United States Patent Application Publication US 2014/0057251 A1 - sequence listing, part 88

SEQ ID NO: 153856 - DNA, 749 bp, Cannabis sativa
gatttgaatcaaaccaacattgttctcattcctaagaaaaaacatgttaccactatgagtgatttaaagcctatctcgttgtgtaatgtggcttacaaagttgtgtctaaagtgctcgtgaatcggctcaagactgtcttgccttgtgttatttctgaaaatcaatctgctttcatagcggggcgtcttatctttgacaacattatgattgcttttgaggttatgcattaccttaaacgtaagcgtaaaggaaaaacgggatttatggcactaaagttggatttaagcaaagcttatgatcgcatcgaatggggttttttgaaagctatgatgcttcgtatgggtttccaccctcggtgggttgatcttatgatggcaacagtgatgaatgtggatatacggttgtccatggtggtcggagtatgggccctattactccgagtcgcggtattagacaaggtgaccctttgtcaccttacctattccttctttgtgctgaaggtttttcttctttgatcaagcaattcgaaagaaatggcgaattgaagggctgtaaagtagcaaatggagctccaactatctcacatatgctattcgctgacgatagctacatttactgtcgtgctactgaggaagaggctcaaaatgtccttcatttgcttaacctgtttgaagctgcttcgggtcaaagggtaaactatgcgaaatcttctatcttttttagtgctaatactccgatggatttgcga

SEQ ID NO: 153857 - DNA, 588 bp, Cannabis sativa
cagggaatgtgatggttttggacatattcaatctgaatgtgcaaatacactgaaaaagaataagaaaagtttcaatgtcacatggagtgacgatgaaactgatagtgatgtagatatttctaaaaatattgcactaacctcagtttcttctaagtttgtttgtgatttacgggtgaaaaaaagattggtatgtttgaataataccattgaaaaagaaaattctcattctgatgaatttgaaatctatgaggaatcactggctgagtcttacaaggttatgtatgaaaagtggatacatgttacttctgaaaatagatcattatcaaaaataaataaacaattttctcataaaattgaatctcttgaattgaaaattaaagaatatgagactgatttttgtttaaaaaagatgaggaaattattctattaaagaagaaacttgaaaattttaacaaagatattcaaatgcttaaccttagatcttctatttttgaagaagttcaaaatgcatgtcaaagagactttgttggtattggatcaaatggtactgaaagttctggaaaaataaaatttgtaaaatctagtgtt

SEQ ID NO: 153858 - DNA, 775 bp, Cannabis sativa
tttcaaattgacaccacgaaagttcaactcgtggaaggcgttctcctcagaattccatgcgcaattctcttcttctcgccaactcccattacatttagaggacctggtcgaagtgaagaaaaggccaggagtacctctctgagcttacatcagcagattcatgacggaggcaacgaaagtggcacggttaattgaaaaagggagaaattaagcgcaatactggggggtatatcaaagttctcggagagctttggaaggacatcaagaaagatggaccagtagattccatgagtgacttcctcgatcgtgtagatggtttcatcaagcttgtagaggacattcaccaagcagaagtcgagcttaagcctggtcagccacaagctccatctgctggaacatttgttcagctccctaagtacccaagcaaatcaaactcgggcggtaaaaggtctaaaaataacaataggcaaggcaactggaaaaagggaacgttcgctagcaaaaatgaacagacccctagagagaatccatccaatgaaaaaggacgtaagtaagagggacatgtccaagttttgccgttttcatggagattatggccatgacaccaacgaatgcaacaatttgaagcgggaaattgaattcttaataagaaagaacaacctgcacatgcaaaaggactatgtatgtcaagatcgataaaaattagagggccgcccaagcagacaataatcaagatttactgccaccaccggtagatgggcatttacaagtcatt

SEQ ID NO: 153859 - DNA, 622 bp, Cannabis sativa
cgagacatgcaggtttctgaatcccgaaggaaaaggggtattcataatatctgggtgatacgactcaagctcctcgtcagagtcgtatccagatgatttccctaatgcccccacttgatatcttgaacttgtactctagctcgtttatccgcaattggattggatcctcttgctacggaccaagctattggcgaaggtcaggtttcttccgattcaagtgctctcgtagatttggttgggactaatcgctggtagatctcgtcttactcatagaccgcgtcctactcatagactgtcttaagtgtctcacggatttacttgttcctatactttcccaatcattagctcattgactactctctgctcttcgagttgattggctatgggttctggatcgccttgaagtcacacttgcttcttcacgctctgttctttcctcccgagagtggtttgttgtatttcccccatcagggtacgtacgagtccttgctctatgggtttgggaaaacgttggtgattcctagtaggtgatctccgttctcccggctgagttccaagatcttcctcattttgatgagggatttgtcgttcatcagtttccggttgtctcctttctggctgt

SEQ ID NO: 153860 - DNA, 546 bp, Cannabis sativa
acctatcaaaaagaaatgcctaaattgtgagtattaaaataggtaagggtaaattcttaaataatttaataataatagttgttggtgcaaatatttctataaagtatgtcttttagtgtccaaataagatgttgtgagtaattagtaatttttttataactaatgattattaaattaaaatatttaaaatttaatatttaattacaacaataataatataatattttttaatgaatgaactgttactaatattatttaaaacaatttatagggtaaatagcagtacgtatccaaaatttgaattttgtaagcaagacgtcgaaggcataaagtaattgtgatggagccaaaagtgtataaaaatattttaagggggccattcaataaaattttaatgaaaaataaaaaaaaaaattacaaaattataacaaaaaaattgaaaaaaaaaaaaaattgggaggagagacttataagagcctgtttggctgtattttcagcttttagtttttagaattgtgtttccaaaagtaagaatagaaaatagtt

SEQ ID NO: 153861 - DNA, 719 bp, Cannabis sativa
tatgatcgggtggagtggggctttttacaggctatgttgaggagattgggatttgatgagcatgtggtgaagttgttaatgtagtgtgttagttctgactcctacacaatcacatcggggggtcatgaaattgggcctataattcctacaagaggtcttcgacagggtgatcccctttcaccctatcttttccttctatctgcagaaggatgctcagctttgataagagactatgaacggttggggaagatttaggggtgcaaggttgctcgaggggctcctgtgttatctcacatgttctttgctgatgactgttatgtgttctgtaaagcctctgaggatagtgctattaacatgatagaaattttaaatatctttcaaaaggcctcaggacaacaagtcaatctacagaagtcctctatatttttcagggccaatattgtcaatgaggtgaggcaacatttttgttctatgttgggagtgaatgaggcaggtggtgatagcacatatttgggtttgccaaatatggtgggtcgtaataaaacgaccttacttgggttcttgaaggataaaatgcgtaaaaggattcaaggttgggaaggaagattgctttcttgagcaaggaaggagttgctaataaaaattgtggctcaatgtcttcctagttatgcaatgagtgtgttcttgctacctgtggaaacttgcaatgagatggagca

SEQ ID NO: 153862 - DNA, 596 bp, Cannabis sativa
gagtgagagagagtgaggtagttttgtgactccatttttgacgtttcttttttccagtgtgcttagaatttaatttttaatttttctatgatttttaataattttttgatttcatttaataattattattgatttaatgataatcatactattaaaaaaatattaaaaattgttttgatgattttttaaaatttgtgaattatagaaaaaaattgggtttcttctcgttctttctcaaatagtgactatcttgactatgtaatctctccaatactttttctttcacatctttccattatttgttgttctacaatttgtaaaacttgattgtttgatgcaaaaataatgtgttatggtggacactttattttttattatcaatatattacaagcaattaatatatttctttttggaaatttggttgaaaattattaaatttctaatgattgttttatcaccaaatttcatatgttgtagaaaatatttattttgtggttatatgtgtaatcacttatccaaaggtagtagttatatatattagttcacatttcatgaaatgagttaatacttaatgtgtatattttaattatttacc

SEQ ID NO: 153863 - DNA, 647 bp, Cannabis sativa
tctttgattatctcgcttgcttctatggggagaacacaccgtaggagaggcattgaataaccccttcaatacaatttgccttctactatcgcatagcgaggcactgaatacaaaagtttcgtgcctcgtttttgtctgctggaagttttccatttagaagatagctaactatgggtgtcatccatgtaggcaagctgtcaatcatctcaacttcttccttttcacatatacttgatttgtctaacacttccaccggtaccaaaatcaattcatcaagttcattctgctaggccagttttggcaaggcgctcacattagagttctcttggaatttgttcgattttaaataatcaaacttctccaagttcttccgaagcttctccaagtattttgccatttttaaaccctttgtcaggtattcgcctagaacttgatttacaattaactacgagtcactgtaacacaccagattcttgacttttaactcttcaactattttctaatcagctatcaaggcttcatactcaacctcattgtttgaaagttaaattggaatcttagggcatagtgaaaattaaagttttctggcaagataagtatcactcctgcacccgagccgttttcattagatgctccatccacgtaca

SEQ ID NO: 153864 - DNA, 994 bp, Cannabis sativa
aggtcatccgcgtggcttgcgcatgccttcgacttgaccagcatttcgtccacgtatacctccatatttcgtcccagaaggcctttaaacattcggttcaccattctctgttaagttgcaccagcattttttttagtccaaaaggcatgaacaggtagtagtataccctcttatcggtcctgaagctagtgcactctagattcgcgatgtgcatcttgatctggttgtaactggcgtatgcgtccatgaaggataatagcttgaacccagaggtggcatccaccatcttgtcgattcttggcaagggaaaatagtcttttgggtaggctttgtttagatcggtaaaatctatacaaactcgccatgtcccatttggttttggtaccagtaccggattagcgagctattctgggtaatacacgtctcggatcatgccactggttaacaatttgtccacctctttctttagggcttctgcctttaccgagtcgagggggcgtcttttcagttggaccgatggcatgtcctggttgatgttaaggacgtgagttatgacgtgggggcttatgccggtcatgttctcttgacaccacgcgaaaacatctgtggcagcctttagcgtctttattatcttttcattttcctctggttctagactttttcctagctcgaggaccttggtgggatcgaggtcacacaccaatacttcctcgacatcctccataggttcatttcagatcccacaaagggatccaactcatcttcttccgccatctctggctcaataacttcacagacaattagaacgggaaggtgggcagcaacgttgtagcactgactggcctctccctggtttcctcttacggttcctatcccaaccttatgagtagggaatttcagacagaagtgtctaatcgatgtgactgcgctgaaatccaccagggctggccggccgaggattgcgttgtaagccgttgggcagtccaccaccaca

SEQ ID NO: 153865 - DNA, 541 bp, Cannabis sativa
tgtttcccttgctgctaaatttgctgagttcagtgcttcagctatgttagatgtcatggtagagtacctatcatttaaacagtttctatcatcattccatttttataaaacaactcaaatgcaatgcaaaaacaacgcaaatacaacgttttaaatatcagagtatgtaaaaacatgttatactttttatttcttttacctgttgttttctgaatgataccttgaccatttttcatggccaatttgttccagatacggtcttatgcgcttatctaagttgtctagctccctcatatgaaactcaaactctatttctgtgtaagcttttgcggctgcaaagaatggacctctaaaatgctttgcatttttttgaattttgtttttcaggttggacaagaggtggaagatgcagtagccatgtgttatttcagggaacacttccctagtttctttgatgatgctttcatgtctgtctgatattaggcattgatcttctcgaaccccgaatgcttcttttattttttttgaagaaccactccca

SEQ ID NO: 153866 - DNA, 717 bp, Cannabis sativa
gatgatgaagctatgaaggagatagatgacaacaagaggaaagcgaagattgaaactaaggctcacagtgccatacttctcaatcttagagatgaagtcttgagagaagtgtctagtgaagaaaaggctcttggattatggaataaattggctatcatttacatgaaaagatctctggccaataaattgtatctcaagaagaagtttgtatactcttagaatggatgaatccaaggagcttcgaagacatcttgatgattacaacaagattattcttgatctgaataatcttggagtatagattgaagaaaaggaccaagcaattatcctacttagttcattgccaaaactgtataaaaactttgttgacaccatcttatatggaaaggacaccttgacaatgacagaagtcaaggctgcattgtgttcataagagattcaaaggaatgatgatcgagcagataacagtggtgatggtttgttcattgcaaaaggaagatttcaaaagaaagactacatggggcacaagaattcttatagcaataacaaagacaagagtgacaggttcaaaccaaaggctgcaacaggtaaataatgttattattgtaaaaaagaaggtcacttttgtgatgattgtttggcacttaaggcaaaactgaaaatttagaaaatcgtggaaagaatggagaagctgacatagcagatggctatgaatca

SEQ ID NO: 153867 - DNA, 774 bp, Cannabis sativa
  modified_base (324)..(350): a, c, t, g, unknown or other
tttccaataaggaaagtctaccccatcaaagaatggtgctctacttgtgcttaaaccttctagcatgttattgtgtgaattgcttggaaacgacataccttgagattgtgaaatctacccaaaaacaagagcccttgctctgataccaattgttagaccaagatatgtttccaagagggggtgaattggaaatttaaactaattttggtaaattaaaacttttaacacaaaattaagcaattaaacacttaatcaaataaataaaagtaatatggaaagcaatatattataacaaataattaaacttgtaaagtaaagagtttnnnnnnnnnnnnnnnnnnnnnnnnnnntttacaaggttcgatagaactatggcacctacgtccttggtctttaaagctatggacctagattcgagttccactatcgagccaagttaacgggcttgactaacccttacaactggggaatttttcaccaagatttttcccaaacatctcacaataatattcttccaaggactatcaacctcaccggattgttgaagtgccaatctcactatcggattgttatagtgacaatctcactcttctcgggctgtttacaaaactagtcaacctcatttacaaccaagttgtttttataccggtgtcaacctaacctctcaatacaatggttatttgtttttgaaatacaaagcaaactctctctaataagataaaatacaatatgaaatcctagagagatttgcaagcacactagaaaataagaaca

SEQ ID NO: 153868 - DNA, 528 bp, Cannabis sativa
  modified_base (320)..(323): a, c, t, g, unknown or other
ggggggcatatagatgacctgggcgaatgcttcaaagtcctcaggaagtacaacatgaaactcaatcccctaaagtgctcctttggagtcagctcaggtaagtttccgggctttatcattaatgcccgagaattgaagccaatccagagaaaattcaagccctcctggatatgaaatcgccaacaaaaaccaaggaagttcaaagttagactggttagattgccacactcagcagatttatttcaaagtcagcgaacaagtgtgttctattcttcagcatcctacgaggaaataagcaatttgaatggacggaggaatgnnnnaaagcctttcaagagctaaaaatgcaactcgcaaaacctcctgtgctctcaaaacctctagacggagaagaattaggaatatacttggctgtcacaagtaagtgccttactgatcagagaagagaacaatatccaacacccggtctattacatcagcaaaagactcattgaagctgaaggtcggtacccattgatagaaaagctc

SEQ ID NO: 153869 - DNA, 530 bp, Cannabis sativa
agtattataactacctaagagggtaatatatttataaaaatccagcgaattaattttatatttaaggaaaatgataaataaatgaataatagcaaacattcaaagcttccacctaatattcgtctccattcaagtcatcgacttccacatctctcttccaacccatttttgatattatctggtgtggtctctgactccgatcataaaccctagaactaacatttctcaattttctcaaaacttgctatttctctctcactcaattgatcaactttgctgggtttacatggcagaaatgaagctctttttactcctcctagtccttattgcacccctcgctcaagccaccgacatcaactactgcagtatctctctctctctctctctgcttcacttttttttttcgtgtgtcatcgttattatcgccaatttttatttttctctgatttttttttttttggaaagaaaacaagtttttttttttctctgattttaatttgggtttctggctataggcttgatttcatata

SEQ ID NO: 153870 - DNA, 524 bp, Cannabis sativa
atggttcctttttgagatttgtattatcgtgttttaatggaaaattcaacaaatcaatccaaagaaccaccaatcaatttgaggtcctagtcgtcgtcagagaatttatgtgggtttgcaagaagtagctttatgtgggtttggtcatataatgtgaagaaaagattcaaaaggaattctaaactcatcaaaggtttaactacgggtgtatccactactttttttgcatgatttggaataagatgagtcggttatcactacgtacaggtattttgcatgttctggaataaaccttgatttattattataaaagttgtcttgttgttttgacatgtctggtatgtaatttttgttgttgagttatgagtttgttgagttggaattgcagtgggcttgggaacacccgggtttttcaatttcttaaagaaatagtttttcaaaatagacccaatttaatttttttgtgtgagacaatttggaagaaagaaacagttgattgtgttagagctttattgggctatgat

SEQ ID NO: 153871 - DNA, 538 bp, Cannabis sativa
  modified_base (341)..(342): a, c, t, g, unknown or other
  modified_base (443)..(444): a, c, t, g, unknown or other
gtcagccaaacgcgtagttttctttgtacgagccatcattctatggttgggtacagggtttgatgaatctccttcgctagaggaaggtggaatagaacaaagacgaggatgatcctcatgcagaagatgaagcaggtcctggtcgatccgatgtccattttccaaagactcacctgagttcatctacaaaagacaacgcacaagatgagtgtttggtcagaatatcgaccgataaataagaaaatatgccaaccaggagtacccaacagattaaagacaacgcagaagatgagtgtttggtcagaatatcgaccgataaataagcaaatatgccgaccagnngtacccaacagattaaagaacgattatgtttgaagaaagtcaaaactcaagaagtcaaaaattttctcgagttagggcaaaaaaaaagttcatgaagcttnnaataagcaagatgaaagatagacgttacgttgttaagaaacaagtgttatgactataaaatcgcacgaatacatgataaagaaaaaccgcagag

SEQ ID NO: 153872 - DNA, 642 bp, Cannabis sativa
tttttaccgattttgaaaaataccacattttttctaacataagggcccaattttttttttctccctatggcccactttgtttcagggctggccctgcctgtccccattcccgttaaaatcttaatcctcatccctccttattctccatcgagaatgggtgggggcgagaaatttcctaatataaaaataaaaattattttaaaaatttaaattaataaaattattaaattacataaaaattaaaatattacaccttatttatattcaatatactaattttatacaaaaacataacttaaaaaattataaaaatggtactaatatactaaaaaaaaaatatacacattttataaaatataaaatattaataaatttaacagtggcggagagtgtcatcctcgttcccaccccgtttaacattcgggaacaaaaaataatctttattcccaccctattaggagcaggtccccgctaggccccatccccatagagaaaatatgcatccctaagtgtagtgaaactactattatagaaggtgtactatataattacctaataatttttattatttatgaacggttaactattcacatacaatgacactttattgtaagacataataatcttctttttttttttttt

SEQ ID NO: 153873 - DNA, 578 bp, Cannabis sativa
attcgttgttgagcctcaatcaaataggtgcctttgagtgttaatcttaggagtgatagttagttttggaacaacgatccaactggttttttcacggtcaaaagctcctataatcacttacagacgatcaatggtagttggaactcatccatggagatgatgtttggaaaatgttgtggaagattaaagctcctcctaaggtcttacattttgcttggaaagctctttcgggttgtttgcctacacgtactcaacttcatagtaaacatgttcctgtggctttacactgtgtgctgtacaactatggggaagagtaaattttccatgtgtttggttcaatgctcctttgctcattcacgttggctccgatcgaagttaggtgttggtgattctgcagcaaccaatttttttgactggtttatggaggtgttggcagtaggcaataaggagttggttgaagaagctgtcatggtttgctgggcaatttggaaggcttgaaatgatatgctttggaatggtaaaagttgtagtgttgctgatgttgtttggctggctcgtactactcttcgacaatggac

SEQ ID NO: 153874 - DNA, 505 bp, Cannabis sativa
atgatgccaactcctttgaatcccaacttctctgttacaacttcaccatccatccgtcctaactttgacatttccttgaggccatctgcttttactttctactccactgattccatgattgtggctgataagcctgttgatcaattgtgtgcttcctctgctggtcctgctggtcctgctgtttctgtttcttttcctggtggtgttgctggtggtgattctactctgggtgctagcccttctcaggaccttcctgatcctgctgttcgtgggaaggggttagcctctgcctctggagttaagaggccttctttccaaccacatcatgtggtggttggaagttctgtcaggtcccaactgaagcgtgctcgtgctggtgatagagaagaggactcttctcgtgctgctgacaatatggaacaggcgggggttgctatgcacacccgcccagaaaaatgagtgtgctaagttggaatgcacgtggtttggggagtacacgtgcatt

SEQ ID NO: 153875 - DNA, 783 bp, Cannabis sativa
ttccattcttcaacatcctgcgaaaaaataagcaatttgagtggacagaggaatgtgaaaaagcttttcaagagctaaaaatgcaactcgcaaaacctcccgtactctcaaaacctcttgatgaagaagaactcggaatatacttggttgtcacggaacatgctgtgagtgccgtgctgattgaagaggaatacaacatacaacacccggtctactacattagtaaaagactcgttgaagccgaaagccggtaccccttgatagtgaaactcgcttactgcctgattctagcaacaagaaagttaagaccttaatttcaagctcatcctgttcgtgtgtaaactaaccaaccaatacgtcaaatattgcaaaaaccggacgcttttgggcggttgctcaagtgggcagtggagctaggtcagtatgagattactttccaaccacgaacaacaatcaaaggttgggccctagcaaattataaatttaaaatacaaattaattttataaaaaaactatacaaacttttattatttcatatttaaagttatctgatgtctttaaataaacttattttatgaaaaaatgtattttcaagaaaaaaaattataaggaaactaatggtatcttaaacattttgaaaacaatattacaaaaacttaattttagccttttaggtacactatattatcttttatttaagatacttttacgttatcttttttattaggaatagttttttacttaaaaaaattattaataaatataagcacttaccatataatt

SEQ ID NO: 153876 - DNA, 1191 bp, Cannabis sativa
gggtaaatttggagtatataacttcaaaattatgattgaagtgtgagatatgacttgatagagaattgaaatattttacatcacttagtctatttttgggttctaacaaagctggtcactagttcttaaagatgttactgttctacggaaatgtgagactcaaaactacccagttttcaagtaaatcaccttgtgagaaatgtgaaaatatgaagttgtgaatttgactattcttacttcatggatctcaattattgttgaaaacttgacaaatggtcgagacagtgtcaaatcaaataagcataatccaggacaccaggacatttgtcagcctgggccctaggtgttcatttcgaagcttttgagatatcctcttggaacttccaaggttcttgagcttgaggatgaggtctcctacctcgtttttgagcaagacatttgtcagagaagcataatccagcaaacaaggacatttgttagcctgggccctaggtgttcatttcgaagctttcgagatatcctcttggaacttccaagattcttgagcttgaggatgaggtctcttacctcgtttttgaccatttcggagacaatgcacaaagcaaaattgacatttgaatgatcgaaactagtgcactaggttgattatcaacttgggcgctaggcctaacactaggtcaacctaggcactgtgcttagtttcctagcccctaggattgtggttttctccccgaatttgcttatatctttgttatttctgatgacgattaaaaaaaatactcggatcactttttttgggaaactagttggaaatagcccaggttgacaatatgtcaacctgggggttgggcccagtgccatgtgtaaacctgggtgctgggtccagttttaggccacctggaagttttgtttggtcctcaaaatagttaactcttaatctttgctgaaaacagtgaatatgctcggaagacttctcaaaaactcctcgaaattggcctagttgtcaacctgggcactgggccttgttctggcaccgaggatgggttatttatttcccaaaagcacttgttttctcattttttatgaagatggagaagatgcacgagtcaagcttttgatttgatgcttggaagtgttgggttttgtgccctaaataaaacccaattcaatataatcaaatttactagttaa

SEQ ID NO: 153877 - DNA, 500 bp, Cannabis sativa
actcccattgcatttagaagacctagtcgaagtaaaaaaaaataccaagagagcctctcagagcctatataagcagattcatgacaaaagctacgaaagtagcaaggttaactgaagaagggaggctggccgccatactgtggggcattggagtactgggagaactgtggaaagacattaagaaaagtgtccttgtaggctctatggtagagtttttagactgagcagatgggtttatcaggcatgaagaggccattcaacggacagacatcgagccttggccgggataacatttgctcagaactcaatggcagataaggcaatggaacgaagggaaagtttgtaggcaaagccgaacaaacccctagagaaaatgcttccaaattcactaccttttctgtcctaactggcaacctagagacaatctacatggccacccagtctgtggtcccgtacaaaaaacctgctcccatgaaaaaggacataagcaagcgggacat

SEQ ID NO: 153878 - DNA, 580 bp, Cannabis sativa
  modified_base (369)..(374): a, c, t, g, unknown or other
  modified_base (518)..(538): a, c, t, g, unknown or other
tatatatatattcatctgactgaaacaatttcaagaatctttttttctttttcttttttatctatatatctatattattaatacatgtgtatatattttattctcatataattatttttaaatttatatatatatattatatgttcttattatttatctatgatatatggtagagaatagatataaattatgcatatatcttgaagattatgcgtcctcaataaaatcttgtatatatcctaagattatgcaaacgtaatattcatcatataattgattgaaatataataaaagagatgaatatatatattcatatatatgttcttatattgtttgaggacaatggaaagtgttatcccaatttttgcnnnnnnacgtggcatcacatgatggtgacacgtagaactgacttcgagtatctggtcggagaatatagtccgaacaggatgcctcatatgcatgcctgaagcaaagcgaacaacaatctgcgcagaacgaccaacacttagcgaattcannnnnnnnnnnnnnnnnnnnnaaagaaatccctataacttggggatcagattgtagagatatg

SEQ ID NO: 153879 - DNA, 840 bp, Cannabis sativa
  modified_base (430)..(434): a, c, t, g, unknown or other
  modified_base (788)..(807): a, c, t, g, unknown or other
atttttggtcatagggtacgatttaaggttcgggtgtgggtctgggtcagagtcctggtctggctcttagttcatgattgggttcagaaccgagtcttggtcccaaatccaaacaccaaccacatgtcgagtctagtttgagttttggttctggttcgggttctagtctgggtctgggtccaggtcgaggtccgattcctagatttagacaccgactatgggtcgggtccaagcctcgtgtcttgggtcctaggtctcgggtccaaatctagatcctggtccaagttaaggtctaggtccttagtgtgggtcctagttcgggtctcaggttcaggtttgggtcttgggtcctgagtcataggtcaaggtccccgattaaggtcaaggtcctaggtcccagtcttggttatcatcctagtccgagtgcagnnnnnagtccttgttcggtacttgtccttgtctcgggtcttggcgttgtctgggtctgggtcacaatacggttcttaggtctctggtccgagtattgggtcccgtatcccaatctcggtcttgggtcccagtcctagtcccagtcttggtcctagccccaatccatgtttaggtctcggtcgttgtcctggtctaggtccaagtcctgatctcggtcctggtccaagtctcgggatccagtccaagttcatgtacgagtccgggtttgggtctgggtcccaatttcagtccgttttagggtccgggtcttagtctggatctgggtctgagtctgggttcttgtatgggtctgggttctnnnnnnnnnnnnnnnnnnnnggtcctggattctgggttcttggtcgcaggtcc

SEQ ID NO: 153880 - DNA, 590 bp, Cannabis sativa
ggaagtttgagttttccggattaagattttggcgtgttgtttacctataattgtaatgtgactagggcatccatctagcacgaagttttccgttcagctcggcgcactcacttgaattcgaaaacgaggtaagaatatcatagaaaatgttatatatgcgattatgtgtatgtgtgatacatatgcatgcttattgtgattcttacactaccaacactagtacggtagcgataatgagtgtattggtacagcgtacgatgtttatagagtacgacacggtgttaccaacactatagtactgcatgtacgtacagagtgtttgtggtataacacttagtggtactcgaggtacaggacaaactgttgtggttatttacacacacgagtgtacgtgtcgtaacaagtaataaactcaccaggagtgaggttgaacccacaaggattgtagtttactttaaaattaaatctttacttctatttggctataaagattaagaggagattaaaactagaaaacaataaaaacagtgaaaggaaaagcaattaaactaataaaggagattaacagtgaataaaagttagggctttcg

SEQ ID NO: 153881 - DNA, 582 bp, Cannabis sativa
  modified_base (304)..(305): a, c, t, g, unknown or other
ttatgaaattatttatagatatttaaataattatttatgatgttttatccgattcctcaatgtatttttatgtcatatagtgagatttcatatttctgcattttcggtgcccgacaacatggaactcggtgtttggctcagtagaatcacaatttagtatgtttgtatagcggggcagtttattagacattgggaatgtcgggattggtcgggaatttagaattttccaaaaatatcctttagtacccttctatgttattttagtgttgaggggcaaaattgtcattttgccccaatgatattnngtcctttagtggacttagtgtaatgtgaatatgtgatttatggtggatatttgtgggcagaaataagattaattatatgtattttcatcttttattcaaagtaagaaatttgagagaaaaatcaagaaaactaaaccatttcctctctccctctccttcggccacacttagaactagctgaggttctagtttcttcctcatcaattatgtattttgcttcaattcctagttcatagcaagcttaggtatctcatgtgtaaccctttctttagttttt

SEQ ID NO: 153882 - DNA, 582 bp, Cannabis sativa
tcatccccgattgcaacaacttcaacccccatatcaaacttgaccacaaatgagacgaaccttggcggtctttagcatccaaaattgatgtattgggaaaatatttgtgtttcaagacacgaccggccaacgaatttggcgattgcagtaatcgccaaacttgtttagcaaccatagcttgataaaagagcataagatccttgaagcctaagcccccctttgattttggctgacacacactctcccacttgacccaagcaattttccttttatcattctttgtaccccaccaaaactgtaaaataacagatcgaagtttatcacaagtccccaccggaagctggaacatactcattagataattgggcaccgcctgcagaatggccttgattagaatctctcgaccaccagcagagaagaaactccgcttccaccctcgaacctgtttttggactttgtcacaaatactcgcaaaagtccgcttcttatttcgcccaataacagttgccaaccccaagtacttatcatgagtagcaactgaccccaagcctaatatacccaatacacttgcacgatccgcag

SEQ ID NO: 153883 - DNA, 848 bp, Cannabis sativa
acctctataaaattcttgtgtttttacattgctttatcatatatttcttgctataaatcacttatcacttataaaaatagactcgttgttgttggttaaaagtgaggtcaacataaggctctattaaattgtactattttataatattttaatactaaatcaattatgaagaatgttatgctctttatcttttcaatggtaccattttataatactttagtcatttatttttctttttaaattaagagaaataattaaccaacataaactagtgtaaaattaattatttaaattataattatagttataatttaatttaatttgaataaatgatttaaataaataaaaaaatgattaatgaagggaaatttgattaattatgtatttattgggccaaaattgttttcctaaacctaagctattcaatattggttgaataggtcattttttcctaaaccccattctactccttccatttgaacaatcctctctcgctctttcccccttctctctcttgatctatgtaaacacacacacggaggagcacacaatcagaccacccacacgactcacggactacctcgacctagcgaccacacgacccacacgacccacacgacccacgaatcactgtgaccacaccacccaactccgacattgtcttcgtcaaaggtaatccttaattttttcatgaatttttaactgtaattgttttatttttttctttttctttagggttaggtctgtgtttttagtggtttttagtaaagaatatgtgattttggaggtttttaggctcagatctgtgtttgggagagagggggggtaatctgtgattttttcctggc

SEQ ID NO: 153884 - DNA, 517 bp, Cannabis sativa
aaaaaaaaaaaaaaaacaagatagctgtgcattttctatttttgggacaggaatgggacaattaatttggtgcagcaaaatttttttctatatttggtccgtgcgcaattgaataagtaatatccattctaaagattataatagcataccaagtaaaagaagtaagaggtctcttttttggataagttttcttaaatattgtttttagcttttagaaagaattttttttttaaagtgcatgtttggataaatttaaaaaatacatatttttttaatttttatgattttgttgtgaagataagtggtgtttggtttggtgtgatagaataatagtggtaatagtaacggtaatatcatatctaatgagagatgtaaaagatgaactatatttgatacaaaaagtaattctgtgacatttttatattaactcttattattatgctctaatacataattataaatcttgatgtaaaatttaatatatcatttaatgtccacttaataatttattaaaaaa

SEQ ID NO: 153885 - DNA, 556 bp, Cannabis sativa
tgatccgatccgacggatcattactgatccgaaacattcggatagttattggatcttggatcagatccgacccgccccgcttaattttttgacggatcggatctgacccgacccgttttaaatatatatttttttttaaaaaaaaagtttactttttaatatatttttttaaggtgtaaggccagtggaataccattagacatatatgatctgcccatagatcacactatatcttattattttaattaattactctcttaatttaattcttatatatatatgcgtacatatatatatataaaataaaaatatatatgcatactggccactctatattttaattatttgattataataattattattatttgcaaaattccctataataagaaaataatgtaataaatgttatacacaatagatcgatttatgtataggcactgttaaatatatttatctgtacaataatttacacttttatattatatcacttttatatatgtatgcaacaataatttacatttaatatgaacatattattaattaataagaataa

SEQ ID NO: 153886 - DNA, 786 bp, Cannabis sativa
tgggaaagaatggcaaagcccaagttggaaggtggtatgggtttccgaatccttcatgactttaatattgcaatgcttgctaaacaaggttggagacttctgtgtaattctgattctctggtgggtcaagtattcagagctaaatattttcctaccagtgattacctatctgctgaattgggaaataatcccagctttgtatggcggagtatttgggctgctcaaagtgtggttcgtctcggggctgtgcgtattattggaaatggtgaaactaccaggatcctctctaccccttggctgcctgacactgggaacagacttgtaacttcaactcatccagctctcttacataacattgtgagttctctcttctcattggaggctagtacttgggattctgaggttgttgaggacctgtttagcaaccgagatgccaatctaattctgggtcttccgctatctccaaattctggtattgatttctggtcttggttgggagaccgttctgggttgttctctgttaaaaccgcctatgttatgctgcagaagaataaaccccaactctctggcgctgataactctgggttttggcgcaaactgtggcatttgaagatccctcccaaggtaaagaatttgctatggcgtgcaattactgattgccttcccacttgtctccaactagtaacaaaacatgtgaatatttctgggctctgtcctgtgtgtacaaaccaagcagagtcaattgttcatgctcttctcacatgcccttttgctatgtcatgttgg

SEQ ID NO: 153887 - DNA, 646 bp, Cannabis sativa
gggaagacataaccatggactttgtagtagggtttacctaggactattgggttacatgattccatatgggtgatagtagacaaattcaccaagtcaatacttttaccagtatggctaattgtacattaaagaaatagtgagacttcatggtgctccgaagttttaggagagtttacagaaagccatgggaaccaagttgagatttagtacagcctttcaccctcagacagatggtcagtctgagagaactattcaaatattggaagacatgctgcgaggatgtgtgatagattttgagggatcttggagcaagttcctacccttgattgattaacaaaatgattgtctggctttcttcattaaccttgtgatttatattacccaatcctacaataatatcattaagcctgccaatattatcatctatagaaaaaaaaaatattctaaaaccatataacctttctagcaaattaatcttgctagcaattaatggcttcatatagagttcttcaagcttgctctgaattcctttagctttcttttctgcaacaagctttctcttcacactgttggacaggtacatgatgatcgtgtaataagccatctccttcatctctactttctcttctggtttcttttcagccaa

SEQ ID NO: 153888 - DNA, 596 bp, Cannabis sativa
agattagcttgcaacttactaatggtgatcaagcaaatgtaagctattacagaataagcactcttgaatgaacaaaatcaattcactaaacatagcaacagaatgccgaatcacaattcaagtcaaaaaaataattctagcaaaataaaaattaattcataatagattgtgcaaaaattacaaagtttaaaagaaaatagagatagaaataactcattttagagttgtcacaagactctaagtttttcttctaaattcctcttcttcttcctcttgatttttgccaatctcaaaataaaaaatgctaaattaaaaccctaaataaaactcactctcgctctctttttctttttctttttcttctttatttttctcttttcttgttgtaggcgtcagtagcttcaaaaaatctagccgccttcttctttgcttcccgtcaattcacacctctttccttcacatatatcatgagatgcatgtcaatctcttctcatttgtaaaatttcaaatgccaagtccataatgtgatggtccaattccctttctttcttttttttttctttgtaaatgttgttaataggaatggcccaataaat

SEQ ID NO: 153889 - DNA, 740 bp, Cannabis sativa
aagaagatatccctaagactgctttcaggacacgttatggacactttgagtttttggtaatggcatttaggttaacgaatgcacctgctacatttttggatcttatgaatagagtcttaagacctttcttagataagtttgtggtggtattcattgatgatattttagtgcattcttagacacgttagaatcatgctgaacacttgacaatagtattacagacattgagagagcatcaattatatgctaagaaagagaagtgtgacttctggatgacagaagtcaaattcttatgccatgtaatttctcaagatggcatcattattgatcttgtgaagatagactctattctattgtgggaaagaccaaagaatgtcactaaagttcaaagttttcttgggttagcaggctactatcgtcgctttgtagagaatttctctcggattgctatgcctttgacaaagttaacaagaaaagaagtaaaaattatgtgggatgatagttgtgaagaagctttcagaaaattgaaggaaagattaacttcggcgcctgttctcactgttcccaattgtgaggaaccatatgtggtattcactgatgcttcaggtactggattaggaggtgtcctcatgcaaaatggcaagatggttgcatatgcttctcgacaattgaaaccacatgagaagaattaccctacgcatgacctagaacttaccgcggtaatctttgtcttaaaaatt

SEQ ID NO: 153890 - DNA, 597 bp, Cannabis sativa
tgtgtgcttttataaacttattattattactaatctataaattttttagaaaaagtgtggattaattaaaacctttaattaaattcaaaataaaaacttagttttaaatactgtcgtaatttggggatcccatgttaataaaattcctttacaactaatttacaaaacgactataacaaaatcaaagttacattttcaaatatatataaaaaaaaagggccgatcttgcttcccagaagccaagacaccatgactgatgtgtacactactgggagacctctgactcatggtcgaacatatctactattctttttatctgcaccatgaagtaccccctgagtcacagagactcagcaagaaaagccacttgacaaaaagcatagaaagtactaacattaatatcataatatacataccagtagatcattacacatttagcatgcttaggtgtattcaacttaacatccaagaaaacacattcatttctcattataataataaccatagtaactcataattaacaatttcatcttttcgctaaatagacattcatccaatccataaccatataatctcagtgctttgtaaagcactcta

SEQ ID NO: 153891 - DNA, 849 bp, Cannabis sativa
tagtgggcgagcatctccttgcctttcttggcctctggaagcactggcaaaggtggagtaggggcccgcatctgctcgggtccactattgaccagctcaaatccacctttcacttgttcaggcctgttcgaacttcctcctcgagactccttggggttagcaacttttggagtagaggggttgcaactgttagctcctcataaagatcaatgacctctccggcaggcatttttttcttagaagaggtcccctcaccgcctctagacttcttggcctgaggagatacacttaagcttccgccaattctcttcttcagagcatcaagaatcttctgagacatgtctgcacggaacaaaagcaacatggttagagaaaatagacatcaaaaacataaagcataatagtgaagaatcttaaaaacaagacgaagtattatgcaagatgattgccggagcaaggctcgaaagtccatcatcacctgacatcgctcttatttcagacataatagctttcccttttttgagcacgtgagaaggcggccgagcaagcaaactgggctccctaatgcgaattgcatgttcaataggcctgggctaggccagaagtttcttcctccttttgagcagagtcacctgctcttcctcaacctcatcttcaagattcaagggttcctgagcatattgcttggccttgcacctcctttcaacttagcctcacgcttcagtcaaattagctcactctctgaatgagcacattcaacccgtccagcaccagatttcctcttcctccccttcactggcttaggaatgaaatccttttgatagagcccgtacttcacaaagttatcct

SEQ ID NO: 153892 - DNA, 672 bp, Cannabis sativa
  modified_base (44)..(50): a, c, t, g, unknown or other
aattcatattaggatgttaaggaaacatacatggtagtaaatcnnnnnnntggtaaaatatttccaacacgttctacttccacgagcagtatagcttcataaccatattccatggcaaaattgatagggtggcctgtgccactttccaatgtcaagaagacactgtggtatggtgggacatggtgtccatgattcatgacgttaccacaatgacctgggagaaattccaggagctgttgaatgccatgtattataacgagacagtcagaagtgccaaaagaaaagaatttactcagctgactcagaaagataattgagtgttactgaatacacgattcagtttgatcgcttggcaaggttgtcctcgggaattgtgccaaccgatttcagtaagaaagagaagtagctggacgggttaaatgcaaaaatcagacacgacctaatgattactaccgatgacaacaccacctatgctgatatggtggataaggcattgcgaggtaagggtgcagtgaagtgcactttagaatctcgggagactctagttgttggcggggctatcacccttcctacatcaggatttagtaggggaggtagtggctcgaccactgatcagaaaagaaaggcacctactgcatccagtggctcaggtcagaacaagaggttccgagg

SEQ ID NO: 153893 - DNA, 546 bp, Cannabis sativa
atcaaaactatcatgggtaaagttaaggttacaactaacgctttgttatgcaatgaacagcttaactttacaaaccccccggtggcatcattcatgaccttaaacccggctagtgcagtttgtgttgcccccccggagaactcacctccatttcccacctacggctctcttgagcaaggcccctccaacggtcaatcccaacaagtgggtctatacaaatccggccccacaccctacactcaagaccctcctcccatggtccaacctgatgtctacgcaaacacaaacactgttatccaaaccagcagcacccaacccgagaccattaacccctcatacaccgctctcctcaatgccacaatgagtaactccagtgtccaaaaagcctctcctatctccaatccgagtcacacgatcacaccccaaaactctagcagctccaactccactagttccaaattctgtcatgttcctcttccagacaacctccccctcctggatacgagcaaaaaactagaagccatgaacctcacctaccaaccggga

SEQ ID NO: 153894 - DNA, 501 bp, Cannabis sativa
tgagttgactactttattcattgaatgatatctttgaatctcgactcaaaacaaagcactgtatcagtttgttggaaaccttagaaattatttagatatgtttgttttgtattttcacatgtctttcttatttgctaaatgtatgataatttctgaatgtgtatgaatttatgttgaatcatgatgttttctgttattaattgtagtataatttcaaatcttcattgttggtccaacttagcttgttgttttgaatgggataaatcccaaaggattgtaatccgttagacaaacataatagtgctacatctcaacatattagtatttaaaatgcaacatctagttatccaaagatgacaacttagactactgttttactgtttacaatatgaaacaatgaagagatttatgaaataagagtaactttggctctctcctaaacgggacatctttggattcttactttattcgaaattatcctttagtttttcctcttagctt

SEQ ID NO: 153895 - DNA, 743 bp, Cannabis sativa
  modified_base (197)..(197): a, c, t, g, unknown or other
  modified_base (580)..(581): a, c, t, g, unknown or other
cttgtcacacctgaggggcaacacgtgaatgctacagtcaagtttggatttaaagcatccaataatgaggcagaatagaagctttgatcgtcggtctaaagctagcccgggagatgaaagccgagcatattgaaatctgtagtgattcacagctggtggtaaatcatgtatctggagaatacgaggctcggggaganaagatgatagcatatttgagcaaaatacacgacctgctcacacaattcaaaagctacggtctcagaaaaattccaagggaagaaaacacgactacgaatgcgttagctcggctggtgagtagtaatgtaagtgataaagcgaacttggttcctatctagttccttgaagaatctagcatcactggcacagaggagatcgaaatgattgatacttctccaaactggatgacgccaatagcaacctacctcaacactagggaactcctagataatcgaaatgaagctcgaaagatgagaaggaaggctgcacggtacatcatagtagagggagttatgtacagacgagggttctccatgacattgctcagatgtgttactcaagnngaagctgcacgacttttgtctgaagtatatggtggattttgtggaaaccacgccgccaggcagagtttatctaagaaaattctaaggcaaggttatttttggccaacaatgatcgagaattcaaaggcctagtttaaaaaatgtgacaaatgccagagattt

SEQ ID NO: 153896 - DNA, 642 bp, Cannabis sativa
gaagaataagtggttgaaataaagtggcaaaattgtattttttggccggccttaatgtgttttttgtccaatatccaatattgttattgtattcttttttaatccatataatttaaccctaagccctagttaaaacactataaaaagaacatgatgctttcatctcatctaactattcacttcaaccaaataaaagctagttttctctctcagacaactagtagataagataccccttttatagtgattttcaatcctccttcattgttcttcatacttgagcctatagtgatagactgcgattgtaacgccctaaataattagacactctacccaataaatttatgaaaccctaatcccctaatcgggattactagaacaaaataagcgcatgaattaaatttcattaataaacggaatgaaaataacttgtaataatttaaaccttataatttaaaagttacaaaagttgggatcccaaaaataattacaaaacactattacaagttggtttcctctagccgacatcagcggcaaaacagagtctcaaaatacatcactggtagacctcaacccgcttggtctagtgtggcccgaacatgtacattcctcgtccatctcccacactcatggctgatcaaa

SEQ ID NO: 153897 - DNA, 853 bp, Cannabis sativa
tttcctattataaagaatagataggaaactttttttttttttttttttttttttttgagaaaatatttgttattataaatcaaagatcgtcatttataacaatagagaaaatagtagaatgaatcttttctaactatatacaatcattattcaactgtaaagcttgcttagccaaaccacgtgcaacttagttagcatctcgtcttatatgagataaacaagcattagagatcggagatgataaatgatatgagagacatcatgaaccagatcatagaaacccgaatttggtgatgtgcaccctttcaatgcattaacaagcatcaaacaatcagatttccacataatcaataggaatattcaattgcttcgcacatgaaagaccacaaaaagaagctctttacttttttactaaatttttttaatagtattttaatcaaagttattttcttactttttactgaaaaatatatttttataattttaaaattttatgcttatttttataaataaaaactttaagtcataaaataataaataaaatataagaaaatatatacagtagaacctttatctaagaatacacttgggggttaagaaaattatattctaattgagaggttatatgagttatattagaaaaaaaaaattaaattccaaaaaatatcaatataataataataacaataaatactatatcataataaaattattttagaataaatataatatttatacatgtattataatttgaaataaaattattaattttacgtaaataactttataaattatatgtacatattttattaaaatgtaattattattattatatagaggtatactttgttaa

SEQ ID NO: 153898 - DNA, 511 bp, Cannabis sativa
gagggagtggctgagatccttgacctggaagatggagttcaaggatgcgcaagcagcgaaccgcctgagtgcacaccgggtaagctgagacgcaaacttgccggtcatctctgcggcaaaggcagctactgtgggcccgaggaaacgaccgaaccaatccgacaagggatccaagtttagatcccacagattctggtagttcgggttgttaagagtattttgcatttcaactcgcaaaactctcttcagagcctccacgtcagcatacccccaggagtactcatccatggcatagttatgcttagctatccggagttcctacctctcctcatctccaggagctggagtcagcacgatgttaggaggggctgtgtgttcctccatctcgggagagatcccatcatcaagaccaggggctggagtatcagctctctgttgccgtttgggctcttcctgggcaaccatcttacccttacgcttgcgaattagagtaacttcttgctcttcttca

SEQ ID NO: 153899 - DNA, 657 bp, Cannabis sativa
tgggcgaattttggagcaacagattgtattgataaaattttattaaaaaaatttgaatttagggtaccaaatatatatgatttgaaaatacaaggtaccaaataagtattgttgaaaacacagggtatcaaatgtgtagacacccatgtttttacgatgttatttttatgttgttttcgcaacaacattatattatgttgtctataagttgttttcatgttgctttatagttgtatttatatgttattttcatattactcttagggagattatattaacaccccacaaaattataactacacctcattactaaatttatctctatttttaattaaaataatattttttttatgatcacaccccaccttatttactaaaacggtatttaattggggaacttacaaaaatactgtaaaatgaaagaaagtttacaaaaatactgacacatagagatttttatatttttattgtactaagtttacaaaaatattgtgttaaagttttaaaattacaaaaatattgtatttcactaaaataaaaaaaaaaaaacaactcaaaaacaacaagacagctaaaacacaaacctagaacaacttaacaaacaacatgaaaataaatataaaataacaaaaaaaataactacaaaacaacagaaaa

SEQ ID NO: 153900 - DNA, 1156 bp, Cannabis sativa
  modified_base (504)..(504): a, c, t, g, unknown or other
gtgtactaggtgtattggggagtatacccccttttttggcgcttgtcctccgtccggttgctacctttccaggacctcttgctccgggaaccttgagaaggtccggttaggttaggcttccagcaggagcggagtgagacgggacttcttcgcttacccccgaggggttcccgtagtgcgaagatgcgggagccaaggcttggctctgattatatcctagagtagcggagaattgtatactgctcatttgtggagtaaccgaaggtagggttcccgggagttgaactccgggtacatatcctgccactccggtcgggtagtatcctccgtaagccactatttgggcctcctctaagttgatgtacttttggaccctcttctggaaatcttggaggttcacagctccttcttgctgtaactcgttccagaatggggttcctgtacgaatcctagcttgaagaagtgcaagctgttgtccatcatcaactttcttagtcttcgagncttcttctttgaacctctttatgaaaattttcaatgtctctgtgggtagttgcttgatgttagtcagggcactgacttcgagattaatctttctcgcggtgacaaactgtctccgaaagctaacttacaacttgttccagcagtccaccgatcctgtttccaacttcttgaaccattcctccgcggacccgcttaacgttagtgggaagcataagcacttggcgtcattgctgactatcatgaccgtcattactcggttgaatcgagacaaatgatcgctggggtccgtgtccccagtgtaagctgccatttcgagaattttaaagtttttggggagttctgcctccaaaatgtatctggcgcacggcacccggtcctcacaatcagagtctgagtcgtcccctttttgtctacgggagacccaagcaatatctttgcgcagtatggctagctcaaccaggattcctttgttcagcgttcctgcggagaccgctggtgcgtgtttctttttgtccaagtgatcccgcaaatcaccatgcttctcgttgatctgatgtcttaaatcaacaggatggtatctccgtcccctccctcctttctcttcgggttcttggtgcacagacatgctctttcggtcctctcgatcctgagg

SEQ ID NO: 153901 - DNA, 916 bp, Cannabis sativa
  modified_base (51)..(51): a, c, t, g, unknown or other
  modified_base (316)..(317): a, c, t, g, unknown or other
gtgcaatttcaaatctatagtggattcaggaggaattaataagttaggaantttacttggtaaatttcagatctatttattgagagcttaattatataaggctatggtctacacactaactgggataatattgttttatagtctcaattacttggttttaattagaattctaaataagactatgtcttgtttgtgaaattttcactaagcaatggattatttgagaaaaaaagaggatttaagatttatttgttaattagagactttgtaaggtctaattctaattaacaaataagttaaatggaaattttatttnntaattaattataattattaaataggtagatttgacgtttataggattagaattaaaatatggcatttgtgaaagaaaagatatggtatttaaataaataaaaaaaattgaaactcttaggacccacatatagggtcggccacttaagattaatttatgacattattttatctttttttaatctatataatttaaatcctaaccctagatgaaattctatataaagaaagagataactcttattttcataacctacattagactccttttctagataattagaaaataaagagagtctcttctattcgaattccttcttcttcttcctttgaatattttaaagccttggtgaattgagagtatgcacactcatgtcaaagcaatacctagcatagtgaggaagattgtgtctaaccaaatcaaaggagagaagattcaagttcaaatcttgataatgctctgctacagatagaaattaagggctagtgatcttaatgaaatgagtaattatattctactgccatcaatgtaaggatttcttaatctcttatgtgtttattttataattttaagaaatttatatttaggatattagattat

SEQ ID NO: 153902 - DNA, 773 bp, Cannabis sativa
aatacgtcttctcccatgcggcattaaatgcgaagtgattgttcaagtaatctctttacctcccagaactgccttatcatggctctagcctcccgaatagtaaagatgtgtcttatgctctcctccgggaggcaccttccctgaggtgttccttttttgtctaagacttagttgattttcgtgagtgttggttctttcagatccacgtgtcacccttatccgcgtccacgtattttggaaaaaaagcaaaggcaacaaatattaattgaacaattaaattgtatcaaataattttaaatatatttttatgaaaatgataaatatttataaagaactttaatttttttaaaaaaaaaattctctctaagaaaagaatactatattattagagaagaatatatataaaatttagtaagtgataaaaagtaattattttttaaatatcttaattaaaaaatatataaaaaaaatatcacataatttgaaaataaattcatgttgtttgaaagattttagagttatggatatttggattttgaaaaagaatgtatggtttcaaaaattttaaagttatgtgatatcttaatttaaaagaaaaaaaaaacggaaattttttttattaataataatatatgtatatatagatataagaaattatataatttgaaaaagaaaaaaaaatgtgtggttttaaagattagaaaaaccaatggtggttttttttttaaaaaaaaaaaataacaaaaatgtgtgagttattattttttaaaata

SEQ ID NO: 153903 - DNA, 528 bp, Cannabis sativa
atgacaacgaatctctttatgaagcctgtgagatatttaaggacttattgaggaagtgcctgaatcatgggattaaaaagtggttataagtgcacaacctctacactggattactgagcaacacccgaacactgatagatgtcgccgctggtggagctttcatgaggaatagtgctaatgatgcctttgaattattgaagagatggccataactaatcaacatcggtcaatagagagaggcccaaccaaaaaggttgcgggaatgcatgaagttgatgcaataaccaagttgacagcccaggtagaggcattaacaaagctggtgactgcaaaagcaaaataagctcaagttgtatgcaagctgtgtggaggatctcatgccactgacacctgccctatagatgtcgacagtttgccaatggagcaagcccacgccattattggaaactatcagaataattatggtcatcagcagaacttccagaagtagttttatcctcagcaaaatcaatctcaacaaagccaaca

SEQ ID NO: 153904 - DNA, 554 bp, Cannabis sativa
gcacttcttatgtaaccaaagaattatatagatttaagtataaatagcactataatcttaatctatttgcaaacactatataaatgactgatctaccttggcatcagattttgaaataaatttgaatctttctacatattattaatttcattgattcattgtgttttttcaaaaaagaacatagtgttttttttgaaggaaaacattaattctctaaacaattaatgaagacaagcggtgtatttttatgagtttcatactgtagtacattgtgtttattttttagtttgttttaatgttgttttaggttgttttacataatttatttttttaacgtcgattttattgttcttgctccatcttactgaaattaatgattattttctgggtgttcttgtggtgctgtggtggttctatccgtgggtgtggaggatggaggctatcaaaaacatttcttcttatggttattttgtggttatttttttattttgttctcctaaaaatacatttgacgagcttactagaaaaaaagttttgaggtgtgtggttctttt

SEQ ID NO: 153905 - DNA, 515 bp, Cannabis sativa
  modified_base (488)..(490): a, c, t, g, unknown or other
tatttgtcattgaattgttgttattttggagcacaataattttccaacacgttaaggaataaacaatcgctaacattataactgtcgattttaaaccggcacataaaaagtcgccaacactatacccgtcgattttatatcggcacatgcatacaaaaaaataactagatctggatatttagaacttattttactaggatcttaatttagtagcatgtatgtttaattaatatattataatccaacatcctaaaatatgaaaaatcataaaacgacaagttaacatgtaaaaggaacataattctatagtgactccttccgtttaattactctaaccctcgattcctactatgtagcaagatattgttaagtattgaacatggatagctttcttgaatccgacaagagcaatctttaagatcttctccaaagatctgagtaccatcttaaatagtgtgagccagggccggcccaagcattgggcagcnnnggccattgcacaaggcccccatttt

SEQ ID NO: 153906 - DNA, 696 bp, Cannabis sativa
agctcctcgtcagagtcgtatccatatgatttccctaattcccccaatttgatatctcctgaagttatccttcagctcatttatctgcaatttgattgaatcctcttgcttcggaccaagttgttggcgaaggtcaggtttcttccgattcaagtgctctcacagatctagttgggagtaattgttggtagatctcctcttactcgtagaccctgtcctactcatagactttgtctttaagtggctcccagatttacttgttcccatactttcccgatcattagctcgttgagtactttatcctcttcgagttgattggctatgggttctggattgcctcgaagtcacactagcttcttcacgctctattctttcctcccgagagtgatttgtcatatttcccccatcagggtacgtacgagtcctcgctctatgggtttgggaagaacattggtgattcctagcaggtgatctccattctcccagttgagttccaagatcctcctcattttcttgagggatttctcgttcatcagtttccagttgtctcctttctgactgttcatcctaattccctagtggtgtctcattttccccgggttgttcttccctggccttttcctgtctcctagttcgtgagccacgaggtttgccttgttgtcttctcactccagtttcaggttcattttgagcatt

SEQ ID NO: 153907 - DNA, 621 bp, Cannabis sativa
  modified_base (31)..(31): a, c, t, g, unknown or other
aactaactcaggatattccaattgcgctttnctgattctttctaatcgatcagattgaagtgttaaactgtgtaactttccaactatgaattcaatcccagcgttaaccatttcagagactagttaagggctaacagaacagtagtacaaacttgcccgaaaccctttttactcaaagcattagtcaagacattggccttcccggagtgatataaaatttcacaatcgtagtccttaaccaattccagccatcttctctgcctcatgttcaaatccttctaggtgaaaaagtacttgagactcttatgatcagtataaatctcactttttttttaccataaagataatgtcgccatatctttaaagccaaaaaccacctcaacatgttctaaatcatgagttggatagcgctgcccataatctttcagttgacgagaggcataggctgtaactctgtcagcttgcatcagaacacatcccagaccctgtctagatgcatcatagtaaaccacgatttctcttgatctgatggcaaagctaacaccgagctattatcaaatgttgctttaactcctggaaacttgtttcacatttatctgaccacacaaatctctgattttt

SEQ ID NO: 153908 - DNA, 1121 bp, Cannabis sativa
gaataaaataatccaaaaatatgaaaaaaaaaaaagttagatatttttgaccatagatgatgatctaacaattaaagttaattttttaggttgatcgtcaattttgttacccaggttgcgacggcaggacctgctttgagtaagttgtggcttatttttataactttcttgggggtgaaatttggagtcaataactttgtaagtgtgaggcatgacatgatagagcatttaaataggttcaaaaaggcaagttgaatcgcatcaattagattaatattgagtgagttatgaccattttacttaaggcagttcataacccaacacctaggttgacatcccaacgccaaggttgacatatgacgtcaacctggacgctgggtaagtaagaaaacgtcctagaaagtgtgattgaagtgtgagacatgacatgatagagcatttaaataggttcaaaaggcaagttaaatcgcatcaattagattaatattaagtgagttatggccattttacttaaggttgttcataatccaacaccaaggttgacattccaacgccaaggttgacatatgacgtcaacctgaactctaggtaagtaagaaaacgtcctaggaagtgtgattgaagtgtgagacatgacatgatagagcatttaaataggttcaaaaggtaagttaaatcgcatcaattagattaatattgagtgagttatagccatttcacttaaggcagttgataacccaacacccaagttgacatcccaacgccaaggttgacatatgatgtcaacttggacactgggtaagtaagaaaacatcctagggatgtactttttgatgccaaagtgatattttgacatcacttattctgtttcagtattctggcgaagctggtcaccagttcccaaagatgttgttgttctgcagaaatgagagactcagaactctttatttccaagtgggtttcccatgttggaaatgagaaatgcgaagttgtaaatttgacttcaatgactttatggcttttagttattatgaaaaactaaatgaacggttgtgttgaccgaggttttcggcaaccaataaaatattataagtttatagagctgtaagaaaattagagaa

SEQ ID NO: 153909 - DNA, 902 bp, Cannabis sativa
ccagacctagaataagacccaaacctagacaaggacccggacctaaactcgaacccagactaagattgaaaccaaagacttagacccggaactaaacctggacttagattaggatcaaaacttgggactcaaaccttggcgtagacccagacccagcacccgaacccacacccaaagcctcatgcgaacctagactaaaatccagactcgaacccaaactcgtacaaggactcgaaccccgaccttaactcgaacgctaactcaaacatagaatcgcaactacaactgaaaacaaactaggactaggactaggaccagcataaggacctaaacccgacccagaacccagataaaagctagaccgagacccaaacctaaactgagagtaggactcaaactagaacctagactgggacccaaacccaaacaagaacttggaccgtgacccaaaattgggatagggacctgggaaacagaactaggatcgggacatagtacaagacccagactcggacttgaacctaggacctagcttgtgaccgaacacccgaaatggaaccagactaggacttaagattgggctccagatctggacctggggcttggaccaaacgcgtagtcggtgtctggatctgggacccaaccccagacccgaacccgaacccaaacccggacatgaacacaatcttagacaaaaacatggactcgaacgcgtaccctatgacttgaaatttgaatcgaaacttgaagtagacggggactcgaaaatgggaccaaaactaggacttggacttggaaccgtaatcgtacatggacatagaccgagaaccgtaaccgaactaggacctagactccagctcaaacctagactcgaacttgaaccaacaactagatcccaaccc

SEQ ID NO: 153910 - DNA, 573 bp, Cannabis sativa
  modified_base (305)..(305): a, c, t, g, unknown or other
attgtttcgccatacatgtgattataaatggttttccttaagttgtacagcgttccaactgtttcctatgtttcttccatctgctgctcgaagtttgtatgctcattggccaactatctttgtaatctggtaaggcccctcccaattgggtcctaacatgcttgctccttcttctttcatgttttggaacactcttcgtagcacccattctccttccttgaattatcggaccctaatgttcttattgaagttttgggccaccttttgctggtatgccgctattctaataagtgcttgttctctcntttcgtctaacaaatcaagttctgtgttcatgctttgttgatttaaatcatctgttgagagttcgtatctaatggttggtatttcgttttttgctgggatcaccgcttcagttccatatgtcaatgcaaatggggtctcttcggtcgaggtatttactattgtttggtaagaccacagtacccctagtaactcatcttcccatctccctttgtatttttatagtagtttcttgttgactattgtcttgttggttgattctgcttgtcc

SEQ ID NO: 153911 - DNA, 964 bp, Cannabis sativa
  modified_base (678)..(681): a, c, t, g, unknown or other
tgctatcatcttttctctctgagcttcgtattctccagatacatgatttatcaccagctatgaatcactgcagaattcaatgtgtttggctttcatctcccgtgctagctttatactcggcttcattgttagatgctttgaatccaaacttgactgcagcgtgcaggtgttgcccccaagtgtgacaagggcaattcctgcaccacataactgatctgtagctgacccatctacatgtagtctccaggtcggcttagcttcactgttactttgttgaggtgtttgtaccgactcggggttactttctggtatgctttcttttttgcgcgtgcattctaccacaaagtctgctaaggcttggcctttgattgctgttcggggttggaaagtgatttgatactggcccaactctaccgcccacttgagtagccgtccagaagcatctagtttttgcaatatttggcgtaatggctggtcggtgtatacccgaacaggatgagcttggacataaggccttaactttcttattgctagaataaggcagtatgcgagcttttctattaatggataccgaccctcggcctcaataagtcttttactgatgtaatagagtgggtgttgtatgttgttctcctctctgattagcacagcgcttacggcatgttccgtgacagctannnntattccaagttcttctccgtctagaggttttgagagtacgagaggttatgcgagttgtgcttttagctcttggaaagctttttcacattcctctttccacttgaacttcttgtttcctctcgggatgttgaagaatcggacacacttatatgtagattttgaaacaaatatgatgagcgcggcgatctgaccagtcaagctttgtacttcttttgtttttgttggtgagttcatatctaggagggcttgaatcttctccgaattagcttcaattcctcgggca

SEQ ID NO: 153912 - DNA, 809 bp, Cannabis sativa
gcactcattcctatcgacttcggctatctacagatgcagcccaagatgtgcgtgcgaataaaatgggctttggtatggttcttcaatcaaaccaaggagagattctactcactttggccacgccttggatcggactacaccagcccctacttatggaagcacatgcattgcattatgctctttcttggtgccatagtcattcccttgctccggacagtatagtttcagattgtaaaggtttagttgattatatttgtaacaaaagcacacatcatattcatctcaacaaatttgtaattcctattttcagcttgctgtcatatttccctaatgccttcattagctacattccaagagaggcaaatgaaatggctcactctctagctaagaaggctctaggccttgaacaggaagctctgtggacaaactctacattaaccttgtgattgtatcctgtatttgcttgttctcaatggatactgttattcaaaaaaaaaaagtattgggctgaattttttttttaaaaaaaaaattatccaatccaaactttttcacaataacaagttatcagattgccttaatagatctccttattgaaacatttaaagtgttatattatttataaataatataatgtatagattaaatatgtataataaactaatatgtaatatatgacattatatattagttgtcatcattttaattataatatttgggggagttaatcaccaatattaagagtataaaaaatgttacatatcttaatttgaaattcttaatgctatatattagagttagtcccacat

SEQ ID NO: 153913 - DNA, 504 bp, Cannabis sativa
tcagaagccattccaacggagcggaaggtgaataaaagccgggcaagtcaaaggctccttccacttggacatctgcccaaattcccaactacgcaaataattcaagatcaagtggcaagcgttcaagcaacaaccacacgcaaggaaacgggaagaaaggaaagttcactgataaatccgaagagactccctaggagaatgatgccaaatacactgcattcactattgtgactgaagatatagaaagtgtatgtatggcaactcagtcgtttatcccgtacaagaagccctagaccatgaagaaagataccaacaaaagggacatgacaaagttttgtcagttcaacggagactacggccacaacagtaacaaatgctacaacttgaagcgggaaattgaattcctaacagggaaaaacaatccacacctgcagaagtatgtcaagactgaccagggtcaaaacaaccaagatttgctacctccaccagtagatggacacttac

SEQ ID NO: 153914 - DNA, 662 bp, Cannabis sativa
  modified_base (363)..(364): a, c, t, g, unknown or other
aagaagccattcagtgagcagagggtgaaaaaaaacctagccagtcaaaagctccttctactaggacatccgtccagctcccccattaccgaagtgattcaagcttaagtggtaaacggtccagcaacaataatagacaagggaatgggaaaaagggaaagttcactggaaaacccaaacaagcttcctgggagaatcttgacaagtatattggatttactgtcctgacagaagacatggaaagtgtttatagggctactcagtcatgagccccatacaagaagccgacacccatgaaaaaagatgtcagcaacagagattaccaatttttgtcgttttcatggggattacggccatgacacnnatgaatgcaacaatctgaagcgggaaatcaaattcctaataaggaaaataatcggcacgtacagaagtatgtcaaggtcgatcagaattagaggggcgataacaatcaagacgtgctaccaccaccagtagatggacatctgcaagtcattattggaggttcgcacatatctagagattcaggcgaagctcgagaaaggtatgcctgaacagtacagcacgagcaagaagaagtagtcctggccgtagaagggaggaagccgaagatcccacgagcgggggaacccaccataacattt

SEQ ID NO: 153915 - DNA, 887 bp, Cannabis sativa
gaacatcgaacagagtcagtaatctttttcacatctaaagtaatgttattatgaaccttctcattgcgaattcgccaaatggtatcaaccaccagagatgcatagagatgcatagaggaaaacctcatccgctgcagcccccttgtgtctcaaatcccaaataaactttacccaatcccacatacaaataccagtatcaaaaatagggtaaatgccccaaggcgaagatctccaaagatgaaacgccatatcacatgatagaaataagtgttcaatagatattccttcctcaacccatacatcggacagcttgtatcctcaatctgaaacctgcttctgattactgctctaacaaggagcgcattggataggatacaccaccaaagaatcttatggtgctccaaaattttgctattccaaagctttttccaaagcgacagagccacctcgcagtgaggagctctttccaaagcttgggttaaataagccgatttacacgagaatcgcccattactttccaagatccaaatccatctatccttgccctgaccagaaagattgccaccctaattttaagatttatatctattttatcattaattcctgctagtattaatcgaatatgtttcattattattttatcacactattgcatatttattatatagctatatttgatattattgtggttaattaattataaaattttattttgtataagatttgcttttttcgaatatatatgtttgtaaattagctgtattagtataaattatctatataaatattatcaagggttttttttcataattgtacaacaaaaataacataattacaaaaaatgtgcaaaaaaaattattttaaaaacttatacattttgaaaactt

SEQ ID NO: 153916 - DNA, 582 bp, Cannabis sativa
tcataattagagttggtcaaaatgacattttacccttccaattatctctttattccttatgtaccattaatccaatgtgaacagttaatctataatttattatagatttttgtatccaactgttagcactcccagaattaacactataagaaaactaatattcaatccattagggaagcttaaattctactattgtatagcatattctcagtcactcatgttattaagttcacaaaacagaagttgtaagaatcatcttctctgaaaaacttaaacaagtgaatcaaagaacccaatgaacacaaatatgagttcatgtatactcaagattcagtctgatctactaatgatcattattgtgatatgaataactctttcatggtaaatgatacatcaattaaagatatttattacatatcggtctagtcatgcatattcaaattatacacaacacctttactacatgtctatccccatatatgattagaattaaaatcacacacactagaagtatatattgtatagtaaatcgtacttagcagttctatattaaagattctcattactttaatacactaccaa

SEQ ID NO: 153917 - DNA, 741 bp, Cannabis sativa
taatccttaacattatagccaaggataccaactttgggatttcacaagattagactattctttcgtataaattccatatcctcatttattgtatatattgtctacaccgatagatagcatattaactcggtatgtccaactgttactacttggtcaaaaccataagatcccacaatacattgttcataattgtgtctttctctcctttgggtttggttactaccgtcttactcactatgattgagtacttgagttgctatgtgtgggcatggccctctttcactcaaggttttgaatatgatgaagaacaatgaaggaggcttgaaatcactattgaaggtgtctctcatctactagttgtcagagaatgaaaactagattttgctaggttgaatagtcaagttgacaagaggatgagatgagaacatcatgttccgtttatagtgtttcaactagggcttagggctgaattatatagattaaaaagaataaaatattgggcaaaaattaacactagggccggccataatggaccaatctatagttataattttgccacttttttaaccacttattcttctttcgataataccatattttccaattcaatcctataaatacaaaaactatttatttaataattgtaattaattatcaatcaaaattatcatatacataatttattaattataccatacaaagtctcttaattaataaattgaccccaaaatctcttttctt

SEQ ID NO: 153918 - DNA, 771 bp, Cannabis sativa
  modified_base (549)..(554): a, c, t, g, unknown or other
ataagatctattgacaattggactataattaaaattagatcattggatatgtcatgaacaagttaatcatagcaatttagatcaaataaataacaggtctgttaaaaaatatttgaataaacaatttaaataaaaaaacacaatattcatgtaacaaattgtgaagtaagatatttaatataactaaattatcattttaactaactaacaaaattttgaaaatttagggttgttgaaaaaccttaaatatcttttcaaaatttaaaaatcaaactaattttaaaatatctagatttatttgaataatttttatcaaattaaattaaatatcaaatcagataaatgatttaaaaataaccaaacagacattttcaatatcattttctaatattacaaattaataaaattaaaataacaaaataaatcaaatttaaaatagatacggttaggcaattatcattttaagaataaaataataaaaaataataattattcaaattatatgtaaaaatatctcaaattaagcctttttcaaatttctacaaaaannnnnnggttatttaaatatttaaaatatcttttataaattttttataagtaaaatgacataaaattttatttttctaacttttaatttataaagaataaaatatttcactgaataactaatttggaatttaaaaatattatggttaggatgtctataaaaatatctaaggtaattttaaatttattaattatttaatttatcttataagataattttaatat

SEQ ID NO: 153919 - DNA, 983 bp, Cannabis sativa
gacattgacgagttacctgaatgggttagtgaaatggttcataagaggaattggggactttttgtcaagcagagaggacaggcggtcatggaattttttaaagaactctacgccaattttttttcccaagaatggcctactgaagtggttgtgcgtgaagtaccggtgtcattctccgctgaagaaatcaacaacttgtttgggttacaatcaatcgaatgccattactcctccctcaaagggcaagtgagcgacgagacattgaatgacatgatgcttgaaattgccaagccagagtccgaatgaaatcttgataattatggaaactttcgatttcggcgcactgacttggagcacgatttgaaatgtctttacacattcatgcaaaccgccctatgccccacctcacatgactccactgtcagcagagatcgcgcatggatgttgtactgcattaagatgggttgggatgttgatgtaggggttgtcctagccctagaaattgccgattgtgcgcaacgggggaaagggaaattatttctgccagctactatcactgctctttgtcgcaaggcgggtgtaccgatgtggaacgaagaaggagcattgaatcctcgggggcctatcagttttggtccaccacgagctccgaaaacaactcctgccttcgcgtcgacctcagccatggagcctcccacagatcgctttgctcactttgagcaagtgcagcagcaaatgtgtggccaattgcacgcgatgtgggaatatgagcgaaagcgcgacgcggatatggagcgtgcattcaggaggacaatgccacgatttgagcctaagttcccgcaattccctcagcacgttctcgacccgtgggctgaaccataaactttgaatacggaggagccccacgaggactccaagtagagggagtttcctaatacctaagctaatttctatttttctgttatgtgtcgtttttagtttgt

SEQ ID NO: 153920 - DNA, 674 bp, Cannabis sativa
atattaatgccccttggagtaaattgggtcagacagaggcagaagaagtctaccacactcctaaagtacgggtgcaaaggcagcaatgccccttgcttggcgtgagcacctgaccaagcgcgcattcccctttcagggtttgtggctcggttgttgtgggcgagaatgtaacactccgattcacccaggtagccatccaagtcgagatcccgcaagcgtgcctcggtaaccttggatggagggctcacccacctgggacccaaagtaccttgccttctatgaggaatcacagcagtaagttccccattggcataatccacgcccccaaccaggacgtcgccatcagcatcaactggcttcccggcctccttgtatcccccataatttggaggtgaacctcctcctcttcctccacctcggaggaactactaggacgaacatcgtcctgctcctcaatctcttagacctcagcgtccccttcatgatcctcctccttctggatggatggatcctgttcgacgctgggtaaggtggtgtgctgggccacttaagggtcagatgcgtcgactctacgcattttcttttttgtgcgagccatcatcctatggctgggcagaagacttaatctagaatgcctgtcactcgaagaagttgggctaaaaagaagacgaggg

SEQ ID NO: 153921 - DNA, 561 bp, Cannabis sativa
  modified_base (169)..(177): a, c, t, g, unknown or other
  modified_base (300)..(302): a, c, t, g, unknown or other
aattagaatatttttcctagtataaaattagaattaataattaagttgattttatagttaattatttaattcttatatttaatacattaatttaattgaattcaattaaatatttaagttgattttattcttgatacttaaatgttagttattttcagaatatttaatnnnnnnnnnaattattttaagttggaaatttaaatttctgaacaacttaagtttgagtaattttcaaaatatattttatttaaatgcagataattttgaattttttttaaaaaaaatagattaaagttgaannntaattttagatcaacttaaataaaataaatttttcattaatgatttattaaaataaatagactaaaatatatcatattttaattagaaaataaagtaattagctagtaaaaatctagatagttatttttagtttactttaagtatttttcagttatatttaattatatagaaaattaatacttaagttgattttattcatgatacttaaatatttgataattttcttagaaattcaatgaaataagaaaattatatttg

SEQ ID NO: 153922 - DNA, 537 bp, Cannabis sativa
aactttaattattttttaatttcatattcttttatattatttatttatgtcatataaaaataaactctcttatattttcccatatatatatatatgaaaaggaccccgatgaagtcacgcatgcgtgactgatcctgcattcattcgctattaaattggctcactaattgatttattatcctaaggctgctaacaacgataattaaataatacttatttatttttttttaagaaaataaattctttggctattcagccaaatatatcgtttttgtgcccaatttaatagtcattcttctttaagataaaataagttattttttcataaaaaaaaatataaaaaataagaaagaaagtgaggagtaagttgaaagaggtatttttttagtattttcaattattagtttatttgtacttaatcttccaagcttaaattttagtggtaaaataaaacctttcaaacgactgaattgttagtaaatttaaggtgtcatctattttttacagttaactgccaacatagactacttatgtgta

SEQ ID NO: 153923 - DNA, 897 bp, Cannabis sativa
aaaagattatgtaagtgaataaaatattttattattaaaatttaaattttatattaattatatattctaataatttttatttaaatacgaggaataggtaaatgagcttgatatgaaacgacttgaacggcaatctcagagcgacacatatggtactgaatctgatgctggttatcagtacgacgttctggaaacagttcttggcgaaagatctaactatcaaagaggcgtgggtaaaagactcaaaggcaaaggaaagaagtcatttactcaaagtcattcgacggtgcctcctccgccatctactgaaatgatgagcactatggcagaaatatcctcaactatgcatgacacatgggggataatttgacgcctgaacaacgtgctcatttatataactcacggtttgagaactttattcaaacgtatagtcaattgcaatcgtctagtggttcgtcttctcagagttatgttgctcctccacaacatcaacaacaacctcctttgcaaccacaatttcagccttctttgcagcagcaattccgaaaaatttcgcagcagcaaccccagtcttttcctcaacatcaacaacagtctggtccgccattaggaaattagttcttatgtagaacaccatcagagtctcctccgctcggctcaaattttgttgattttggattatttgggagttcgtcgtagcaacaacaatttttttcaactcctattcttaaccaagctgagctggggaatctaatactgggtttatcatcagatcaagcatatattctttctctgctacgaccatcgggaactcgtaatgataataatacggatcaagactttataactcgagaccttaatgaagattttatggaataatttatttatgttttttaa

SEQ ID NO: 153924 - DNA, 1011 bp, Cannabis sativa
catatatggaatttcataatttttgcatgtcttgtgcccgacaatattgaaatgcggtgtttggctattagaatcacatcttagtaattttagtatagcggcgcaataaagttagacattgggaatgttggaaatagccgagattttagaattgataaaaatacccctaagtaattttatgaccttatagttatgggaagggcaaaatggtcattttgcttaaataattttttttcttttagtggatgttgattgggtttctatgctgattatatgattgattttaatataataactaattttatttactcatttattttacaaaaaatatcaaattgaaccatctagggttctggttttcttcctcaaattctatattttctagcaagattttagtggtttcaagtttaaggtgagttcctagtacttcccttgttggtttcttaagtttaaagttatgaaattatgcatgatttgtgagttttgctactgtagttgctgttgatgtttaaattgtgtttctgaggttaaattaaggttagatatgttgttttaagttagttttcgtggttgtagtgttgattgagcaagttttgagttttagaactcaagcttggctctttaatggtgaatctttattctatgcatgttgaggtgttttatggccttggttatgttattttgggtatattaagcatgtctggaaggtttggtatgatttggattcgaattggtttaggtttcgaaattttgtgggttacctggtgcaaatcggttaaccaattttacaagccctgtaaaactggttaaccggatcaaaaaccggtttcctacactttttgtgttttcgattcgtattagtttcagagttttagttggttaattccctgttagtttagggtatttccctgttaacattcagtaggtaaacttttagtttaaaacttaagtccccggttgtgatttagcgtgtcacttatccatgttatgaaacgaggtaagattagtata

SEQ ID NO: 153925 - DNA, 580 bp, Cannabis sativa
ctgctgggttttcagtcaaaccttgtgtggtactattggctgaagggtgtttctaaggcaaactatttttggcaaagtttgctgacatggatctctatcattacggtgtaactataaccccagagttacatcaaagaaagtaactcgagccattaaaaacctgtaacaccctaacaattaggcacgctacaacaaccaattatgaaaccctaatcccctaaaccgggattactagaaaggcaagcccgggaaaatttaaactttatttataacaggaagaaaattaaacttgtaataatattaactttacaacaacctaaaatacatatttcgggatcccgtaaaaatgttcacaaaattttacaagtccattttacgtgcggacctaagcggcaaaacaggattacaaaatacaacagtggtagaccccaacccgcttggtctagtatggcccgaacatgtacaagcattgctaagccctcgtactcatggctgatcagtgacgaatttaccctttcttgcacagtagagcactagtgagccaagcccagcaagacagtaaaatatatcgataatcata

SEQ ID NO: 153926 - DNA, 787 bp, Cannabis sativa
cagacatgttgaaacaagcaagtggtttcggttggaatgaggacctaaagtgtgtggttgctgaaaagagtgtctttgatgattgggtaaaagtaagtgttactttgttcaacttaacttcacaaaatatcatatcttaattcttttaaaatattttttattcattgcagagtcatccaaatgcaaggggcttaaggaataaagcatttcctcattatgatgactttgttgctatatttggacagcatcgtgcaaatgggcaaggtgccaagggattttctgaaacaatgaatgagattgatagagaagcagaaaatgatcaacaatatgagtttgatccatttgccccaatagatgatcttgttggaaatgcaaccgatagtcacacaagtacgggaacaacttcagcacaatcaagaaagagaagtagaaagaggtctaggaatgaagattcattagttgaggtattgactaccacagtgaacaaatttggtgaaatactagctgcttctggtgatagtattagaagaattgctgattgtttctagttcgagatagaaagtgcaagtagaagactgaaagtgtttgatgaactgaaaaaaatcgatagactatcatttgaacaatgaattgaagctaaaaaacttcttgttcaaaatcaagcttatacgaatcttttattgactttggatgatgaatacaagttggcattcattcttggtttgtttaagtaaggtgagatttaatagttgatggtatttcgaaaaatactattggggtgacttta

SEQ ID NO: 153927 - DNA, 595 bp, Cannabis sativa
ttttgtgctttaaaagaacatggactcatattaggtaattttctagtaattgaatttgtttatgtatgctaattgtgaaatctggaaagttttttgaaaaactctagaacttgcttgcttgctctttgaggcgaaataataaataatgcacgactaggaaagtgatgtaggcatttttttgaacgattgtgtctttcaagccatccctataattttatttttgagccttaacctattctttgtttctacacaaattaagcctaaaaagataaacccatgaatatcgaaaaatttaaccataattataccataagtagatctttagtttggggaatttggatgggaagtttgctatgtgtgtgttgaataagtgtgaaaatttagagaatatgaaaaaaaaaaatagattgacagcaacttgaaaaagaaaagaaagaaaaatctgacaaccagtgtcaaatttagaaaaaaaaaaaaatccatataaagttgttgcaatatagtgaaaaaaattctctcatgtaattagaaaaaaatgtattgggattgtgtgaaaaatattttgggtgacatgattggagaagcttatgatata

SEQ ID NO: 153928 - DNA, 541 bp, Cannabis sativa
tacagatctaaatgtgtttgcactagtcttttttctgtcattgataatattaagaaaactttatctgtcaatttactgtccatgtttcgtgagactttggtcgttttctagatacgcctgagtttgttttccatccccaagttgttcatagtctattattgagggaagttttccagcccaatcctaaagaattttgggctaaggttgctggccgttgcatacggtttagtgctaaggaattttatttgattaatggaatcgattgtttcggtgattgcaacaagttgttgttttcacaggaatcaaatcagttggtagaaatttgttttcgtggtgtaaaaaccattcaccacaaagctattgaggatgattttttgggtagtaggttgggtttggatgagtcccttggattgaaactggctgtgttgtattttgttcagtgttttcttttgagtaatactcctgataaagaagtatctaggtttgatctagatgttgtggatagcggtcggtgggatgagtattgttggggtagggaatc

SEQ ID NO: 153929 - DNA, 626 bp, Cannabis sativa
agtgccacctatgaaatgggttgggcaattgaaatattatttcaagtatcacgtacaattgattattattattatatcttattttttttttttttaaaaaaagtaaaaatacacacattaaaattattatttttatattattattatatttttttgaaaaaaaagccaaaaacattaaggcatatatattaattgacattttatgtatgtatataaacaaaatttactattaattatatttgatttaagatttaatatttttttaaaattattttttattttctaactttttttaaaatatttaatatttttataaaaaaattattaaaataataaaatatcaatttgtagatttatacatttttttatagaaaaattattaaaataatagtaaaatatgaatttgtagaattacgttttaatcaaatattaaaattgagagaattaaggagagaagagaaaaataatttcgaagtgattttaaaatgtcatgtcaccgtcctatacttctctcttatatgtatatatatagggtaatactatggtaggacctagcaaaagttccctaccggtagggaacttttttcttaaccgttgattttagatcttgtggttattatgatgta

SEQ ID NO: 153930 - DNA, 646 bp, Cannabis sativa
cctagttcggtatcgggtagtgggcgactctgatacactgcacctaacttgattacagactttgtgtcacgagaccgctaaacacctatagtgatagtgtcaatattgcgagggtacatcggcaccaataagtaaaacactatttcgatatcggttagtgatttcgttacgaaactggtgactacaataccctacaccaaacttgattacatacgttgtgtcacaagacccctaaacatctaacttgatagtgtcactactgcgagtatacatcgacacatcaaagtacaaccctaattcggtatcggttagttatttcgattcaaaactggcgactccaatacactacacctaacttgattacaaactttgtgtcaagggacccaaaatcttctacatggatagtgtcactactgcgagtgtacatcagcaccactaagtagaaacctatttcagtttcggtgagtgatttcgttacgaaattggtgactctgatacactacacctaattttattactgactcttcccctaacgagtgtacatgggtacgactaagtggaaccctagttcggtatcgattagtgggtgactctgttaccctacacctaacttgattacatactttgtgtcacgggacacctaaac

SEQ ID NO: 153931 - DNA, 882 bp, Cannabis sativa
tgaaatggctagtttgtattttttgctgtcgattgatatttgcattcaaaaaaaatataggtaattctacaatgcatcctcttaggatgtattgatccatcctttatttgtttcggcatctagaagaattttttagtttattttttttttcaaattcatgtacgttatagctatttaagatatcttacaaaattttggaaaattcggaagaatttacaatatagattacaatgtgcaacacactatttgaatgtagttttctgtgtgttaaacttttccaaattttttaaaattttagaggatgtcttaaataactataatttatatgaccatgagaaaaaatttgactaaaaaattattccagatactaaaactgatagagatatatcggtatatcctttctaagagggtacattatagaaattttccaaaaaaatattatgcgtcctatttttataatttttattttagataaaatgtatatttaaatataaaagatattttcttttcaaaaaaaattatattagatattatattacatctaggaagacgaaagcgacacatgtcaactgcgaaagcccttagtgtataatgtacaaactaagtgtaacagtcggcttggctcaagacctagtaagcgaggtgcctatctcgctatcgggaggcttcctgaaaacttaagatatcttctcagtgaggcctataatcctgacgagtcagaagctagcattcaaacgagcctcgaagaactctttgtaaataagaaccgcaatcatcacaagacgagcatcatcaacctcagaagggaaaatggtcccagctcgctattatgatcactggaaccaagcttctgtcgaggcatccccagatacaataattaaa

SEQ ID NO: 153932 - DNA, 666 bp, Cannabis sativa
tagcacattaatataaaattctcaaaaaattagaaaaataaaaacaaaaaattctagagagccacctatacatttgtgtgctttcctttatataaatatatagattctaattccaattaaacatttgtatgggtcttgggtgggtcgtcggtggctagggctactaaaggagagggtcgagagggtgggacgaagctttctgtggggttgtggctaaggctgaggaagaaagagtcgctagggagaaaagttcacaaaaaaattaaataattcaaattaatgttcgctcaatatctaattctttgttatggtatgggtcttgggtgggtcgttggtggctagggctactaaaggagagggagatgtagagactaagtcacaaagagagatatcgacagggtgggacgaagctttctgtgggattgtggctaaggctgaggaagaaagagtcgctagggagaaaaagtgaggaagacgaagagagaaagagaaatagagatcttttctttaattttttttttttaaatatagcttaaattacatggaccaatcttataataatttagaggttccacgaatgcatccaattttaacaaagtttttagaaggaaattacactctatactctttttatattgtcctcttttatttttaccctctttttta

SEQ ID NO: 153933 - DNA, 546 bp, Cannabis sativa
atggagggtttttgtttctgacttaactcaatagaattcatttattttgtttgattttcaaattagggtcggtatactaatactacatgaattcaacgagagagaggggataagcttaggtgtttccaaaccttgggtgttcattagatcacattcaatagatttgggcttaactgatctaattcaattatttattggatattgaattttgtcatccgatcgaatccaatcgaattgagtcatccgatccaatctaatattggatctgttccaaccattgaatgcattaattggtttttcattggattgaattaagcaggcctgttttcagttttaataaaaaataaataataatattacaaaaatatttccagctgaccaaataaataaatatacagcccaaataaatttttttacacaaataccacttacacacaccttcaacccaggatccatgcttcctgggcaactatctgcgcaacaatcgcgcaactacgcagcaacctaacgaaaccaaaatgaaaattcaaccagaaagagaaccac

SEQ ID NO: 153934 - DNA, 745 bp, Cannabis sativa
gaaaatatcatggacgacattctcgactacaccgaggtctccataccccattacccaatctatccaaaagaagaaccatcaaacaatccaaggggaagtccttcgcgacccaagtccctgtactgagacgttagccctccaactcaacggaagttccctcaagttatacaactttattgaacatccattgagtttcatttagtggtattatatatattgtacttattttaaaactcatctcatatggctgttggacaactttttgttatgccatttaataagattcaagaactttgctctatcgtgttactattacgtcaatgtaaatgttagtatagtagtataatataagaagtctattttcattttgaatttagtagtcatgtctaaattatttacttaagttttaatcccaaaattaatgaaaaaggaaagtcaccttagtacttcaaaataaaccaaattcaagattttaccacaaacacgtacaatacataaaagcttaaacaaatacataaaatggaaaccaacagagtacatcagttactatttttgggagaaggatgcattcctcttttgtctcccccttgaatatcatctccatttggctccttgcctttcttactcaaattgttgaccttgattgattttttaacaccagagctctcaccctcatcaaacaatgagcaaacacaattaaggattgcttcgtcatccttaacatcatctgaatcccacatgcatg

SEQ ID NO: 153935 - DNA, 882 bp, Cannabis sativa
  modified_base (517)..(523): a, c, t, g, unknown or other
tttgcacaaataccggtgtgccacgtcagcacaattaccgaaatccaaaataattaccgaaagtggaaaaaacttgaaaaatctcgctttcagaaatttctgtattgtgtaatttttaaaaaaagtaaccttttaattgcttttgatgtaaataatatatcaattagttactttttattaaaaaaattattttaagataatattttttctaatacacatttagttgcttattttgatcagttactttaaaattataattttattttttaacgtttagtccatattatgttatttaacgtttagtccatatttaagataccttgaggttaccttttgtttttagcaattttaaatcatattttaagttgtgaaaaatatatatatattgtgatataaaaaaagataaacaagataaaagtaaaattttcttttctttttataaattattaacaaagaagtaactaaaatttatatttgaataaaattaatataccaattaattttatgggttactatnnnnnnnaaaattgattttatttataaaaatccaaatgtatcataaaagaaatttgtgagaatataatatattatttaataacttttaaatttgaaaaaaaaaataataaactatatatttagttgttatattgaatcttatttaattaactacatacattaaggtaaagagtgtataatggttatttcatagttttttttgtttttggtaagtatggtaatttcatgattggcaccagggtcggctataaacttgtgcatcctgatctattacacagggcccatttaaataaggacctaatttcttgccttctttttaggttggcttttttgtttttttgttttttttttatgaaatgaaacatt

SEQ ID NO: 153936 - DNA, 577 bp, Cannabis sativa
agcaaagaactatccaatcaacccaagttttaataaaaccaataaaagttaatgtaagcccaaataaaaagtctaacaaggacaaaatgctcactgttgctaatgtcttaacatcagcccgtatagctcttgatcattgattaaaagctcaagataacacatctctctctcacatctactctggtaatggtgatgatgagctgagctttagactaaaccagatacaaatacaattaagattaatgttgatgttgctatatttgctagtgacaataagcacgaatatggtatggttgcaaggaacgattaaagatctctcattgaagctaaagcttagtgccataacggtgtctttgcctctgaagttgcggagattatgggaattaaagaagctttaagctgggtcaaaaaccaaggttgccaacatgttgaacttgaatcagacagtttagtctctatccaagccatttgcaatcactcttctctttgctccatctttgggaacctggtttaggattgtcactcacttctgctatctatgtctttagttaaaattcattttgtaaaacgatcagca

SEQ ID NO: 153937 - DNA, 526 bp, Cannabis sativa
catgtcctcttcattgggtggattattttctatatctacaaactctattggatctcctatacattgaaagttaatttctggtaatggaccaagatcaacaaacatttggaaatcaaatgaaattgtatcatgcataacatctacttcaatatcctctaaatattcttcaatttgtagaatatcccatacatttcgatgatgaacttcttagatgactttctagtcaaatttatttttgagatcatcaatgtaaaaaatttggttagcttgagacgccaaaatgaatttatcatttttgaatccttcaaaactagtgttgatactaattatgttttgttcagacatcaatctctctaaatgtcaactagtgtaaaccatttacatttaaataatataacagaacatccactaagatatgacatcacgataacttcttctaattggccataataagttttatcttcaactccaactacagaaacaccactattttgagttttcatattctcgtccctattaagacaca

SEQ ID NO: 153938 - DNA, 565 bp, Cannabis sativa
  modified_base (27)..(28): a, c, t, g, unknown or other
actaatcagattgtaaagagttttatnnagggcataaaacccaacataatcagccacctctcattctttctcttgttgggcaatgtttttcttctgtttaagggatttgatttcggcttttagtttatcaatctccttttatttctgagccacaacatcagaaacttcccttttcttcctgccaaacaatttatatgccttggtaaggaacctgcagatcattaaataaaattagctatgattttggcagataagtttgctattctccttactcttgtttactctatggcgagataaaccacaagtcaggcaataatccatgtctgcttattccttacgatataaaatgcaatcgttcggacatgcatgaattttttcatactttaatcctatggaatttaaagtttttttcacttcatatgttgattccgcgaagcagatgttaaatggaaagatatctttaaaagcagctaaaaattgagtaaaacatttattgctcactcgattttctgctttgatgttgtaaaattttaccattgccggtaatcttagttttttacaacca

SEQ ID NO: 153939 - DNA, 538 bp, Cannabis sativa
tttgtatttactcattcttcttgtgtacacatggtgatatcagtcataaatatgactttgctatctgttggccaaattaaaggtcaaggtactttcattgagagcattgtcgaatgatctgatctatcaccatggctgtaacaaggagacatctggctataactcctgcctcatcaggtcttccttaagacaccatgactgctaatcttgatgtttgtgttccaaccaccactggatctccacaaatccaatggatgtagccaaccctaccaacccggctagcacaacaaacttgaccaacacaaatggtcaggtcaaccctaacaacctggctgatcccaatgatcaacctctgtcacccagggaaaatccaccattggcacctcatactaagggtttagccaatgttgagcgaccctcgggcaccataactgaacctggtcctctttattatgttggggaaacagggccaaaaattggcgagctagccattggtaagcctcatgtagatttgggagaagattttgaattggccaaa

SEQ ID NO: 153940 - DNA, 654 bp, Cannabis sativa
taaaattaaattactaataatcatcaattaatttcttacaatttgttattaaataagaatcttttaaaaattaattattttcacataaagtatggagatatttgtaataaaacatcttataaattaataaaaaaatagtaagaatgacatctaattaaatgtaattctacactcaattttgttatcaatacattaagtgccaaataagtgtgacagtctgtgattggttcaagtgattttatttattttaaaaaaacaaataataaaaaattaaaatataataataattataaaaataaagataatttttctgccgcactcgacacatctgtacttcatttcaccatctgttatgtaattctattttctcagggagacgaagttgctttattcttccttctttggagttctaaatatattatatatgtaccaattgattggagtaaaatctttaaaaaaaaattacaaaagtttgaaaattatttgttatacccaaaatttgactacacttcaatagttgacacatgtccaaaagaagaaatatgaatcaattatgaattgtatattatatcaataaatgcatattaaataactcgttattattaaatagaggtttgatagataatattcaaaactcattgactttatagtcaa

SEQ ID NO: 153941 - DNA, 503 bp, Cannabis sativa
acctttttatgtatgcaattagtttaaacctttataaataactaaacttaaattaatacaaaacgggtgtagccaaaatcatctcattcgaaagagaagaaaaaaaaccaacatgcttatatgtacaaaaaagtggatttaaatagatttcaactaataaaaaagatttagatttcattaataaaaaagatagaacacactataaaattacaaactatatatatagctatatatatatatatatcaaaagaagacatcaaactatttaatgcctaactgttagacttgccttttatatatatataagctgattataataccacagtggtagcaaaaaataataaaatactactatccaaaatcataccctattacaccaaaatagtttctaaacaaataggaaacactagggtggacggcggaaaatgctgactgcatctcgcaactgttcaggcatcctctctactgcactcaacagtcgagtcatggattctacagtaatt

SEQ ID NO: 153942 - DNA, 685 bp, Cannabis sativa
aaaaattataactctaatgcctatttataaaaatgggacctacaataatataaaataatatatataattattaaaatattagtaattaatgctaattgcttgtactaattcataatttaacatgcagtcattacaatttctctcaaaattacaactaaaagggtagtaggtcattacccgctatcacaagggggctgaacctctataacaaatctattgtttaatgcttttcattcttatttgtgtaaacacatggcaaatattagattcatacgacccgctgtcgattgatcactttttgaggtcaacttagtacatagaaaaaatggatgtaaataaaattaaaacattttgaaaatttatgactatgaaagtcaataaatttgtagtgttagataaattttgtttgtagattataactgaagtaaaaagtaattttaattttgtataataatttttaataatacgtttgataatacttttttaattaatttttttatttttatttaattaaaaatcaaaatttttaaaattttgagaaaaaaatttactttcaaaattttcttaacaaacgttcccaaaaaaaaacaaaaagtaaatttaagggatattggcggctaaactatctgaattttagggtttgtaacagttaaccacaaaaaccaaatttttggcggctaaacta

SEQ ID NO: 153943 - DNA, 633 bp, Cannabis sativa
tagcgagtcgttgagtcgagccaatttataaactccaatttcaactactacttcgatgacatatggaccctcccagttcaggttgaacactcctgtagaggcatctctcgtatttgcaagtactcgccttagcaccaagtctccaacattgaatagtcttttcttgactcttttgtagaagtatcttgtgactcggtgttgatatgctacgttggtgatttgcgactcatctcgtttttcatcaagtagatccaaggaaattttttgaagttcctagttttcttcttgactataaaactctcttctatgagtcgatatgttcacttcaacaggcagcattgcttccgaaccaaatgctagcgagaaaagagtgtgacccattgccgtcttctcggtagttctgtgggcccagaatacttgaggtagctcgtcaacccacctacctttggaaggatctaacttcttcttgatagtatcctttaaggttttattaacggcttccactttcccattcgcctgaggcctggatactgacgagaagctttaaataattttgttcttttcgcagaatttagtgaacaagtcgccatcaaattgggttccattatcggatactatcttcatgggaattcc

SEQ ID NO: 153944 - DNA, 511 bp, Cannabis sativa
aagataaggaagtgttatcgtgagtgttacgccagcggtcaagagttatttgtgctgatgcaataacttcagttcgtgaggatgctttattcttccatacaacgagatttcgggctttccaaattgcccaacaaagcatagcagcctgtgatccaatctcctcatcaagagttgtaagagctttctcaaaccagccaccaaaggataaagggcatatcggatcataagtgataccaagagtacgccagcatgacatagcaaaagggcaagtgagaagggcatggacaatagactcgacttgatcagtacaaacggggcagattgcagagatgcttacatgttttgtcaccagttgaaggccaggtgggaagacagtcagtgatggcacggcccataacaaattcttgaccttggccggatccttcaattgccacagtttacgccaaaatccagaattatcagagccgacatgttgggttttgtttttctgaagcagtaaataggcattttt

SEQ ID NO: 153945 - DNA, 669 bp, Cannabis sativa
aaaaaaaaaaaaaaaaaacccgcttaatttgggacaaagatttgaatttatttgtacctaataaaattataaaattgtacgtacacttcaacatatataaaaattaatttaatacaagtttgagatttccagtctaggtctcgggtcggtattggggtcgagtttattaaaaatatattataacataatctaatctattaatacaagttaatataaaaagtaatagggtaaatatcattttagaccatgtattttgtaaaagttaccaattggatcctttgttttgttaaataacaaaatggatactgtattttctaaaattatacgaataggactctgaactaattttttgtcaaaataaaacttaattataatctgatctagagatgttatgataaaactggttctattttctatatttattcatgttaaaaattattttttttttttaagaaaaatgttaaaaattatcttaaagtaagttatatttaaaaaaaaaattattgaaaattgagtttaaagtcttatttttaccattttaaaaaatataagatctattttatcatttaacaaatacctttcgtaaaacagaagatccaaaatattatttaccattatatttttttttttttttttttttttttgaaaaaatttacggtttgggttgct

SEQ ID NO: 153946 - DNA, 827 bp, Cannabis sativa
  modified_base (651)..(654): a, c, t, g, unknown or other
aataattatttgttgtgactaaaaatcaaatttagtcacaaaaaatttatgttgtaactaaaaagttgtcactaaaaatagcagttttttatagaggtgcgaaacataaatacttaacgcaagttttagtatcgaaatagacttttgtaacttaatatattcaagttttagtatcgtctctattgcacgtcacatactaataagaaactaaaggagaagggaaataatgctaaagtcaaaggaaaagaagtttgagaagaagttgtggatcttttggagcagtcttttcgtttattttttttttcttttagataactggttttagtaatgaatatgatacttaaccgtttaaatgtttttatttcaattttgttattttggatgtgttatttcaaacacactatgttacaattattaaataaaattgatgttatatactataagaaactaactttttagcaacaaaattttagctaccaaatatagttggtagcatttaattaatattagttaataaattttcgtagcaaaatgattttgtagcaagttccaataaaaaactactatatgagtttcctaccaaatattttagtagcaaatttatatttttagctacaattatcttcgatagctaacattttgagcactaannnnaaatttgctactaaattttagtagcaaaatgagttttaatcaaaatgacactaaatatgtttgttactgggggcatatgaatacttttagctaataatattttttgtagctaaaattatatattggcgtaaaatataaaattgatgcattttgtgtatattggaatttattgc

SEQ ID NO: 153947 - DNA, 576 bp, Cannabis sativa
aattctagacgtcatactaaccgtgtacgcagggaacgaagaaccaaccctgaaggtttggacctgaaccatccaacgtcgagggaccaatccgtaaggtatcgaaaccagggcacacaggttgatgaagaccctgaatgacgcagtcctcacagtcgaccatcaagagacaacgacgcagaatcagcctcttcatcattgcatggtcgtacaccgagtagatatacaaggtccggctctgtagaaacgcagcagggaggacgttatcaggtacatcgaggtgatctgagtgatcacctcaacgcagtttttagagcgcgttctcgcgcccctcataacgcaaagacactctgtgatccccatgcgggcaatcagggtgtgaacactcacaataatccgcctaccgcgctgatcgcgaccactgggatcactgtcccagcgaacctcgccgcagtagttgcgactctcgcactgcgactggagggattgaccaaagaatgcttctgcaggctttgaaaatgctggagcagtaacgaaagcccatatacaagttgcatgggacctcacccttcacta

SEQ ID NO: 153948 - DNA, 655 bp, Cannabis sativa
ttatcatggattgtgtgactgaccatgcgggctttaatcctggccttgatatgtaagttttcgaatttatttttctttatgtcaagctgaagtatgcttgtacctaacttagagggaggtttagtagcttattctatgcgttaaaatttcgttgcataagttctctgtgctagtttgatgcatagtatggcgtgggtgcccccaagtgaacacacaaacttatggtctcttggtcacttgcaattcacaaagtttcatagacctttcctgagacttttcttcgagtgctacctattgtatgcatgtggagttgaaaaagaataactttgagaagttaatcttattagcaagtggtttagacataataaattgaacataaacattattttttattcattaattagtctttattattgtgcaactcacataaaaaaaattgaatctacaagcttacataacacatttttgcttcaagatatcaagttctacccctgcttgtcttgcatagcggagaccactgttaaagaatagtgggaatccacgccaaaaaggccatgggtactagctcttttgtactctaatgctgagtaggtagaactactactttggagtagtgttctgtaagctggtaattgatagtatttgtgaaggtgct

SEQ ID NO: 153949 - DNA, 667 bp, Cannabis sativa
atgtatattctattattatatgtagtttttttttctacctacaattcaaaataaaagtaaacgtttctttatacatataatttttttcttcgtttgagtttattatttgttatttattttaatgtgttgttggagacataaaataattataatttgttttattttgttaccagttatgtgaaaaaaaatatttattttcataaatattaaataatttaatattaaaaagtaacaaatccaatccgcaattggattggatttgagccattgtgcggattggattggatccaaaaaaagaaatctgcacttagtgcgaatcggatgcactataaacaaaatagtgcggattggattggatgaacaaccctagtataaacttgctgcaattgatttattgtgttgtgtcctttgagtggtggagtaaactgaatatatgtgtttttaagattaattatgatgctataatatttttcatttgtctttattttagtttcttttgtaaaatgatttgggaatcagacgaccaattagttggcccgttcttttgattctaatctagttgtgtttataacgggagagatgtcccgattgaattcacgactacaaaaactattattctcatcggtcctcaaactcaatcattagaatttcaactgaagataattac

SEQ ID NO: 153950 - DNA, 596 bp, Cannabis sativa
tgtttcctctaaccatgttgttttttattctgtgcagacatgtctcagaagatgcttgacgctctgaagaagagaattggtggaggctccagtgcatctccccagccaagaagtctaaagacggtgagggaatctcttccaaggaaaagacgcctgctggggaggtcatcgatctttctgaagaactgacaactacaaacccctccactccaaaagtttcccagtcgaaggagtctcgaggagggagttcggataggtcttaacaaccgagagatgggtcttagctggtgcggacctctactccacctatgtcggtgcatccggaggccaagaaaggcaaagagatgcttgctcactatatgaaccggttggttcctgaggctagtgagcagctggacgatgctgacaatgactcttctctagagctactggtgggaggagtcttgaaggagttcacaagggtaagtctttcttgacgattttctttaatcctctttactgggctcaaatactcaagtttttcgtttgtgcaggccggtctgaagttgcctacacctactcccgggtaagtttgcttcttccaagaacacggcttt

SEQ ID NO: 153951 - DNA, 563 bp, Cannabis sativa
  modified_base (32)..(35): a, c, t, g, unknown or other
ttaaaattctgtgaaaccgtatttttataatnnnntttgttatttttgtgtatttgtgttagactttgggataagatgaatgaggttctttctcaaaatcaattggcaatgggaggagtagctcattcattttatatgtggtaatttatgtccacacattagcaatgtgggactaactctaatacaccctcttcacgttagatcctagaaagtgtgggtataacgaacgacttttaaaaaaccacagggtcgaacataacatttgaaagaatcccacaaggccaaatatcaaaaaatttgtaggtgtacacatcaggaaatttgtgaattttaaaacaggtcaaagacatcaacattggaaactagcacacattagctgagaggtcacaaatggaggttaaggctcatctttttggaccggcgatactttgggctgacaacagatcacaagatgcttttttctggaaatcggatactcattagagtttagtttgactctgataccatgttagaatttgggataagatgaatggggttccatctcaaaaccaattggcaatggg

SEQ ID NO: 153952 - DNA, 566 bp, Cannabis sativa
atcaactagacataccacaaacatgtttgaggcatcaaaattagatttggagcaagttcatttttgagcaccggagcacctggtgcttggcaccttaacgcccaggttgacaatttgtcaatctgggcaccttccaagtatcagatcaactataaaacttttgcatgttcttcttcttcctcaaaaatggggatataggtactttcagggaagaaacaacacttactgggtgccaaaagcaaggcccagcgcccaggttgagatttgtcaacctaggccgattctgattatgttttgcgagaactcttccaagcatcttctttgttttcaaaaaagattaagatttaactatttccgagaactaaacgaaacttttaaaaggctataattgggacccggcgcccaggttgacacctagcactgggccaagctcctaggttgtcatattatcaacctgggttgttttcaatcaagttctcaaaaaagggtttccagggcatttttctcgtcatcggaaataatgaatattcaagtaaactcacggagaaaaccacaaacccgagccc

SEQ ID NO: 153953 - DNA, 831 bp, Cannabis sativa
cgtcgccggacactccagccggtactcgagagcattgggaacagccaacctgtattcggggctcgcgcagggcccggttatctcccatggcttcttgaagtaccgctttagggtttgtataagagaagaggtggccgacgagacagatttcgccatagttctctgcgtccaaagagagaaatccaaccgcgaaatttgggatattggtgattgggacgattatgtaatttgtgaattttttacgggattttttcaaaaatatacctaaaatacaaaataattacaaaactaacttaacaaatctcaattatgataagggatttttttcaaaaatatacttaaaatataaaataattacaaaaataacttaataaatctcaattacaataataccttacacgtcatcgaaaaatactttaattctaaataatatgcctgaaatgaactaatcccgaaattctcttcttttttttttttttttaattttcctgcgtttcaaaagtaactttttgattacttatgatattgataagaaatcagtaagtaacttttttcataaaaaagtatcacttttatattatgtaatgtgaggtatattttggatacctataaaacttacgtgtatacactttaataataaattatttatttagattatatttatacatttgagtaaccttcaagtttattttcgaaaatagtgagttatcatcattcagttagttgtcattttaataaactatattttaaaaaaatatatatcatgaatgtttaaatcacccatattttttaaatataaattaatatatacattttgaatagttaaataaa

SEQ ID NO: 153954 - DNA, 583 bp, Cannabis sativa
ataatattttttttttcaattatttattgtattatttgtaaataaaataaaaaatacctaacataaaactaagtatacgtgcttggcacctaacttttttctagtattacaatacacgtgaataatagttaacacataatataataatctcatcatatatatctctcaaatttaaccaaaaaaaaagtgtagaagttgtccatgataaaaaaaaatacaaaaagtcggaatactaagtacagaaaaattctacaatgcaaccttttaaaatatgtagactaatgtacttctatttattttgacatttagaataattttagggtttaatttttttcatagtcatgtatgttgtagttatttaagacatcctataaaattttgaaacttttaaaaaaattcaacacgccataaatagaattgaaatagtctgttatacgcgtaatttttttattttatatgcatgtaaaataaaacatttgaacacttttttctatattataaattattttaaatttcttaaaattttacagaatatcttaaataactataacgtatacgaatataaaaaaaagagtaatttgcg

SEQ ID NO: 153955 - DNA, 626 bp, Cannabis sativa
  modified_base (458)..(458): a, c, t, g, unknown or other
  modified_base (561)..(562): a, c, t, g, unknown or other
gtttagttgtgcatgaaatatctgctagattttagcattagcggaggagaaaggggttgtagcttcttttctcaacttgaattttcttaataaaccttttttctttttccttggcctaactggtaactgatacttcagggagtggcacttttcacttaacgatattatctaatagtattaatttaccaaaatcttgctaaaacagatatgtaaattatgttattattcatgtcagcttaccaacgaatataaatacaacgcaattgagacattttcaataaagaatatcatgcaaccacgacaagagtatgatcatccagcaaaaaagaagtagggtgtgttcttgtaaaaaaattcattataaggacaaaattttaatttatataaaaataagtttaatttttgtaaaaaaaaattgtaaatattacaattaaatggcttaattgttaaaataattnagccaaatgatttatatataaataaaaaaaaattgtttataaattttaattgcttagaaaggtctatattaaatatttatttaattacttaaaaaatagttanntataattaattaattctaaaaatggaatttttacctattcgtaacctgctattataggtaaaaa

SEQ ID NO: 153956 - DNA, 940 bp, Cannabis sativa
tctatttaaactttgacactagtgtttggttttgtggaaacgtgagatcaaacaatatatgaaatatatgagtcactttacattttttttttttttaaccatcatgattatatttttgttgacctataattacagggtatcaacatgtaatttttttttaaaaaaaattaaattaactataatcaactatttcttaaaataattaatttttaatttaaatatttaataagaccttttttaacaattaatataaataattttatttttatatttaagtctctattataattttttaaaaattaaacaatttaattataatatctacaataaaattttgtaattttataaaatttaaactttcacccattctaaaatatatttttgaataattaatcacaaaatctgagaatagtgcaaaatactagaatataagaattcatgatttatatatcatatttaaacctccattttattcgtatatcattttagacacaacttgaaaataaactaacaatttcatatatgtatatttttatcattaacacatattcgagatcaataactaataacaattaatattttttaaattttcaataatacatattcaagatcagtaaccaataacaattattaactttcaaactttttcaataacacgtattcaagatcaataaccgataacagttagtaatttttaaaccttcaataatatatattagatcaataatcaaaacgattaataatttttaaacttttacaattttttatttttctatgattcctctccgatcaaatgatacatatacaatattgttatagtgagatttttctcacctaaaaactcgagaccagactcctgttcggaggacacatgtactcaatttccccacggaaagctgagatgtcaataagagactcctcgagtttagacctcgcctga

SEQ ID NO: 153957 - DNA, 776 bp, Cannabis sativa
gtttttcaaaatttctaaaatggaagaaataatgcaaaggtggttcctttttcttattttatactcttgaaatcattttcgtcggatcagggagatgtttgatcatgcagacagagtttgaaatggaagtggaaaaatggtcatttaatgttgatgtgcctcgaaactgcaaaatcgccaaaattagaggacatgcattttttcaaaagggattatgacaaatataccctctgtattcattaaaaagcactttttattaaaaagagctttttaagggacaattgttatacccaaaatttggctagcacattagagaaggacacgtgtcaaactgggaagaatatgaaccaacacacataattataattacatttaaggtggaataactcgttaaaagtgaaattgacagagtatatttacaactcggttgactgaatagtcttatacgagataaagatatacaaactgttgcctcgcgtattaacgagaaaccatataacttcaggtgtacaaggcgaggcatcaacctcgttacgcattagaagacgagatataacgactaatgagatacttaatgtatattacacagtaagatagtcccataagcacatacaactaatagcgagatgttcatctcactataagaaggcgcgctcgtggtattctcaccaatcaaccttagacatcttttagtaagattcatagctccgtcgagtcagttctctcagataggagctgacattcaaatgatgttgactgttgaagttcaccttgtc

SEQ ID NO: 153958 - DNA, 612 bp, Cannabis sativa
gagttgttcctaatctattaaataaatatgcattagggtgtctcagtgactgattcgtttggccgatcacttggccggaactgttaacctgggtggagttattaggtacaacctctcctgatgaattactagataaggtctggtcgcctaccgcttggcccacaggcagaacttgtgacgggggatcgggcggctgaccattcagagtctgagaagccttcccagctggatcttcgtctgactcgcccagtgggatgctggtcgcaggttgctgattagtagcttgataggatcttcgtatcagtacggtggcctgtcttgttcggtcgtcaattgctgcttgttgagccctcaacgtttccacctctttatccctccattcagcgaacatatgcctttgttcttaaaatgcaaggttcactgcagtacggagttcttcccgatcatgatgtagagtattagtatggccttgtataagtccaagagcatcacggaggttctagatctcggtgttgtctccaacggttcttcatacatttgttgctggcgaaactcaagtactaggtttacccagattggctgttgaactagtatttccagtctcttgcacac

SEQ ID NO: 153959 - DNA, 569 bp, Cannabis sativa
acatatatatgtgtggactgtggaggtgtatatatttttttccttttcttttggttccaacaatgtttaatagctaatacactatatatatactaaattaatattatgtgccactataaaagaaaaattactgtgaaaattttttagtcacataattttttgtgactaaatataacttttacttataaaataaaaaattacttataattaaaacatattatttagatacaaattataactgatttaactttagtcacaagttttgatataattataagaaaaaaattttgtagtgtgtaatgcgcacgtatatttaattacattcttaatttttattttaattatgtatatttttaattgcataactagtttttttaatattattcaacaaacaacatatttttttattaaaaaatatttaatttaaatactatttataaaaatatatataagaatatatttattgttaattaattatgattttagttttaaccctaatacttataattttataatacttttattttttttaaaatatcatatacttttttttaattatttttaaataa

SEQ ID NO: 153960 - DNA, 619 bp, Cannabis sativa
tgcatttctttgttcaattaaattaattttatcacattaatattgtgtatttattgctcttttctatcaaaggaaataatatttttagttgtctattttcttattttggaaatttcttgtagaagagaataaattctcttattgaaagttagtttttatggaaactttgactattgtaatttcgattgtgtcttgataaaatcaaatcaagtacactatttttgccaggtatcaagtccatattcatgatcggacacctatttggcaagtttccttttctgttttagtttgctactgcagaactttattctgatgctaccaaataggattttcttttaggaaagtttgtacaattgtggaatcgattttgtggttgtctctagggttcttatattctataaatagaacttatagagcaaccaagtataatgcttcacattttgaggaacatttgttgccagtcggcaggtggattagcattattaaccccggcatcatcccggattctgcgaaggcacaggcaatgtcggtggattgatttggttattaccaagctctacgtgcttgccctatggtctagatgattgtggagggtccattttctcaaataaccctgtaa

SEQ ID NO: 153961 - DNA, 1058 bp, Cannabis sativa
  modified_base (992)..(992): a, c, t, g, unknown or other
ggctcatgtgttgtttgatactggtgcatcacattcctttatatctttattgtttgctagtatgttgggtttgagttggaaaacgtttagtcctacgttacatgtgagtgtactaatgggaggcacggtgaggtatccaccatatgtaggtcagtttgtattctgtttgagggatacaagttgtctggaaacttactagtgttgtctatggggcaatttaatgtaattcttggtatgaattggttgtctaaataccaagctattgtggattgttcacgcaaaagagtgagtcttttaacccctagtggtgatttcattgtttaccgagccaacatgagcacagtgagacaaaatcctatcttaagggcatgcttaggtggaaagagaaacttagagtgttatgggaatctttttgcgatcgaggatgagtttagagatttagaccaattctcttagatattagtgattagtggttttttcggatgtgtttctagaggatataccagggttacaacctgataaggagatcgagttttgctttgattttattcccggagctcaaccaatttttattgtgccttaccgcatgacacctgcagagtttgctaaattgaaaaaacaattaggggagttaatggataagggttacatcagacatagtacttcttcatggtgagctctagtcttgtttgccaagaaaactgatggaactttccgactttatgtcagctatagaaagttgaatcatatgtcaattaaaagcaaatatcctttatcgaggattgatgaattatttgatcaacttggttgttcaaagttcttttcaaagattgacttgaggttaggctaccatcaattgaggattagggaagaagatatccctaagactactttcaggacacgttatggacactttgagtttttggtgatgtcgtttgggataacaaatgcacctgctgcatttataaatctcatgaatagagtctttaganctttcttggataagtttgtggtggtattcattgatgatatcctggtatattctaagacacgtgagg

SEQ ID NO: 153962 - DNA, 608 bp, Cannabis sativa
  modified_base (556)..(559): a, c, t, g, unknown or other
aattgtattttctaaaaaaaaaaaaaatagctaaactcctccatctctcccccaattgaaaaatatatatttttttttgataaggagtcatttactcaaaaaataaaaccatagtcaaaaaaacaaagtcaagctcccccagaaaacgaagcaacctcaaacttgaatagaaaaactcatacttagttcttctagttataaaaaaataatttaatatcatttaaataaaattaattatttaaaaatttattatacaagaagagaattctaatttgtgtaaaaaagaagtctaatgtttgtaaaaaaaaaaaataaagttttattgtaaataatataattaaatgacttaactgttaaaataattatagtagagatttatataaaaaaaattatttataataatcaattgctaaaagaggtcttgttaaatattcaattaattatttttaaaaaataattaattataattaattgattctaaaaaggaaagttttacctattggtagtgtaacactaaaacttgcataggcgtattaacgtgattttaaacatactnnnnagctcgttgctaatcaacgagattcatgaaaatcgtgattaattaaaat

SEQ ID NO: 153963 - DNA, 650 bp, Cannabis sativa
aaaattatccttggaagtcaaccggatgatgttccggtcttccccgacagtcgagcaagcttttgagctctatccctaagagcaagagtgaggggagggcaatgatatgttggaatctattggaacagagtctgggggatgcctgcgccatccacaaagaagtactcatcaacaaaacaccctattttgctgatggccgagccatcggtgcccgtcaaccacttgaagtctggttgagagaaatagaagtaccccgaacttccttgtttgggagtggacttcaaatcaaagaaccaactgacctcgtggggagaaggcataccccacttctgggaagcgtagaggacaaagagggtagacagatatttaatgcccttaggagtgaactgggttgggcagaggccgaagaagtccgccacatccttaaagtattgatgcaaaggcatcaacgccccttgttgggcatgagcgcccgaccaagcgcgcatccccctttcagggtttgtggctcgattgttgtgggcgggaatgtagcagtccaactcacccaggtagccatcctggtcgggagaccgcaggcacgcctcagtaaccctagacggaggactcacccacctagcgcccaaggcactttgcctcctatgaggaac

SEQ ID NO: 153964 - DNA, 555 bp, Cannabis sativa
tacaacgttgctgcccacctacccgttctgatggtccgaaaaattattaagccagaaatggcagaagaagatgagttggatccccgcgtgggatctgagaaaattgtagaaccaattgaggatgtcgagaaactgtcagtgtgcgacctcgactccactaaagtcctccggctaggaaagagcctagaacctgaggaaaaagaaaaaataataaagacactgaggggcaccacggacgttttcgtgtggtgtcaagaagacacaaccggcataagtccccacgtcataacccacgtccttaatgtcaatccggacatgcctctggttcagcagaagcgacgtcccctcgactcagtgaaggctgaagccttagagaaagaggtggaaaaacttctaacgagtggcatgatgcgagatgtcgactacccagaatgggttaccaatccggtactggtgctaaagcccaacgaaacatggcgggtttttatagacttcactgatctaaacaaggcctgcccaaaagattatttccctttgccaaggatcgaccagatg

SEQ ID NO: 153965 - DNA, 705 bp, Cannabis sativa
  modified_base (161)..(161): a, c, t, g, unknown or other
gggtacgggttcgggtcgagttttagtccaagtttgggttcaggtctttatttgggtttcgagggaggtgggtttcgatctcggtgagggtccgagctttggtctgtttctaggttcgggtccgggtcaaggtcccagtcccattccaagatcctagtctngttccaattcaagttttggttttggttggcgagtgtgggttatggtctgggtatgtgttcgagtcgtggtttgatttcgagtttgggttcgggttctagtctatgtcccaaatcctgacaccgactaagggtcgggtccaagcatcaagtcccagatcccaggtcctgaggtgggtcctaggtccaggtttttgtctggggtctagtctcgattcccgatttaagttttgaggcccaagttttgctccaagtttgggggcccaattcccgggtctgggtcccccatctatgttcaggtcttaggtccctgtctaggtcaaaatttgttttcttgttcgggttcgcgtctcgagtcctagtctgagtccatgttccagtttgggcttaggtccgagttcgtatccatgtcccagtgtgggcttgagtttcgggtcgcaggtctgagtctggttcttatgtcatggggtcgggcctagtttttgggtcagggtttgggtttcggttcgggtcccggtctttgtttaggtcccaagtcataggtccc

SEQ ID NO: 153966 - DNA, 612 bp, Cannabis sativa
ttactttattgatatagaataatctggattacattgaaacagagttttatatagggcataaaacccaacagaaaggaggtgctagggccaaatagtatgctcaggagtcttcaaatcctgaggatgaggctgaggacgagcaggtaactccgctgaagaggaagaagaaactcctggccacgcccagggagcccatttcatctgttcgtccatctcccccctttttcggaaaagggaaagctgtcatgtctgagataggatcgatgtcaggtgataatggacttctgagtcttgtgcgggtggtcaccttgcattttactttctcttattcttcagcttcttgattttcatgccttgtgttttctgatggctgttttctaaccatactgtttttgttctgtgcagacatgggcggaagctctaacgtctctcctccggccaagaagtctaagggcgttgagggaccctcttcaaaggaaaagagaccttctggagaggtcatttatctttcttaggagctgactgctgcaaacccctctacccccaagtctgccaagtcgaaggagtcttgaccaccaacggctgggtctgaatgttaggctatttttagcc

SEQ ID NO: 153967 - DNA, 652 bp, Cannabis sativa
ccatacaaagatctattaagcttgaaaactaattcaactcttttcccttccacctgaaatctaggtggttgcttcatatagatctcttcatctaagaacccatttaaaaaagtagtcttaacattatgctgttcaacttcaaactccaaatgtgttgccaaggataacatcaaccttatcgtcttgtactttaccacaggtgagaagattccagtatagtctataccttccacctgagtaaaatccttagccactaacctggctttgaacctcactggttcattctcattgattccttctttcaccttgaggatccatttgcactccacaatcttcttgttctctggctttggcacaacaacccaagtcttgttttttcgtatagaatccatctcctcatccatggcctggagccatttagacttgtttccgcctaaaattgcctcttcatagcttccgggctcttcaattttagtttgttgaactgccgccagtgcaaatgctattatgtttacttctgcgaaccttgctggaggttgaatccctctccgaattctatcatgagccaactgataaccttccaaacctgtctgtttgaacccttctggcacctttgttaggtcttcgttatcttgttcttctggctccataa

SEQ ID NO: 153968 - DNA, 543 bp, Cannabis sativa
gggattgcacagcttacccggtatttccccttacagatcacgggactactgactgtcacacacagttcgttactgcattggtaaaagtaacttttaccagcgcatttcgcaaactgcattggcaaagaggtcaaaattttaccagtgttcatttggagtggctaaaatctaacttttaccagcgcatttacgcgctgggaaaagtcatttttgccagcgctttttattttatgttggcaaaagttctaataccaacattgatttgccgaccctcgttttccaacacatcacaagtaaattttattttaccagcgcaataccaacttttgccagcacaaaaatgtgctggcaaagtgacatttcttgtagtggaagcatcacaaacttctcttttctaattccaaaattgtctatactattgcaattacttcattttgatttatggagtgttgcacctattaattcctctagtggttacaggtactatattagctttgttgatgccttcgatctcaaggcacacttggatctacatgcttagaa

SEQ ID NO: 153969 - DNA, 604 bp, Cannabis sativa
tatttaaaattacatacatagaaaaaaaatacatatacagaagggcccattttttttaatttgctaaaaccgtcttgggcccattttttttagggtcggccctggctttatgcattgttgttgatttcgaatcataatgatgatgatgatgatgatgctgtgttggacatgcatcatcaattgtgaataccaaatcaaaagaagcaatggccaatgttacaaattttgttctattctacatagataaatattggctaattaatgatattgatgatcatcatcgtgatgtgttcatatggtgtctttaccacaaagaaatttatgattatttacataatgatgagccattgccaaaggggtctttattatttgagttttacttggaatcaaatgatgatagcaggagctgtggcggtacaaagagaataaaacaaaactacaatcaaaatgaatgaataatttaaacattcaagtgtgatcagctgtatcagagaaagaagaagagagaaaagaaagagaaagagtgagctgaaagagtagcttcattgaatctgaaaagagttacaacagctttatatacaggccaagaaccaaacagaaaaac

SEQ ID NO: 153970 - DNA, 557 bp, Cannabis sativa
taatcacattttattttacttattttaatacaatttattttcacattaagatataatattcgtgtgtgcattttattattatttacttttgttattttaaattatagtaaagcactacatggtttattttgttacttttctagaatgagaatattttaaatacatatatatgtatataatataagcacaatattttaaatataaagaaaaaatttaaataatatacttattttttcttcatattccacaatataaaaatatatttaaaataacatatagcaacgtacaatgtttattaataattttattaatgataacacttataatacaagtgttgcataatgtttattttttgtaaaattaaaaattatattaggcaacactttgtaagtgttgcaataggatcctaccttttagcaacagtttaggagacaacacttatacaagtgttgcattttaggtttctttagttaaaaaaaagtgttaccaaatgtgttttttctagtagtgacagtgaacttttcaatgtagcaaaacctagaaacctcaaaagaaaa

SEQ ID NO: 153971 - DNA, 597 bp, Cannabis sativa
  modified_base (167)..(167): a, c, t, g, unknown or other
tctagaattgagaaattataactctaatgcccatttctaacaatggggtccacaaataattaaattcataaataattataaatacaacataaattagtgctaattgcctttactaatcccaattactaaaagcggtcattacaattatcccccgttaaaaggatttngtcctcgaaatctaacctgaattgctctggatgttgagtcctcatatcagactttaactcccaaggtggattcctccaccttactgttcctcaggagcaccttaaccaaagctatggtcttattccgaagaactttctcctttctatcaaggatctgaagaggttgctctcataggataagtttgattgcagttcaagggcttcataactcaagatatgagtcaattctgaaacatatttcctcaacattaaaaatatggaatacatcatggacgaccgacagtgttgatggtaaggctagccgatacgctacctgcccgacattctcaagtatttgaatggcccaatgaacctagggctcaatttacccttcttcccgaagcgcctaatacctttcattggtgaaactcgcaggaaaacatgctcccct

SEQ ID NO: 153972 - DNA, 611 bp, Cannabis sativa
ctactaagcatcctcttcttcaagaggaacacggtggatcggagtaaaagtccatcctttacgtatgtgtatcaacagtcaccggccaaagagcctaataaaatggacttctggactaaggataattaacgcttgaactacattaaaatttgttgtctgtattcttaacatttacgattttattactttcttaagctttataattattctattgccgaaaaattcggtaaacattttggtgcttttataaagatctgaagaaagaaatatgcacggcggttactggtgtgagactgcctggaagaaggtccgtgaaagaaaaaaaggaagacctcctgaccatttgtcgaggtttggccgaaggccacaaatgtgcgaatccaaggtgttgctcagaaagagacttgatgcctcaatctactcaagaaaggtggcaaagatgaatgcaagtagtctcaaaacacctgatgcaccgacacccgtcctcaaaagctcagatctggccaaccaaatctttttaggtgggatctacctgtcggaaatattttaccaggatctaaatttactaccaagtatgtttcattaacatcataatatgaattctaaaacaa

SEQ ID NO: 153973 - DNA, 543 bp, Cannabis sativa
  modified_base (51)..(61): a, c, t, g, unknown or other
  modified_base (499)..(516): a, c, t, g, unknown or other
aacatgcaaaattatgaaattctaaatatgacatataaaatgcattctgannnnnnnnnnntcatcataaataaataattcaaagctattaaaaaattttcataattaaaccctaattatctgctaatttctaaattaaagcgaagcagtctttacagtaggaaatggccctagcgccgagacagtggtctgccccttgtggcaccttttttggtgaagacaaatttgccaagttggatggccaacttggttttcatcattttttaatgcttcgtacttttatgcttgatctttaatacgtacttgttcgcttgcttttcattcacaatttaaacaatcatattttgatcaaatacttcaggagtttccattgctcgtatatccctttgattctatgtagttaatagtctactatatgcgcgagtagtttattatctgccaagcttttagtttgcgagtagttatattttctgcctcgcaataacagttataatctgtnnnnnnnnnnnnnnnnnntacttttaatgattttatcactttgta

SEQ ID NO: 153974 - DNA, 508 bp, Cannabis sativa
tatattttaatttaataaaagaaaataaaaaaaataggttattaaagtttttaatattttttattgttcaaataaattttttatgaagtggactaataaaattttgacacatgacaattttaagaactacaaacaaagctgttaaattatgtacctatagactaacgagaatcttaagcttgtggacttttactataattttttgagatgagagacttatctgtatcaaagtgaacttttggggaacttatttcgcaatttaatatcaacacgtgatatttttggagcaactaacatatgtgttaaaatgaggattaacagacttataggattctcgagcttgagtactattaccgctattttttgaagttgggaatttatctgcatcaaagtaaattttttaaggacttttgttacaatttttcctaattgatttggaactatgtaaaatgataagggataattgcggtaaaagtctccaaaaacttaaggttgatgcaggttagtc

SEQ ID NO: 153975 - DNA, 521 bp, Cannabis sativa
acttagaagattgaaagagacttcatattaatgataaatcaaagagaagagcttgcagtaaatacatctttcaactgcctatataaatatttttatatatatagttcacaagtaaaattattatctttgaaaatatatagttaaatttctgttgagtcatgttaactctcacagttgtagtaaaaaatggtatgggtattagaaagagttcccttagaaaaccttgcatcaagacaaacaagtagttagctattgttaataaggatatagatattgcaacatcatcaatatacagatatttgttcattttgccttacaaggtagtaagatttgactaactttctatgaaattaaatcaggtatcttgcctgtaagtctaatatctaatgcctatctacacaagttatagaaaaaagggaaataactcgtaaataaaagatgatcattttataattcgacaacaaactttttaaacttattttaaatcatgtcatatcatcatgagagggtacatagaataa

SEQ ID NO: 153976 - DNA, 713 bp, Cannabis sativa
  modified_base (141)..(142): a, c, t, g, unknown or other
  modified_base (389)..(397): a, c, t, g, unknown or other
gtccgagtcccaagttccaataccgatctgagtctggattcagttctgggtctaagtcctttgttctgatttttctttcggttcgagtttgggtccgtctcaaggtctagctttgtctcttattctaggtgtgggtttganntcgggtccgagtctgtgtccgggcatgtgtcctggtctggatcccaatctttgtctagtttcgggtctaggtccaagttcgggtccaagtttgtgtctgggtcaggatctcggtctagatctaggtccagcatttcgatccctgtcttggtcttggtccgagtccaggttcgtatccggatccctatctaggtccaattctgtgtttgggaacgggtcccaaatttaggtccaggtccgggactcannnnnnnnntgggtacacgaccgtgtcccggcctgagtttcgttctaggtctgggtgtgggtcctggtcacggtcgtagtcttgttctagggtcctgatttgaccatttttgttaggttctaattttgggtcccaggtctaggttagggttcgggtttggttcttccttttggttcttgtcctagtctgagtcccaaatctaggaaccgacttctggtctgttcctggcccctttacccgaatcttgagtgaagatctggatcactgtcacgggtctcggtatggttctagttcaggtcccaggtcccatttctgagttcgggtt

SEQ ID NO: 153977 - DNA, 839 bp, Cannabis sativa
aagccaaccggtagaccggttcctacaggcctccctgaaccggaattcaggttcagtgcaggaatttttcaaaattccatttcttaaccaactcaaccccaaacttcatgcaaccatccactcctgctaattagaccccaatgaccatattccaaatgataaaacaaagcttcaatcacagaaacgagttttgccattaatgagccaagcttgagttcaaaactccaaagcttgctcaaacaaccaacagccactaaatcaagcataaatccacatagaaactcataactaagcctctggatacaaccacaaataactacagcaactatagcaagctaaacaacatttcactcataaaaaccaaagttttgagttaaaaattccaaacttacttcaatccaaccaacatgcatcaaaacctgttctaaaccactcaatgaaacatactttaactacagaaatcataacccaatcacaacaacaagaacagtaagcaaaacatcaaaacatgcataattcactctctttaaaaacaagaaattaaaagaaagttgctagagatcatacccaaaacttgagaccaccactttccttaaaagaattagctgaatttccacagaaaaaaccccaaaacccagctgccctaggatttcaagagagagagagagacagtgaagagagaaagctttttcccaatttttcttatttttgaaaattaaatggaatgaagtaaataatggcttaacttgaattaatatcagctaataatcacaaaaattagatttaaaacccaatattaaatccccactagaagacaaaatacaaatgggcaaaatgac

SEQ ID NO: 153978 - DNA, 503 bp, Cannabis sativa
aattctagaacaccaccaaattctttttattatgtgtgtatatcgatcggtttggtcggtttatattatattttattcaacccaatataaagatcgggttacaaaaatctaagtgcaacccgccctaagaaaaaagaaactagtaactctcctaatgaaattggtcggcttggttggattaacccgtccaaaccgaccactaatatttttttaatttttacatttaataattatattttaattaattgtaataatgaaaaacatatatatatatatatagattggattcaaaatttaaatcaagtcatataaattatatagtatataaatatatataataaaaacatataatatatatattaataaaaactattgcgtttatagtagagaaaaatttgactaattgtaaacctaaattatttttcaatctaaatctaaactatttaatattggtagaatttgttatttttttcctaaaatcccattctctctctctctctctc

SEQ ID NO: 153979 - DNA, 806 bp, Cannabis sativa
  modified_base (580)..(581): a, c, t, g, unknown or other
atatcagaatattattgtaatgttttgtttggaaactattattttttaaaaaattataggtgttattgttttggttttaggtttttaactgtttttttttctggttttttttattggtttttggttttcgtttgtcaattatgtttttgattatttttttgcattttcaaagaaaaattatttttaaaattatttttttcaactggttttttttttagtttttgattgtatgttttgttatatgtttttaactatttttcacgttattattattttttttcctgttatgttttgttatatgtgactttcattattttttaactgttttatgcaaaagtaatattatattattatattttggtatttggaaccggttatttttaaattctatttagagaatcaatgttatatgtgtgtttttaaactagtttttaagttttaactggtttttttaatgttatatatatatttttgtatctgttttaattttgttttcttgtagcattgttcaatgtaatattttgttacaatctgattttatttttgtatttggaaccggtttcatttaatttttatgttnnattgtctaagttagttttttaactggttattttgaatttggtacatatttggtttgcctgttatgtatgtgtttcatacggttgacattgattttctatattgttttaacaggttatttttttttatacatgttcattaaaatgtcgtgtaatgtttatataccagtaatgcttatatacctgtaatgtgtattattgacaattgttattccagttttggttctg

SEQ ID NO: 153980 - DNA, 700 bp, Cannabis sativa
  modified_base (111)..(113): a, c, t, g, unknown or other
tttgtccactaccataatgggatggttaataattatttactatgttagaggcacatgagagcaccctcataactataattatctcattaaattataatataccattattgnnnacttaagcccaattagtaaataacttattagggttagaggggtgtgacatatatatatgtgtgtgtgtgtgtcttaagtgaaaagtggttaatggtaataggaagagaagaggggatagctacacattgtgctctttttcaatcttgagtttgtgattgttttgttggtgactcttggattcaaatggctcacatatagatggctcaatgggaggtatgtgtgtattattttagatgttctaaataaagtattgatcttggatttaatggttataagcaatgatgattatgtttaatgtgtgtttggatagctcataatctatgagatagtttaacaattggtatcaagagctagtatatttgattttagagctccataatatttgaagtaacccatttatttatttatttattttttcaaatctgaatattttttttttattttcggaccaatatgattttaatggatattaaatgttttagaatgtgtttatcttattcttcggatgattattgtatggttttattgtgagattgcaagtttttcattgagtttatcaatggtggaaacccattttcggatttgt

SEQ ID NO: 153981 - DNA, 597 bp, Cannabis sativa
tggatcctgtattttctaaaattgatacaaacagaatcctgaactaattttttgtcaaaataaaactaaattataatccgacctaaagatattttggtaaatctggttatattttttgtatatgttcgtgttgttaatcattttcaagttggttttattaaaaaataaattgtcaaaaattgagcttaaagtcctatttttactattttggaaaatataaggtctattttgtcatttaaccaaacagagagtccaaataataaattttataaaacacagggtctaaaatgatatttacccttttattttttatcataattttttcttgggaagttctatttgcaccccataaaattataaatacaccctattattaaaaaaaatataaacgtaaataatttttagaaatttcatttaatatttttttaaaaaaaaaatttctcacactattttatgttaatttcaatacttattttgatttcatttcaataatattttctaactcatgtacatatatttttattttttttttctaagaaaatttcatataattttttactttaattttttttcttcataatatttaaaatataattt

SEQ ID NO: 153982 - DNA, 608 bp, Cannabis sativa
aataaaactaacactacgtggcttgacacgtaacaatcaactagtaaactttaatatacatgcatgatataattatatacacataatatataagaattttttcatttttacactctaaaacagttttttttacttttttacggaattctacatagaaaccctactgcaaccatcgctgcaacctaaatcgcaataaaaaatcgaatagcaacccacatagcaactaccagtaaatttgaaaaaaaaaataattaaaagaagataattctcctaatatatattatatatggatgtctcatataaatacataaaaatcattattctatatatttaatctcactaatttataatatatcacatactttacatatatataatatatattactcatatatacatgctatatatatatattatatatctcacatatatacatatagggagctaatataataggtattgtaatttttacctatcaatagggataataatttattgtcattgatttatccaatggctcaaatcaactcttgaaaactacaccaaaattaatatattttttttatttataattaattttgaaaattattaattacaagttcaactaa

SEQ ID NO: 153983 - DNA, 1101 bp, Cannabis sativa
  modified_base (84)..(98): a, c, t, g, unknown or other
gcgatcaaggggcaagccttggcagatttcattctcgagttcctgagtactgaagtggcactcataaacgacaagatcgacacnnnnnnnnnnnnnnnagaagaatggacgttgtacgttgaaggggcttctaatagcgaaggttacggcggtggaatcatactaatcagtaccaacaattttaaggaacacgctgctttacgttttgaattttttgcatctaataatgaagccgagtatgaggatttcatcgcaggattgaagctcactctcgagatgagaatagaatacttacaggctttcagcaactcctaaatcgttgtatgccaggtgaatggagaatatctggccagaggcggtcgcttggttaagtatctcgccatagtatgcgagctgttgcaaaaattcaagaaagtagtcgtgtcccgagtaccgcgtgctcataactcacacgcagacgcattggcccaattcgcctcgactagagaagctgaattattcgatgtaattcctgttgacagtaagttgagaagaagtaatggaaatagatattgcccaagaagtcacctagatgactccaataattgcctatctggagaagggtatcttgcccgatgacaaaatggaagcgagaaaactgcgacagcgggctgcccgatatgtcatctatgatggaagattatatcgcaaaagcttcagtcagccgctactcaaatgtattgacatggaagattgccactacatactccgcgaggtgcacgggggtatctgtgggaatcatactggtggtaattcccttgccctaaaaatcatgcgtcaggggtattactggcctaccctgcgacaagacgctttcaacttcataaagaaatgcgacaaatgtcagcgaatagccacatatgcccatcaacctcctagtcacttacattccatcacaagcccttagccctttgcagtgtggggcatcgacttgataggtaaactaccaaaaggaaaaggctgagtcaagtacgctgtagtcgcagtcgactattttacaaaatgggctgaggccaaagcactagcaaccatcacagcggctaaattgcacgagtttgtcta

SEQ ID NO: 153984 - DNA, 556 bp, Cannabis sativa
aatgggaagaactagggttcccaatttttccccaaccggcagaccggttgtacaaccggaattcgggttctaggaggaacccagaacaccaaccggaatcccggttcctgcaggccatactgaacgggaatttcagttcaatgcaagaatttttcaaaattccataactcgaccaaatcaacaccaaactaattcaaactttccagacctactctaaataccccaaataacagtcccaaagcaataaaacaacccagtaagcacagatacaaatgttgccattaaagctccaagctttgagttcaaaactcaagcttggttaaccccactaacatgcatcaaaacctgcttgaatctactcaaatatgcataattaagcttctgaaaacaacaacaatcaactacaacaagcacagcaacagatttatcatttctccataaaaatcctaagttttgaattaaaattccaaacttgaacaaaaacaactagcatgcatcaaaacctatcctatttcactcaattaaacatttttaagctatagaaaacaacaacaac

SEQ ID NO: 153985 - DNA, 827 bp, Cannabis sativa
  modified_base (666)..(670): a, c, t, g, unknown or other
gtaaaataaatatccaacatcatgtgcctaattatacgactcaccaaatggtcaagaacgttctaaacgaaagtacaacctctgtacgacatgcactgaagtaccacctccgtactagtgttggtagggtcaaattgtactttcgggtgctactgagtgttgtaccacatgcacttcgtacccacttgtactcgtgttggtaacattgtaacatacccttaaacatcatacattgtaccaacatactcagtattacaactattatagcgttggtagtgtaaacaatataattaacatgcattcgtacccatatacacacacatgccacctaggggtaatttggttatttcttatatcctaattattaccaacatttctaatgcctatctaagttgccccactactactaaaatattaaatcataagaaaacgtgactcactattggcccaacgtcacgttctactgttatcaggcacaaatacaaaaaacaagaaatttcatatatatcatgaataacgcatctagaactcaaataaatcttcataaatgcataaatcatggttaataatctaattcataattaaaccttaattatttgctaatctatcatattaaaattaagtggtctttacaattattttcccgttaaaaggattttgtcctcnnnnnctaacctgaatagctctggatattaagttctcatgttggacttcaacttccaagtggcttcttccactttactattcttccagagcaccttaaccagcactatggttttgttttaaagaactttttcctttctatccaggatttgcactggctgctc

SEQ ID NO: 153986 - DNA, 652 bp, Cannabis sativa
gtgtattataattaggtatttaagcttaagtttattaatgaaaattttaattattcacatttttagtaaacaccttaattagcaaaagagggcacagtaatttaaaatcacgataacgtgcctaatttagtaggacattacaatttggtatcagagctgccaggttatctttcgaagatcgtcatgatatgtacaatcatcatgagagataaggtcggctcatggtttagtaagcttttaaatgctttagtagtttgatttattactatgaaataagaaaaacttgttaggaagcatattagtagctcgatagttgaataagtgcatgttttaaattcctaagtaagcgataattaaattttaaccttgatcactgtctaaccaggctaacttatgatttaataggctagtccaatagaatggatgccaggcaaaacacgagaagccaaggaaatttagtttgatccagtggttgtcagggagaagaatcccctaatctatgtggttggggtaaaggctaaagaggtatagcttgtggtcggggtaatgttaatccactgcaggctgtctaggattagaaacagaggtttatagaaatgcaagccataattaatgaacaagatgaaggaatttaacgcttaaggcaacaagg

SEQ ID NO: 153987 - DNA, 825 bp, Cannabis sativa
  modified_base (214)..(216): a, c, t, g, unknown or other
gtgattttaaatgtactgtgcagctcgttgctaatcaacgagattaagaaaaacgtgaataattaaaattttcatacttaattaaaaatataaagtattacatccataaaattctgggatcccgttgcaaaatacatttacaaaagttttgtcgcgtagcgactgtcagcaaaagccttgatgtcccctaaaatcgtacgctccaggcctaacnnncccgacatgtacaatcttcacctactcgttctcacgggtcctcagctttagctttgcccttgcctacaatcttcacatactcactaagaaaagcataacataaaacataataatatcccggattatagccaggcgcccatacacccaaccataatcctaactgagtcaggaatgtattgacaaagtatgactaactgcgaatccaacctatactcagtactctagtcgtgttgatgtggtagcagatatttcatactatctaatagcctagcatatatctgttggcatcttggtgcatctctatgtacacctcactgatgccttgatatgataatctgatgggtatagatttgcctattctaacggcaactaacatgtataaatatatgcataacattatactaatcttacctcaattcttaattcaggtgtgccggtcaacctgagtgggacaactgctcggcgaattataggctcctaaatcacatcgttaacaacatagataagttactcgctaaatcacaactgggacttaggttttaaacgaaaaacctatctacaacaacttaatatggcaataccctaaactagcagggaatcaaccaacta

SEQ ID NO: 153988 - DNA, 562 bp, Cannabis sativa
  modified_base (489)..(500): a, c, t, g, unknown or other
ctgaagttgaaatggccttaaaaatcatgggaccggataaaagccacagaattgatggcatgtctgtcatgttttaccaataaaattggtccatggtgggtgatcttgtaacctccgctgtgttgagtgttctcaataatggcgttgatccttcaggcttaaatcagaccaccatcactctcattccaaaaattaagaagcctcaacgcatgaaagagtacaggcccataagtctttgcaacgttatccatgcttgttacaaaagttctagttgctagattcaaacaagtcctccctttggtaatctctgaaacacaaagctttttcttgtcgaattgtttaataacaaataatatactagtagcttttgagttatttcacgctataagacgaaaggacattgcatgtttgaagctatatatgagtaaggtatttgaccgagtcgaatgtattagggattgttttactaggatttagatttactaccannnnnnnnnnnnaacatcctaaatataaatttctaaaacaatggaattttaatacatataaagtttaagaaacc

SEQ ID NO: 153989 - DNA, 1000 bp, Cannabis sativa
taatattatcacagtttttaataattaattattctattagtattaaactagtttataaaatcactcacgtggcgtccctatagattagggcgctacagtaaaaacatccaaggaatgtactttaagatgcctaagtgatattttgacatcacttagtcagtttatgtgttctggaaaagctggtcaccagttctcagagatgttactgttttacagaaattagagactcaaaactcttcatttctgagtgagctggaaatgagaaatgaaaagttatgaatttgacttctctgacttcatagatctttgttattgtgaaaaactagatagacagttgaaataacatcataattggataagcaaaacccagtgcaccaggccgtttgttacttgggcgctgggtacttacttccaagctcctaggatcttgttttttatacttccaatgctttcaaacttgaggatgaggtcccctctcctatttttgaccattctatattcaatggtcgcatcagatttggcatttgagcaattgaaggcagcgttccaggttcattatcaacctaggtgccaggcccaacaccaagtcaatctgggcgctaggccctatttttaggggctcgggtttgtggtttcctccctaagtttgcttgaatcttcattatttatgatgatggaaaaaaaaaatgcctagaacactttctggtgaacttgattagaaatagcctaggttgacaatatgtcaacttgagcgctaggcccagccccaagtgtcaacttgggcgctaagcccactcccaagtgtcaacctgggcactgggtcctagttttgccccttcagaaattctgtttggttcccaaaaatagttgaatctcaatattttctaaaaacaaagaagatgctcgaaataatactaaaaaaaactacatttaaaatggcctatgttggccagccccaggtgtcagccttcaatctaggcgcagggccagccccaagtgt

SEQ ID NO: 153990 - DNA, 778 bp, Cannabis sativa
acactgcagtgtaataaaagcgtttgtgaaaatgatgttgtctttttgagtactcaaagctcgaggaaatcccgaaaataatctggtccatagattttggttccaagttttaagcaaagaagatttccccaccataacaaagaaaatcgaaaatgatttgatttttgcattgctttcaactcaatgctacattttcttccaactgtcaaactaagcaagcaatagcatcacttagttccaatagtaaatcatagaaatctccaaagtccaacctccaaggttctgaaatcctaaaatttacaaaaaaataaaagtttactattttttccctcccaagtgtcatagcaatagttctatggtgttcattacacaaactcagttcattttatggagaataatataaaagtaaaggcagaacaatgaaaaatgtcaatacaaaattgcaacaccgagaaagtttcgtacacagtaacataccccgatagatactggtgacttttgttgtgttttctcaccggaagcttcaaagcaccgcttccaaagcttttgggtactcagaaaagtttagactttggagggttccttcagacactctttgtaaagattttcccgcttcaagccttcattgggcccaacacgagtgttttcagtgtgctttatccacactaacacacttcctgagaaaactttcctgggtgatgagttctttcatgatgtgctactagaaaacaagatgcaccttgttaatatagctagtatcagtcaatccatttaagct

SEQ ID NO: 153991 - DNA, 512 bp, Cannabis sativa
aaatcaaccccaattcacatgaaaccttccagacctgttctaaacatcctaaagatcattttccaagcaacaaaaccaatacccaaactcagaaacaagagacgccattaaagagccaagcttgagtttaaaaactcaaagctttctcaatcatcaaactagccatcaaaacaagcctaaaacaatatatctaagcataattaaacctcagaaaacaacaacaaccaactatagcaaccacagtagctaataactcaattcatgcaaaatttcatttccttaaaacccaagaaactaaagagaaggatacaagaaattacctagagcttaagatctcctaacgcctgctggaacaagtttgaaatacagaaaaacaatccaaaccctagctgtctctagggggattcaaaaaaagagagacttgagagaaaattgatttttttttttgcttatctttaatatttgtaaaaataaatgaaataaccttgtttttactcaaatattatcagcat

SEQ ID NO: 153992 - DNA, 634 bp, Cannabis sativa
  modified_base (599)..(600): a, c, t, g, unknown or other
aatttctacatggctccttaaccaaaaagttatatggtaatatactgatgttcttgcaacgataatgactagctcatcaatttcaatttctacagttatagcttgttgtatacattcttcattcatctcttttgtatctgaatcactatccattctgctatagaataaacatgtaaatatataattcaaatattttttgaaataaaacaaatattattattcaagaaaacaaataaaccaagttgttcaaaaaataaaataaaatgaactaaacaaaccacaatattcaaacaagtaaaatgaaataacatctcatttagaagttcaactcctgttctttcaaccactcaatttgatatttaagctccttcaaagcaacaaaaatttccctatttgctttcttcatgaacaaattagtaccaactttgaatagagggctcattggttcacaatttgttagtgtagctaatttatccatcacttcttgaacactatatccaggaggatcggtacgtatgtatgagctcttattttttattgcctcacaaatctcatcaagttgtttggaaaactttgctgttgtagaattattccttttnnccttcttaaattgcttcttatttgggtcaagtaa

SEQ ID NO: 153993 - DNA, 588 bp, Cannabis sativa
ttcataaccgaaatcgtttcttaaactatcgataataagatttgcacaattgtttcactaagaatatatataagatcaaagacacaatttaagaccattctcactaacaaaaactccattaacgaacaaaaaagcttcgattacaatcgccacaagatcgatcacgagtttagttccgaaattgttccttaaattaccaaaaatacctcaaaattagagatagaatcgttgctggataaatgaacaactcaatcgacactttagaaaacttgatccaaaacttactctatttctttctattttcctcaatttcaaaagtaactttttgattacttatgatgctgataagaaactaatcagttactttttcataattttttttttcatattgtataatttgagatacattttggttacctctaaaatttatttggaacaccttaataatcaatgatttatttttcggttttattaatacgatgagcatcttcaagtttatttttgcgtaaaaaaaatattgctattattactgttctatcttttctaacaatatactataaatatataccatcaatcaactaacatata

SEQ ID NO: 153994 - DNA, 584 bp, Cannabis sativa
attactcttttattaataataaaagattactaccgattatgtactttgaaaagatttagaaatttattttaaggagaaagaaattcaaataatttcatttggaatattctaacaaaaaattgtacaaatgtttaaatataaatactattttagattctgtattttacaaaataataatttgaacttaatttttatcaaaataaaacttaataataatctgatattgaagtatctgtgactatactaattatatttttttttgcatcgtttcgtgttagaaattagttttagattggttatattaaaaaaattgacgaaaattgtccaggatataattttgtactattttaaaacatataaggtctaatttatcatttaacaaaatagaatgtcgaatcaataatttttacgaaacacaaagttaaaaataatttacccagattttaacagtaatatgaaaaatacatagtgttgccaagctttgaattttgttaataaaaatacaaataaaaaacaaactatcatcaaaatatatttacaaaatttgaatattttttttttgaagaaattagactctataccct

SEQ ID NO: 153995 - DNA, 601 bp, Cannabis sativa
  modified_base (289)..(292): a, c, t, g, unknown or other
ttttcaaaccaaccctcacatgcagtttttctaatttttcaaactgcacccgcaccacgaaactaaaaaaccgcaaaaactgcaccacaaaaaatggtgcggtacggattttgaggtttggactatcaccaaataattaaactatcacaaatacaataagcttgagcaacacttatcaaaaataccataaggtttgaaaataaatataaaaaaaaaaagttttaacaatacaataattagtgggccttgagttgaacattcacctattggacctaaataaatataaaannnngtatttttataatgtgcggtgcagtttgaacctcatatttacaattcaacactgcaaatcgcactgcgcacagtttaggaaaaattcaaaccgcgaccgcaccgcaaagaatttcaaactgcatttttttttgcggtgtggtgcagtgcgggcggtttgagaagtttaatgaacacccctaagaaaaagagaatacataaatcatagtgtttcttggagaccactgcctatttataagctcattatatattgagttttgggtatttataatttggcccctcaataaattataaattaacttatggtatc

SEQ ID NO: 153996 - DNA, 570 bp, Cannabis sativa
aaagtttctagttggaaaggcaagggtatgttttgacagccgatctttgattcactttggcaagaatctagtttattgtgagaagacaaaacacattgatattcagttgttttggataagggagaagatagaagaagaaatgatcaagctggagaaagtaaagtttgaagagaaccccattgatattggcactaaggtgttaccagttagtaagttcaagcattgcttggacttacccaaccttagtttctaagaagctacacatgaaagaactaccacttctattagacaaatatgcttagcttgttggggcttgaagaaataaggtaaaatttgtggtattgttccttaaatccctaactagagactcaactagttagttagttgttcattaactaactcaactgtcaaatatgacagcaagctattgggtctcttggcctatataaagaggactactcatattattttataagagaataacaagaagactcaaccagagaaaagaggagagatacaactgttggaaattattttaccaggatcttagatctactcataggtatgttg

SEQ ID NO: 153997 - DNA, 1046 bp, Cannabis sativa
tttggtatttgtgattatgaatatttttattgatttaaaaataatatgattgtcatagttcaatatcaaaggttaaattagaccgatatattgaaatgctattaaagaattatcatttttaaagtggctacaaatattttctcagtgttcaactcatgagtcattttcaaacaaaactattttgatatataatatagtatgtattaaaattaatgtagcccaagtgggagaatcttaaaatttttatttggacttacattaacttttattagttttaataaaatataggttgattggatagttttttattgtcttaggtgatattgttagtgatcaatagttaataagcttagtatatatgtgtgtaaagtctagttgaaggagaagtgtgaatttttctagttagctgaagcctttgatgagcagattcagtcaaattaaggttatgtagctaagtcccctacctaactttataaaatacatattgtctcatcacaattgtatacttttgataatcagatgaataaaacgacttttgatttagagatctaaggagaaagacttagttgatagtatgtactattaaattgttgtaattaatatggatcaatcatgtatacatacttaattattatatattattattgtgttctgaattatatataactttgtatcttgagttattttgattttctaacacttaatacgtaataattaaaaaactacatggaaagtttagaaactatatatatatgagtcgaatatgaggtggatagtatcacccctaccccaaacccatttcgggtatataaaattactccccaccccgactccattacccattaagggtaatttccggtccattcgaggtggataccgtgagtacccgtctctgcgagttaaatttctatcactagttccaataataataataataataataataataataataataacctgtaatatccaaattaaaatagtatttaattttttttttatctccttgggatattaattgtgtgaggataattatcttatatatt

SEQ ID NO: 153998 - DNA, 666 bp, Cannabis sativa
gacagggtcgactggtctttcctgcgcggtatgttaattaaactcgggtttcaccctggttaggttgggttacttatgtgtagtattacttcggtgtcttatgctattaacattaacggagaaattattggccatatctcgccttctcgaggcttgcgacaaggggacccactctccccttttttgtttttggtgtgtattgaggggttgacttctctcatcaagcatgatattggtcgagggacaatctcgggtcttcaatgtggcaaaaggggtcttgtgatttcacatcttttgtttacagatgacagtttcttctttctagaagcctcggtggctagttgtgttcgatttagagaaactctacatcagtacgagaatgcttcgggacaacttgtgaacttgcgtaaatcagcggtatgcttctcttctagtattcctcttgattttcgtgagtatttggcccacattctcggggtcccgcttgttccttgtcatgacaaatatcttgggttgccttgttttgcgggtaaaagtaaaagtggtctgtttcagtcgattaaagataggatttggaataaacttttttagttggaagtcaaagctcttctcctctggtggggtgaagtgttgctaaaatcggttatccaggccattcctacttat

SEQ ID NO: 153999 - DNA, 644 bp, Cannabis sativa
  modified_base (244)..(247): a, c, t, g, unknown or other
atatatatatatatattagtaatgggtgactactcaatggttacatttttattgtaaccatgattgtttcatttttgttgacctttaatagcaagttaccaacatgtaaaaattcttgttttagaataaatttaaccatgattaaccattgcgtaaaataattaatttttaatttcaatatttaataagatgtttcttggtaattaatattaataatcttatttttatatttaagtctctattnnnntttttttaacagttaaaccattaattataatatttacaataaaactctattattttataaaaattaaatttttacctattccaaaatatatttttgaataattaatcactaagtttgagaatagtgcgaaatactagaatatgagaattcttatacatcatatctaaactccaatttcatctgtatatcttcaagttgcatgttttagacataacttgaaaacaaccaacaacttcatatatgtatatttttatcaataacacatattcgagatcaataaacaataaattatatactagctttgctgacaatacataatcaaaatcaataattagtaataatcaataacatcggttgttaagtttatcaagaacacatgttcaagattcataaccaa

SEQ ID NO: 154000 - DNA, 615 bp, Cannabis sativa
ccttaagctttccctcttcaaggatttgttatcctgctactaccggagcttagatcgctaagtttcgagttgaaaattgaagaaaatagatataaagaaagaaaatttattaaaagagggggaagagggttcgttcatactgttatatataaaacttaatatatatataatcttaaacgaaactgataagtttccttatatataataataatataattatataatattaataataatgtaatattaataataatataatataataataataataatattaaaagctttattattaatagttatcttatcatttcttagccattaagaaacttctacttttagagtatttggctaactttgagtaccccaaaatatcccagtatttctaaaatcaacttatcctaataattttatcaacatttttaactaaaaccgttgtgatatttttggcctccaatcgggtctccagggtcgccgaacgtgaaaatatttttatttcacaaataactcatattatattcaggcatttcaaataaatcttcgtaattaacaaattacacttatatatccacttattgagtctccagggtcgccgaacctgaaaatatttttatt

SEQ ID NO: 154001 - DNA, 1138 bp, Cannabis sativa
  modified_base (1087)..(1097): a, c, t, g, unknown or other
agaggctccattatcgatcatggtcctggccaccattttattggttatttggacttccacgactagcgggtcatcgtccgaaaatttaattttgacggtgtcttcatcgttgaaggttatggtcggttcttttgctcgtggaactttgggtttcctttcttccacggccaggatcacttcttcttgttcgtgctacgctgtttgggcttacctctcccaagctttgcccgaatctccagcaatatgcgggcctccgatgatgactttcagatgcccatctaccggtggaggtagtaactcttggttattatcattcctctgaccctgatcggtcttgacatacttcttcaagtgtgggttatttttccttattaggaattcaatttcccgcttcaggttgtagcattcattagtgtcatggccatagtctgcgtggaatcgacaaaactttgtcatgtccctcttgctggcatctttcttcatgggcccgggcttcttatatggggctagcgactgagttgccatgtaaatactttctgcgtcttcagttaatatagtgaacgtagtgtactttacttgattctcccggggagcttgttcggatttgccggcaaattttcccttcttcccattcccttgcctgaggttgttgttggaacgcttaccacctgggcttgaattatttgggtaatggggaagttgggtggatgttccagtagaaggagctttgacttgccaggcttttgctcaccttccactcgttgaatgggttcctcgagcttgatgaagccttcggcacgatcaaaaaaatcactcattgagtctaccgacccgttcttccttatatccttccaaagttcagtgaggacttcgatgcccctagtatcgcggataactttccatcttcagttacccgtgaaactttggtctcttccatcatgaatctactgatgtatgcccaaagtggctcgcttggtcgttgcttaacttcgaccaagtctcccaaatgcaacgaaagttggcgtgaggatgagaattgtgcatggaattccgaagagaagattttccatgaactaaactttccagnnnnnnnnnnnaaataccattgctgagcggcttccgacagagtggcaggaaa

SEQ ID NO: 154002 - DNA, 757 bp, Cannabis sativa
ttagccgccaatatcccttttttatataattgtatacgttatagttatttaaaatattctgcaaaatttaagaaattagaaataatttacaatgaagaaaaataatatttaaacagtccatttcacatgtctataaatatcatgtccaacacaaatgaacaggaaagacatatcatttcaaactttgaaggtcgtgaaaatagatttttgtagtagtatgtataaaacataggataaaactccacgatatatgaaactgcccactaaatatttttaagtaactgttatatcttactttttataaatactggtgaaatcaaggggaaagggacgatggatttgaacacaaacactctgctaaaatttgtactcaacaaacactcataaaatatattgactcgtgaactaagtggattttaactactaaacaacgtaaaattttatctcctttactttgatttattgcatacttattattatcatcttataatattttttttgataaacattatcattttataattaattcacagtattaattatctagtctcagttaggggtgagcaaaaaatctaaaaaactgaccaaaccgcatacaccgaccgttcgaacatcgaaaaaaccgaaaaccgaaaaaactgccttcggttaaaaccgccttagcatggccagttttagtgttaatggcaaactgaccgattaaactgagaaccgactgaacatatatattatatataatatatattatttttgtaca

SEQ ID NO: 154003 - DNA, 635 bp, Cannabis sativa
caatagagacattcaccaaacatgacaagtaaaaattaattcttaatcctatcgagaacatgtcgacaatatatcgattatcaaacaacaataaccagcacaacaacaacaaaataaaattctcactcttatcgagaacctattgataacccgtcgataataacaaaatttcttttttttttttgtaaaacttgaactattgataagatgttgagaacttctcaataatcagtcgacaatttatcaataattaagtgagaataaccaacataacgacaacaaatataattctcactcatatcgataatctataaaaaaaaaatgtcgataatcaatcgataataaataaatttcaagcttttttttttgtaaaacttgaactatcgataacttatcgagaacctatcaaaaaattgccgataaatatcttccctgaccttgggatatttgtatcgagaacccgtcgagaacgtatcgataaagcgtcgagaaaattacacacacagaatactcaagaaaatatatctcgtgatttcagcgaagaatacatcaaaatcaaacaaatacaaataacacactactataaatatcagaattcgcgacggtcctaaaaacaatttttttcgaggaccgtc

SEQ ID NO: 154004 - DNA, 925 bp, Cannabis sativa
ttacggtctggtcggtttgatagttggtttcggtttttatgaacacccctaatcacacattattctctctttttttttgtttttttttttttaacatctttcacaattcaacattaaaatgaaatataattacaattcaacaaatctctcttttgaacttttctttgggtttacttcttaatgatattagagatttatattctaattttactattgtattttttacttattgccccaaaatgcaacgaatgctcttgctcattatgctttacgggctatttctagtactgtttggtggcctgggtatccttgtattcagaacattattttggctgatgtgaatcatcgataaatcttttaatcttcggccccgtggagttcttctcttttggtggtgtttttctaaggctattctctccaaaaaaaaaataataataatttaagggtttttcttttaatattaccacattaatcaatatttgataatgcttaaaagaaagtttttttttttggtaaacttaattacattatccataatattaatccaattatcaacatatatcctgtagaaattaaaatttagtagctgctaagtgtaatataaactccacaaatcacttacacaacataaaattgttgatgtattttttttttttgttattttccaattatcattctcttcaatgaaaaaaaaaaaaagagagagtttacaataacatacaatttttttgtatttaatttacaataatgatgttgctactattattgacgtgtcacgttaggtaaatctaacatatatctgatgttttcttattgattactaatagtgttgatatataagaaactaattagttacttttacataaaaaaaaaactttatttttatattatattatttgaaatacattttagttacctccaaaat

SEQ ID NO: 154005 - DNA, 710 bp, Cannabis sativa
ttaaaaactgttttcagttttaaaaaatagaaaacagtttttaaactgtaaagccaaatagcctcttagactcccaaaatttatttctacaccccaacgttaagtacactcccattttatttgttaaatttttttactttttataactgcacctaatgtaggtagtcttttcatcctatattttgaccctaaaatcttatttacaatttgaagagtgttaattacgatcatttagtcaaactccacgcctgaaattacatgtaagcatattttttttttcatagtgctatctatatatatataatccatttgttaagataagtgacgtagcagcaccaataactttctttctctattttctctattctttgttttctcatttttctcatatttctcatattttttttaattttttatttttttttaatatttttatataatacaaacattaacataataatctaataattaactatttattattaaattttgaatttcttaatacaaaaaaaaaaaacttataataataattatttattataagagttactttttgtgtttacattatttcacgaaaacctaactacatttttttttctttgatagatttatttaatatttaacatgttttgagtctattaaacttctcagggagtagattgtgtaaacgatagtgaaagaaagaaaagagaaagaacaagaggaaagaa

SEQ ID NO: 154006 - DNA, 712 bp, Cannabis sativa
tttagaagccctaactggctttgggtctcctatcatagttgggcttaaataatacaacattgggcttttataaaaatattggattttgagtaaagatttatatttatactgcccacacggtaaaaattatatttttactatcttggcttatttttttcttttatatcgtaaacactaaaataaacgagcctccattgaaagggtgaaatctggaagaccaaacaaaaaagaggatggaaataggctgagaaaagaaacaacataacaaatacaacaaaatgtagggagctaggacacaataagagaacatacaagataaggcatcaaaaatagaaggaagcagaacaacaaaaaaaaactgtgaaacaacacgaaggaaaattgaacatatattaattggagcatatgatactaaagaaaataacttacatacaaatttcattatattcctattactattaaaaacagaatagtacaataatatttagaaaaatatgataaataaataaaagaaacaacaataaaataacattaaaaaaatattaaaacaataaaaataaatcattaacagaatagggtaagttggaaaaaagatggtgaacttagaagtacggtacagatggagccaaagctttgagattaaaacaactaaagaacatgaacttagtgagagtttctgaaatatttatacaagaagctcatcacagagcaa

SEQ ID NO: 154007 - DNA, 558 bp, Cannabis sativa
atacatatatattatatatcaagtgaataaatatttaccttataaacgcaatctggcgataaattacgacaaaaatttggccacctatagcacacacacaataaaatattaataaaatgaaaaatctctccaaaaatttacaaaaatgaaataataccaatgtacatcaataaaatgaatagaaatcatatttataccttaatggacgttgagattcaacgttttctctactaaaatcaattgccggagttgtaccaccacctttttttaaaaataggttcaagtacagttcaaatgggtgaaaaataaaacttttttagagtatgggattagatattgaaaatagaaaattttaaaataaaaatgggatgaaatggtgaataaatgagggagatagggggtttttagtggtggttggcgagtgttttgtgggttttcaaggggtctgctatcgtggggaagaagaagaagacgaggttaagttatttttataaaccctatgccatcggttcctagcaaataaccaatggcataggtgcacacgtgtcaataaagtgt

SEQ ID NO: 154008 - DNA, 535 bp, Cannabis sativa
gttagcaagaacaaataacaactctccctgagtaacacactcgaaaatgaaaaataacaaaataacatgctaacttttaatccaaataagttcacaagtaccgaacacaactccccttgggaaaagggtccagagttggtccaaacaaacagttaaaaatcaaaatattactccccgtttttgtttatctaagggccaaagataacaaacatgaaaatatagtaatatgtccaacaaaagcaaagaaagaaaaaaacgtctctgtaaagcttgaccaaggtggacagctgctttgacatctcttgctgaacttcttccatggcagcaagacgattgttcaccagctgaacctcattcttgacctcctggatttctgcagaagcagaatttgagcttgcagcaacaccaccaccaactttaggcctctttttaaaaatgccatcaaaatactccgagggttggaatgttgttccagtgagtgaaggctcaagagtttcatgagattgggcctcatttttctgagaggacaaaacct

SEQ ID NO: 154009 - DNA, 771 bp, Cannabis sativa
tctataactttaaaaataattttttgttacataattaatttgttgagctaaaaaatagtatcattgctacctacattttaatataatccttttaaaatgtgaaaagtatatatttttttacttttatcaaaatcaaaataactattagttgctaagcatattaattatatactcgttagttacatatcaccattgtataattataaaattaaaaagcttataagtaaccaattagtattatgttaatttaaatatcatcagtcactaccaaaaactccaacatcacgatattttttattggcatcattagtaattaaaaagttttttttatatcaataaaaatgcatattaataaaagaatgaatcattttcatgttgtgtgggaaagtaacttcatagttacttctaagtattattttcggtatcataagcaactaaatagttacttttaattgtggtgacgatgagcaaatatatatttttctgtttttcatttagttaaccaaaacgtaacaaaattcgtaaaattattttctgactatattgttgcttgcttaagttaaaaaattatcattgtgatctactctttaatgtgatcgttttaagatgtgggaacatatattttttccttatttcaaaaataaaataaactattaaggtacctttgataccaattatatactatttagctaccattaaattattttaataatttaaagaaaacttaatttgtaattagtttctactcttttctacaataaaataaacttg

SEQ ID NO: 154010 - DNA, 753 bp, Cannabis sativa
  modified_base (718)..(723): a, c, t, g, unknown or other
tatatcatttttattttcaatgcaatcaaattttagtttttatttacacatcatcatattaacaattgacgatgttttcatgctctattagtttgtgttaataatatatcaatttgtgtttataatgtagatttttgaagtatgacatttaggcttatccgtggagtcaatcttgatctgattcaatgcactaagtagtggccatactctttaaagatatggatgaagattctatctttaattatttcgagcaacaagatttcacgacaagtgaactcaccctcttttgatttctactgatataaagaagtaattctaatctaaatggattgctatcatggtaagatgagatcgtttctaataattataataaataatttacaattgtatattttctatagttataaatatatatttttttcttttgaaaacctgtataattatatatttctatagttataactattttttttttgaaaacctgtatattataaatatctatatataacgactatttttctatgcttttgtatattaattaattagtttacaatatgaataattaatatgtatttggatttttttttgtttattttagaaaattcaattgctattatgaatcacaaatcgtttacaataacacaaaaattttaaattttttcttattttattctaaaaaaaatatgaatttactaatctatctatctatctatctatnnnnnnatataaagaagaagtatgaggcggtgatgt

SEQ ID NO: 154011 - DNA, 540 bp, Cannabis sativa
  modified_base (27)..(29): a, c, t, g, unknown or other
  modified_base (129)..(130): a, c, t, g, unknown or other
  modified_base (354)..(362): a, c, t, g, unknown or other
ggaatagttgtaaagaccgcttagttnnntttagaaattagcagttaattatgtttaatcatggaaaattatttatagatatataaataattatttacgctgtaatttttgaattctgaaatgcatttnntgtcatatagtgaatttcataattttgcatttctggtgcccggtaacatggaacccaatttttggctcagtaagatcacaacttagtatgttagtattatgggacggttatttagacattgggaatgtcgggagtggtcggaatttagaatttcccaaaataccctttagtgccctttatgttattttaagtgtggagcagcaaaatggtcattttgccccatnnnnnnnnngtcctttagtggacttagtgtaatgtgatatgtgattaggtggcatctttttggctgaaataaagagttacattatgccttttctttcatttttattcaaaattggaaaacttagaaaaattagaaatttcaaaagctctttctctctctttctttcggccaagcttgggagctgcta

SEQ ID NO: 154012 - DNA, 632 bp, Cannabis sativa
tcaatttttataataattcgatgggtcaaacctaacatcatgttatacaagtcgcgtctgacttttattataataacgggatttagtaaatacaagttgcatcgatcggtttgtacacacctaatttttcatacaaaattatataaaaaattagattaaaatttgatacgattttattacttagttgtcattaattaaatattatgatttatttatatatatatatataatttaaaaattttcaaacatctatcgtcgcgaagcgcaagttgtttattaatatatatataataatataaatacaaagtgaagttttttttctaaacaaagtgagcataaataaaagaaataaatcttaaaaaatatcatttacattagtgtctgaatgaaaaaaatatttatttatgtactttttaaaaaacatttatgcaatctcattcaaattattttttttgtatattctaaatatatatttataaataaaatattttaaatatttgacaataattattaaagtagaaaattaaattatattcatataaaatcattaaatatttgaaattcatataaagaataaataaaataaataaatataaatcaacaaaatcactattatatagcaatgaggactt

SEQ ID NO: 154013 - DNA, 976 bp, Cannabis sativa
gttagttagggtgttacagtctgtgtctgagtctgggaccgggatcggatcccggtttgggtctgggtttaggtcaaggttcgagttcgggtctcgggtgcgggtctaggtcttggtccgggtcagggtctcgttcagaatctatgtttcgagtttcgatcctagtctgggaccaggcctcggttcaagtttaagttcatatctagaaccctatctaggtccgagtttaagttttggatagggtcccaagtttaggtatgggtccgagttttggtctgggtctcattgttggtctgcgtacacgacgtgtcagggcccaacttcaagtcacggtttgggtctggggctaggcccgagttcagttctaggtttgggtcaacttcctagtcacggtcctagtctagtcctgagtcttggttttagtccaggtcgcggtacgggttcaggtcaaggtctcgatcaatatctttgtctgggtttaggttcgggtccttgtcagggtctggatcctggtctgtgttgcgagtctcaggatcgggtgagcttttaggaccatgttaggtacaggtctcggtcctagtcctagtccatgttcaagtcttaggtctcatgtcccactcctagtcaaggtctccgtcgaggttttggtccgggtttggttcgggtctgggtctgggtccaagttggagtcagggtaccgagtcttagttcgagtttggttacgggtttttcagatctcggtctggatccaggtcttagtcaaggtccacgttcgggttttggttgtgggtccttagttcgtgtctgggtctgcgtctgcgtctgggtctaggtcccgtgtttcaatcccagtctaggtttgggtcggtatttgggtccgtgtatgagttcgtgtgcatatctacatctgaattccaatttaggtcaggggcttggtctgggtctgggctcgactcccgagttcgtgttcaggttc

SEQ ID NO: 154014 - DNA, 536 bp, Cannabis sativa
attttaatttgaaaaaaaaaaaaggttaatataagatattttgacatataatttggaaaattatcatttgtttatgattttatcttaaaataataattgtctaaccatctattttaaaattagtttattttgttatattaattttattaaattataagatcagaaaatgatgtgaaaaatatctagttggttattttcaaatcatttatcttattatatatttaatttaatttgataaaataattcaaataaacctagagattttaaaattagtttgaattttaaattttgaaaatatattttaggttgtttcaacaaccgtaaattttcaaaatagttggttatttgaatgataatttaattatataattattaaatatctcgacttcacatattgttacatgttgtgtttgttttatttaattgtttatataaaaaattttaaacaaacctattatttatttgatttaaattactatgattaacttgttaacagatccaatgatcagattttaatcatagtcaaattgtcaata

SEQ ID NO: 154015 - DNA, 521 bp, Cannabis sativa
agcgaagctcaaaggaaatcattgcttcacttcatagaagctatagatttcatatctatgattaatgctcccactcaattgcactaccaaatttctaatatgtaaatatgggctataggtaagccgttaacgaataattcaaaaaactcatatagtacaattaagctagaatctaaccatctcaggatttagatcgacataagatcaactaagagacctcgacttagaaaaggcatagtggtaagtttatgatatcttttctactgtcaatatcagtccagacccatgtatagccgatgcatctgatacaagtttacttttctaataccctagacagaacattccacttatacaagtgtaagtaaaccacatcgttgattatcacgtcagtataaatccaatatactgataaatagtttgactaaatagtttgaaacacataattatatgattatttattactgtgtagacaatactataatcatgagtaactatatgttcatgatttaatagaatttata

SEQ ID NO: 154016 - DNA, 886 bp, Cannabis sativa
tagtgagacatccacctcgcgacatatatggaagtatagacgaggcgaattggctgttggaacacttaccgtataattcacgttataatgactaagtgcaatagcttgagaacatagaggacatgcttgtccagtttgcaaggccttatggtcaaagagcagttgttaagtttgcatagtacactagtgctcatgctattgctagaatacatataaaccaagtcattcatctatgtacaaagcgagatgcctctagcgaggtgcttctatcccacatccgtgtccactacttcaaagataagaataacaagcagttatgagaattcttagctatacatgtgttaaaatgggacgtggtcaaagtccacgtttcattaaaacagttatgtatttcaaattcaaatgtaaataactaccaacctatattcctataaataggggtagattatacagaaaaaggaacgaaaaatcttggagagaaaaaagatcactgattgtaaaaccataattctgtatctagaaatattttaataagattgactcgtggactatgcagagttaactacaaaaccacgtaaaaaacctggtgtcattattgttattattcttcttctcaaatttcttatataatttgtgtttaattttttatgataaaggctttttaattagttaacagtttggtggtttcattgagagcctacgtgatacaaactcataaaaatccctcctaaccaaaagaaaaaaatttctccatggctgatcatgatgaaaacgataacagttgtgctaaagagactaatcgtcgtcctaggaaagaacaaatgggttcacagaggccaccttgttgggttttatgccctaaataaaactcatttcaacataatca

SEQ ID NO: 154017 - DNA, 617 bp, Cannabis sativa
  modified_base (139)..(141): a, c, t, g, unknown or other
tattttctactcaacaataattatagctaaaagagtacaaaatattcaagttatttaatcctaaaataatcaatacaatcaataatataatcatagagtaagcggtaaaattctcttacatcaactataatgtcataannncaatcatttgtaaagacatgctttatattatttttaattgaataatttgattttttttccaaacaataatttaaatttcttcaatattttttcattattagtgtgaaataattcttatactgtaataatttaaagtttgtaattattgtggtggaaaatcttcaatttttttttttgttaatatatatatgggtaaataccattttagacaccgtgttttataaaagttaccaattagtccctctgttttattaaatgataaaatgaatcctgtattttttaaaattgtacaaataggaccctgaattagtttttttatcaaaataaaacttaatgataattcgatctagagatagtatgataaatctgattacattttatgtatttgttcttgctagagatattatgataaatctggttacattttatgatctagagatattaggctttagggtttggaacaattttaatattat

SEQ ID NO: 154018 - DNA, 609 bp, Cannabis sativa
gcagccgccccattgttcctgaatgatggaaaaacaattctcttcacggagccaagcgttctcaaaacggaaaactttactagaacgagtaggaacccaaaaagaaggatcaagaagcaacgggcagtgatcagaagtggtgaacaaaagattaatcaaccgagaactaggaaacaaatcaatccaacccgagttggcaagagctctatccaatcgcacctcaataaaattatcagaatccctacccttttcccaagtgaactgatgaccaaccaactccaagtccactaaatcacaaaccgcaagtgcttgttgaaagccttcaagaagcgaattaggatagggatttccacctcgtttatccacttgactcaacacattattcaaatcaccaataatacaccaagggagagtcgattcttctttcaatgttcgcataagactccaagtattccttctaagagcccggtttggttccccataaatacccgtaagccgtcaatcaaacaaattattatgatgaacaatcaaatcaatatgattctgagaaaaacctctaacctcagcttcagattgctctttccacaacatagctaaaccaccactcct

SEQ ID NO: 154019 - DNA, 1665 bp, Cannabis sativa
  modified_base (289)..(290): a, c, t, g, unknown or other
  modified_base (479)..(481): a, c, t, g, unknown or other
  modified_base (1266)..(1277): a, c, t, g, unknown or other
  modified_base (1382)..(1395): a, c, t, g, unknown or other
agaaaatgatttttcctttaactttgattttttttcacttttgaaactttgaataaaaatgaaataaacttaattccttattatttcaacgaaaacaaattccacatagtcacatattcaaatcacactaagtctacaaaagaacaaaataacaatggggcaaaatgtccattttgcccctccacactaaaataacatacaagggtactaaagggtattttgggaaattctaaattcccggccactcccgacatttctaatgtctaataaaccgtcccacaatactaanntaataagttgtgattttactgagccaaacgccgagttctatgttactgggcaccggaaatacaaaattagtaaatacactatatgacataaaatgcatttcagaattcaataatgacggcataaataattgtttaaatatctataaataattttccataattaaccataattaactgctaatttccaannnaaactaagcggtctttacattgacagtcaatttaggagcttcgttcaacattgtattggcactattagtttcaagtttttctcaatgggggttcaactaagatcttcttccctaaacggggtttatgtcaaggggatcgactctccgcttatctctttataatgcacttatatgttctttttgagattattgatttaaaagaaaaatatggatctcattcaaggtgttcgtctcataactagggtttcatttgtgtttttggcagagagagaaaaccaagaaagtgaatgtatgcaatttgattttttttatgagataaacataacctattcactatttattccacttaatttaattaaagtcatcttccaataatttactaaaatctaactaaatataacttatgggaaaatgaccatctatccctctacttcacttaataagtaatctacatatttaggggtaaaatagtctaaaactatcaacccaaatactcctgacattctaaatgtctaactatcttgcctcgctaattctaagatacttaactgcaactaagtgacttctaatggccaaattgtcgcattctactgttaccgagtataaaatatgaaaatcgcaaaatttatatataatatataaaatacacctaaaattcaaatatatctccataattgagaaattattttcataagacctatttctgacaataagccctaatttctactatgaaacacataattataattaattataaaataaaattatcatttatcttatttatnnnnnnnnnnnnacaaagtctcttaattattaaataaaccctaaaacctattatcttcacaattaaggcattgtttagtgaaaatttataactaagacatagtctaatttagaattnnnnnnnnnnnnnnaaaactaattaactgagtcttacaagaagtattgtctcaactagtgcggggaccgtggacctatataataaagcttccaataagtagctctagaatttacttctaacttattaattcctccttgcaccactatcgattcagaattacactcttaattatatagaaccctctacatattcaagatatagatacgctatgaattatccattgttataatcctaataatcaatgatcctctatagatggtctacatcgagtagggataaattt

SEQ ID NO: 154020 - DNA, 803 bp, Cannabis sativa
gaatatgaaaaaaaaaattagactgaaaaattcttctggatgccgaaacaagttaagggtgcatcaatacatctcttttaagggggtgcattgtagaatcaccgaaaattttttatttcattcaaaaatatattatttattttatttcttttctatatcattttgaatgagacttagcacccttgaataatactactagtaaacattctcggcttcgcggcggatatataaaatattttaaattacatataaaaaataaattgtatattttaattaattataattacttgataaaattatattaaaattttaattttagtattaaaacatttgtgacataaatattcaaaatattaaatttgttgctaataaatatcgaaattcgaaaaatagtaacataaatcttcatttatagtttaatttttatgttgatgtgtgttaagttctgggtacaaattttattgtgtttgtttttaatgtttgagttttagtgttttactggggttctgatatttgagtttgtgtttatgagatctatttttatttatttaattatttacttatttatttttatagattttgagaacttaaaatttgatgttgtttctattgattattgggattgaaatagtttgattttttatacgggaattaaagtttgccttttcgtttcattgactgaaaaatattagtagaaaatgtatggaatgagaattttgaatatatgaaaatagaattgaaaaatagcatttgaatcgagaattaaagtttattgttaatctccttacaaaaaaaaaaagttt

SEQ ID NO: 154021 - DNA, 889 bp, Cannabis sativa
tcctcttttatttttaccctctttttttttttttttaaatattataccaattttgtcattgtcacttcaatgtactctccatgtaactcacttatgtcagggtattttgggtacaatacatctaaaaagatgtattttttaattaaatataaaattagaggtaaatttgattaatagattaataaaagtggtatttttcaacttacccctttaaataactgttattaattgaatagacccaaatactaattgggcctaaataaaatatatcaagtgtgataattttatttagcaacctagtccattttaattacaaaaattaaatgggctccctatatgcacctaagccctaagcaaacatataggctcatacaaacacactgatttggatggatcctatcatgttactaggtttatacacagatgaaagaagattgcaaaatttacctgtaataaattatttatttgacctattgacaattgaacaattggttaaaatcagatcattggatgtgtcaacaagttaaccatgacaatttagatcatacaataataggttttataaaacttatattaataataaacaatataaaacacacacatgcaacacattggatagttggatataggatttatttgatttaaattaattaaataattaattaatgtcgaaaatattaaataataaaatattagtttttgaaaatttcaaattaattaaataattaatgtcaaaaattaaacctataattttgaaaaaattaggttttcaataaacctaaatatccattcaaaaaatattaacaacttttcaaatttaatgttattttaaaaataaaaattaaatatccaataaaataaaatactaaataaatatcatttatctaat

SEQ ID NO: 154022 - DNA, 520 bp, Cannabis sativa
ttagaaatcatacaagtcaattaattttgtagacatggactcatattttttatcttatttattaatgattactcacattaggtgtatctttacaaaatgatgttttatgtgttttaagatattttaaaacacatgaagagaaataatgcaatttgcatattaaaatagtgagattaaatatagatggagaatacaacattaaaatttgtaaggatggttaagctcccactccatttgtaaagtttcttaaaaaaaaacatgagttcattgctcaatacatatacttggtacacctaaataatagtctgtgacaaatttaagaaactaaccattgttggacatgggggggaacctacatagcaaactccaaactttcctaatcttcgtcggttgatactcctccaggggattgtacatatcagatcatgttctaaccaaagttgtttctcaaacatattttgacttgtgataaggttggaaaccgaattgatgacatacacattttataaattcctgtata

SEQ ID NO: 154023 - DNA, 558 bp, Cannabis sativa
  modified_base (173)..(183): a, c, t, g, unknown or other
cactaacataaaataagtagttcatttcaattaatctattgtcttgatattcagatcaggtgtagtatatttgactaaacccagattacaggaattgtaagtctatggtgagcaaatgctttctccactattacttcctatgtgttcgtaaaacattatgcaacatcattatnnnnnnnnnnnttactcatctagggatactgaattgtttattgcttataaagtgtatctgaataaacagaacacagatctctaattttatccaaaatggaatagagataacacagttaagaactttcttcaattgaataacttttcagtgctttacaaaagcaactaagttatgtagcttcactgatggagcttaaattattatagatggatttttacactcttctagaataattcctccacccctaaagtaaccaccatccctaatattctgagttggtgtagataaaaagattctaatatacacccttatcatctaacatataggtcactgttagaattctttcttgattttctcctaatgttccttgtttgattacatcttag

SEQ ID NO: 154024 - DNA, 576 bp, Cannabis sativa
gatagagtggattggcattttttgtgtgctatgcttgctcgattgggatttgctgataagtggattcgtcttatttttgggtgtttggcctcggtacaataccagattgtgagtagtgggcgaactatggggcctattgttcctagtaggggccttcgatagggtgaccctatatcaccttatctttttttggtatgtgctgaagctttttctgctcttatttgcaagtttgaagagaggaagtggctgcatggttgtaaagtggctcatggagcgcctagtgtctctcatatgctattcgcggatgataactttctgtattgtaaggcgaccaatgtcgagatgaagtaggttcttcagttgcttaggatgtttgctactgcaacgggacaacgtgttaatttttggaactcttctgtattttttagctctaatacttcatctaatttgcggagggccatctgtggtactttgggcattcgggaagcgactgacaatagtatgtatttggggctcccgagtgctgttggcaggaataaaaatgtcatcttcggctatttgcgggacaaagttcag

SEQ ID NO: 154025 - DNA, 603 bp, Cannabis sativa
agtgtacaagagatcaaacacttgaagctccagctaaaaatagagtttgaaatgaaggatttggttcagctagcaggatcttaggcatggatataagaaaggaaaggaggaaaagactatcgtacttgaatcagacgagaaacatcaaaaaggttctaaataccttatgactctaaggcagtgagtactccgcttgcacaacacttcaaattgagtgctactcagatgcaggtagatgatactgagaagacgaagatgtcaagagtttcgtatgctagttcagttggctccttgatgtatgacatggtttgtacgagactagacatagcatttgcactgagcatggtaagtaggttcatgagaaatcccaaaaaggggcattaggaagccttgagatggattctacgttacttcaaaggaattgctgagaagggactaatatttggcataaataactggaaggaagacttggatgttatcaatggtcatgtggactttgattatgcagggtgtattgatactcggaagtctctgaccggatatgtatttactatgtttgggacaactattagttggaaagcgaaccttcaaaaggttgtggcg

SEQ ID NO: 154026 - DNA, 715 bp, Cannabis sativa
actcgtagaaacacatgatcccccacttggaactcaatatctctgcattttggatctgcatataaaaatatgaaaaatgcattctgaattcaaataaatcaacataaataattatttaaatataaataaataatttttataattaaaccctaattatctactaatttccaatttaaactaagtcgtttttacaatatgtgtgttgtaacatattttttaatcaatctcttttattgtccttgtattatttttacaattgagttgtatatatctttttttatctttcattgtaataatatctctaaaagtttatggttgaagtcctagttgtgcaattccttaacttgttacctcatctacatctcttaatatggacacatatgcttttgctgaagaaagtgcacctagtaaccaaaataatgacgttgtgaacacttctccatctcaatattaaaatcctttaggaggaaaaaagaagaaaagaaagctctcatctcaacaagatattttatgataagatgtctgttgcattggagttgttaattaaaaaaaataatggtcctgaagttgaggactgcatggaaaaattagatggacttggataggaggagcctttgtatagtggaactattggtatactttgtgaaggaaatagctatagaaaagcacggatgaacatgaaagacatcaccataatggagaattgggttaaggc

SEQ ID NO: 154027 - DNA, 551 bp, Cannabis sativa
ataaaattctaccaaaatttgaattttttttcaatgaaaaatgatttttgaatcaaaagttatcacaaaaacaaaattgggcacaggggtatgcaatgtagcctatttgggtgaggaagctcgccgtgtggggggcaagcttcggacacgctcttgtctgaaggggttttttctgagcgagctgcacgtgacactcagtcgtgtccccatgcgcgcgcggatgtgcatccctaagatattttgtttttcaaactttaaaaaatcataactaatttataaaaaaaatccaaattgagttctataaagcctaaatttattaatttttcatgtactttcaagaaaaaatattttcagaacgaaacagaaaatatttatcaacgtaaattgcaatttccataaaattattaaatatgcacataaactaacatgaacacatccaaatcaacacaaacatcgttttaaatccatatttaatgaaagtaacttattaccatggccctgaggctagttgttagggattattttatcaggatttagatttactaccatgt

SEQ ID NO: 154028 - DNA, 758 bp, Cannabis sativa
  modified_base (26)..(28): a, c, t, g, unknown or other
tatttttaataataaatcattttatnnntaatataaataaaaagtctcccacgaatttttcataaaccaacaactcagttatataagcacactttatatagaataaatacttgtgatgaggctatggtcaattatatgtaaacgtacgcaatgtgtaacaacttgtgattatattatatcactttaaggactataactcttcataagatgttaattttccagagatgaaatttttgggagaaataaattgttgcattatggtactcgaaagattgattaactacacctactcattaataataaccacacaatgcaagacgattaaaaattagatttgacagaagcttaaaagcaaagcagaaaataataattaaatttattttttcggggtttagccaaaatttctgttagcttaatccatgagacttggtcaagagatgaagtaaatgcactaagaatcaatgtcattacgatcagttcatacaaagaaatacaaattaaagtctctcttaattttgacgttctcaagaacatataataattaacttccaagcaattttatagattgagcttcaaacaagccttccgttggttcaatgtttgctagaatccatttagctatagttatgcttaattagctctctcttaagacttagcttcaacatccatccattcaagtattttaatattctcagtttgattatttaattgaatgattaattaaatacggaataataaaactggtactgaaaacagtt

SEQ ID NO: 154029 - DNA, 598 bp, Cannabis sativa
ctatgtttggatttgggatccatagccaaactcaaacctagacccggactcaaacccaaacccaaacctggacccgtaccccgtgacttgaaactggaagttaaaccgaaagcggactgggacctgggaataagaccaggggactaggacctagactcaagacacgaacaaaaactagacatgctcttggacccagacccagatgtaggacctgaactgagattggagactcagacttggacccaggtcccaaacctagattgggaacccaaacccaaaattagaaccagaatcgggacccaggactgggatggggacccaacacctgaccccggtctccactgctaccaaaagtacaattcttgtcgatttttaagtgtcatttaaagaatttgcgtcagtttaaaaaaccgacgtatataccgtagtcgcaaatagttttttattagcgtctttttttaaatgacgcaaaaaaaattatcttcatttaaaaactgacgcaaaatatacactcttctttttcatcttctgcgtcagtttaaagattacgtaaaattgtttgtggcattttaaaactgtcactaaaaattatagcgtc

SEQ ID NO: 154030 - DNA, 809 bp, Cannabis sativa
tgcaatacatgagttctaacagggttaaccttcttcattttacaattcatgtagctacaagtagcatcatgtcttgtttgattagattgctgcccaaacatgtagagaattcattatttgagattcattctccgtttcttcatgtgtcatatgcagaacatcatccatgctaacaagtatgaaatatttggccttgttgttggattgaatccaatcatcatatttgtcctaaataatttttggggcattggcagcgagctcctcagttagaaaaaaaattgtggttctcacaaaccagcatcaaatttagattagatttccatttcaaaaagttttcaccattcagtttttcaagtgctactaaatcaataaggggatttggcataattgacaattgattgccgccttagggtcgatattgagtcaatttcattgagcttatgagacaattctcatctttattattttgtaacttcaatatctcatattttcttttcaaaatataaaatatccttgcttagttgcgctttgtgagtgtaactcattatttcaaatttcatgacttaacttagtaacgccaccttagggtcggtattgcacttaaatacatcacttcctcttatcttagtcaagagatcaaccttgaacaacaatatagacaaataccttccttaaggggaagaaaacaaagttgtctcaaggtcactctatactccttcggtgttgaccaataatggaggtcgtaggttacattgacatgtactccttctcccactcactatttcaagttaatgtatttattttattaa

SEQ ID NO: 154031 - DNA, 1083 bp, Cannabis sativa
  modified_base (939)..(941): a, c, t, g, unknown or other
ttttacaaaaattagatttttttacacaaattagaattctcttcttgtataataaatttttaaatatttaattatttttaaatatattaaattatttttttacaactattagaactaagtatgagtttttttatttgagtttgagattgctttattttttgggggagcttgactttattttttgattttggtttagttttttgagtaaatgactccttataaaaaaaagattgaggaatttggctatttttttttaaaatacattcaacctattttactttttacttttcaaatatttaaataaaaaaattcaataattaagtgtaatagttttaaattaaagttataggtaacaaaattttaattataaaattatatgtgtataattttaaattataaagagttttgctataaaaattttaataatttaagggcaaaaaaaattactaaaagatccttatttaataataaattacaaaaatttaattaataattataattaatttaattttaaatataattaatcttcattaaagttttataagaaaataaattattaagtgactattaggttataggttaattattaattatttttatttaatttctaaattaatcacaaccattcaatggtaatctaatggctaaaaaactgtaaccatgaaggttacatatttaatgtaaccattgaaacatcctccttatgtttatatattaattttataattgattattaaaactatttatattcttctattaaattaaaaaaaaaaactatttgtattctaactcttatttctttatataaatatcctccatagtgttgggtgactattcaatgattacatttttattgtaaccatcatgattacagttttctttgacctgtaatagcaggttaccaatagataaatatttttttttagaattaattaattnnnattaactattttcttaaaataattgattaaatatttaacaagacgacaattaattaaatatttaacaagacggtaattaatatttatacataatttttttatttatatttaaattcctactgtaattattttaacaattaag

SEQ ID NO: 154032 - DNA, 536 bp, Cannabis sativa
  modified_base (490)..(490): a, c, t, g, unknown or other
ttgctaatgaacgaacatctattagggatgaatctcaataaaacaaaaattgtatatatagaaccaacaatagagatcaaatgtccttttaactaaaactcattattttaaagagttgtattttcttttgatacttattttaatctatttattttaacattattatatttatttaattaaaattattaatttagataactctatacataaattttaatataatacttataaaattataccctaggtagatctaaaaaataaaaatttatttttcatccttagtataaattttccaataaatataataaaaattatttaatttaagttggtccaaaattaaataagattaattttcaactcaaatttaattttctataaatatatgtataattacattcaaaattcaatgtatttaaaatacattttcgaattctattaaaataaaataaaataaatctagaaaacttattctaatttatgttggtctaanattaaataaattaattttcaacataaatataattttctatttaatt

SEQ ID NO: 154033 - DNA, 614 bp, Cannabis sativa
aaaaaacccaaaaaaataatttacaaaaaccaaaaataaaacaatgtacattataaaaatgaatagaaactatatttataccttaaaggaggttgagattcaatgtttgctcaacaaaaaatagtggacggatttcaaacccacaattttctagctgggttcggatgacacttaaagagggtaaaaaatgaaaactttttaggtgtatgtgattaagtatcgaaaatggaagatttttttttttttaaaaaaaaaaatgggctgaaatggatgagaaatggaggagaaaagggtgggggaggcagtggtcggcgagggtttggggctctggttcctgggttttggctgggctgctgtgtgttcgagtgaggaagaaggtgatgaatgagacgcgtatagggtttcttatataaccctatggcgtcggttccgacggcatagggtacacgtgtcaaatattcgtgtaccctatgtcgtcggttcttatataggaaccgacgccatagggtttatccttaaaacccaacatcctttattttccaaccgcctctaaatggtataatgcaattttatacctatggtttttatctaaaaactgtctctaaatgtcaatt

SEQ ID NO: 154034 - DNA, 509 bp, Cannabis sativa
taacaaaacagatggtccaatcggcaacttttacaaaatacagggaccaaaatggtatttactctaaatttaatgatttttgtctaattctgatcaattttactaatgtagtgattgtctatatataaaatcgtactacctaaactttaaattttaccaaattgtgtccacctaaacttttatctacattaaactttccatagtaaaatttggtaaaagtcattgaatttatcaataatatataaataatatcatataatatttttatttcgtttgcatgtattaatatattttccctattcatttacaagattgtctaaacccaatagttcatattttcaataataattagaacaattttcatttttatagtttggatggaaaaagtttgtaaaaatatgatttttcttttctttcacaaaaaaaaaaaaaaaattgttttataggaaaaattagaaaatatgaggaaaagcaatttaagtaactagttacttaaagtagtatgataa

SEQ ID NO: 154035 - DNA, 720 bp, Cannabis sativa
  modified_base (667)..(668): a, c, t, g, unknown or other
actactttgtaacagaacttgtaaacatggaattggacaatggtttcaatcagattttcagctcaatttgtctctattatgtatcgattatagacaatttccacgttaggagctaataaaacattaatttaatcaagcagtgaagagaagacccaagaagagtaagagtgagtgagagagagtaaacctcttcttctttcggttgtactacttcactttattaatgtaatgaaatgtaaaattaatataaatattttttttttgtctttttcatgtacaaacaaacaaataaataatgaaaccattcatctttaaacattggtcaccgcctacgtttcacaaatacaataaagtatgttttagtgcggacaataacacaaattttaagcactcttcggcaatttaattaaaatttaaaatttataaaagtcaatattttgtactttttttgcatttcaaattgaattgtcattctttaaaaaaagaaaaaaaattgaattgtcattcctcatcacaatttacatacatgcatgaattctcccaaaaaaaaaatttccttaaaaacgacaatttacttaggcgacgtttggtaacactttttaatgagttttctatttttaaaagtgaaaaagtgacaatatctttcaaaaacatgttttataaaacnntttttacttttcaattttataattagacatcaaaattttaaaaacaaaaaaa

SEQ ID NO: 154036 - DNA, 594 bp, Cannabis sativa
aactcggagccagtgcaagaacctcacaagaacctcaatcgagcaacaacgagcaacaacgaagacaaacctacttggaaattacacgtagatgggtcagctacagatcaactttccggtacaagaattgcccttgtcacacctggggggtaacacttacacggggcaatcaaatttgggttcagagcatccaacaatgaagcagaatatgaggccctcattgccagcctaaaacttgctcgagaactacacgccgaacacattgagatctacagtttctcacagtttgtagtaaatcatgtatctggggagtacgaagcttggggagaaaaaatgatagcatatctgagcaaaatacatgacctgcttgcacaattcaagagctatgtcctcaagcattcaaatcaaagagaagagaagagaagaaaagaaaatacaacacaactactgatgccttagcccgacttacaaggagtaatataattgctaaggctaatctaatcccaattcaatttcttgaagaacccaacatcacctatgcaaaaaaaattgagatgattgacacatcttcaaactggatgacaccaatagcag

SEQ ID NO: 154037 - DNA, 687 bp, Cannabis sativa
  modified_base (373)..(374): a, c, t, g, unknown or other
  modified_base (456)..(465): a, c, t, g, unknown or other
  modified_base (515)..(525): a, c, t, g, unknown or other
tttatatactaattcacttagggttaggattggattatatagaataaaaaatgataaaataatagcaaaaatagggacttagtggccggccatgtatgtggccccactaattatatttttgccattttaaaatcatttatctattatttcacaagtttcatattttctaattttaatcctataaataccaaaaatatttatttaataattataatcatcaaataaaataatcatttatattatttattaattagactccacaaggtctcttaattaacaaataaaccctaaaatctttattcacaattaagccataacttagtgaaaatttgtaaataagacatagtccaatttagaattataattgattaannaaaatcaattagctgagtcttaaaagcagtattgtctcgactagtatggagaccatgagcctatataatcgagcttccaatnnnnnnnnnnagaatttaccaagtaaattccttagcttattaattcctccttgcaccacnnnnnnnnnnnaattacactctcaattatatagagcgctccatatgttccacgatatagttacgctatgaattatccatttttagattcctaataaacaatgatcctctatagatgatctacattgagtagggataaatttaccgttacacttttcaatgtattttatcctta

SEQ ID NO: 154038 - DNA, 539 bp, Cannabis sativa
ttatattttcatttctctcaatgaaaggctaccttaattcatttcaaaactatagaacacgatttaatttatttaataattactataaaaaaataatttaatcattcataagtatcaccttataatagtgttgaaaactgttgctatctattaataatgtttgtttcttaatgactatctaaattttattatttaaggaaattacactacatacatcttttaaattgatgactttaagttttacactctctttcaaaatctattatgtttactttttttttttcaattattctactaattttacccttatcatttcacgatagtctctatttttctctaaacaaaattttgttccaactttcttacaaacctatatatctattttcaaataacacaatctattatgtttacaattgtatcttaattatgtgagggtgtcaggaaaatttgagtacaatactcataaaatgaggtatatttgaattaaattttaattggatatgaatttaggtgccgtttggtaacacttttgtattcta

SEQ ID NO: 154039 - DNA, 522 bp, Cannabis sativa
  modified_base (488)..(496): a, c, t, g, unknown or other
aaattatgctttaaaaccgcgcgaagcgcggctttgtttactagtttacatataaatggagtatcaagcaatctatcaattaatatcctttttctttttaaaaataggaaactgagcaacctttcttaggttaaatataattatggagtttttacaaaaaaaaaaaatatattaaattttgggtagaaatttacaattttactgtcacatggaatttttttacaaaaatattgtatttttataaaataaccgtaaaacaataaaatagaacaattaaaataacagtagaacaactaaaaaataaccgtggaacaatagtaaaaacttaacacagtacacagtataaaacttacccagtattttttaaaaaaattctgtcctatagtaaaaaagtaaaaagttaaaaatttaaatatatggtgttaaaatcttaatgggaaatttacatggtatactaacttttgttattttttttacaaaaatactgnnnnnnnnnattttttacttttttactatgttttt

SEQ ID NO: 154040 - DNA, 681 bp, Cannabis sativa
gcagttgttatggtttcgaagatcattatgaatctcctattcatattcttcacgattcccagttgttagatttctcaatctttggctttcttgttactgaacttggtgtataaaagggtggctcaagcttgtcatttttcacaacccttctgacattttagtgaaatccattctcagaatggattacttccttcctgccaaaatgtgtcttctaagttcaaaagtttatccttccagactcataatacccagatgcaccaatcattttccatttgttcctacagacttcaagcctcaactggagccagaaacgatggattccagggctgaggagcttctgaccaatccaaaccaagggaaccctatcacctaccatggccgatcctcacaagtgatcctagagggtataggtcttgtgaacgatctcaaagatcctcctcatgctagtgaataattcattctagaggaagattggcatggtattaggtggatctaggaaggaagttggcgtggtttctatcagagtatctagacaactcaagaccctaacctgtgccagaagatttttgcgtcagcctctctccaacattgagaaattgtcttatgatgtcattctaatttctcttaagaaattgaatggcgcaaatgattatattcctgacattctatcccgaaatgata

SEQ ID NO: 154041 - DNA, 557 bp, Cannabis sativa
ttaaataataattcatttttacgagaaaccactccaaaaaggataaatataaatcatattaatcaatatatcttcagataaaatatagaactttttacataacaataaaaatacgaaaaccaactttatttatcaaattatttttacacggtaacagtcgtgttgtattaaataacataatattatgtttggataaaatattatattgtattaattattacaaccataaattttaatatgtgagtcgtattatttaatatataacaaatgactctcattagcttgtattataatatttacaaagaatttggggttaaccataaccccgatctcagcccccgacccagacacgaacgcggaccccagacccagacgcgacccagaccccgacccagatctggacccaaattctagaccgagaccgagacctcggactcgaacgcagaatcgaacctagtcttggacctgaaccccgaactcagaccctgaccttgactcggaccttgatccaaactcgaacccgaacccgaacctgaactctgattcaaacatggaac

SEQ ID NO: 154042 - DNA, 952 bp, Cannabis sativa
  modified_base (899)..(927): a, c, t, g, unknown or other
acccgaaattcggctaccatctcagtggaggacacgtgttaagataaagggaatatggatcgatgaaatcacttttaatggaataactcattaattttgtaagtagtatagtatatttgcaactcactgaatgtaaggtcttatgcgaggaaaaaatatacaaactgttgcttagtatattaacgagaaactatatatcattgaatgaatatagcgagacatcaagtccgttacatctgggaagatgaaagcgacgcatatcgattgtgaaaacacttagcatataatgtaaaaactaagtataacagtcgagtggactcgagacataataagcgaggtgcctatctcgctataggaaggcccattcctgtaacttccccaagttaacttcagacatcttctcagtgagacttacaatcttgacgagtcagaagctaacattcaaaatgagcctcgagaaactctctgttgataaaaactggggttgtcacaatgaagcgttaagctttcaaataaagaagcaacgaggcgtacattattgacctcggagagatagggaaaaaggctccagctcgctatcaagatcactgaaaccaagttcctatcaaagcatcccagaacgctacaattaaagatgtgtttaaatacacgatcattttgacccagtaaaagcggaaaaattacaactctgtgattttcaaataataaccgcatttgtactacgtgatatgtaatcaaaccccatggtttcaggaaaaaaacgttgtaaagattacagtcaactttataattaactgcctactatgtgattataaatagtggcatgtaagataaaaaaaaaggcaaaaaaatgatacaaaataaatcctgagaaactatcagaaatctaataagattgnnnnnnnnnnnnnnnnnnnnnnnnnnnnnaaaaccacgtaaaaaatcctttgtg

SEQ ID NO: 154043 - DNA, 526 bp, Cannabis sativa
  modified_base (27)..(34): a, c, t, g, unknown or other
  modified_base (196)..(202): a, c, t, g, unknown or other
  modified_base (253)..(253): a, c, t, g, unknown or other
  modified_base (489)..(496): a, c, t, g, unknown or other
tagggctgaattatatggattaaaaannnnnnnnatattgggcaaaaatcacttaatggtcgtacacttaaagggaccattccctagttacaatttcaccattttatttcaaccacttatttttctttcaataatactatattttccaattcaatcctataaatgccaaagctatttatttaataattataattannnnnnnaataaaattgtcatttattttatttattaattagaccatgcaaagtctctnaattaataaatagaccccaaaacctcttttattcacaattaagccattgcttattgaaaattcataaataaggacctttttcctaaaggggataacttatgaggggtagctcctcaacttgagattcgaccctctcattgagtcatctattcaaatcattagcctccctattctagcagttcagttctgcttgatggttagagatcttgaacgcaaggagtcattatattccgctnnnnnnnntgtaaggttttcttaacccttatgtgttta

SEQ ID NO: 154044 - DNA, 573 bp, Cannabis sativa
tcatcattatctcgctttttgccctgaaagcctcttcaatggatgatttgatgaaacaacaacaacaaaataaattaaaagatgaaacaacgataaaacaacttctacacaacgttaaatcaatatagttttttttttggaaggatcaatatagttatttaaagtctttagataaaatttttgattcataaaattataaaacttagaaaaataactttgccaacttgtgagataaatggacatcaataagcattaaattttaaggttgagatcatttgaaaaataaatcaaatccaaaggagattattgaataataaaactctaaatttgagttttatacctaacatttagatttaagcttcgccaccaaaaataatattaattgaaatataacaatagcagcaatataaataaaaagatgaaaacaactacaaaataacttataaacaataataaatcaacatatttatttaaaatctgaagataaaattactaattcattaaattcagttctacaaaataaaaacaataataatatcatgaagaaactttacttaaagataaaaaaaaaaa

SEQ ID NO: 154045 - DNA, 558 bp, Cannabis sativa
tcaggcttgggatagaagtcaagtttgatactctggccattcgactgccaggccatgtagacgccgtcatcgaagctcttgacgcaatgcttgcacacgacgggggtcagaagctcatctcttttggcctttttcaaggcctgatctctgaaatccctcagctccttcaccttcacggtcaggttggccgtagactgcaagtccgcctgatgcaactcctctaaggacttcaacttggcagccatctcgtccatagcctccctagcttcccgaagctcgcgtttgtccctggctgcagcctcgccctccaccttcaaggcctcttggtgcctcgcctccgcctcagcttccctttgcttggcttcctcccgaaactttgcctccgtaagggcctccctctgttgagcctcctcctagaacggctgcctttcggcagacaaatcctgaaggattctcacggccttatcaatgcccccgaattcggacatgacgaaaccatgatcgatcatggtcttggaaaggcggccgatctcggcagtaatctgaaaaaaaaaaaaa

SEQ ID NO: 154046 - DNA, 728 bp, Cannabis sativa
  modified_base (585)..(599): a, c, t, g, unknown or other
ttcacgagttaatcaacaaccttcggacatttgaaaatttgattggaggaccgcagaaaggaggatctaaagctcctagttctagcaatgctaatgggggcgctaaggatgaggcatacattacctctacttccaaacccaacaacaagaagaagaggaagaatagcaagaagcctgctcaagctgtgaaaactgttaaaaagaaaaaggctgctactcccagagataagccaaaaggaaaattcttctattgcaatgaaaagggccactagaaaccccaatgtcctaagtttctagcaaagaaacaaggtatttctttctatgctataaactcatgtgttttagattgaagatggttggacatatgggtagagatagtccaagattgaagatgaagctcgaaatcttctattttattataatttttgaattaattgttttaatttaagaacaatttggatttcaattgttggtttgggatttttatcccctatttttcatattattgcagacaattcgttttattttggagaatattataataaacttcttctctttttggaaatgaattgcatttatgaattnnnnnnnnnnnnnnntatcttgtgtatgccagtaccaatttaattatatgtttataatgtttgtatgtgtttgtgttttattattgatacaaattctatggtatattaaactctacaaagaatgaatgccacataaacacttag

SEQ ID NO: 154047 - DNA, 1301 bp, Cannabis sativa
aatacgacgttacaaacgagccctcaaagacttattttgttatgtttatatttttttcttatgtatttagttagaagaattgttcaaccttaaatggtttatgtctctcaattttttttttctaattagttgatttttagttttaatttagttattatacgattcttattctaaggttcttaagtttttttttttagaaaaaaactagatcattatgttaggtcttacatttatcaattgtatttgagttttaattggaattgttttagttgcatgtttattaagttttataattacgttattttttagttgttatattgttgttttaatgttgttcagtacatgatatacttgcagcattttgtaactattaatcgtatttttattggttcattattttattaattttgtcatcctaatattttcaggtgcgtgataagacctctgatattgttgacaagttgaagcttccaaagaaaaatattgtcaaggtttataatttgctttttgatttgtcttgtttgaaatgttatctgattgtagtttattcatttgaaaaaaaatcatagcagaaagttgttttatagtttgtttaatgttgttttgatgttgttttaactgctgcatgacttattttctagtgatgatgaacttcaaagttgatcagaataaacttgttgttcatttcgattcctttggtagaataaagtgagttgcatacattgaaagtgtacaaaaaaatatttcgaagtcttttaagaaagttgacgctactgtacatgaattcataattgagagaattgtgtttagttttggttgtatgcattgaagagcaacattttttaagaaactttgcttttatgaatttttaaacatttttctatttaatttcacatgtatcttgcataggatattgaacgttataaatttttttaacttgtttaaatcttttagtacaatgagaaacaactattattatatttttaatttctacatccagtattggtaaaattatatttttttttttaaaaaaaaacaatagttgttagtagctttttaaaattgttaacaactatttaacaacgttataaaaacataaaaacaactatatatataatttaaggaatctgcagattttaaccactgaaactcaacgtacaaacaacgtgaaagacacatgctcaaaaagcaataaaatcaaacaacgtatttacaactttaaaacaacggtaaaataacgaacaatgttattactaaatataagtaatttttcttcatatttacattctcttcctatcaat

SEQ ID NO: 154048 - DNA, 577 bp, Cannabis sativa
aaaaccacaacatttttgacacctacagcagagaaaaagctagtcaacaactttgtggactcattgacaaaaaatgtaaaatctctttcaattataagttgcattatagtttccttatagttttttttttcagtttgctacacagtttgacaattgattatatttacctaatttgcaggtaaagccaataaacgagagcatgttcgaagtggtagaactaacaagatcatgggtgatcaatttaaaggagaaaatatgcagttgcaacagattctaaattgacgaattaccgtgtgctcatgcccttgttgtgataaaagagatgaacttaaatgtttacaactactgttaacattattatacgacaagaatatggcttgaaacatacagcgggtcaacatattcggtacacaatcccacaacatgggatgtaccaatcaatccaaatcaggtataaacaatacagataaggtatattcatttgcattgtagtttttttatgatttcaaaatagaatcaagctacaaccatgttaattggagttaagttccaagttttttcaagttgatttatagtt

SEQ ID NO: 154049 - DNA, 501 bp, Cannabis sativa
acaatcagccacttcccgcgtgcacatgaggctgcaagtgagcaaggggaaggctgctagcagcctacttaggacaaatctcagtcaagaggggaaaaaatttggacatggccttgtctgaaggcctcatgtctgagtgagccgcacgtgacatggtcgtgtcccctccatgcgcgcgcgtaggctagaaaccctagcctagatatttttcaaaattcaaaaaatcataactaattcataaaaaatccaaattaagttctgtaaaagcctaaatttattaattttttatctactttataggaaaaatactttcagaatgaaaaaaaatatatatttatcatcataaattgtgatttccacaaccatcaaatatgcacataaattaacatgaacagatccaaatcaacacaaacatcattttaaatctatatttcatgaaagttaatcattaccatggctctgaggccagttgttggggataattttaccaggatctagatt

SEQ ID NO: 154050 - DNA, 524 bp, Cannabis sativa
tggtactcttgaggatgaaggctatagttacaagtctagcaatggtcagatgagaattgcaaaagggtctcttaccatcatgaaaggtgaaaagaagaatggtttgtacatttttcaaggagaaacagtagtggcttgtgaagctagttttgtgcaacaccaagaaactgagatggaaatgtggcataaaaggatgggtcacatgagtgaacaagggatcaaagaactgaccaagcaagggctcttaggcaatttcaaaccgaactcattacctttctgtgaagcatgtgtgttgggggaagcatcatagactgaagtttacatcaggtcatcattgttctaaaaggccattagaatatgttcatgctgatttatggggatctcacaaggttggaactcactcaggtaacactattttctgtctattgtatatgatttcagtaggcatgtatgggtttatttacttaaaaccaaaaatgaatgtctagagaaattcagagaatggaaaattgaagtggaaaatc

SEQ ID NO: 154051 - DNA, 650 bp, Cannabis sativa
  modified_base (620)..(620): a, c, t, g, unknown or other
ttcctggaaagttgaagtcaaggtggtcaggaccattcacagtagtcaaggtgtttccttatggagcggtggagttaaaaggtgaaggtcctgcaactggtgggaccaagatcattgcagaggttctggatctcagtatcatctcctatggtcgtttgaacattggttgcggaagggattcaagtacttggagtaccaagatcagctgccgaactggtgtttctagtctcttgtacactgggtgtgatcccagccaaaggagatgtcacaccttgacccatagtaggtggttgcgtgtttggttgctcaggattggtaactggtgggacccttgtgtttccaggagtctacagtgtaggatctgccactagtggatcaacctgatcaactacgcctttgcgagtttgtgccaccattttgtgtgtgtgattaaaattaaagtgaagagaaaacttggattattgctctcaatgaaagcaccaaaatattgatctcgtttttagccaacaacaatgagtcaattaataagcgatagaaaatgtaattaagataaggtaagaactaataaacaataaagtgttgggttttatgccctaagtaaaactcatttcaatataatnagatttacttattaatatagttcagaaata

SEQ ID NO: 154052 - DNA, 841 bp, Cannabis sativa
ataacgaacactctcgtgaaaaaaaatattccgagatatgttttcaggcgtaaaatttgactaagaggttgtaacaagagattgactacggtagcactcctcatacaaaaaataaagttgaattgtctaattcacatgcatataaaataaaataaccacgcatatgtataactacttaaattttatttttaacatcttaaattattacaaattcactataaaaaactgttacttttagtgacaaagttacaatataaatttttggtgagtaaatgtgacttttagtcacaacaaaaagttacttgtaactaaaacacaatattgatttataagttgtcattaatatagtttatttattgtgactaaaaacacatgatttaatcacaacaaatcgtaattttataactaattattttagtcacagattttttagtcacaatacaataataataataataatttataattagccacaattttttttatttttaattacaaattttattatgactaaaagtaaaaatttttataataattttgaatacggtagaaccacactatctctcgcaggggaatggcccccaaaatttttagtttgtgatgtgttatatattaaacacactataggtttgcaaaaaaaaaaaaaaatccttctaatatatatgtatatatataatactacaagaaatgatacttttgccagcacttgcgctggtaaaatagaatttatccatgatgtgttggctaaaggggattgaaaaatcaatgttggtattagaacttttgccagcataaaataaaaagcgctggcaaaaaagacttttcccagcacgtaaatgtg

SEQ ID NO: 154053 - DNA, 521 bp, Cannabis sativa
ttaatataatcgacaacatatcgatacgttgtcgatattctgtcgacaacatgtcaatcagacaacaatttcccaacatgtcgacaacatatcgacatccagtcgatatttagtcaacaatacaaacttaaattgaacaagttaatataatcgacaatatatcgacaacatgtcgatatgctgtcgacaaattcaatcagacaacaatttcacagcatgtcgacaaaatatcgacatgctgtcaatattcagtcgacaatacaaacttaaaatcaacatgttaatataatcgacaacatatcgacatactgtcgacaatatagggcagaaaatacactaaaaccaccaatcgacatcctatcgacatacaaacgatatcctatcgacatacaaataacagcaaaattcaaatagacacccaatctatcgacatgctatcgatatcctatcgatacgtcatcgacaaccctgtaataaacacagataccattgaaacactaacatctacaacctaaagatca

SEQ ID NO: 154054 - DNA, 540 bp, Cannabis sativa
ctctctctctctctctcatatctcaaagcttcaaaacccacaaccatcacagctggcaaacctctaaccatccacttttagccattatttgatcccacatgccacactagtgaattctccagtgggcggtgaccatagccctcaagtataacctcctcattcaccatcattagtctgggatcgcttgtcattgttttaatattcaaacttgaatgctttttttagtcaccttcggtgtccgtttgacgagctgtcttcaccactatacttagctctatctacgaggagaacaatctccactaagccattttgtcacttttctacttatactagtaacttttttgtatctctaccccttctcggtgaatttttgccaataccgagcaccgttttgacaaatagttaacatgagtgtgatttactcattgggttggtggattttatgtcctaaataaaacttaattttaatataatcttatttactagccaataaaagatcaaaaatcattttatgtaacttggttcacatgttactttcat

SEQ ID NO: 154055 - DNA, 608 bp, Cannabis sativa
aaggccctaacattaaaattcgtactcttacagtacaacagaaagaacactatttttggctaaaaactatacaaattcagtaaaagttgccttcctaaaaattatagggatttcaactatcttttcaatggtataaagattattaaaaatagattaaaactgatagagttattctagttttaccgaaactatttttgagaaggaatatagagtaatgaattatatgactcagcgaaaatataaacttttggcattgaaaggttcagaactagaagataatatcctcatggaaattttaagaaattaaattccctttccaatgataccaaaatatttggaattggaattatattcagagagatattacaattttactaaaatagttttgcaagaataatattcaagaaatgaatcacatgaaacagaagaaaactaatttttcgacatagtataactccgaattaacgaaatgtttcttcatgaaacttataggaaatcaaataagatttgaaatcatatataggttgttgaccgaggtttccggcaactaataaaatatgaatatgataatgagctgtaagaaagcgagatgaagactttttacgtgg

SEQ ID NO: 154056 - DNA, 658 bp, Cannabis sativa
aggggattagggtttcataatcattttgggtagcgtgcctaattatttagggcgttacacttactgtgtcccctgatctgattattcttctaacacctgaacggagtagagattgggtagtccaattacctctcaagacaaagcttgggttacttcctagctctgctgacaagaaatcagagtggggaaagtatctagctttatagacttttccaataagagtatatggattgcaaagtaggcgccaaccttgtttagcgagcatggcaatgttgaaatcatgcaagtgctgaaaacccatgccaccatcatatttataagcagccatacactcccaggacctccaaataataccttttcctttactagaagatgtcttccaccaaaatcgggccataagtttttcaatttcattacatgtaccaagtggaaggaggaaaacactcataacatatgtggggagcgattggacaacagttttcaagagaatttatttgccagcacgagaaagaaattttccatcctaactattaattcttgcaattaccttcgtctttagaaatcctagtacatcatttttgtttctcccaataatgtttggaagtcccaaatagaggcttcattcagaggcttcaggcatatggagaatatcacaaat

SEQ ID NO: 154057 - DNA, 583 bp, Cannabis sativa
attattttctaataagttagtgaaagaattttctattgaaatacatttcttacatcaaaaaataaataaacaaacataattttataaactccaaatattatttaattataataaataaacatgacacaataaccaaagaaaaagaaaaacataaacaattttatatatatattatttattttttaaaaaattactaaaaaataaatatcacacaaataaagtgatataataaacctatatgaatattattattttgtttattaaattagtatgtttaatttatagaaaataaaataaacacgcgtgtacatacaatagtatgaatacatttatattcaaatgatatatttatgttaagtacatatatatttgaatttaacaagaattatggaatttaaaaaagaaatataaaatagtcaataatgattaccacatatatatatattataaaaaaaattaaaaaaaattctaatggtatataaaaaatgtatgagaaaatagtaataagtttttttgcacatattttgtaattaattaaaataaggctaattagtaattattccttccgaactttgacatgtac

SEQ ID NO: 154058 - DNA, 1228 bp, Cannabis sativa
  modified_base (613)..(624): a, c, t, g, unknown or other
tttccctatgtagaaccctatgaactggttttccattttaggaagccagtttaccagttttggcagttttagaaccctagttttttgcattttagcgatatttagggtatttccacgctatccatcgataatgaaacttctacttttaactttaagtccccaagaagtgatttagcgtatcacttatcagttttacaaatattgtgacttatgggcctataaattgttgagcaacagtttcaactcaggttgagcgatacacttgaattcaaaatcatggtaagattagtataaaaatatctcatgtgattacatgtttagagtgcatatttatgaatgttacataacatatcagtggtggcgatattagtgtacatagagttgcactaaattttgaaaggtatatgtttggcatagtactgattgatgttatcacatcagtatgaattgagtaccgagtataggctaatattatggtaaataatactgtcgtatgaatgttctagactcagtacacctgggacacatgataggggtgtgattgggtgtatgggcacctagttataatctagtttgtgttatgttatgattatgcttttcttactgtgtctgnnnnnnnnnnnntattgtttgcatatgtaggtaagggcaaggctaaagatgaacaataatgagcttcagctaataaagattgtacatatcagggtagttagacctggagtgttcgatattcgggacaacaggctgtattttattagtcgttagacgacaacttttttagctgaatattttgtaatacagttgtaaattttaaagatgagatccctataaggcttttgtatattttattttaaaggttaatcaagaaagttttaattattcacgtttttccataaaatccttgattaataaaagagtgcacaacattaagaaatcacagtaacacacctagtctagtagggtgttacaattttagtatcagagcggccaggttgtcttccaaagatcatcacgatatggataattgtcatcagagataagctcagctcacggtgcagtaagccttttatactttagtggtttattttttttagtaagtgataggaaaagcctggtatgaagcatattagtagcctaatatctgaataggtgaatattttattttctcaagtaagtgataattaaaatttaatcttaatcgcgatctgaccaggctagctcatggttt

SEQ ID NO: 154059 - DNA, 664 bp, Cannabis sativa
aagattaatacctttctttacacgccatgtgtgatatttggcacaatctttcttcacatgtccaggttggttataaaagaaacaacccttagaatgcaattggagcggtcatgggtcaaagggtcgacagggtgtttcacacaatctattatgctagtagaaccctgaatgatgctcaactgaattatgccacaacgaagaaagagatgttggcaattgtttttgcatgtgataagttccacccctatctaattgggaataaggttgtagtctacacagatcattctgcaattaaatatcttaagaccaaaaaggatgcaaagccaagattgattcgattggtgcttctactccaagagttcgacatagagataaaggacaagaagggcactgaagatctggtagcagatcatctgtcaagactagagttggaagagagccacaatgcaaaagaggtacagataaatgagcaatttcttgatgaataactttttagtgtgagggaaaatctaatggtaccgtggtatgctgattatgtcaacttctttgctgccaaaataactcctgagctttctcgtcaacaattgaagaagttcttttctgaggtgaaacattactattgggaagagccaatcctctacaagcactgtgctgattagataat

SEQ ID NO: 154060 - DNA, 547 bp, Cannabis sativa
  modified_base (39)..(41): a, c, t, g, unknown or other
aaagaatcaagcgtaaaatagccctaaaactagaaacannnagtgaaaactaactgaaaatacgacccgaaacttagactaattttagcctaacaattattccaattttcgttctccttacgtgacagtgcttaggtggacaaaattagggccatgtggcaatacgacttatcggtaaggacaccaagtcaatacctgagcaaatagaggcttcacactcaaatgggcatcaaacacaagactaacttcctcccagaagctggccaaccacccctagctgaccctatggccgcccaacctcaatgcaatgccatggccggccagtctgctccctgcaggtgcttggtcgacgaaggagggttctgtaagattctttatgcactcctacgtggacaacaacacttgggctacgaatttggccctaaaagtccaacagaatagctgaataatatctagattcaatgatatttttgttttgtaattaactaattaaatatacaaatatctagggtttatagttgtaatctagggtttaggcctcctatat

SEQ ID NO: 154061 - DNA, 662 bp, Cannabis sativa
ataatacaccaaattataactaaagctattctaataaagcaataaagataatataaaactatgatacaaaatgcaatattaattcaataactaatatagtataaaattaattcaataaataatatagtataaactatagtatacattaaatatatttttttaagaaaaaaaatctctctcaatatacttaatttataaaacatgtttacttcattcatttcattaatacaaatatatgtgtacatcattgaaaactgtaatactaaagcaaactcatacttttaataagactaaacaaaagtaaaaattaaggtcgtaacattttttaattagttttataatttttaaaattaagaaagtagaaatttttttttgaaaaatatgttctataaatctgttttcactttttaatttttcaattaaaaatcaaaattttgaaaacaaaaaaaaaaaatcactttcaatatttttttataatttttttttcttaattaatattttggactccgaccagacttggacccaaattccccccacgactctagcgttgaacccggtctctgattcgaacccgaatctgactctgaacttagacccgacttaaataaaatcaaaaaataaaaatggactttacaaaatgcacttttattttttatttttaa

SEQ ID NO: 154062 - DNA, 502 bp, Cannabis sativa
aattgccttgcaatcttctttagaattaacctcagttgtactaggaaaatttccctgaggacaggttgtaatctgagttgccaattgccccatctgagtctgtaggtccttaatggatgatcttgtctcagtcataaattgttgcaataagtctgtctgaagaccaaaactcccacttgacccttggtgctgtggttgttgttggttctacgtttgattctgattactctgctggtaaaacccagaattccttcgattccccccttgattgaacccatagttgttgttctgagagtaattcccaatggctttaactgcatccattggcaaactattcacatcttctgtgcattttgcatagggatgaggacctccacataactcacaacccacctgagcttgttttgcttgcacaactatcaatttacttagggcctctacctgagctgtcaacttagtaattgcatctacctcaagtataccagccaccttctttgtttgg

SEQ ID NO: 154063 - DNA, 605 bp, Cannabis sativa
ctatgccatgctaagtatataataatattgagatttaagggttatgcgttcaaggcataatcgggttggactaggtaaccataaccgagatgaaccagtcaagggccttattgtctttagacgtgtgagagcaacacgtaggtttacggcacgtagacatatatatacatgtgaaagtaacacataggtttacgtcacgtaaacataaacaggcatgtgagcccaacatgcaggtctgtgtcatacagacagatttaaatggcattactgtttatattatatgatgagcatattattgatatgttttatactgtctttgctgggctttgctgacgggtgctctactgtgcaggaaagggtaagactcttgttgatcagccatgactacaggagctggacgaagaatgtacatgtccaagccatatcagaccaagcgggttggggtctaccagtgttgcatttttgagactctattttgtcgcctaggtcggctgaaagaaaaggagttgtaataatattttgtaaatgtttttgggatcccaacttctgtaacttttagtttataaagtttaaaatattacaagtctatttccattcctattgtt

SEQ ID NO: 154064 - DNA, 520 bp, Cannabis sativa
  modified_base (468)..(477): a, c, t, g, unknown or other
tacaagtgacaacaaattgtaactcctctccaagttacaacatgtaggttacaaaagtgtaggttaaaaccatagattacatatttatttactatacacttaatatatatatatattatttagaaaataattatatattcattatattttaatctatacttattatatgataaaataatataacaatcgttattaaactagaaaaaatgacttttctcgacattttgaaacagtcgtttaaagtattcccgccagtttctataaccatagcctatacgaccatcgcgaaatggataaaataggtgacggttaaaaaccgtcgctaatgtagacttctcgacagtttaaagtcgttgcctataacagggcataaaaccgtcgggaatgtaagaaaaaatgagaaaaaagtatagatttttctagcagaaaaatttgtattttcccctattttttttcctgcattagttnnnnnnnnnnacctaaattaaaataaaacaaataattaattttattacaataa

SEQ ID NO: 154065 - DNA, 831 bp, Cannabis sativa
aaccaaccagtcactaagacagccaggcgtttccgtatttgagaggttggggacgactcatgatctcaaaaacgatctaaacaggaggagaggagtggacgatcagcttgatacgccaatcgtgtcacccagaacccgcgctccaattcgcgctcaaaaagatactgatgtgactcaaaccagccaagaggccaaacaggttagtctagccgtgcaggcacagttggacgaactaaaaagtatgttccaaggcatggccggtcagaggaacaacgatctcgaattagaccgagcacgtggaacccctttctcccccgagatcaatattctggagttaccccataagtttaagatgccaacctggaaaatatatattggaaaggaagatcctttgtctcatctcaagtatttcaagatgcaaatggatctgcaaggagtacgaggagatgtatgttgataaatttttactgccaacctctcagaagccgcccaacaatggtatttcaagttggcacccggaaagtttaactcatggaaggctttctcctcggagttccatgcataattttcctgctctcgccaacttctgttgcacctaggagatctggacgaagtaaaacaaagatcaggagagcctctccgagcctatatcaacagattcatgacgaaggcgactaaggtttcacgggtaaacgaggatggaaagttatccgcgataatggggggcattgaagtccttggtgaaatttggaaggacaaaaggaagaatggaccagtcgactcgatgagtgatttccttgaccgtgtagaaggttttatcaaacttgaaga

SEQ ID NO: 154066 - DNA, 708 bp, Cannabis sativa
  modified_base (31)..(42): a, c, t, g, unknown or other
  modified_base (679)..(682): a, c, t, g, unknown or other
aactagcaatacgtggctcggcacgtacatnnnnnnnnnnnntatatatgtatatatataatgtatatagtataggcagatatatatatactatatagattgtgtacagtttattatggaaatttttacaccaaaaatacaaaatagaatttttattacataaatacttacacacggttacctcaatatttttaccttttctctttattttattacatatataccacatgcacactccccccatgcatatgacacgtgcatctcccccatccctcttcaatcaaccattaatcatgacttccctctcttttttttcattttttcctttgatttttcatttcttttcagtttttttttttttaaatatcttgtaacctccactgatgacttatatcaatcataccttacatcattttcctctctttttctcttctttttttctttttataattttcaattacttttcagttttttttttaaaaaaaaagaaataaaacctccatagctgaactcttctccttcccttgtgccaaagaaaagttctaaaatgggattgaaattttagctaataggaataagggcaaacgtcctgttgttcaaaacgatgactcggattttgctcctcatttgtcgaaacgtgagcgagctcctcctaaaaagaaatcaaaggttactgccnnnnaaaaaatttctcatgctcctgctcaa

SEQ ID NO: 154067 - DNA, 506 bp, Cannabis sativa
gtaatgggttttatttagggcacaaagcccaacaggttctaggtctgaaagtgaagagctggaagctgaacctgtcagtgcagaacctcctgttgcaattccaaagaaggacaaaggaaaaagacccattgtctctccaagtcctattcttcctcaaaaaagaaagaggccctctggtattactcttgaaaacttaaagcctcctcaaggaaaaactgctaagaaaaaggctcggtctgctttccctggtgctactgatgaacctactgctgcatctgcatccacttctactcctactgaaatggctgaattcaacttatgttttggaagaatggagacaagtcaaaccttacttctcaagaggatggacaacatcatgaaattcttccaatccaatgatgatgaataagtggtccattttttatctcttgctttatatttatgtgtgcttgaaaattatgactttgttcatgtttttttgttatctttggctccttgatagacaa

SEQ ID NO: 154068 - DNA, 635 bp, Cannabis sativa
tatccgggagtagcagagaactgtatgccgctcattggtggagatgctgctagcatagtgcccgagggctgggctccgggcacatatctcgctatcccagtgggataatatcctccataggccactagttgggcctcttcaaggttaatgtatttttggactctcctctggaaatcctgaaggtttgcagctccttcctgttgtagttcgttccagaacagagtccctgtacggatgcctgcctggagaagggcaagctgttgtccgtcatcaactttcttggttttcgaggattcctcccggaacctctttatgtagttctttagggtctccgtaggcagctgcttgatattaatcaaggcgctgacctctagattgacctttcttgcggctacaaactgtctccggaagttggtctgtaacttattccagcagcccacggatcctggctccaatttcttgaaccactcctctgcggacccacttagagtaagcgggaagcacagacatttagcgtcattgctgactctcatgaccgtcatgacccggttgaaccttgacagatggtcgcttagatcagagttcccggtataagctgccatttcgggcattttaaagttcttggggagctctgc

SEQ ID NO: 154069 - DNA, 734 bp, Cannabis sativa
tgatcaacatgttcctcatgatcggaagataggggatttagaaaaagcaaaacagtcatgtttgttgggttccttccaactctcaaagcgatctcacgacacattttgactactcggtaaagaaagagaaggtggggtttttattaaatttgctaacatatggatgcgacatcattgtattggattaatcagtcgaggtgaggcttgtgaccgggagaaagacgtgggtccatcgtcaggtatctcctcactcgctcctcttctcttaataatgctaaatctttgatagtttatacaagataatatgactttgttgttgaaaacaggggtgtatgttccttcgcaaaagtcacctcctttagcaccctccgaactctgtttagttgatgagcgtcatactcctgccaatcttaatatcgggtccataggagatgatgtaatggtagctttagtgggtaaaccttctgacactttgggtggtaactctcacgggaatgatgtagcagttcgaccaaactctgaaccacgacccttccattgttcaggaactaatggtgacagcgatgctaccacgaacttatttagtatatatatatttttgcttatggtaatttgttcgtagtcttcaccatatatttatatatttttttacatttattattagttttcattacatccccccccttttttttttttttttcaataagtactcatctactcaaaaaaaccaaacc

SEQ ID NO: 154070 - DNA, 966 bp, Cannabis sativa
ctatagtactatatataatttgtgtgttttagaaatttatatgtatagagtgcggaattaataaaatatatatgctttataattaaggattgacatacttctatttattgattttttgagtttttgtcccacataagttttgatctgcaaaaaaaccgattgttgtggctaatcgggcttccaagctctctcaactctctttagatggatttaatgtgtttcacagaatgagtagtgagctcggtgaccgagaccctatatgagacctttcatcaaggtctctgccacaattaatgtaaaatattttgacaattaattcttgaaattaaattgggtaactaaaatatttggtaattaaatctaactataattagaatatttgattatagtaaataattaattatattttataaatcaaatcaaatcaaatatttgatttgttaccatataaaaaatattctaacattctcccacttggtcagtatttaaattaatttaccacttataacctaatgtttctcattacataataaatatatgaatcgtagtgatatgtcttcattatatatcgagtattatcttccatgtattacgacatattcataatataacaatatacttaatgtggcaatgtactagtgaacaaactttaaaccttatgtttattttgattctcttacgataattttttcagttgaaattaaggtgcacgtaaatatgaaaaaatatcaaaattagagtttcattgaataattttagttgtacaaacaaaaaactctatatggggtaactaatcccatatttactttacgatccttgaatttgtattgcgacatgcttttagttaaggatatgtgatcacccaattcagtttgcgtgcttaatgaccacttattatcacgcctcgttatgaccaaatacttaatgtcgatatgctagcttcgaccagtactcttatagttatta

SEQ ID NO: 154071 - DNA, 847 bp, Cannabis sativa
caacataaaaagaccgtatttatgtaaataaatcaaaaaaatcgtaaaaatgtttaaaattccgtgaatccgtatttttgtttttttttgttgtttttgtgcatttgtgaaattaaccctttcttatacttatttatgctattttagattatgattattcctaaaaaaatattttaatttatagattaggtataatatataaatttcctgtaacaaaatttacgtattattaacaattaaatacaaacttttttttattaatataagtacaggtttataatctatatatatatatatgtgtatttttacacaagcatagttattcgagcaaaaacaattattctacttcaataatattttttgaacactctattttaataatattgatttagaataataatattaaattatttttgtatttgtttctttttactaaagaaaaaaaaaataatcttttaaataaaaataataaaaaaaaaactataccatcatttacaagcttatttttattaaacttaaaaaattgttatcttttttaattatattataaaaacacatagaatttatctgttcattctactatttttaatatttgtcatgaaatgactattcttttatatattttaaaaataataaattatttatgtttctaacttcaaaatgttactttgtttataatatacaattctaaatgttttatattcaattatatcacttaatcagcataaaacaaatcaaaatatagaaaattataaaagtttggacaacaccgcgcgtagcgcggcttagttccctagtatatatataaaggaaggtttaaagagagatgatgtggcattctatgtga

SEQ ID NO: 154072 - DNA, 617 bp, Cannabis sativa
  modified_base (178)..(202): a, c, t, g, unknown or other
  modified_base (251)..(267): a, c, t, g, unknown or other
  modified_base (325)..(342): a, c, t, g, unknown or other
  modified_base (576)..(579): a, c, t, g, unknown or other
taattcctcaattattcataattatctaattagggttttactaattcaatcttaattcctcggtattacactaaccatgtcaggattaagatccatagcctaagatcaaccattgatattgactaagaaaaatataacggtaagtttaagatttcttatctaagatcaatatcggtcnnnnnnnnnnnnnnnnnnnnnnnnncgatactggtaaactttgccgatgacttggaaaggacataacacttatnnnnnnnnnnnnnnnnnctatcgttgattatcatgccagtcgaaatccagtctgacaaatcagggaattaaactnnnnnnnnnnnnnnnnnnattatattccactgtgctgatgatgtacacccaaaatgtgacttccactatcggtagttgtagtatagatcgggtattcgattccacaatgaggggtttatggacaaaaacgttagtagaaaaatagaaacaaaaggttaataaataatgataatagtaacaaatggttttgtgatttttgatttgataataaatattaaaaagaagtaaataaaggtgtaatcaatagtaaannnnagaaaggcttcaagaatcatctatatgcttgtttagct

SEQ ID NO: 154073 - DNA, 681 bp, Cannabis sativa
  modified_base (253)..(253): a, c, t, g, unknown or other
  modified_base (624)..(624): a, c, t, g, unknown or other
agggtttgtggcacgattgttgtgggcgggaatgtagcaatctagttcgcccaggtatccgtcctggtcgagagtccgaaggtgcaactcagtaaccctggacggagggcttacccatctggcgcccaaggcaccttgccttctatgaggaaccgtagcagcaagttcctcactaacgaagtcctcgccctcaaccaggatgtctccgtcagcatcgactggctctccagcctcgttgtactccccgtagttngggggttcaacctctgcctcttcccccgccttggaggaactgccaggacgtacatcgtcctgctcctcgatctgctggacctcagcgtccccttcatgatccccctccatctggacagctggatcctgttcggcgctgggcaaagtggcatgccgagccacttgagggtgagatgcatcagccagacacgttgttttctttgtacgagtcatcattctatggctgggtacagcgtttggagaatgtccttcactagaggaaggtgggctagaacgaagacaatgatgatcttcgtgcaaaagtcgaagcaggtcttggtcgatccgttgtccgttttgccaagactcacctaagttcatctacaaaagacnacacacaagatgagtgtttggtcagaatatcgaacgataaacaagcaaatatgccga

SEQ ID NO: 154074 - DNA, 1085 bp, Cannabis sativa
gttatacatgaaatgttgagttagtcattattttgctaagatttcaattggagttgttttctgtaggttaggtttgatgttttagaatttgagttgttgttattgattaattgtgtggttgagaaagtttgagttcaagaactcaaagcttgcttaacagtggtactttttaattcttggtgtaattgttgtgtttaagctgtaaaatatgtttaatatgctatatgttgatgctctggaaagtttggtggtgattggggaagatttgagtaggttttggaggtttaaagtttgagaattttcgtgttgaatcttcccagacaaccggaattccggttggttcagggctgttccaaccggaatttcggttggactgtatcggggaaggccgattttcgtattttggccataacttttcactcgggtgtccgttttagacgttctatataccgtttaaaagcttatgacgagctctactatagtgtaaataaactagagccaaattatgtattttattttagggtgtcttcaccacacagttcagtagaaaaatcctaagttcttttcgagcattagagaagtgttgtagagtaaacacttatcaattttatgttgtgacatagggcctccattcagcgcgtaactttccattcaagtcgacaggcacacttgaatttgaaaatgaggtaagactagcatagaacacattatatatgtatgttgtgtttgtgattgtatatgttttgggcgatatcatagcggtacaatcattgtgtcggttcagcagtacaggcaccgtactggttaagagtgatattcacccaagaaagtattgattggtgctatcatagcggcacaaccattgtgaaggttcgacagtacgggcatagtactggttaagagtgatatcatagccaattgtacttttaagtactattgatactatcatagcggtacgaacatagtgtcggtcccgcaatgcgatcatagtaatggtagtgggtgatatcatggtcaatagtactaattgttaagatcattcttaatcatctgataagcattgcagataggtgtatgggcaccta

SEQ ID NO: 154075 - DNA, 648 bp, Cannabis sativa
gaacgaaaggagtcatattattttactgacatcattgtaaagcttacgtaatctctaatgtgtttatttatcgtttttaggaattttatatttataagaagttagtgtatagaattataataagcatacatattagtaaatgtagatcctcgtaaaatatatttcaaacaaaaccatctattatattggtatggggattggcctcaataacattgcacacaatagatggcttccagtagtttacctcttccgtgttatcctgaaaaccaattttcactttagctctcttgcttgaattcatcttctcaactgtcgcttgagagtctaaaagagactctacatctttggttccatcaaaacttctcttcaaattgcagactacgttagatctcaatattaggggagtagtctgcttcccaacattgacatcttgagtaacccgatttgccaagctaagtcttgacgaatttttacttcgtcgtttgaagatctccttagtttcctcgggcaaataaatttttttcatagcacttgttaatgcagatttttgttaactaaatttgagcctcacgactataattctacacataaaaaataaaagttatagaaaaataatatatgaacacagggttttttttacgtggtttt

SEQ ID NO: 154076 - DNA, 549 bp, Cannabis sativa
  modified_base (192)..(192): a, c, t, g, unknown or other
cttaaatagtatatcattggataaatggtttataaatcatctgcttatgatgtcattcttctatgaaattgaatggcacagatgactatatttctggcattctatcccaaaatgattaaatccacgatcttagaaatctcctacttgtatatgtttacttcaagcaacctaaacttagagttagattagtantggtggtccaagaaagaataactactcattgtatatctggcataaatttaagtctttgactttaaattttaaattctaaatagaaattttaaatttcagtttccaaatacattagacaatatagtacaactttcacaagtttaatatctattttctgtcaatagatttaaactgtatattaatgattatgagtttttattctatgaccgggatccacttggactattctaagaactctttcttgtaactaaacctaggattcatcaaaccacaacaatatatctatggcatttgtatcttgttcatagttgttttgacaagatcattctctgtaaagagataatatgcctatatcca

SEQ ID NO: 154077 - DNA, 1605 bp, Cannabis sativa
aggattattttgtttttttcttagttttcgttggcctcgcgccgtatcaattaattcctcaagcatactgcctgcttccaggctaatttatcttatacgctgcctggagctggggctcgcccagtccggctgagattttatacttttacgaacttgtttctgtccctaagaagggggacaaatttaaagatggtttttatggacttcggtcccatccattgaatgagggcccggtcccttataactatcagaagcatgtgaaggagtaccaccaccgcttcttcttttcctccggcttccaagccatggaccgcttggagcttcttacggagtgggtcagaatccctccctacctgcggaccgcgcctactcaagtgttcctccagtgggccaagactttctctacttatgacaagaaggccctcaacgttggggacttagtcacgatggagaactgtcagaaggccaagctgatatccaagagtcagtcagtggatgtaacctttccaaggtcatctgtcccaacgtaaggactccagccgcggaaagggcactctgggtggacataatcacttcagcagaggaacggtaccagaagtacctcttcaggagggagcaggagctggcttacatcaaggcccaggctgcagccgggaggacccttcgtctagaagctggcacggatcgaaggctccaggcctaagccttcggtcccggttcctaatattggtgctccagatgcaagtacctcaggttcccgtaagtctcccttagtaattcaccatgtcccatctgtctgagagtatacctaatgtagacccataggatttgatgaccgcctttgtaagtttaggatgccttccacccggtggggggatcatgccaaagactactatttttcctacttgggccatttcttgggtcagtcccggatgggttctggacctcctgcacccattcccctcgatcattcagcccacttgtcctccagttggtttctccccagacaactttcttggggatgacgcagccaacaccgtagttcaagactttgttggggctaaattagagactcggggtaggattagctttattgctttgttgttgggcgcatgccttacggttattctaacacttttcttatttctttgttgcagcagccaagccaatggaagatctcctggcgacccttgccgaggcctacagcccagatccttctctgcctctggcctcatcccaactagtgacacccgggagatcgtcgtccagtgcccctttaggcacaatagtcttggtagacgaggcacgggaagtcgaggaggatgagggcgagattgcggctgccctcgagcgctagtggaagggaagatggttaaggctgagtcttccaagcggcctaggaggagggacactctagctgttagcaccgactccgggattccttccgaagcgaaggagtacactgtgccgcatggcattgttctcatcccgatccccgcagacgaggaaaggcaaatgctctgcaccgccaaacacaactacgccatagacgagttcagccggggacatgctgaggtggaggccctgaagaagatcttgcgggag

SEQ ID NO: 154078 - DNA, 821 bp, Cannabis sativa
gtttcatctactaagactcattcaaaaattgagagaagatggatgagatgaattagtttatgaggtggaatctttttgtgaacctgttaatatatctgttctagattttaatgctcactatactacaaaaaagaagaagtcgtggtcaacaagatgcaattacagtggaacattattacagagttgatcttttcaattcagtgatagactttcaactacaataattaaacaacaaattcaatgataatacagtggagttactcattcttagttcagctttagatccgagagaaatgcacacataattcagaattaatgatatttgcaagtgggtacaaaaatttaacccaagagattttacagaatacgagatggtacagctaaagatgcaatttgaacattttgctcctgtacgagaacttcttgattatactgttttgacaactatttttgatttatgtcattggttggtaaaaactagaaaagtagagatttttcaaatcgtctataaagtgataactcttattcttacgcttccggtttcaatagctaccacagaacgatcttttttagctatcaatatagtgaagactacacttcgcaacaagatggaagatgaatttttaagtgattgtttgctcgtgtatattgaaagaaaaattgccaattataaccagttttatttttatttatatttgagacattggtgacttttttagtaattttttcaagcgacgatgattttcgtgatatgcaagaaagacgttctgtattttaattttaattatgaatttaataaaacattgaaatttttgacactt

SEQ ID NO: 154079 - DNA, 581 bp, Cannabis sativa
  modified_base (36)..(44): a, c, t, g, unknown or other
atattgaatttaatggattttgagagaaaatgaatnnnnnnnnntggtattatctctctctcacccgaactctctctctctctctctttaaccctttcctccgctttctcatggtagcataaaggtaagctcaacattctcttatttgttgtttaaatttctataagtcatgatttagtttgttgatattgatatgcgtgtgtgttcgaaataaatccaaagcttgcaatgcgaagaaagtttcaaggatcgtcaagtgaaaagtaatctgaaacttgtcaaagaaaattttgacgaggatgaagacgagcacaacaacggtggaagaggatgaagcttgtaagggttttgaaacggatgcgatatatgcgagaagtggtttcgaggaggatgacaacgatatttttttttgggcaatccactatagcgacggttagtatagccgacagttttaaaccgtggcctatagtcgacggtttaaaactgtcgagaattcttttataacgacattttttcattgtagcctattctacccagtatttgcgacgctcgtatatgcgacagttttatagaccttcggg

SEQ ID NO: 154080 - DNA, 1223 bp, Cannabis sativa
tgtacacaaatgtttttaatggttggtgtttcacttcgaatttagcttggtatccaggaggtcgcatagtaattggttggaatcctcatagtttcaacattaatactatgaggtgtactagtcagcttgtgcactgtcatattacaacaactggtgggaatatttctttttatgctaccatgtatatgcttacaatgatagggaaggaaggaaggaattgtggagacacttacaagagattgctacacaggacccgtggttagtgcttagggatttcaatgacattttgacaagagaagagaggatagggcataaagttagaggggatttagcgcctgaatttctgctttgtgtggagaattgcaagcttgaggatgtcaagtattgtggcaatttctacacttggaacaacaagcaacatggagaagctaggatctattccaaaatagatcgaattcttgcaaacccaagctgcattaataagtacacagggggaaaagtattgtttttaaatgaagaacttttttattatactcctagaattctgaccatccatcctaaaataagaagtggcaaaaggtcatttaagtatttcaggatgtggagttcccacccggactatggaaagaaagttaaaggagtttgggaatcaagtataaaagggactaagatgtatcagctggtttcaagactgaaaatgctgaagacagatttgaaggagataaataagcaaggatactcaaatctccatgctgcagaagtcaaagcttgagaggagctacagagctgccaagacaaactcaagcttgatcctttgaatccttctttgcacaatgaagagatggaagcaaggaaaaagctgattaaaactacagcagatcttcattcaatgctacagcagaaagaaaaggtaacttgggtgaagaatgggaatgaaaacactactatttttcactctagtatccgaatgagaagattacagaacagagtgtggtcaattgaagaacaagatggtaccagagttactcaacccgagcagataaatgaagccttcttagcttattacaagtcattattggggagcacaatgaacaataggaggaggctgctgccaaatttgatcaaacaaggcctcttgttaggctatttttagcctaagttctgggtcgatttcataggtgttttctctgttaatgttaccttttagaatggttttacgcttg

SEQ ID NO: 154081 - DNA, 838 bp, Cannabis sativa
gagttcacataatagggttcaattaagtgctacaacatcatttggtggcctggacaaaataataaccagtaactatatcattttctaatagggtgggagttgggagaaacgagcgcctgggctcagccttggtgggtctaggtggaagcttaagggtctaaggagaagaggttctaaggtattgggtatgttggaaagaagggctctcgatgatgggaattcagacataatttgtctctatttgtgatacaaagttttagtttacttttagtttaatttagtattcaaaataagtgttttacacctattacctcatgacctcactattggggtatgaatttgtgtctaaataagtttgcttaaaagtttcgatcttttattcttgtttaaatctacattatgccagggtgttcatgagattagtgaattattatttattatttatttaaaacagtctcaagtgaaattttgcttcgttagagaaacacctctaagaaaaggaagggacacaaaagtttactcaattcattaattacatcatctaaaaaaagagacttaatacaaagagggtatagttagaccaccaaactttactaacagtagctgataaagcatatttagccaatgtgcgagctgttttattaataatttagaataatgtattggaaattattgtgctccaatagaattatcaaatcaacaagattacaactctatgataaataatacaaaggacaaaaacatagcttaaataatgttacaacactaaaaaaaatatacgcataaaatagagaatgtagatgtaacgccctaaataattaggcacgctacgcaaaat

SEQ ID NO: 154082 - DNA, 590 bp, Cannabis sativa
aggttgaggagcttaaaagctcgggatcgtttttcacctggacgaataagcatgaagtgtggggtagaatttattctaagctagatagagttttcataaataatatctggctcaatgagtttcctaattctgatgcctgctttaaatgggaggtcatttcagatcactgttactgcttaatccgttgccatgtttagaataatgtaggtgtaaaaccttttcggtttgggaatcattggccttcctaccctggttatcatcaactggtgatggattgctggaatataaaggacgctggtaccggtcttgatagcttaatgaagaggttgattcgtgtcaagcatgctctaaaagtctttcgtaggtatgaagtggtagatgttgcaacggagtacagggaggctaaggaagcttactgtggtagtcttgaggaagcagctttgaaccccagatcaagccctgcaacttctggttaaagacaagcagcaattatttttgacagctaaggaaagaatggatttgaatcttcgtcaacaaagcaagatcagctggattaagtttaatgacgaaaattctacctatttccatgc

SEQ ID NO: 154083 - DNA, 514 bp, Cannabis sativa
ctataaatgatatttcagtaaactaatataattacttaaatgaaatttcaatcatttatctctatcaagtaaagttcgaagaaaatcatcgtttcacttctaaatacttaaagaagctatagattctatatatatgattagcgcttccactcaattgaactgccatattcccaagatgtaacgtatccaccagaaccattggttagcttccacaaataactttaagaacataaataatacacttgagctgaacctaaccatatcaggattaaaatcaatacacctaagatcaactagtgttattgaactagaaagatataatggtaagtttatgatatcttatccaagttcaatatcgctccaatccaatgtatattccatacatctgatactggtaaactttaccaatatcttggaaataacataatacttatccaaggtgtaagtataccttatcgatgattatcaggtcaatctaaatccagtgtactgacaaatcacgggacttaaactt

SEQ ID NO: 154084 - DNA, 685 bp, Cannabis sativa
  modified_base (141)..(156): a, c, t, g, unknown or other
ccagtgcacggaccacacgttcctagagaacccaacccgatgttggtcctagtacgcggacaacatgctcgaggacaactcagcatgggaatggtcagaaccccaggacgacggatgaagagctcaatcgtggaggtgccnnnnnnnnnnnnnnnngtacttatgaaacggaaaactaccacctgagatgctatcttgaagaggcagagcgtcgaaacgctgagctagagcgtgaggcagcctcggccagggcggcacaggggacgaatgctcaaaatcaacctgaacctagagtgaggagatcacgaggcagacctcgtggctcacaaaccaggagataggaaaatgcccaagaagaacaaccatgtgaaaacgagatacgccctaaaaattaggacgaatagccagatgggagacaactagaaactgatgaacgaaaaactcctcatgacaataaggaggatcttggaatgcaactaggagaacggaggtcacctgctagaaatcaccagcattcttcccaaacccatagagcaaggactcgtacagaccctgatggggaaaatacaataaaatgctttcacgggaaataacaaagcgtgaagaagcaagtgtgacttcgaggcagtgaagaacccacagtcgatcaactcgaagaggagaaagtactcaacgagctaatgat

SEQ ID NO: 154085 - DNA, 568 bp, Cannabis sativa
  modified_base (180)..(180): a, c, t, g, unknown or other
gattctctgatagaaaccacaccaacttccttcccaaatccacctgaaaccatgccaatcttcctctggaattcttcatcagcttgaggaggacatttgagatcgttcataagatctataccctccatgatcacttgtgaggatcggccatggcaagctacggggttcccctggtttggnttggtcggaagctcctcagccctggaatccatcatttccggctccggttggggcttgaagtctgtaggaacaaatggaaaatggttggtgcatctgggtattatgagtctggaaggataaacttctgaactcaaaagagacattttggcaggaaggaagtaatccattctgaaaatggacttcactaaagagccagaagggttgtgaaaaatgacaagcatgagccgcccttttatacatgaagttcagtgacaagaaagttaaagattgggaaatctaactgttgggaatcgtacagaatatgaataggcgattcataatgatcttcgaaaccatacaaccgccagaatcaaaggaggagtcctttccaagaaaggattttggcaaa

SEQ ID NO: 154086 - DNA, 808 bp, Cannabis sativa
ctcttctttgatttcctcaagacatggaatttttacctcaatttttggaatagttttagggatctttttgatgggctcctcttttttggggtttttcaatctacttggaaaaggtggaggagggccataagttggtgcaattggtttgtgaggctttttcagtgatggtgcaccaactaaagtaggagattcaacctttggtggagataactcttcaagggatgaatttttgacttcatgacttggaatcaaattattaacttcttggtgtggtggtaattcaagttgtgtaccactttggagtggtatgccactaacattctttattagattactctttacttgtgaaggcatagtgtttgtacattgaattttatattcacttgtagatgtttccttagactccgcaagattctctaacttttgtagagattgttgaaggctctgcatatttttctgaaagctatactgacactgcaccatattttgttccatctccagagtagcaacctgcaaagagttgattatatcaataagagaacgatctagagcttgtggtggtaccggaggatagtaagaagttagttgaacatattgatcgatcccattgtaggaaatgctagaataatctccccattgttgattgtatgtgtaagtgttgtaatagggatcatattgttacacttgtggcaaggtataataagaatcataattgtacatctccatgtttctaaaggaagatctgaaaattaaaaccacaactagaagaacaagttagtaataaaaattaaatatgaataaaaaaaaa

SEQ ID NO: 154087 - DNA, 517 bp, Cannabis sativa
tagactcaagagaaaggtcatcaacaaggctagtaacatgaacaacaacgggatcgaactcagggcctaatccattgagcaagtgcatgattaaatcactttcttccataggagtaccagcaactgaaagagaatcagcaagaagttttaccttatcaaggtagtccgaaattgaaagatttcctttctggattgtagagagttgggacttgatctgtaaaatgcgtgctttggattgacttgcgtacctctgctctaatgcgcgccaggcagagtaagagctttggaactgagcaagcgatccaagaacagattccgacatcgacgaacgaagccaactgaggagaagctgatcttttctcttccagatagtgaattcggggttggattggccattaaccaatctttctggtggagaaatgcctccaagaagtatatcatctagaccgtgaccaataacggtgggtataacttgcgatttccaggcgaggaaattggatcggtccaatttcacagt

SEQ ID NO: 154088 - DNA, 784 bp, Cannabis sativa
ttttgagaatattaataaagttttctctttaagttatgaattgcatttatgaattgagctttatattttctttatcttgtgtatgccaataccaattatatttatatgttgatcatgtttcgtatgtatttgtgttttattattgatacaaaatctatggtatgttcatctctgcaaagagataataccacataaacatttcgaattcaaattcaatattcatgaataattgttaattcttaagaaattattaagattttgtttaataaaaacatattttgatctgataggagtggaagaagttaataagtaatatatctagttcaacgatcttttacatcttttgaactctagattatattcataactccacaagatctctataacaattaggggtggaagaagctattgacataagtagttcattttgaactctagactatactcaatacaccacagtatctctatagcacacatattttgattagacatggatataatataatgaacaaattaataaattattagaacttattcttgatcctgtatttttgttccaattaatatattactgttgtaatgaaaattgataccaataaagttcttggacatagtatcacagtaccttacttgagtgaaaaaattttaaaactctaagctcatctttatttggatgacacttgtgataacttactatgttatgatcatgataggaactacagaattcaactgagaaagtaaatctaaccactcatatggatagaaataacttatcagaattatg

SEQ ID NO: 154089 - DNA, 526 bp, Cannabis sativa
atttttttttttttacagttttcttatagttggatgaccatatttgaatttttcaaaatttcaggaaacataatcaattccatttctcatacagttcaatgtgcagtttgatcaaggaataaattatgtgaattacaaagctagtggtaaatttatctcaatgtattgcaaatatgaagaacttgtgcacaagttgaagcaagtgttggaatgcaactaagaaaatactcaactgcaactaaaataccaagtgaaataaggttaccaaccgttgagaataaatgacaatccaagcctattcttctacatacaattaaaattgaaagaacttgacttcacaaagtatccattatgtgtgaacatggtcaacaacacatcaacaaccaacaccacctctttctttgcaatgagtagctcattagttgcataaccgttgtttcaaggttgtatgacatattcaaaatattaacagaaacataaagcattatcaacatcacatttgacacattaatgtgaagttctaaaa

SEQ ID NO: 154090 - DNA, 599 bp, Cannabis sativa
  modified_base (322)..(328): a, c, t, g, unknown or other
aaccattagatttgatccaatgacaaatattaaaagagaaatttgaatttctatgtttcatttagctacttaataaaaaaaaatatcaaaaagtacctctttatacactaaataaaaaatgtaattatataaaaaatatttaagtcaaactcatcttttttatcttttttttttttgccaattttattttattattttttttcaaccgaaggaacactctcagtccatataatataaaaattagaaatttttctaattaattacaaaaattaagcataaaaactcaaattttcctaatattactcattcatgggtaataccnnnnnnnagtgcacccatatatatatatttatagaaaattagatttgagttaaaaattaattatttaatgaaatttagaccaacttaaattaagtaattttcataatatttatttgaaaattaatactaaggatagaaagtaaatttttattttagatcaatccaagtaaatacataatttataaatattaaattaaatatttttacagttatctaaattagtaatttttgattaaataaatatatgaatattaaaataaatagattacaataagtat

SEQ ID NO: 154091 - DNA, 556 bp, Cannabis sativa
gggcgggttgcacttaaattttagcaacccgaactttagattgggttagaaaatatataggataaatcgcccaaaccgaccatcgtacaaccctatttcatactgtgttaaattaatctatttctgacaagtcaactaacttaatttatattaaatatgctaactattattgttaactcgattaaaggtttaattttttaataaataaaaaattaattaatgtgtcaaatttaaattgatttaacacagtatgagacaccactttttaattgatgattttgattcctctctctaatttttattttttttcattctcaaaaataattttttttttctctcttttcttatccatgaattatctatcgtttttcctgttatttttaagtagtctaggaatcaactacgattaaaatttaaaaagtaattctaattttctttttcagaatatatatataaattaaaggatattttacaattttgtatacattattttaattaattacaaaatatgtgcaaaaaaacttattatcattttctcatacatttttacatataa

SEQ ID NO: 154092 - DNA, 750 bp, Cannabis sativa
  modified_base (134)..(146): a, c, t, g, unknown or other
  modified_base (212)..(221): a, c, t, g, unknown or other
gagaatgggcggaagctctagcgcctttcctccagccaagaagtccaagggcggtgaggggtcctcggaaaagagaccttctggagacgtcatttatctttccgaggaggtgactgctgcaaacccctctaccnnnnnnnnnnnnnagtccaaggagtctggaccaccaatggttgggtcagaactagtcaggagtactcctgagcgggtgnnnnnnnnnnctccacctttgcccgtgcttctagaggccaaaaagggcaaggagatgctagcccactatatgaacaagttggttcccgaggtcattgagcaactggctggtgttgatagtgactcatctctggatgtgttggtgggtggagtcctgaaggagttcaacagggtaagtcttctttgatacttctctttaactttccatacttagctccatacgctaaagtttttcctttgtgtaggccggtcttaagttggcttacacttactcccgggctaagtctgttgcttccaagagcacggctccgtccaacaccttgaaggcggaggcagacttggccaagaaggaagctgaggaagccagggcagaagctggagctgttcggttgaagttgggcgaggccaacaagaagctgttcgctgccgagaagaagatctaactgctgacaaaggatctcgaggctactgatcgctttaaggagaccatcaagatcttatctgctgaagtaaacagtcttcaggatgagaggaattctc

SEQ ID NO: 154093 - DNA, 527 bp, Cannabis sativa
ttagtaacttcgattagaattttaattttttttacatttaatctgctaatttaattagatatttttttttatttaaatacaattaataaaaataagaaatatgattagtccattaattttaacggaatgaggcacgtttttaaccacctaatatttatatataaatataaatatgtatgtatatatacataatatagtatgtagatcaatcaagcatgaaaattaaaccttggaagtgcagcagtaggagagtgacaaaaattaattttactaacccacctgtattattgctacttttttaagatgttatttattgttggtggggaaagttacacactaatcctcaaataatgctttattcttcatctttgtttgatcttgttgttgtcggaggaattttgacaacactaattttatgcaagtattcaagggctgcttggataccaaaaaatagatatgtgagtactcacttagaatagcgagtactcaaagaatatagtgtataatatatgcgagtactgtaaata

SEQ ID NO: 154094 - DNA, 901 bp, Cannabis sativa
gtccgagtccttcctaggtcctggtctgggtccatatttattcgggtttgggtcctagtcccagttttgatttcgattgagtgtttgggttcaggtttggatccaggttggggatggggtctgagtcctagtccgagtctgggtccgggtttgggtctgggtccaggtacagatcccggtctgggttcaagtctaggtccaagtttgggtcccaggtgcgggtccaggtttgggtctgtgttagggtctcggtccggatgtaggtctcaaatttttatcccggtgtgaatccaagtcttggttcaagtccaagttcgtatccaaatccctatctaggttcgagtctgggtttgggatcaggtcccatgtctaggtctgggtctaggtttgggtctccatctcggtgccggtctgggtacacgaccgtatttgggcctgagtttcagtctttgtttgggtctggggctaggtccgagttcggttctaggtctgggtcctagtccaggtcacggtcctagtctttttcgagggtcctagtctagaagttcttgttctggttccagtttttggtcccgggtctaggttagggtctgggtttgggtgctagtctgggttcgggtcctggtctaagtcccagatttggatccttattgttatcccaatttttgcactctaacgtggcctcacatgatggtgacacgtggaatcgactccgagtatatgctcgcaggatatagtccgaacaggatacctcatatgcatgctcgaagcaaagtgatcaactatccgcacatagcgatcaacacttagcgaatttagctttcgcctcgtgagtcatcaaagaaatccctataacttggggatcagattgcagagatatgtcaagctgtccaaatcccac

SEQ ID NO: 154095 - DNA, 533 bp, Cannabis sativa
  modified_base (55)..(61): a, c, t, g, unknown or other
ggtatttagaccatgaagatattcccaccttccttcttctttttctcttgaagtnnnnnnntttatgccattagaaaatgtgtacgagttcaattgtgaaaagttaaacccagtacttacatcatttcttatggacttaggcattgatgtaaatcccttagcaagattactttgaaacaatgaggtcttcctcacaaggtctgactcaattcctcttattttttctttaaaaggttttctagaaataaccagtttcgccccaacatatttggtgtaggaccagccgtactattatttagtagctttgtgatgcaaagtgatgaagtaggatctttagtagtcttttgtactaagaaatctagaccattagtgttctcctccgttgagttcaccatgcaaaaactaacatcaactaggtttattggaacaaaaccgatcattatttgagtcaggccttgttgcttaacctttgtggttccaatatgaatgcaactagattttgttgactttgtttggatggactccaaagactt

SEQ ID NO: 154096 - DNA, 712 bp, Cannabis sativa
gaggtagtgtgacagcgtctcctatggttacaatctatcagaaaaagttttttgggacaaattgggcaatgttccctgcttacaatttcacacacttatgcttgacacagtttgtggtaaatgtttcatattcgaaaatggtcttataaagctgttatatactatttgatttgactttaatattcttggtgactgagtcaacttttttcctgcgtaaccggtatgacctcattccactagttaattagcttgataaaataatttctgactattcttatgagtttgattttttcatcagggacaaagacaagcggacattctgtactttttgttgaaaaaaatatcaaggttattttattttttcttttttttaaaaaaaaaaaaagaaaaaatatgtgtgaccgacattgtcaattgagttttcttgaaaattcttgttatgtttcattattgtcttagacactatttttgctctaaagtgttgattggtgttttatgtattttttgtgtgttgtcttgtttgttctttgcaaataaaaaaggggggcttattttaaaaaaaattcaagaaaaaagggggcataattttttttattttttgggctgtttttttttcttttattttttcatttatggaaacatatttttattgcattttatttattgtgtttcctttatttttgttggggatttacttttttttttttttttt

SEQ ID NO: 154097 - DNA, 538 bp, Cannabis sativa
  modified_base (247)..(248): a, c, t, g, unknown or other
ataaaattattttgaaaaaaatattacgtttacttaaacaaatacattttttgagaaaaacaaaatagatccaagtttattcccgtaaaatgtagtttttacaaaaattaaaattttaatatctaaatatttttttaataataaataaataattttttaaattgcttaattaattttaaaattttaatttcttttttaaatttcttaatcattcaaaatgattttttttttaagatctaaattaatnntttaagatttactaaaaaaaaatattgaatctttctcatttttattttgaggggtatgatttgttagttgtcaaactttaggggtaaagttgctaatttataaagacacgtcagcatttaaacagaataatgggacgaaactaggagtgttcaatggatcgcatcaaatagattttgactcaatcgatccaatctaattatttattggatattgaattttatcatccgatccaatccaatcgaattgagtcatccgatctaatctaatccaatagatgtatcagattaaa

SEQ ID NO: 154098 - DNA, 525 bp, Cannabis sativa
aagcatataacatatcatataattttccacttgtatttaggcacccatacacctatttacaaggctcaacagatgagtaagaacattccaaactaggcgttgtgaaaacatatgttgatttataattgggcaagtgtacacaatcacaaacaagtgatacaatgataagtaatcaaagttcgtctccacagggactttttactgaataattcaaaatcaactaagagcaattccaagaatttcaaataaaaataaaacaaagtaacaaattaattcaagagaaaaatttataaccttaattctaaacttgagaaacaattttttaaacaaaataaactaaaattaagaagctaaaagtgattaaagtggtgataatttcagatttggaaaatagagttgggtgattaatttccacttgtgtgtcctagttgatacagcaatgacccagcaatgactcagcaatcctggcagagttaacagatttcaaaaaagaaccaacaagctttttccaaaacttgcaataaa

SEQ ID NO: 154099 - DNA, 602 bp, Cannabis sativa
ataattaataatgtttaatgtggacgttagtttgccattttactatatatataatttttttttagaaaaaaactatatacatgattagttagatattttagtttttatattggtgatattgctctatttttatttcaattattaattaacatatatattttttttttgaaaagaaattaatgtagattaaaattgagaaaaaaaattagtgtagagttttatgagattatgtcaccacctccaccctcaactttattctaatagtcttttgatgacctttcataaatctcaagagtcagtcattaaaaaaataatttttttacatcaaataatttagactaatgactaaattatgaattattcgaaccttaaaattatcataaagaaaagcttatatatatatatttctaaattagagtaatttaaggtgaaacccctttatgttttaattttatacagtatttaacctctttatcttatattttggtggcaaaacatccttaagtttatttttctttgcaaatttaaagttttagttagatattaccgttaaatactaactagattactactgtattgacttcgaggttttactgttacat

SEQ ID NO: 154100 - DNA, 514 bp, Cannabis sativa
  modified_base (122)..(145): a, c, t, g, unknown or other
atttctatctgtctacttaagcttcttgaattttcattctgtttttaatcttgaaaaatattggtttgccaaatagagtcataaatttggtctagtgatatttaatccaattccctgtggtnnnnnnnnnnnnnnnnnnnnnnnntacttgattacgtgcacttgcgtactatttacatttttcataacaagttttcagcgtcgttgccgggaatcgtttaaagattgattttgcataagattatattaaattctactttggtttatttttcttgctaattgctaacctgtttctttcaatattgtctttgtctatttcaagaagtgaaggtgtatgcgacatcaaggacaaggtgtcatattgccagttgatcctgaaatcgagaagacttgtaggagaaacagaagaaacaagaggcaagaaagggtttcaacaactgctaaaactaaaacataagaaatcatggctgagaatgctaatggcggtaacaatggaggcaacaacggtaataat

SEQ ID NO: 154101 - DNA, 652 bp, Cannabis sativa
ttcactgcagaagtgcgacaagcttgactacccaaaggattctggttatccgaatccctaaaatacaaaggtacctctaatctcatagactatttagaaaaatttaatactattatggaagtggatcaggtacctcaacttgcaaaatgtcgcattcttgcggcaacgttggaagaaaatgaccatgattggttcagccaattgcccgaggcatctatcttgacatggcagacctttgttgaccaattcctcacgcatttccaagccacgatgacctataggccgccctataccactctggctaatatcaaacaagaaactggtgagtctttacaggactattttaaacgctttagctaaggtaacaaaagtagagaaggctcacgagtcttcgctagtatgtatgttgataacaggtgtcctgccaagaaaagatttctggaaggaactacaagctcgaagacttgaatcgttggtcgagttcaatgccatggcagagctgcataagaggattgagaattatttggcttagttagagaagggcaaaggtaaacgtaagtcattagtgcgacggtcacgatctcccagtcctagagggaagaattccagaggaaggagcccgagaagacgcagtccacagagacagcgaagt

SEQ ID NO: 154102 - DNA, 576 bp, Cannabis sativa
acaaccccagcgagttaagcaccaataccacacttatgcacttattgccttgaaccctaactcaactatttactctatataaataaacacttaatcatatagcatgtaaaacatggcatcacataacacataaatactctagatgcttgcatactacttagaatggaaaatggtaaataaatgatcacataagcagtaaagtatttactctcaacactttctgcaccatgagtcgagcttgtctctgacgatgaatgtacatgttcagccggtctacatgaagtttaaaaaccttagcgctttgataccaaattgtaacgccctaactattaggcatgttacccaagataattaagaaaccctaatcccctgaacgggattactaataaaattagcacgaaaattaaactttaaacacaaatggaataaaaataaacttgtaataattttaactttacaaacaaaagttacatgcactgagattccaaaattattttacaaaatactattacaagtccgtttccactagccgacctaagcggcaaaacagagttacaaaattcatcactggtagac

SEQ ID NO: 154103 - DNA, 761 bp, Cannabis sativa
taattccttagactaaaacgacaccgtttatccaacacgacaccaaaacttgtgtcgtttggatcccagagtttaaagactctaaagaagggtctagaaaccctaacactaaaacatcagcctcacaatctcacaagtcgaaaccctagcagagcaagttctctttgagaacttgctcgattccaagcctgaaacccagaatcaaacccacacacacatagatttaggtttagcaaaatgaaaaacaaagtaagggagagaaaacaccagggaatttgtttcagagttcacccaaaagttgggctacgtctctgtcaagctcatctcagagatctagcttgatatccattatcaacaatggtgagatacaacgattttgagcttcctgtcacaaaatcgatcaggtaagattcggttgatcaaaggtttaggagttagttacaatttcggttgtaactaactactaaatcttcatccactagaggcgaagccacctaggatcgagtcaacttgtttttttttctgttgtatgttgctgatgtggatatttatgttgtacagggactggttataagtggattttactcaacaatttccacctgaaatcctcttataaccatttctgatgtctaattatttatctctgagagtcttaacttgataggtcctacttttagtctcctgagtcgattcttaacaagttcatacaatgtgtgaacttgttaagagtcacaatcttagttcccatgtctgctgggtta

SEQ ID NO: 154104 - DNA, 511 bp, Cannabis sativa
  modified_base (365)..(367): a, c, t, g, unknown or other
tgatcaagatgttaagtatgcttcaatttctaccgtcggaccatccatcagacattattgaaactcctgttgatggccatgtctttttaagatcctcaactatagtgtcggtagtatttatctcctccatcaatatccaagtcctaagctcatacatattatgaggtttcaatcccctaccataatttccattcaagtgacacatattgataaaggaaggactcttagccaaatgaaaaggcaaagcattctcaaagaaacaccttcctatgtccatgcaaacattatcacacatttctttctcagttttgggaggtatatgggtttttccagcggttgacctatcactaccatcacacacaaannnatcaattggtcctcttacacctctagcagacacgagagcactagtcttagtttaataagatcccgactcaaccatctcttcgaatttcatttgagccacacacttttctaatgttttttgtttcaagagctccacaaattcatt

SEQ ID NO: 154105 - DNA, 501 bp, Cannabis sativa
tatatataaaataaaatattattatttaccaattttgttttattaattacttctctattgcttaaaccaaatgggaaagggtgtcttcattgtattgctatatatattttatcacacttaaaaaaactattgttctaataatattttaaaaagtgtactaaatttagcatatactaaaaattataccgaattggtacaatgttatatcttgtgttaaatttagcccacaataaatattaattttttatttactataatgctactaattattatgatttacttttacaaaattttacattctttatttactatattacaattatttaaataataaaagaataaaaattgtatactctcaataaaatattaaataatcatcaatataaataattatttttggagtttttacaaaaatactaaattttaggcaaaagtttataattttactgtcacacggaaatttttacaaaaatactattttttttataaacaaccgtaaaa

SEQ ID NO: 154106 - DNA, 895 bp, Cannabis sativa
  modified_base (659)..(662): a, c, t, g, unknown or other
cgacttggggacccaagcaacaatcttggacctgtggaagagttagaagagatcgagatcgatccaaatatcccgaccagaaagctaaagatcgaaaagggtttactggaagaagtaaaatcagaattgataaaatttcttagagcaaacctatatgttttttcttggtcgcatgcggatatggttggaattgatccttctattatttaacatgttctgaatattgatctcaacttctggcacttacaacaaaagcaaaggctactagacgagcatcatccctaaatgaagacgcaaaatgcttttagccaacgacagtgagtctatttttgtaagcgacaagtagtttataacgattgaaatatagtaaagcaatataaagatacaggaattttatagatgttcagccccgagcagttcggtaataacttaatcctcgttatttgtattagcacaagaacaaggaaaaaggttccttttcttatagctctaacaacaatatctctgaatatcaattcttagacaatatctctcaactaaaatgtttgcgaccctttgcccagtgaatatgcataactatttatagggctatgtgcttggagaggaagtatttcccttctcgttacatttgatataagcagaaagattgcataataaannnngaatacactgatcgtgggattttgacagcttgccatatctctataatcggatccccatgttatagggattcccttgatgactcacgatgcgaaagctcaattcgctaagcgtttgtcgttcggttcgggttgctaattttttcatcttgagcatgcatatgaggtatcctgtttggactgtatcttgcgagcagataatcggagttgattccacgtgtcaccatcttgtgatg

SEQ ID NO: 154107 - DNA, 701 bp, Cannabis sativa
gtggtgagggagttcagattcaccttaatattcatggacgaggtagaggtcctagaggcagggcacgcggtcggggcgatgttaacccgctacaggctgcccttgggaaaacaagtttgctgaaatgcaagccaggattaatgaacaagatgaagagatctggcatttgagacagtagggtgctcctgctcctgttgtgcaggcaggaccagtcgctatagtaaattgaatggaacccctgtatgaaaggtttcgtaagcaggcacctccagttttcctgggaggtcccgatgttatgaaagccgagcagtggctaacagtgattaccaaaattttgaactttatgggcatcaccggcaatgatagagtggcttgtgctacattccaattccaagaagatgctctggtatggtgggatatggtatccctaactcatgatgttacaacaatgacttgggaaaagttccaggaactgttcaatgcaaaatattacaatgaggcagtcagaagcgcgaaaagaaaataattcacttagctgacttagaaggaaaacatgagtgttactgaatacacaactcagtttgaccgcttggcaagattgacctcgggaatcgtgccaactggttttagcaagaaagagaaatacttggacgggttgaatgcgaagataagacatgacctaatgatcactactgatgaca

SEQ ID NO: 154108 - DNA, 976 bp, Cannabis sativa
gtattttgggcgatttgggcgaaattggcgaaattaagaaattaagggcaacatttacccccaagccttgtttggtgcaaagtaaacgaggctttccaggtgcctccttctgtctcattgatttcctggcacgtgcctcgggcgcgtgggctgcatttatgacaatcctcattaaaatttattgcttttcgcacgcaatgattcgcttcccgtcaattaatgatcgggagcatttaattggtgtcagacaaatactcaagcgtttccacccgccctgatgagcatttatcccaactgttagatctgtagaatgcgaatcgattcgattcccaccgttcgatgacgcctgatcatagctgtttcgtacccgttctgccctataaaagccagtctttctccttcatttggttacttcccttactttgccatttttccgcaagaacactttagagagaaaaaatttcggacaccatagatttcttgttgcttttcctccaccgttgtcaatccactttatactgtcgatcaacgccgacccccagctctcaactttcatgtaagttttctggacactttgtgcgttttaccgtttgttttcatgttaggatagaacttcttggttgagcgcttgatttctgggaactaactctatctgcatctggtgtgtgatgcatagaatcttgtctatttgtgtctttgttattttcctcccttcttctttagaatcgacccctctgttgaaagactgtttagggcatgaggtgatttttgttcccacattctgcgttttttgcttttcttctgctttcgttgcctttgggatttttgcacccgatgtttgctaaggaaaatcctttgaggtttcattttcagcaaacatctcgagggggcctatttccagcggttaggggacccccattccctcttttaacattagggtttggtttggggtctaactgttggattctttcttttt

SEQ ID NO: 154109 - DNA, 563 bp, Cannabis sativa
taaccataaattttttaaacttagtatattttatttatttaattattaaataaaattgataatatcctaaccatcaaatatctttttttaaaaaattgtttattttgttatatttgatttattaaattataagattagaaatataatattaaaaatatctaaatttttaaattaagatattatattatattatcttattagatatttaattaatttaaattatttaaataaactaataattttataattggttagttatttgaatttcaattagaatttaagatatttagtagatttgttcgattttaaatattttttttaaatattttcgagcaacctaaatttaaaattctagttaagatatattttaaatattttatttttagacagaaatatcttagcctacttttcaattatctgttacatgttttttatgtttgtttatttattaattatttttttttacaaacctattatttatttaatctaaatcgctacgactaacttgttgacagatccaatgatcagattttaatcatagtccaattgtcaatagatcttat

SEQ ID NO: 154110 - DNA, 652 bp, Cannabis sativa
gtagtttagggaacgaaatgttgtcattggaactaccttcttcttcttctccaccgtcttttatcactacaatctcttacatattctcacactcctctacttttagaaattcaagttgaatgaaacttcttgccacagcagaagaaaacagatacattaacttatgacatctataaacagttaaatgttttaaattctgcatgtaagattcttcttgaagtggatctggccaaattatcagtacagattcaagcaattgcaaagctaatttctccgacataggaattgctaccacctgcaaaacatgaaggaaaaagataaaaataaatgatttttcataagaaagaaagtaaatttgtgtttttaaaaaataaaaaatgttctataataaattttattttttaattttaaaaacagaaaacaatagtttcttctataactttctttctcatttttattttttgatattatttaagtcaggtccaagtttaggtttggggtcggagtcgtggtccgaatccgggactggggccggagtgcgagttctaaagtccaggttagggtcggagtccaaaatattaattaaggaaaaaaaaaaggctttttttcataaatgtacaacaaaaacaacataattacaaaaaatgtgcaa

SEQ ID NO: 154111 - DNA, 524 bp, Cannabis sativa
atccaccttttggagataactaattctccaccaagcagtagggttccaaaccctgtatcataactatcatgtggtctacccaacttacacaagattctagctgccacataagaatgagtggccccagagtcaaataaaacagagaagtaagagttgttgaccgagagctgaactgttaccattgaggggctagcttctgcatctgcctgagttaatgcaaacacccttgttggagcgagtttcgctgcattattctattcttccttcttaagctgtgggcaatctcttttgtagtgtcctggcaaccgacactggaaacatcctcgccttctacacgcaccttaatggtgctttatacaattggaacattcagggtaagtatatcgggtttcaaagccaccctaatgattacctcgaccctggttccctcggagcctcttgtttaggtatgagccaccatgtgcagatggtgtctttattttctgatcagtggttgagtcactactgttgggttttgtgcccta

SEQ ID NO: 154112 - DNA, 623 bp, Cannabis sativa
ttatatttttatcacttgtaaaagaaaaaattgtagtttataagaaatttaggttgatatttttttattaataattaaaatttaaatataaatataaatatttcttaaaataaaataaaaaaattaaaaatttatataatatatatgtcgaattgttaattaatattaattttgttaatcagtatatattgattaggctagctattaacctttcattaattataacattacaaactatcaaaatgagtaattgaagttgatggacattacatgctttagtcataattaatatagtgatgagtacatatattataaactagctaacttaaaatggagaaatggaaatgttaaattttcgtgtgatatattaatatttgatacctatttatgacttttttttactatatgattttgtaaaatccatataataaaatattaataattatagaattatatcatctaatttagattttacataatttttttatgttacttataaaattattaaaaaaaatttactatatattaattgtatataaattatttataatagtcatatcactactacaatgttggtctttagaggctgtttttttacgtccatttataaaaagggaagctaa

SEQ ID NO: 154113 - DNA, 799 bp, Cannabis sativa
acgatagtgacatatacagctcgttgataacaagtggtaagggttcattatgaagtactgagttcaagtgattatggtattgtgtaagtagagtgcttaataaagcactgaaattatgtgattgcaatgatgtatgactagagtgctttataaagcactaagattatataactatggattgaatgaatgtttattcagtgaaattataaattatgagttgccatgattattcttatcatgtgttgtgaatatgttcgcatagacgtactgatatgtatatacatgctaaatatgtaatgaattttttatatgtatattttgttgtacactagcacttgctatacttttgtgtataagcttttcttgctgagtcactatgactcacgggtgcttcatggtgcaggtaagaagattagcggttctgtttggccatgagtcagaggtctcccagcagtatacatattaaccgtgttgtcttggctttcaagaagcaggatcaacccttttctatgattggatgtataacctattcttgtattaatggttttataattggttgtaaaagaatttcattagcaggggatccccatattatgacagtatttaaaatgaaagtctttattttgaattttattaaagatttaaattaaaccacacttttccaaattttatagattagtaataataagtttataaaagcacacacgtggcgaccttgagagtcagggcgttacattatcaaatctagttcaagttcaatatcgatctcttccgatgcatacttcatacatccaaccca

SEQ ID NO: 154114 - DNA, 765 bp, Cannabis sativa
gtacttgaaaagtacaaggcaattcgtgttagtctaaaagggtggtgctttaaatcccgtaggctataccgatttagatttctaggcatctcttgatgacaagaaagctacatgtgggatggtgtttactgttggaggtggagcactggtttggagaagtgctaaacaaactgcaatttcaaactctactatggaggcagaatacatagctgctgcagaggctgtaaaagaacttgctggcttacaaagttcttctcaggactcagtgttgttcttggaatggaaaaaccactggttttgctttatgataacactggagcaatagccaacaataaagagtctcgaagccacaagagaagcaaacatatagaaaggaaataccatatcatcagagagtatgtggcaagaggggatgtactggtggagaaagtgggcacagaggacaacatagctgatccattcactaaagtcttggcaggaactgcatttgaagagcaccatcaaaatctaggattaattgaaatgaactgattgttttatattagtgcaagtgggattttgttggtctttatgctctaaataaaactctatttcaatgtaatctctattatttaaatatcaataaagagacaaaagtattttcatcacttatttgatgtgtcttttggttcttgttatcatttatatatttatttgatttataaattcatccaaacccttatcacattaatattcttgtttattgtatcgtcagcacagtggaaa

SEQ ID NO: 154115 - DNA, 748 bp, Cannabis sativa
aataattcattatttaaagatttaggataaattttaaaaaggatgggtaatggagagaaaaagagagaaattatgctagaggtattttgaaaataatggattaaataacattttttttttggagaaattttatttacacctaaaaaaaatttatataaacattcaattttaataatttgtattttacatatatatatatatatttaattatactaagtttttctttaaaaaaaaaaaacaaaatcatctagtttattttcttaaaaaatatacctattaaacaaaaataaattactttttttttttaaaaaaaaaaaaagaaaattcttttataaatattgcaacaaagaaacttaaaataaaaaattatatgaaatttttataaaaatataaaaaaatatatataattttaaaatatatataaataaaattaaaataagttgaaattaacatgataaatttttcttaaaaaaataatttttaaaagttatttaagtttattttttatatatatataatagggttctttttgtaaactttaaatagtatatattttttttttgaaaacaatgaatatatcattgaacaaaaacagaatgtttgattacaaaaacgaaaaaacctaagtatcccaaagacaataaggaaagttgtctaaccacacaagttgtttatctatccgaaaggcatgcactgctaatccatgcgcagccacattggctgctcgacgaacatgaattagggatac

SEQ ID NO: 154116 - DNA, 654 bp, Cannabis sativa
ttagataattcgtaaactaattatttattttctaattaaaatataatatattttagtctatttatttaaatacttattaatgaaaattacttgatttaagttgatctagaattaattaacaaattaatttttaactattatctaattttcaaaaaataaaaatttcaaaatatctacatttaaagaaatgtacttcaaaattgtattaaaaatggttcttaaaataaaataaaatatactttaaaaattattctaatttaagttgatctgaaattgaaaaatttctaacttaaatgtaattttctatttaattaaatttataaaaatagaaacaaataattaagtatcgtgaataaaattaacttaattattaattctaatttaatatttcagaaaatatgtaatttaagttggtctaaaattaattaacaaattaattttcaactttaatatattttctatttaattaaacttcttgaaatagaaataaataattaagtatcttgattaaaatcaacttaattattaattataatttaagttctaagaaaaatgtcctaatttaaatttgcctaaaattaattaacaaatcaattttcaacttaaatatatttttctacttaattaaactttagaaaatataaattagttact

SEQ ID NO: 154117 - DNA, 504 bp, Cannabis sativa
tttgttataattgttaacatctatataaaaacatgaaaacaagagtatataaaatttaaagattctacaaattttaactactgaagttcaacatataaacaacatgaaataaatgtgtttaaaaaagtaatgaaatcaaacaacgtgattacaactttacaacaactataaagcaacaaacaatgttactacaaaatattagttttcgattgcatataaagcacgaggcttctgtcatacttgatttttaatagtgagtagagctttttaacttgataatgtagttgcatgtgtgttgttacatattaataatgtagttgtatctgtcgtttgaattatatagttattttgttggtgtattacaattttgcgagaaaaattaataaaatatacagcaaaaatacaactagaaaacaacactaattaaatatgtaaattaattagacatcaaaatatattggtgacaaccttaaaaaaatataaacacaacacaaaaacaatcat

SEQ ID NO: 154118 - DNA, 689 bp, Cannabis sativa
gaagtctatgaatgatcatgaatgcagaaatagcattgagcataaaattcaaaatttagagaaagaaatgaaggaaatcagagagtgtcttacaacaaaaagaaatgcaaaaataaatttacaagaaaatattgaagataaaaagataaagcggatgaatattggttggaagtatgaggaagaattgtgtgcaatagcagaaaataattcatcatcaacagataatgtgtctcccataaatacttccaaaggagataatattttcttcgaagattttaaactagaaaatatactaagaaataaggacagagatatgttacagtatatatattcaaacttcaatgatacttagtaagtgttatgattattttgtattattaattaaattatttattttcatgtatatcgtaatttacacatttttcatgtataggcctgtgattgtaaggaatagtgacattcatcttttacgatcaaatgtttgataccttggccctggaaaagaagtagaaataacggtaattaatgtgactatattatgaataaggtgtttgatggtttcattgtttatattaattttatttcattatatagttgttgactacggtctctactttattaaccaatgacgagaggaccaaaacttgtggaaaagcaagaagatggtatcttccagctaacataactgt

SEQ ID NO: 154119 - DNA, 591 bp, Cannabis sativa
gctctcctgctcatggaactttgggcttcctttcttccacggccaagatgacttcttcttgctcgtgttgtgctgtccgggcatacctctcctgagctttgcccggatctacagcaatgtgcgagcctacgataatgacttgtaagtgtccatctactggtggaggtagcaaatcttggttgttctgaccttagttggtcttgacatacttctgcagatgcggattgtttttctttattagaaattcaatttcccacttcaggttgtaacactcgttagtgtcgtggccgtagtctccgtggaaccgacaaaactttgtcatgtcccttttgttggtatcattcttcatgggcccgggcttcttgtaagagatcaacgactgagttgccatatatacactttctatatcttcagtcagaatagtgaatgtagtgtatttggcatgattctctcagggagtctgtctagatttatcagtaaactttcctttcttcctgtgtccttgcttgtggttgttacttgaaccacttgagcttgaattattggaatagttgggaagttgggcggatgtcccagtggaaggagccttcg

SEQ ID NO: 154120 - DNA, 625 bp, Cannabis sativa
aatttcatgaaaataaagttgggaaaatggagggaatttgaaattttgcatgttcataatgttcttcaatattcaagaacacaatcacccaaaagtttcaaagttaattttctcaccaaattacaatagaccagagccaaaaacacattaccatagcctatgctacaaaatccaatcgtcaaacactcacattttatcaaaaactcaaaaatcccaaggattcaatgccatttccggccgtggagaaaactaacaaaaagaagtgctaaaaatttcatcaaatttcaaatttcaagtaagaagtttgcaagaggaagtgtggagagcatacccactacgaagatggagacctcaaagcttccaatgattattataatttttttctttgtaaatatttagattatttcttttgtaaataatttatttttcttgtaatttaattttgcttgtaaagcgaaaaattatcattgggatatgttgtaaaatgtgaaaaaaaaataatggttgggtaaaatgtttttgggtttttggaatgtaattttagttataggcgtagtatttttggtgccaaatcgtcaacaacaagggcaagacccggacaacataagaaagttcctaccgtatg

SEQ ID NO: 154121 - DNA, 993 bp, Cannabis sativa
atggaggaaaaaatgtgtttgtggctatttaggctttagagggtaaagacaaaaaaagtagaatgggttggagtatgtaggaattgatgagtgtatatatgtatataccatctccacgcctcattttgcatatgcatatatacatacacatatatatttttaaatagacaattatgccaattgggtctcctcttgtgccaattggctccattatgccatgcggctcctttgttggagctcatggaaccattccaatcggctccactttttttttcagctccactttctcttgttggagctcatggagccatttcagtcggctccactctctttttttcagctccactttcctttgttggagctcatggagccattccaattagctccactttttttttttttcagctccactttcctttgttgaagctcatggagccattccaataagctccacttttttttttcagctccattttttttcagctccattgtaggagcctatggagccatttgatccctttgtgggagcttatggagccatttggctcctttgttggagctcatggagccacacatattgttttttttttctttatgtatataccaagagcacatagagaaggttgatgcctcaataaaattctaatatacccaaaacaagccaaaaattaaaataaaatacctttttttttaaaaaaaaaaaattaaattcattcagcttagttaatttaaattaggtttattccaatccaatttaacacaattagattttttcaatttaatttacatcaaatttagtttacatcttatttttgtaattgaattagtttttatctaatttattttaattaactagcctaaatactttatcaagtgaatttaacttagcatttttttttttttggacatactcatatgataacattatgatgttgtgtgtgttgcgatattaattttttttttcttttcttacagattcagatatgttccacc

SEQ ID NO: 154122 - DNA, 549 bp, Cannabis sativa
tgtcaaatactttctatatgtgtcaccccacgattgattaacgatattttctaaaagttattttttttttaagttatatgcgacccaataaggctatgtttgttaacccaataaggctatgtttgttaggaaggatggagaataggaaagatggagagttggttgaggatgtagaataagaggaagggagaggagagtagcaatccttttaagttgtttggtagaagggatgaagtgatggaaggatggataatatttatttatgaaattattatattgtccttagatgtaattttttaataatatattacaagggtatatttataattttaaataattaaagaggaagagtgtgaatcctttcatttatggaaggatttaaaattagaaatttggaaggatttgctctccatccaactatcctttccctccctcaatctaaacaagtagatttgttgtctcctcctatatctctcccttctctcctctccatccacccacttctccctcccaccaaacatagtgttaattacatcaataacagtataa

SEQ ID NO: 154123 - DNA, 1035 bp, Cannabis sativa
atttctgattgttttttagggcctcttttgtatgagtttttccgtccccttttttgatcttgtttgcctctatttataattacatagtgagcagtttattacaaagctcactgtaatctgtttacaacgatcatcccctaaaatcatggggtttgattacatatcacgtagtgtaaatgcgattattgcttgaaaatcatacagctgtgattttcttgcttttactgggtcaaaatgatcgtatatttaaacacgtctttattttttatatctggggatgtctcatcaggagcttggttccagtgatcacaatagtgagctggggcaattttttcttctgaggtcgatgatgcacgtcttgtgatgattgcagttcttatttacaaagagttagcttctggctagtcaagattgtaagcctcatcgagaaaatgtctgaagttaactgggtgaagttactggaagccttccaaaagcgagataggcacctcgcttactaggtctcgagccaacccgactgttgcacttatcttgttcattatacaataagtgcttccacagttgacatttatcgctttcatcttcctagatgtaatgtactcgatgcctcgctattcgcattcaacaacatatggtttctcgctaatatactaagcaacagtttgtataatgattcctcgcataagaccttatagtcagccggttacatatatactctgatacttacgcaattaatgagttatcccataaaaagagattgcatcgatccatatttgtaacaccctaactattataggcgtgttagcatggtttttaacatactgcgcagctcgttgctaatcaacgagattattggaaatcgtgaataattaaaattttgcttaattatttaaaacttaatatattacttttataaacttcagggatcccgtttacaaaatgcagctacaaaagtttactacatctttacaaaatacttgtcgcctagcgactaaacaacaaaaggtcgtgatgtcctgaggatcgtacgctcca

SEQ ID NO: 154124 - DNA, 732 bp, Cannabis sativa
  modified_base (430)..(434): a, c, t, g, unknown or other
tcctttctagccgcctcttgcttcagcctcttcatgttctcctgaagctgggcattgtgcctcttcagcgagttagcttccttcgaaccagcggcaacaactttcaggaataggctcatcgactgcgaagccaactccacagaacgcggaacaagctcctcagaagggatcttctctgccttggatataaactcctcgcccacgaacttctcctgcatagccaggaagtcgtgagctcgaacagttggctcggtcaggactttcttccccttgtcctgcgtggtcttggccagcttcttggaagaatctgcagcaagagtagccaccacattgctcttcctcttctgggcaacaataggcgatgtcgttgctgttccactcttcggcttgattttaaggacgggtgcggacttcaaaaaagtcatctctnnnnngataaataaaagataagtataaataaaactcaaggcatcagtttataacaagagataaactaggtcagtttataaaaagtcatcttgttgtctctcagatggttttttgtatactggctctctttgaagacttgcgttctctggactcagtttgtgttctcgtagcttagcagttgtacacagtaatcaccagtcgtgatcttgtaccggaaggctcgtaggatttcagctgtctctctgcgagtcgcatcaagtgccggtcgagctggtctacctgcgagaacaagaaaaagcgagt

SEQ ID NO: 154125 - DNA, 545 bp, Cannabis sativa
aataataataacaataataatactaataataataatattaatattaacaataataaactaaggaatatgctataatatacttacctatattaatattaatatgcctataataattcacaaataattaaatattaaactacctctaataatttaattatttatctagcattacacacaccctcaaaataaaatgacaaaaataaatgaaattaaaattttattgtcactaagaaaaaaaaattcatactccactaaactcataaatattcaaaataataaattatccccattgacaaacaaaataaactaagagtaataaaaaaaattaattatccaagaaagcggatattacaattatcccctccgaaaaagaaattttgtcccgaaattctactcgattttttttggaaagcaaagactcgatgtcttatacgtcagcacttgtcctcactctgtcctgcttctttgatagtgaagaccctcgttggaacatatttatcgtcttcctttgaatcttctttgttctcagtttgtccccacaatgg

SEQ ID NO: 154126 - DNA, 647 bp, Cannabis sativa
gtttggttaccaccgtcttccgcactatgattgagtacttaacttgctatatgtgggcatggcactctatcactatgggcaaaatgatgaagaacaatgcaggagggttcgaatcactatagaaggtgtctctcatctactaattattagagaatgaaaactacattttgtaggttgaattaggttaagttggatgagatgagagcatcatgttccttatatagtatttcaactagggcttaggtttgaattatatggactaaaaaagaataaaatattaggcaaaaattcactagagtggccggtttaaagacagcttagctttaatttggaaattagcaaataattagggttaattatgaaaattatttattcatgttaatttaattatttatgaagatttatttggattcagaatgcattttatatgtcagatatagaaatttcataattttgcatgttcagtgcccgacaacattggaacgcggtgtatggctcagtagaatcacatcttagtatttcagtatagcggggcggaatagttagacattgggaatgtaggatttagtcgagaatttagaatttcccaagatacccttagtacccttttatgttgtttttgagtggaggggcaaatggtcattttg

SEQ ID NO: 154127 - DNA, 1195 bp, Cannabis sativa
ttcatttaattttattattttagtgattgtttatgtactaaattatgctctccaaactttaatgtctaccaaatcatattcctcgaactttgacatatattaaattatgtttcctgaactgaacttttatccatgttattttttttattaaaattagacaaaaatcattaaatccaacaatctcaatatataattcaagggaaatttttaagaaccttaaaatttcaaaaagcataatttaatacatatcaaaatttaaagataaaaattctaattaaccattataatttactatctagcgtctctaatttatattcatgtaatataattgtacatacattgacaatagttttccatcttatctgtaagatgtacttaactttaattttgatagaactaggcaatatagttgctcttcgtgcggttaatttaattttttttagtattataataaatagttacttaaaaatataattttaatgtatagtaaaattttaaatatattatcttatttcattattattaataatttatttattaaaaactaaatgcacaattttattaattattatttagaattatttattaagaagtttagaatttataatatgtagcattttaaattactttgttaatagaaattatttttataaaaataaataaataaggtggtgtagaaaaaaaaattactattatatctcacttgttgtctcattgaatctcacttatttttgtcaccgtatctcacccgttgtcatcactgtataacattttttgtcattaccgtagttcgcttgtagtcttcactattgtattttccaaatctatatcttaatcttagatttatctcgaattttatttttttttttaacatttttaagacattagagaaaattcattagtttgttctgttattattaattaatatgttttaaaaaattaattattatttttaaatatcttaattaaaaaaaataaaaaaaaaatataaaaaatgtgatattttagttatgagaaatgctaaaaagcaaccaatcgtaccatgttaccgctttatgtctctgctttatatatatagatatagatttatatatagtgattgatattttacgtatatataaacaaaatttacgattaattatatttgatttaagttttaatattttttttggaatttattttttattttaaatat

SEQ ID NO: 154128 - DNA, 597 bp, Cannabis sativa
cattcttggcctcgagctcaactttctccttggccttgcggagttcctcgagctccttgtccttagaagacgcatcttgcttcagctttttattatcttcttgaagcagagcgatgtgtctcttcgcgagttcaatctccttggacccagtagaaaaagcccttgagaacatagccataaactgcgaagctaactctgcgaagtgaggcagtagctcctcagcaggagtcttttcaatcttcgactggaactcgtcactgacaaatttctcctgaagagacaatacgtggcgagctcaaaccgccgggtcaatcacgattttcttccctttctcttgaatgcccttagctggcctcttggaagaatctgcgacaggagtaaccaccacatcccttttcctcttctaaggagcgacaggggaagttgccgctgttccagattttagcttgcggttaagagtaggtgcggatttcaagaaattcatttctgcattacagcaacaaataaggattaatactaataagggtgaaattctaacgccctagtttatgtatgcgataaactacctgatgatggtcgagaagtttgcttggaaag

SEQ ID NO: 154129 - DNA, 627 bp, Cannabis sativa
  modified_base (46)..(50): a, c, t, g, unknown or other
  modified_base (235)..(237): a, c, t, g, unknown or other
ctttattgatattgaataaaattggattacattgaaatggagtttnnnnnagggcataaaacccaacaagttaaacaagtgagttttagagagagaatctctaactttatggagagattttagaacgtagaaaatgaacttagaggagcctcttatttataagaatagaggtccatttaaataaaatatatattacaaaattgggaacatttcatgtaaagaccgcttagcttannnttggaaattagcagataattagaagttaattatgaaaattagttattaattctaattattaaattttgatgatttatttgaattcagaatgtattttatatgtcatatatagaaatttcataattttgcatgttcagtgtccgacaacattggaacgcggtgtatggcttagttgaatcacatcatagtattttagtttagcgaggtggtgtagttagacattgagaatgtcgagattagtcgggaatttagaatttctcagaatacccttaatacccttttatgttttgttagtgtgggaggggcaaaatggtcattttgccccattagccttttgtcattttgtgactttagataagttaattaaatcaattttctaagttatgttat

SEQ ID NO: 154130 - DNA, 576 bp, Cannabis sativa
ttattttttttttctgtaagttgtatccttagatgatgacgaagaactaacatcgtagtctcccgaatcttccaccatacataagaactagtgtggcctagtaggatataaattgtctatgatgttcttagtttttttcaacacatgagtaagaactcttttggagtgatgatggaagaaatacattaatcagatgaattctttttaggcttaccaaaataatttgtatcaatttttgtttatatggtatctttaaattaaaaccaataaaaattttatttactgaattatttaaatctaaataatttattaaatatatttaattatttgaataaataatataaccgaactagttatagatattttttaattataattgattaaggaaatatctcaaccaacagaaatatttataactacttttcaaatttaaatttcaataaatatttatcttttaaattaggctaattagcaatttacccccacccccacccccccggaactttgacatataccaaatcatgcccctagaacttttttggccgttaaaaattccccctgaactattgagattgt

SEQ ID NO: 154131 - DNA, 540 bp, Cannabis sativa
tcaaataagtgaaacccagcgcactatttatcaatctgggcgttggttgctcattttcgagcttccaggatgtaattttgatacttctaaggttcaagaacttaaggtctcctaccctatttttgaccatttcagagagaatgatcaaatcagaattgacatttgaacgatcaaaacaacgcaccaagttgattgccaacgtaggcgttgggcttgacaccaggtcaacctgggcgttgggctcagtttctagggcctcgagtttgtggttttctccccaagttttcttgtatctttgatattttttatgacaaaaaaaattcctagaacactttttcaaaaaaatgattggaaatggcccaggttgaatatatgtcaaccttggcgttaggttcgagtttcggcctcctaaaagttttgttagtcccaaaaaatagttaaatcttaatattttctaaaatcaaagaatattgcgataagatttcttaaaaaacatcattagaattggctcagtttgacaaaatatcaacctgggcgctg

SEQ ID NO: 154132 - DNA, 591 bp, Cannabis sativa
tgttaattttgattccatttttgcgtaaagtaacatgttagtttgtaagtaacttgatacatgtatcactaaatatagttgagtgttaaattgtgactttatttttaataaataaataaccttgttattttaaaaaagtaacctagtagttgaatttttagctttaatttttctttaaaaagtaacattgtatctatagtgtgtgttgtgctatgcttgcaaagtagcgtgttaatttaaaaaagtaacttcgttgttaaattttagatattatttttgctcagagagtaacctggtacttttagttttgattttagtagtaataattaatacaaatgaagatcctttgttcatatgtatttagaataaatttttaatatattttttttctttttggtaagattagtatcaaaaagttaatgtagaataaaataatttaactaataagtcaaatatttattttttccaatctaaaaaaaaaactatcaagaaaattttgtgaaacaaaaatatatatatattatatattaaattacaaattcaatattaataactaagataaataacaaatttccctaaaaaataatacaa

SEQ ID NO: 154133 - DNA, 611 bp, Cannabis sativa
aaaaatatattttgggcctcgaacacgattaggctcaaaatacccagttgtgactatatcgtgtcgacttgtcaaaaaaatacctatagaaagttgaaacatacatactatataatattatagccataagcacaatatatcataaaattacgattttacccttctcgggtcaattacaaaaaatgcccgtagcacaccaacggggtcttaaaatataatttattagtataattttattcattaaattatataataatataattctacattaatacataattaaactagttagggttgctaatctggtttcttaaaccttaggatattataaaagccattgagaagattcgagcttgtatgcttgcctcacagggtagacagaagagctacgctgatccaaagggtagagatattgaattccaggttggaatttttttttcctttaggtatccccaatgaaaggaattcggaggttcagaaagaaaggaaagttaagccccaaatttattggcccatttgagattattgaaagggtaggtcaggtagcctataggctagccttaccccctgctttatctgaagttcacaacatgtttcacatctcgatgctt

SEQ ID NO: 154134 - DNA, 569 bp, Cannabis sativa
cacatagagtcaatagacatattttaacaaaaatgataggatcaatgacactccattttgagccaaacgacaacacactgaccatgcaatatagattaaactcttctccgtttataagatcaataactatcttcacatcaaaaaattgaatagtgaaaaaatatgattatttatgaatataaaacaaccataagaaaacattaaaaatgaagttgtaaacaagcaaacatagatccataacatatacaaaccaaacccaaaaaaataatgccaccaaagaaattaaatctcctacacgatgttcatacaatagtcaatctaatctaatccgtacgatccaatccaatccgtaaagtacagatgtccacacttgtacatattggatcatgttagaaaatccaaaatctacccttgtgcggattggatgttgattgacatataatagtaacaaattcaatccaatctacacatatttactaaaaaaattatatatataattacaattttaatgtaaaaaattagtaatttaaaaatgtaatatgtataatacaaatatatttcaaaactta

SEQ ID NO: 154135 - DNA, 686 bp, Cannabis sativa
accacaaaaaataagaccaaatctccaaaaataaaggaaacacaatagatagaatgcaattaaaacatgtttccataaatgaaaaaaataaaagaaaaaggccaagattcgaaaattatgcccccctttttctttatttttttttttcagaatatgccgcccaaattttgttgcaaagaacgaataaggcaacactaaaagacacataaggcaccaatcaacacttaagagcaaatatagtgtctaagaaaataatgaaacaaaacaagaaaaataacaagaatttttaacaaagctcaattgacagaatctgtcaattttttttattttgttttttttaataaaagacaaaaaaaaataaccttgatatttttgtaacgaaaaattcacaatgtccgcttgtctttgtccctgatgaaaaaatcaaacccacaagaatagttagaaattattttatcaagctaatgaaatagtagaatgatgtcataccgattatgcaagaaaaaattgactcagtcaccaagaatattaaagcaaatcaaacagtatgtaacagctttataacaccattttcgaagaaatgaaactttcaccacaaaatgtgtcaagcataagtgtgtgaaagtgtaagcacattgcccaatttttcaaaaagactttttctgataaattgtaaccataggaga

SEQ ID NO: 154136 - DNA, 511 bp, Cannabis sativa
  modified_base (51)..(57): a, c, t, g, unknown or other
  modified_base (306)..(309): a, c, t, g, unknown or other
atcaagaatttattctgataattgctaattcattatattacttccatgttnnnnnnnatgtgtcacaaagagtactgtggtatatagtccacccctaattcattatagagattatgattcacccctaagggatatagagatcacggttctcttagtgttatagaggtcatgtggagttacgaatataatccagagttcaatagatataaaagattgttgaactgcatattattcttaactttttttccacccctatctaatcaaaagatctttctattaaacaaattcttaataattgttttagannnnacaattattcataaacataaaaaatttgtgtttatgtagtattaactgtttgaagagtttaagatactacagaatttgtatcaataataaagacacatacacatacaattgttaaaacatataaatataattggtattggttacacaagataaaataaatgaagctcaactcagaaattgcaatttatttccaaaatagaaa

SEQ ID NO: 154137 - DNA, 783 bp, Cannabis sativa
ctgtatactacatcaacaaaagactggtcgatgtagaaattcaatacccactcttggagaagctgacctacaacttcctcttatcttctaaaaagcttaggccctacttccaggcacaccccattaaggtctacaccgatcaaccactgcaacgggttttacagaaacctgaagcgtcaggtcgactactcaaatgggccatttagcttggccagtttgagatcacatgccaaccaagaacagccataaagggtcaagcccttgcagacttcgtggttgagtgcactaactcaactcttgagacccctcaagactcaggagaatagcaagagccagagaagaagtgagagcaagagcagcaacaaaatcccgaagatctagcatggaaactccacgttaacgaaagttgcagtgaccaattgtccagtgcaggcattgcccttacagcacctaggggcaacaagtgcacagagcaatcaaattcagcttcaaagcctcaaacaatgaggctaaatacaaggccctgatagcttccctcaagctagcacatgaagtacgggctgaccacttggacatatttagtgattctcagttagatgtgagtcaaatcctgggtgaatacacagcttgaggtgatagaatggttgcctacttgagcaaaatcatagaataattaagtcagctcaaaggctacacggtcaagcaaatcctcaaagaatagaatgccatagcagatgcacttgctcgcctagcgagcagtaccatagctgacaaagcaaactt

SEQ ID NO: 154138 - DNA, 739 bp, Cannabis sativa
acctacccttttcaaaaactcaaatggaccgattatcctgggacttaactcctctttctaatctatctttgaatttcccctttatattggaaccacctgaagaaagataaaattcttaacttggaatttaatatctctacactttgaataagcatagctcttccatccattttataaataatataagaacttgaatctttaaactccatcactaccacattaacagtactctaataactgatattatacatctttgttactcccgagtataaagaatatggtgtagtatgtaacttattgagaaccttccattctacatccttatctaactgatacactaatctggtttatgtcataaattttccttcaaacaaaatcaaaagtcctatgtctatccagttccaaacatgtccttgtacttctaaagttcagagtcactctgctgggctattttattcctttccaataaattgaactacaatgtaatattaacaagttctccaatcatgatctcaatccttgttctgattacctttccagtaacctttggtaagatctctttggtttaaagtattcactaataatttacttcccagagtggtagaaaatcacaccgttagaatttaaatcaactctaactgtcaccacttcctcctatctaaattttcctaaaagaaacggtatttgaggcttttgtgttctgtatagatttcatattttcaccatacaaataatgtgc

SEQ ID NO: 154139 - DNA, 701 bp, Cannabis sativa
  modified_base (335)..(337): a, c, t, g, unknown or other
  modified_base (638)..(646): a, c, t, g, unknown or other
aatcggttttacagggacctgtaaataaaactggtaaccgatttttgcagttggaattcctgagaaattcaggttgtcgatttgtgttagatttaggtttttggttggttaattccctgctagtttagggtaatgccatattaagttgcagtagataggtttttggtttaaaacctatgtcccaattttgatttagcgtgtcacttatcctcgttgttattgatgtgatttaggagcctgtaattcgccgagcaattgttccactcaggttggccgacacatctgaattaagaattgaggtaagattagtataatgttatgcatatgcttatacnnntttagcgtacatgttagtttccattagaataggcaaacctatagccattagattagcatatcagggcatcggtgaggtgtacatagagatgcaccgagatgtcaaccgatagatgctaggctatcagatagtatgagttatctgctaccacatcagtacgactagagtactaagtataggttggattcgtggttaatcgttctttgtcagaacattcttgactcagttagggttatggttgggtgtatgggcgcctggttataacccgggatatcaatatgttttatgttatgcttttctnnnnnnnnntatcgactcacagtgctattttcatgtgtaggtaagggcaaggccaaagctgagg

SEQ ID NO: 154140 - DNA, 529 bp, Cannabis sativa
ttttatacacttaaatacattatctttattattggaggtaaaaatacccaatgttacagttctcttacactgttactactaattccgttaaatcataattattgaaacatgtaaggcttagatgcattccatttatttattttttattttaaaacttcatatttttaatattataaattaaatttgaaaaacttatcagtattaataacgaaagctaattaataaatttgaatattaataataaatttaaataatataaattatggaaagaaaaaattatgttctatattcatacccaacattttttctcttgaaaaacccaaaagaattttgaaggactattccacaaagacgaagcatcaccgttcgggtgaaacctgctccagttgaagtccgacgaagcttccctccagctgctggccgacaatgtggatgaaacatttccttggagaagaacctccagaatatggtaaactttcttatttttatatatatgtatatatttgttctttgtgaatagataaagttg

SEQ ID NO: 154141 - DNA, 700 bp, Cannabis sativa
acttgacaatttatttttgatctataaaaaatgacttggtcaagtataataataaggtttttatttatttgggtatgtttcaatactctcatttatacttttctttctctctctctttttcccttttctttaaggttaatactttctctctcaaactttaaaaataatttctgatcacatcattattcattattcgaatgagcctaaaaaaaatattattgtgatatactattaaatgtgaatatttcaaaatatatttttttttcgttatttctaaaaaataaaccatttcattactaatatagtaattagttacaattttatgattttttaatcttacttaacatatcttacttaacattcattttaacattcattttataattttattaattgatttatattatattatacgataactaattagctttcaaaataacaaaaaggtatctaaaataaacaatatataaaaatagtagattattatattacatgacagctcattagtttcgaaataatttttaaggttacctaaatgttttttaaattagtctatcataatataacttaaaaataaataattaataactaaaatgtatacaaataaattttagatgtaaccaaaatgtatctcaaattacatgatataaaaaggttactaattatattcttaccaacactattagtaactaaaaaatta

SEQ ID NO: 154142 - DNA, 648 bp, Cannabis sativa
ataaccctcttccacgagaagaagggacaatttggttatctcgagagggaaagtgtcgcaagagtacaaaaggcagttactctggtaaaagctaactattaaaagatttgcgacctgagtatgtactggcgcgttatggttgccataactgaacgtcaactagtggcagtcgaagacagaactaaaaccatgattactctacctagaaccccaatatatgtcagggatcgacgctgaatattgaaacgattgtgggagaatgttggggattgaccctggacattgaaacccattttatcaaaactagatgttcctggaagattgataaaataaacaattgaacctcttggggaagttcttttgagattaatgattgtaaatcacattactgatggaatattttaaattctagttgtgaataaaataatcatttttttcaaacaagtaattacaaagcacaaaatctttaaaattacttgagggacatatatgtatgattaactagaattgatctggaaatacatagtacattgcaaacccatagtttatgaaagggcctcgaccaaacttttttgacggaagaggggtcaaactgttataactccctaaccaaaccttttcgacggaagaggggtcgaattgttataa

SEQ ID NO: 154143 - DNA, 581 bp, Cannabis sativa
agagagaaccacgaggcaaacctcaagactcacgaaccagggggtaggaggcagccgaaaagaatccccaaaacgctcaagaaagacaacctggggaaactggggaacaccttgaaagcgagatgtcatgtgatcacctttttggaggataacaacggagttccctaggtgccacagacctgataacgtaccccttccgttgtctaatgctgcaagactgaaggatgccactaatgtaggccccaatagacttaaccttggactcgataagttctacctcaaatcttacattggggtcttgaagggtctttgatttgcggggcttagaagacatgatttcaaactcaaggtcacctagttcaaaagcaacaatgacgttgggtaaaaacattggtcttgcgagtggaatagaagataaacacaaggtctcaggccaggcagcatctcacaaaaagcaacacttaccctcaaaaatctcttgtaaaaacagcctataacgactgacagtctcttcttgtttcgacttaatcaaatgatctctaatcctggcatcgtttacttccaatttggattgaggtcca

SEQ ID NO: 154144 - DNA, 796 bp, Cannabis sativa
atatataccgagtttaactgcagtgtctattaatataaccaattccagtgattagccctccttttgttgattcatcattagttttggtcaaattactattttacctttctatttaattctgtaccttttagtgcttaccgagattttcagaaactaattaataagagcttaaggaaatgcaaaattgtaatatccagattaaaatattatttaatttttcttgagatattaattgtgaaataataatgatctcatgtatttgtattgttagtgagtagagattattgcttagagtagttgtaccaattttgtaaagagagttaaagttgtattaactatgaaagtaaaatattatgatattttcataagtaggtaatcgtttaattaaaacccaatatgaaggtccattaagattttataatatatttattagatttaattaattgtataagttttattaaataacattattatccaattaatgttagaaaatttgtaagtttagagaaattcgcaggtttagaaactgttttactaaaatgaccatatctggaattttataacttagattgaggtgatttagtggcattgaaaagataattcaaagatctataaattttagaaatagctacatcataattcgtaatttttctaggtcaaaactaagccctacagttacaagattgagagcacaatttaaatttaaaagttagatatttgtttatttaataatttatcatattattattgttattatgttattattattatcattattcataaaactaaacctaat

SEQ ID NO: 154145 - DNA, 1028 bp, Cannabis sativa
attaggtcaattccccaaatggcaaagggccacggacttcgcatttgtgtcagctcgttgggcagagctcttggtatctttgaaaatctctggcattcttcccacttgttgacataggctctcgaatcttcaatcatcattggccaaaagtcgcgttgccttagaattttctttgataagctctttccgggtgcatgatttcgacaaaatctgtcgtgaacttcatatagaagccgtgcagcttcatttggtgtggcacatctgagtaatggcatcgagaatcctcttctgtacatgatcccttctactatgatgttacgtgctgcctttcttctcttttttcgagcttcatttaggttatctggaagttccccagagttgagataggctactattggcgtcatccaatttggagatgtgtcgatcatttcaatttctttcgtgccagtgatgctaggctcttcgaggaactggatagggactaggtttgccttgtcacttatactgctgctcgccaatcgggctaacgcatctaccgttgtattttcttctcttggaatttgtttgaggctgtagcttttgaactgtgcgagcagatcatgtatttttctcagatatgctatcattttttctccccgagcctcgtatttgccaaatacatgatttaccactaactgtgaatcactacagatctcaatgtgctcggccttcatttccttcgctagtttaagtccatcgattagggcttcgtattcggcctcgttgttagaggctttgaatcccaatttgactgctgcgtgcaggtgttgccccccaggtgtgacaagggcaattcttgcaccagatagttgatctgttgccgacccatccacatgtagcttccaggtcggtttgttttcagtgttactcggttgtggtattgactcgagatcgctttctcgtatgctttcagctttgcctatgcattccaccacaaagtcggccaaggcttggcctttgatagctgttcggggttggaagatgatttc

SEQ ID NO: 154146 - DNA, 726 bp, Cannabis sativa
tcctcggtttcctggcacgtgcctcgggcgcgtgaaggtgtaattaatgatcgccattactgcagcgattcactttttgtaggcgtcgatttgtttgacgtccattaattgatacagcgcattaatgggtgtcagacggacactcaagcgtttccaccaccttgatgacaaaccaatctggccgtttgatcttgggaatttgaatcgtgtgccttcccaaccgtacgattggtaggtgatcgtgcttgttccacatgcacttttgcctataaaagccaccattcttccttcatttggttactttcagcctttcaccaaattgcttcgaatttttcagagagaaaaaatccctcaaaccaaaaaaccttcaaacattataggtttcttactaaccttctttcgttattgtcagttcaacacttcaccgtcgatcaacaacaactctcagttctaacactttatgtaagtttttcgcatccctcactttatcgtttgtgttcatggcatgcttcactgttcatctgttaatctgggtttaatgttcgaagtttctgggaatttttcaccttgagtttctgtgtaacatgtttagatttctcttttctcgtgtttgagtcaatcttattttgcacattatatttttccaaaggcccatctgttctttacgtgatgaccttcaagggtacagagaagactttgtcgttctcgatttttaccctttctttt

SEQ ID NO: 154147 - DNA, 570 bp, Cannabis sativa
taaaataatttattatataataagcttttttcctacagaaaattatttgtagtttgaatactctatctcaatactttgtagtttttcttcccaaaagagtatatttatatatataaataaaaatagaagatagagttgagtgaattatattcaaaaccataactaccgagtaaagaatgaacaattacaccaattatgctatttaaaaattatgtattatttctacctctaattttatataatatgttttaaaaattgaggaagggcttaagtcttcctttggctttatgtaagtccaccttatgacctcctttaatccttctacaaaactaccctctaacatgtgctcgggcatattggccctgtttaattaagcttttacttttgtttatatctagaagtataagataattattagttttattttattttttaccctttttataattattatataaatatctttttttaataacaattactttttaaaatatttggatatcattataaaaagatcttttgtgagtaaattaaaaattatataaattattttaattttaaaaatagttt

SEQ ID NO: 154148 - DNA, 541 bp, Cannabis sativa
  modified_base (28)..(29): a, c, t, g, unknown or other
  modified_base (60)..(61): a, c, t, g, unknown or other
  modified_base (88)..(89): a, c, t, g, unknown or other
  modified_base (116)..(117): a, c, t, g, unknown or other
  modified_base (145)..(146): a, c, t, g, unknown or other
agtgcatgcccacccatagtaagtctanngcatgcccacccatagtaagtctagtactcnnccacccatagtaagtctagtactcaannacccatagtaagtctagtactcaatcnnatagtaagtctagtactcaatcatagtnngtaagactgtgaagaatccaataagttgaaggagaatagggctcaaatcttgataatactctgtaacagaaaggaacaagcctagagatctgagtgggaggcgacatattattcctctgcaatcaatgtaaggtttcataaatttgtatgtgtttaaattctattgttttaaaaattcatatttaggatgttaatcaacatataattctgtgtttaaattctagtgttaattctaggagtgctaatagttggatcaaaatttataataagttaactgttcacattgaattaatggtacataaggattaagaaataattagaagggtaaacgataattttgacaaactctaattatgaactaataattggaggacaaactgttggaaattatttta

SEQ ID NO: 154149 - DNA, 627 bp, Cannabis sativa
actcggggtagaatcaaatcaaaatgcatccaccagaccaagaacatacaagtttctgagcagatatgggtctatattactataaagtaatgtcgtttgctctcaaaaacgctggagccacataccaaagatttgtaaacaaaatgtttaaagaccagatcgggcaaaacatggaagtgtatgtagatgacatgctcgtcgaatccaggaaggctggggggcacatagatgacctggataaatcccttaaagtgctcctttagagtcagctcgggaaagtttctaggcttcattggcaatgcccaaggaatcgaagctaatccaaagaagattcaagccctcctgaatatgaagtcgccaacaagaaccaaggaagtgcaaagtttgactggtcggatcgctgcactcagcagatttgttttgaaatcaacacacaagtgtgtcccattcttcaacatcctgcgaggaaataagcaattcgagtggacggaggaatgtggaaaagtttttcaagagctaaagacacaactcgcaaaacctcccgtactcttgaaacctctagacggagaagaacttggaatatacttagctgtcacggagcacgttgtgagtgccgtgctgatcaga

SEQ ID NO: 154150 - DNA, 717 bp, Cannabis sativa
gggaggaagaagcgaataggagattacgtccaaatatggtgacacgggaggtgtgggcagaggttatcgcatactgaaaagacccgaaacaacaggtattagttgaaagttttaattttcttatttacttaatatttttttttctcaatttgctaacaataactatacgttaaattacaggcaagagctgagcaaaatgggaaaaatcgaggtaacatgaaggttcaaggtatggggatctaagaatagtttcgaccattgtcagcggggtatgaaattttcaatgtatgataaaaatatggtataattggaaatttttaataatatttttctaattccaattttttttttaaaaataggctgatccgcagacaaaggagcttcccagtgttgtggatacatttgcaaagttccactacaagaacaataagtggcgcgacgagcacacacaacaactgcatgtaagtatctttatatttttattaaattagttttataatttaaatttctttcactctaacagtttcatcatgaacttttttgcaggccaaaatggttgagattcgtgacactcaaccaacgccagccgatgccccccaccagtacaatgtcgaccccacccaatttcctacagatacgcatattatgacacaagtattgagtgagcggtcacgccacttgagaggactgggtccgttgccaagacttaagacaggg

SEQ ID NO: 154151 - DNA, 692 bp, Cannabis sativa
  modified_base (235)..(236): a, c, t, g, unknown or other
ttcagtttcagtttttttgacatggcggccggtttcagtttttgaaataaaaaaatagttaaactaaaaaacttccaaaactacccaaaactgtctaaaaccgccaaattgaaaaattgccaaaaaccgtacggtcggtttcatacgattataatttctaaacgcgcagttatggttttcgtaaaataaaaaccataaccgagcgtcagttataaaattgtaaaaaccgaccatnnccgaccgattttcacccctatcgcgtactgccaatggaactaaggatgatgacctcgccttacccatttgctatatgggggattgacctaattggggcatcagctgtcgggcgaggaggagccaagtacgcagtggtagtagttgacttcttcactaaatggactgaggccgagcctcttgtttccataacctgcaagaaagttcttgacttcgttgccaagaacattgtctgtaagtttggaattcccatggagacagtatcctataacggaacccaatttgatggagacttgtacactgagttctgtgagaggaataaaataattaagagcttctcatcagtatccagtcctctggcgaatgggcaagtggaagctgttaataaaaccttgaaggatactatcaagaagaagttagactctgccaaaggcagatgggtcgacgagctaccacaa

SEQ ID NO: 154152 - DNA, 853 bp, Cannabis sativa
cttgttttaatcttattcagattatcgctaaattaagttttactttaatctaccatcatcttaggattactattcacctaatagtctaggattctaagtgtttgtgacagattacaattttaaattgtgatgaataatagaacctaggttaaatgaattatatgcttcattaatttgttgcctagattaatctatctccataaatctcaaagctttatttaagttaaataaattgcatgctttgtgaatttactgcttaagtaaaagagttaattattaagcgcttcatcttgattacatacaatagggagattgggataattgactacttcaactttatctgtaggattaatagtttgataagaaactgaaattacattcattaataggacttaggaatgattgttcagggtggcgaataacctttaactagtttctcatatcgtagtctcaattttactttgtttttttttattttaatttatgctattttactctaaacctcaaaaccccatttttctaacttttgatactaatttttgaataattaaataaacatagtcctcgtgtgttgcctgagattttccccaaaatacttggcagcagctgcgtgcgacacatagatctcaaagaacacccactcacaaaaattgggtaagtcatagacagagaagtgcatctcacggtgtgagcctcccggaggagagcataaaacacacctttactctttgggaagctagaaatgtaacaatgcatctttgggagggaaagagatcattcgaacagtcacttcgcatttaacgctgcatgggggaaacgtatcagaacctccataagaagatttgacagatgg

SEQ ID NO: 154153 - DNA, 617 bp, Cannabis sativa
  modified_base (570)..(584): a, c, t, g, unknown or other
gagttttccagagagaaaaaatcctcaaaccaagaaaaaaccttcgaacactttgcaaatttctttgctaaccttcactcactactatcagtctacattcccttgtttgatgaacaataaaacccccagttccaacacttcattgtaagtttctcgcatccctcactttattgtttgtttttatggcatgctttacttatctgtctgtttttctgggtttgtgtttgaagtttctgggaatgtattcttttgagtttttcatgtaataggtctagattttccttctctgggttagggttactcttgtcacgcactgttgttatattttgtgaaggaccatgcactcttcgtgtaatggtcttcaagggcatagagaagacttcgtttttctcgattttctgcccttctttctttttctttcatgcgtaatgtcaccatctgtgagatttttgcacccgacttttgtccaggaaatccttctaaggctttcttgttgacagctgtccggagggggcctctttgtatcggttacgggacccccattcctttttttgatttagggtttggtannnnnnnnnnnnnnnggaattttaactctttttcagaataaaaaatgt

SEQ ID NO: 154154 - DNA, 970 bp, Cannabis sativa
  modified_base (455)..(456): a, c, t, g, unknown or other
  modified_base (770)..(777): a, c, t, g, unknown or other
taaaaatcccaaaatccaagtccacccatcaccttaggctaacacgccgttttccatttcacctaagaaatcttcctttgattgccattcgaatcccaccagaattgtcgtacaatagactttaattttttacaggttaccataagaagcttaaagacactcatcatataaattggaatagcttgaagatagatttgataagtacctctcttccaccagcaaaaaagaaactctgtttccaccctcgaacatgcttcctgacatctcacatattccctcaaacgttctctatttatttctaccaatgtgatcacagtatacattatacttatttagagcacttttctatttattttttttttgttttatctcacactttatattataccatacataagctattatataatttcttttgtatatcatttaaatattatttatatatataaatatanntatatatatatatatatctataacctatataaaagtgagaatgattttttgggctttcactaattgaattacacaattaatcttcattatatattcaattataaaaaatttaaactaggcaattgtacactacttacttttttttcttctaaactaagcttcccctctaacattttatcttttgtgaatatttgtgaaaaattattttgtcttatatttttttttattgctatcaataagtatattttcaaatatttaatgcttctttattttttaagctaatattgctaataattattatttatataaccatnnnnnnnnattaataagtatacaatataataaaagagaattatgtgtatatataattaaattgaaataatatattttgtgatatatgagtgttatctttttttttaaaaccctatatttccttttagtattagaaataatattaaattttaaaaataatactattatatcattaattaaaaagtaagactaaaaataattt

SEQ ID NO: 154155 - DNA, 526 bp, Cannabis sativa
agcctatgctggccatagggtcagccagggggatccggccagaccccttaaggtggccagtttgttgtctctttgtctcgcttaagtactcagacttcccatcaactattatgttgtgtacggtgccttaaccttcttgttgacacgttgtgctccacgtggcattgatcttgctcacgtggacatgccacgtcatgtgggcaaaaattgggataacagttatatgtgttataatttaaaattataaggagttttgctataaatattttaataatttaagtgtagaaaaaattaattgctaacagaaccctgtttagtaataaattgtaaaaaaaataaattgtaacgtccttgcttcaagcttccattgtgcccttacacccatggaatgatggctcttatacatgggtacgttactctgacaactttgtggagtgacgactgaccctacaaatcaacatgagtgtttccagcatgctttgtcctcactcacacacttcctgggaaaacttcctaggaggttacc

SEQ ID NO: 154156 - DNA, 1091 bp, Cannabis sativa
gggtgtctgagaggaaaccaacagtctggtcgggaatgttataaccttgaagtatcctccagccagagcacatataaaggaaaaaacattcccatgtagggaacttcccaaggcggggatgaagatgtgaatcctcgacttggggacccaagcagtaatgttgtacctgtggaagagttagaagagatcgagatcgatccagatatcccaaccataaagctaaagatcggaaagggtgtgttgctcaaagtaaaatcagaattgataaaatttctgagagcaaacctagacgtttttgcttggtcacatgcggatatggttggaattgatccttctatcatttcgcacgttctgaatattgatcctaactttcggccagtccaacaaaagcgaagaccactggacaaagaacgagcattagccctgaaggaagaagtagaaaagctgcgcaacaataattttataattgaagctttctacccagcttgggttgcaaatcccgtattggtgcccaatccgaacaagaaatggtgagtttgtattgattttacagacctcaacaaagcatgccccaaagactgattttatagacctcagctcgggaaagaatctgggtttcatcgtcaatgcccgaggaattgaagccaatacagagaagattcaagccctcctggatatgaagtcgccaactaaaaccaaggaaaagcaaagtttgactggtcggatcgccgcactcagcaggtttgttctaaaatcaacagataagtgtgtcccattcttcaatatcctgcgaggaaacaagcagttcgagtggacggaggaatgtgaaaaagctttccaagagctaaaagcacaacttgcaaaacctctggacagataagaacttggaatatacttagctgtcacggaacatgctgtaagtgccgtgctaatcagagaagaggacaacatacaacacccagtctattacattagtaaaagagtcattcaggccgagggccgacacccattaatagaaaagctcacatactgccttattctagcaacaagaaaattaaggtcttattttcaagctcatcctgttcgggtgt

SEQ ID NO: 154157 - DNA, 581 bp, Cannabis sativa
attgatgtgatcaaaccgatcacagtagcaaatatcaagaacaaactcaaatgattaaagtcaatattaatcgagcaaatcttaacataaagaaatgcaattaaaacagtaaagaacaaactgaaaaattaaccacaagaatgaaatcaaagtttagccattgaggcacttcccattaaccaattatgcaaagaatgtatacacaagtgttggtgattcaatcaagtaaatggagagaagaaagatacatcaaaaaagggcacaccagtagctaatttgacaaaaccagaacccagacgtctctctgtctctctcactcttggttttttaccgtacaaaatgaatcacacatgccttaagttagttatgtctatttatagacataaccaacttgaccgacataacaaaaaaaccggtaatacagttggaaagtccctaagtacatcaatctaagacttagtttctaggccacattacaaaaattattatattttttattaaaaaaaaaatcaaaaacgttaaggtatatatattgattgatattttatgtatgtatataaataaaatttaggattaattat

SEQ ID NO: 154158 - DNA, 529 bp, Cannabis sativa
tctttgaacatcaacatccatgataaatcaaattgttacctattacagatataaaaatggacaaaaaacaactagaccaaataatattcccaaaaaacgacatacagaaagtgattacaccattaaaaaaatgaaaaaaaaaactaatataaaatgagaagagatcaaataaaaaaactgaaatgaaaaatattaaaaaacttggaaaaacaaaaacaaaaaaaaaaaaaacaaaatgaaacaaaaattaagactaaacaaactaaaatgaaaaacccatcaaaagaacaaataatttgaacaaaacaaattgaagccctaaaaaaccaaacaaaaccaaacgaaatgctaaaatgaaaaacctagaatagtacaatccaaaaacacaaaacacagaaatgtcaaatacgaaaaaaattcgaagaggggggaaaccaaaagaaaacgaaaacaaacctcagatcgaataccaccaccaacttgatcatttttttgagaaacatcttcaggaattttttcctgggcagcc

SEQ ID NO: 154159 - DNA, 677 bp, Cannabis sativa
  modified_base (334)..(335): a, c, t, g, unknown or other
gcattcgaaatgtaaacatgcaaggataagcataaaggggaatcagaaacttactcaagattcaaatgtctgggttcgagcaacgtcaatcaaacaagcagtttttatgaaggagcttggcaactttgaagccaagaatttctcttttcgctttgaggcttacttagcaaagaacggtgacgaaatgagtttatgtgccaatactattgtctcaaaggaacctcagacgcctcagcttcctgccttaaaaacgaatatgggaaatcaaaagtaatcaagtgcagccgtcagctgtggagagagaaaataagatttcgaaatattaattgtcagnncatttattagccgaaaaccgaagggatgcccaatcagccacacatcgagtctctgacggtcgcgctcgacacgtgtccccatctaaaggcagaatcagcttggatgaagtctacacgcaacttcagaagtctcgtacagacttggggggcaaatgttatcccaatttttgcactttgacatggcatcacgtgaatggtgacacgtgaagtccacctggaacatctgctctggaggatgcctcactggcacgcccagagcaagatattcagcgatctgcgcagagcaaccaacacttagcaaattcagctttcgcatcatgagtcatcagtacaatccctata

SEQ ID NO: 154160 - DNA, 533 bp, Cannabis sativa
  modified_base (35)..(56): a, c, t, g, unknown or other
tattaaaagtaaaaaaaaaaaatcgaaaaaataannnnnnnnnnnnnnnnnnnnnnaaaaaaaaaaatagaacaactatgaaatacaaaccatggtttgaatcaaaccaatatgtttttaagtggtttggtttggtttgatcatttcattagtttggtttggttttgaatttgtaaaactgtaatagtggggtttgtaaaaattaaaaattctgaccaaaccaattcgtgaacacccctaagcagtggccatgctcaaggcctccacgatcagtctaaaaaaacttttgacaaaaatattctaattaaatttattttttaaaaatattatattttgtatatttaccattatttattaaaatataactactttcttaaaaaatatctaatttattttttaagatacttcatttgatcatattttgttaagaaaaaagcttgaatatatctttaaaatactatatagatttttaccatcatacataaaataatatattttttttatataataaaaaagagttaatttcacaaatg

SEQ ID NO: 154161 - DNA, 642 bp, Cannabis sativa
  modified_base (65)..(68): a, c, t, g, unknown or other
  modified_base (508)..(508): a, c, t, g, unknown or other
taatgccattcatatatgcatgtgtgacacagacctgcacgttgcgctcacatgcctatttatgnnnncgtggcgtagacctacgtgttgcactcacacgtccatttatgtctacgggacgtagacctacgtgtttctctcacacgtctaaatacaataaggccttcgaatagttcatctctgttctggttaccgagtccaacttgattgtgccttgaatgcataagccttaatctcaatatgtataacacataattaatggtgcgactgcactatttgtctattttctgtagacctgcatgttacgctcaaatgcctatttatatctacgtggcgtagagctacgtgttgctctcacacgtctatatacaataaggccttactagggttaacctcgattttggttaccgagcctaacccggttatgccttgctcgcataaccctattcatatatatacgtaatccatacattacgttctttcgatggtttatcctggtgatatatancaggtctaacccagttatgtcttacacaaataactcttaacatacatgcgtgtattcaatatttaccacatcatataaaatcttagggtaataaccctaactcatgttttcactagattaataatattaccata

SEQ ID NO: 154162 - DNA, 663 bp, Cannabis sativa
ttttaaggttgttgagatattctctcaagtggttgagagatttcctcataaatattagtaaccaaattcggttatagagatagttaccatccaaacatgaaattgttctatgtaaggatcaatgtccaaagactcctcaagaagaagatgacatgagaaagtaccctaatgcatcaacagttgggagcttgatgtatgcaatgttgtgtacaaggcctaacatatgctacactgtagggattgttagccgttatcaatctaattcaggtttagaacactggattgctataaagcatattcttaagtatctttggagaatgagagatgtcttgcttgtatattttgatggagagttaaatcttactaaatatactgattctaattttcaatcagtatttactcttggttgaggaactgtagtttgtagaagcattaagaaaactagtattatagattcaaccatggaaggcaaatatatacaagcttgtgaagcagctaaggaagcagtttggttgaagaaattctacactgctctagaagtagttctagaagtataaaaactacttgtgctctactgtgacaatagtggagtggtggacaactccaaggaaccaaggagacacaagagaggcaagtatattgagaggaagtaccatcttctaa

SEQ ID NO: 154163 - DNA, 927 bp, Cannabis sativa
gtgaactagtgtagtatatgtgaaaactaggcattatagtcgttcttcgtgtagttaatttaattttttttagtagtataataaataattacttaaaaatataattctaatatatagtaaaattataaatgtattatcttatttcatattattataaataatttatttattaaaaattaaatgcacaattttattaattattatttaaaattatttattaagtagtttaaaatttattatatagtattttaaattgctttgttaaaagaaattatttttataaaaataaataaataagatggtatagaaaaaaattggcgtttcttataatgcattattttcatatctcgatcattcaaaattattgtgattattgtatctcacttgttgtctcattgtatctcacttatttttattaccgtatatcacccgttgtcaccactgtatcgcatccattgtcattgtcgtagttcatttgtagtcgtcactattgtattttccaaatctatatcttaatcttagatttcatctcgaattttaaatattttttaacattttattagagaaaattcattagtttgttcttttattattaactaatatgttttgaaaaagtgattattattttttaaatatcttaattaaaaaaatatatataaaaaaaaatgtgatattttaattataagaaaagcaaaataattttaaagaaaatttaaagtactatatcaccgttttatgtctctactatatctataaatatacagatgtagatttaaatctattgattaatatttatatatagatttatatacagatatagacctaatgtattaaagcaatttgaaaatgatattaggaaatagcaataattgaaagaaatgaaatgaaagggtgtgtaccttattttcagtgaacgtatggtcttca

SEQ ID NO: 154164 - DNA, 760 bp, Cannabis sativa
ttcggaagacaacctggcggctctgataccaaattgtaacaacctaactaatttaggcgtgttagcgtgctttttaacatactgtgtatctcgacgctaatcaatgagattaataataaacatgattaattaaaatttgcttatttaattagaaactaaaaatagtatattataaaatctcgggatcccgtttacaaaatacatttgcaaaagtttgttattcatatacaaaagttttgtcggctagcgactatacagtaaaaagccctgatgtcccaaagatcgtacgctctaggcctaacagccccggcatgtacaatcttcgccttctcgctctcacgactcttcaactttagtcttgcccttacctacacatgtaaatagcactgtgagtcgacagactcagtaagaaaagcataacataaacataaaaatatcttgggctataacctggcgcccatacacctgatcataaacctaactgagtcaggaacgttcttgacaaagtatgattaaccgtaaatccagcctatactcagtactctggtcctactgatgtggtagcagataactcatactatctaatagcctagaacatatatgttggcatctcggtgcatctctatgtacacctcaccgatgccctcatatgctaatctgatggctataggtttgcctattttgacgccaactaacatttacgctaaacatgtataaacatatgcataagattatactaatcttacctcaattccgaatt

SEQ ID NO: 154165 - DNA, 712 bp, Cannabis sativa
atatatatatataaagtaatacttacttagaagtataaatatgaaaaattaatttaattaattaatagtaaaataatttttaaattattaaataagtattattacaaatagtaattttttttttaaaatactgaaaatttaatatgtgaagtaatgaataataataataaataaatttaataaattattaaagtaatatttttaaactaattatttattatttttttataataaataaatataaaaaattaaagtaataataacttaaaaataaaatataattaattaataatataataactcttaaatgatgaataatttatttcataaaatgatataaaatattttaatataaaatattataaaattgtgtcataacatgaaatcttatatgcctttataaaattttagatgacaatcgacaagtcttggacgacattgcgaaattttaaaggatctccacaacagcctatgtatggtcagtttttcagtgcacagagtcagcaacaaatgcaacaaccaattttggttcgtccgcagcctcgacaatatgtggagatcttaccaacaccgcagactggacaagcttattaccctaccctgcctgctcaatcccgtgataatcttgatggttcaagacttagctcaaatgcagatgaatttttagagtatactgatttgaacaatgataattaggtttttttaattatgt

SEQ ID NO: 154166 - DNA, 760 bp, Cannabis sativa
aaaactatagtgatcgccggagttatcaccggtgcttgaaaaggcgtcggagtttgttgtgagcgccgaaaaagtcgccgaagtagctattagcttcgaaaaaattgccagagttgctaccggtgccgaaaaagtcatcgaaattggcattgtccctgaaaaaatcaccaagaaactggtttcttcatcaagaaactatttcttgatgatttttccagtaatttttttggcgacaatgctaattccgacgacttttatagagtttgctgtcgataccgaaaaaattttcggagtagctgctagtgtcggagttgttttcggcactagaaaatttgtcgaaattgacattgtcgttaaaaaaatcaccgaaaaaatcactattccaatcccgatgactatgctaatttcgacaactttttcggcattggtttacaactctgacgacttttttggcaccgacagctattctggttattttttaggcatcgatagaaaactccgacaactttttcggcatccgtgacaaataaaactagcttaacgaataaaaatattaaatatgagatttaaaaattaaatttacatatatatgacatattaaataccataaaaatgcttaaaaataaataaaaaaaaataccatataaattggtcaaacttaaaagtgtcatttttttttgagaattcagcaagtatattcattcactataccaatttacaaccaaagagcatcctccaatagaagacctcaaaatctcaa

SEQ ID NO: 154167 - DNA, 706 bp, Cannabis sativa
caagtcttggttattatcgcccctctaattttgatcggccatgtaaacactttctatatcctcagtcaagatggtaaatgcagtgtacttggtctgattctcccaaggagcttgttcagttttgccggtaaactttcccttcttctgattcccttgtctattgttgttgctggaacgtttaccgtttgagcttgaattacttgggtaatgggggagttgggcgaactttccagtggaaggagcttttgacttactaggtttttgctcaccttctgctcgatgagtagcctcttcaagtttgatgaagccttcagcacggtcgagaaaatcgctcattgagtctaccgaatccttatgtccttccaaagctcaccaatgacttcaatgcctccagtatcgcgaataactttccgtcttcagttacccgtgaaaccttagttgctttcgtcatgaatctgctgatgtatgctcggagaggctcgcctggtctttgtttgacttcgaccaggtctcctaggtacaatggaagttggtgagaggaggagaattttgcatggaattccgagaagaaagctttccatgagttaaactttacaggtgccagcttgaagtaccattgctgggcggcttccgagagggtggcaggaaaaattctacaatatgcgtctcctcgtaccccctacagatccatttgcatctcgaaata

SEQ ID NO: 154168 - DNA, 792 bp, Cannabis sativa
tctgtatcacaaactcgcatcaagctctcaagccaattaccaaaactggaaggggctgcaacattgataggccagccgaaactagcccagcaggctttggcaaagtcgtaggttatgagcagatgaatggcagtttctgggtgtgctttacataccggacattggcttgaaatagggacatgcttggtgacgaggttgacacatgtggggagatagtctgagatgacacgccacaaaaaattcagcacttttggtgggattttcaggtgccaaagctgtctccaaaaaccagagttatcgggttgaggagttgctgctggtttgtgctgctgtagcagggaataggcactgcggacggtgtagcaacctctgtggtctgctgtccaagaccagaagtcagcccctgcagtactactcaagggtataccgagaataacattagcctcatgtgaaggaaacaaatcaaacacaacttcttcatcccagcttcggtcattgactttgaaaagagaattcacaaaggtattttgaagacttggatgggtagacacaagacacttagtatgttgattcggtagccaaggagtaccaaggattttagtgcttaggccatcaccaatcgtacgaatagctccaagacgatccacatgttgggcgccccaaatgctacgccaaacaaagcttggattgttaccaagatcagctgatagaaaatcagtttaaggaaaatactttgctttgtaaactctagcagcgagagaatttggattacacagaagacgccaaccttgt

SEQ ID NO: 154169 - DNA, 523 bp, Cannabis sativa
  modified_base (63)..(67): a, c, t, g, unknown or other
tcatggtggatccagccaagattgcatgtgagacattcttcgggatgaagtgtgcaagtgctnnnnnttgaagggagttcaaggtctcgacacttttgaaatttgattagaacaatagatcaacagttgcagtaaattcaaagagggagtctttatttgtataagtcaatttagttttgtaaacacttgggattcatctaataaatttctttctctgggcgtggccccgtggactaggagcaattcgaaagaattacagataccacgtataaaatgttatgtgtcattttaattttctacattttactttctgcagtatatttttattctattagattttgtgtctgatagaacagagataaattctatccaaacaattttaatacagttctgcattatttaaattgcttgataattttacttggcaattattaaagggaaatttgattttctatacttaaaaaaccttaatattttatttttaaaccaatacatttcaaactaagaaaaatatgacactttt

SEQ ID NO: 154170 - DNA, 711 bp, Cannabis sativa
gcctgtgcattctaccaaaaagtctgctagggcctggcctttgattgttgttcgtggttggaaggtaatttcgtactggcccagctccaccgtccacttgagtagccgtccagaggtgtccagtttttgcaatatttggcgtaatggttggttagtgtacacccaaacaagataagcttgaaaatagggccttaacttttctatcaatgagtattcgccttcggcctcaatgagtcttttactgatgtaatagaccggttgttgtatgttgttctcttctctgattagcacggcactcacaacgtgctctgtgactgcttagtatattccatgttcttctctgtccagagatttttggagtacggaaggttttgtgagtgcgtttttagctctttaaaagttttttacattcctccgtccactcaaattgctttttttcttgcaggatgttgaagaatgggacaaacttgtctgttgattttgaaacaaatatgctgagtgcggcaatccgaccagtcaaactttgcacttccttggttcttgttggcaacttcatatccaggagggcttgaatcttctcttgattggcttcaatccctcgggcattggtaatgaagcctagaaaatttcccgagctgactccaaaggagcactttaagggatttaatttcatgttgtacttcctaaggactttaaagcattcgtccaggt

SEQ ID NO: 154171 - DNA, 710 bp, Cannabis sativa
  modified_base (664)..(674): a, c, t, g, unknown or other
attccgctgcacccaatgtaagtaaatctagatcctggtaaaatatttccaacagtttgctgtgttgacagatcttccagcacctctgccatacattctagatccaaaaccagaataggagttattgttgccacttccacgattgtatcctccactattgctacctcgattagaagaagaaaactgagatggataattgtaccttgagaatggaaattgttgtctgaaattaccaaaggtttttctgaagttggcaagattagcttctggatgatcaatgtcaagtgaagcaacttgagcactaatttcaacctctcgaccagtcttctctattctggattctgaagctagaagtagagactcaatctctgcaacagaatacgtctctaatctggtattagtggatatgacaaaagtgtcatattcactcggaagtcccttgaagatagcagctacatgatcttttgtcgtgtacacttcaccaactgaggcaagaagatcaacgtgatgtttaactttgaggagataacccgatagagacagtgagcctttcttcaagttttaaagcttggttcgaaactcaagaattttggcagaaacttgaagattaaagaactgttgggttttatgccctaaataaaacccatttcatataatcagattnnnnnnnnnnnaaagatcagaaataacattttatgctgcatggttca

SEQ ID NO: 154172 - DNA, 603 bp, Cannabis sativa
  modified_base (500)..(505): a, c, t, g, unknown or other
ataattataattaattatcaaatagaattaccatttaacttatttattaattagactttataaagtctattaattaacaaataaatcataaaattctctcttttttctcaaataagctcttgtttaataaaaataaataaataagatagtcttatttagaactctaatcgattaattaaaactaattaattgagtctacgagacaatattatctcagacaatgtagggaccatgggcctatataaccaagctctcaataagtagatctgaaatttaccaagtaaattttctatcttattaatcctcttgactccactattgattcaaattacattcctgattacatagaacgctctatatatgttccaaatatagatacgctatatattatctattgtttcaatctaaataatcaaagatcctctacaaatgatttacatcgaatatgggataaatttaccgttcgatctacccgtgaatgtattttatccttaaaacannnnnnttcctataaataatatttcagtaaactaatataattactgaaataagggctcttccatttatgttaagccaaactcaaaagaaatcaccatttcactt

SEQ ID NO: 154173 - DNA, 668 bp, Cannabis sativa
gataatcctagacccgatcgtgggaggtatggatcttggatgtgtgctccgagttcgccaccccgtgatcgtgttcggtaccagaaaaaacgtgaccattcgccatctaataggccgatcatgtctatgggagaggcttcgagaattcttgctgttgtggagagggggcgggttcgttattcaggtcctacacatgaggagttggctcccacttctgtattagagggccgtgagcgggatgtcggggtgaagtctaggcttgcgactgatcaaggtggtaaggtggctgtgggtgtatcgtcttctttgaacggcacacaggcgggtgtggcccaaatggttggtaatgatctagggaaggtggagccaaggtgtgaatcggatgagataaatgagccgttgggtgatgttgttgctaatcaaggtgagggtggtgagttttctttgatgcatgagttacccgtttgtgatatgggtaagcctatggtggagggggagtgttctatgggtgggggtagtggctcggttgaggggatggaggccgagaatgagggtggtcatatggttcataaaagcatgcatggattgaatcatgttgataagggtaagggtgttttggacctttcatctcaagtggaagtttcttttacccaagcacttcaacaaac

SEQ ID NO: 154174 - DNA, 690 bp, Cannabis sativa
  modified_base (27)..(28): a, c, t, g, unknown or other
ttacacaacatatatcactagggtaannaccctaggctattaaccgctcatattagggtaataaccctaatcccggttacgattactcacatatatcatgttctacataagcatcaccgggcatactctacgtgcaaactactgtcttacctgttgtcttgcaataacagagattccaaacccctggctgctcctgatcaggtgccggtaatcctagtcacacaatccaagatttcacaaataaggtttatccctaattccactttcacataatataaacttggcattcaaaatacagataatcatatagagctcgaaacgagctttccagcgatataaagaacgtaaaaacgcagtcccgagtcaaaagttatggctaaaccaaaatcgggaaaaagatggctctctgctaggttttatggatgcggcgaccataaatttggtcgcggccagttggttcgaaaaatcgagaaagccagattataaggtctaaaaatgcccacttttacatatattcgaaccttaataaaaccatacccaaatttaacttcttatagataaaaatcatcgcaacagagagcaaacaatgtcaattctaacattaatcaacaacatccaatcaaagctccaaagcttgagcaaaatcaacaaaattcaacctcacaccttgaatcatcaaatcccaaaaca

SEQ ID NO: 154175 - DNA, 632 bp, Cannabis sativa
ctcgtcttcgaattgaggaggaagctcgaaaacaagaccaaaaggaagaggtgcttgttgttggaaacaacaacaacactaataaaagatccactgttgttttgaaaccgaatgggaaaaactttaagaatcagaatcgcaaagcgaatccaaactgcaatagtcaacctcggaccaacaacaataatcagaattggaaccatcaaaggaaccaaaataataggcagcaagtaccccctaatagaaatgactctaatttgttcatgtgttacaactgtaacaagccaggtcatatggcacgaaagtgtaagaacaagcctagttctgctccgcaggctaacctgacaggagagctgtcatttacagctatgatttcagagattaacctcattggtggatttgaagggtggtgagtagatactggcacttcttgcgatgtctactataatagaaatatgtttaaaacatatgttgctgctactgaggatcagaaagtgttgttgggtgactcccacactactatagttactggtactggaaatgtggaattgaacttcacctctggaagaactgtgattctaaaagatgtgatgctagactttgtcacgtaaataaatgcataatcaagaaca

SEQ ID NO: 154176 - DNA, 576 bp, Cannabis sativa
tgcaataaaattatgcaattttccagttccgatggacatccctacttcttgatactcgagtataattttcatatagcaccacaactacaaataggttgtggtctatattcacgaatctaattccatgaggacttcaatcgagtaaagtatgtagtcacactgtttgatccttgtgtaagattctgcataatcttcttagcttcaaagattcttggagcattcttttcattgaacctttcatataattcaagctaaatttctgtagcattatcatgatacataatactatctgcgatttctctagaaatcgcatgaagaatccaagatatcacagtaattttgtatctacaagacaactaataattttagcttcaataagtgaatttgtactaaactatatccttatttaaacataattaataaaagtaaaatatataattataatccacaaattttgacgagatgcatgtgatatgtactccacacataatatatataggaacatgattttgtcctgtgatgtacggcagccgttagatgggagagttatttgatctgagggctggggttgatcta

SEQ ID NO: 154177 - DNA, 529 bp, Cannabis sativa
  modified_base (471)..(472): a, c, t, g, unknown or other
tgattctgagttcatcgagaagacatttcaaccacattccttcacaaattccatgtgctaaggcacgaaattatgcttttgcactactgcgagctacaatttattgcttcttgctacgccaagatacgagatttccccaaacgtaagagcagtacctagaagttaatctttggtcagtgagaggaccaacccaatctgtatctgtgtatattttaagatctttgttgagagttttcctgaacattgacccttttcttggtgttcccttgaggttcctaacaatccggtagacaacatccatgtgttcctaaaggggattattgagaagttggctaacaacactcgcagcgaagcttatgtcaggccgagtgtgagttaggtatattaactttcccacaagacgttgataccttcctcgatcaaattttgttctgtctgtctatacttcaagtttggtattagggtccatcnnagtttcacttggcttgcatcccatcatcccagtttcctgtaagagatcaaggacata

SEQ ID NO: 154178 - DNA, 548 bp, Cannabis sativa
tcaccagagggctgtaagtttcactatgctttgagattttgatttgacgcatcaaacaacgaggctgaatatgaagccttgattgttggcttaaagttacccgaggtattgaaagtcaaaaatctcatctgccatagtgactcacagctgattgtaaactaggttttcggggaataccatgccaagggcctgagaagggctaagtatttagagaaggttcagaagaacttggaaagattcaattactttaaaattgagcaaattccaagagaacaaaactctaatgttgatgcattagcaaaactggcctcgtagaacgatttggatgaattaaacttagttctagtggagatgctaggcgagccaagtatatgtgaaagggaagatgtggagatgatagacagttcacctacatggatgacccctatcatcaactatctactcgacttgaaacttccaactgacaaaaacgagacccgaaaactcttgtactcagtgcctcgatacacaataattgaaggcaaactatacagaagagattattcgat

SEQ ID NO: 154179 - DNA, 518 bp, Cannabis sativa
acaattatgacattcttaacaatatctgtaaattatagtttatatacacaattatgacattcttaacaattagttttataaaacatatcgtttataacataatttacaattagtcactaaatttttaaacaaaaaccataaaaatttaaaataaaactaatatttacgtggcttgtcacgtaactctcatctagtatatatatatatgacgagttaatattattttaaatcttgtacattttataatatttacactcattatttcgtttttttagaatcacactcattattttgttaatattctatattttttaaaatagtactaagtagtatcttgagctcaatttagctcaattttagacgatttttttttttaatataatcaatttaaaaataatttctaacacaaatagatacagaaaatataagttgtaactagtatatatatatttttgaaacaattagtattgttgctcctaaattcgcccaatatacgtggaccagtcaggaagggacac

SEQ ID NO: 154180 - DNA, 502 bp, Cannabis sativa
  modified_base (434)..(436): a, c, t, g, unknown or other
gtaaattctagatctgcttgttggaagcttggttatataggcccatggtcctcatactagttgcgacagtactgcttgtaagactcagctaattgatttttattactcaattataattctaaattagactatgtcttatttatgaagtttcactaagctagggcttaattgtgaagaaaataggttatagggtttatctgttaattaagagactttataaaagtctcattaataaatatattaaatgataattttaattgataattattttaattattaaataattagttttggaattgaagtggttgaattggaatatatggcatttgtgaaagaataggataaatagatgaaaaatggcaaaattgcaagtggtgggcccacatcctatggtcgacaactactgctccttttttaccatttatttatcaatnnnttaatgccaaataattcaaaccgtaacctagaaagattccgataaatagataatgatggactcaaa

SEQ ID NO: 154181 - DNA, 1083 bp, Cannabis sativa
attcatacaaactactatgtttagaaaaattttaatatttatatggtcaaataaattttttttgaatatttttacaattttttttcaattatttacgttatactaaaaaaaaaaaaaaaaaaaaaaattaacaaaacaacaagaatattataactagaaaaaatcatggaaatatataaatattttttttttatttaagcgtttatatattacaaggagacactactcttttatggtcacttgagctaagctcaagtagttaaatcaaataattagtattttttttttaaaaaaaaataaattgtacaaaaaatatttaaaattttatacaactatatttctttcgtaatcttttgacttttttttagttaaatataaaataatcattttatgttgtatgcgcgaatgtattatcactacaaaaaattgctacaacataatatttttgtgactaaatgtgacttttagtcacaataaaatattatttgtgactaaaatatagtatttagttatcaattgtcactaatttagttttagttacaacaagtattgtgactaaaaatagtagtagtcacaacaaattgtaattattgtgattaatacttttagccacagaccttctagtcacaacataggaatcataatttatataattagtcacaattttttcactattaattataaattttattgtgactaaaaagtaagattttttgtagtgtatatataggtaaaaaaattagtgagagtgttagaggttgtttggttttacagtttaaaaactgttttctgttttttaaaactgaaaaacagtttttaaaaattaataggggtcgtttggcaaaattttttaaaataattttttaaaaattgagttttaaaaaactaaaaaacagaaaacatcaaaatgttgttttcaattttcaaaaacaattttttttttgtctaacatattatattttgtattttgctcacatactcggatcctagacccaaaaccatacccaaccttggactcagatgggttaatgtcatggtatggtgttaaaatattgattttttttttcctaagaaaaaaaatct

SEQ ID NO: 154182 - DNA, 519 bp, Cannabis sativa
  modified_base (377)..(377): a, c, t, g, unknown or other
tttttaataagattatattattttattttattttttgttgtatggtatataattattgttgtctatagtatatcatttatttaagatgatatatagtttttcttttattatacataaattttttattatgcatattttaatattggtatatataattttgttaacataatatatattttttgagtattaatttagtattattataattcttttgtggtatataattttattactacaatatataaatttttagtgacatgatatatcaaatattgtagtatatatttaatgatctaatatattttttttttgttacaatataataatatgcaatactaaaaaaaaattatagcctaatttaattattatatatattnttttaaaaaataatatgtagtaaatgtatttttattagctaatttattatattttgctattttcataatttttttaaaaaggggacatttactaacttaggtggcgtttggttgagaggaatgaaaatataggaatatgaat

SEQ ID NO: 154183 - DNA, 550 bp, Cannabis sativa
  modified_base (487)..(501): a, c, t, g, unknown or other
attgagtacttgacttgctatgagtgggcacggtactctatcactaaaggctaaaattgatgaagaacaataataatgaattaaaaatcactatacaaggaggctctcaattttctagttgtctgacaacgaataaaaactaggttttgagttggatgagaatgaaagcatcttatttcctttatagtatttcaactagggtttaggattttaaaatatattgcttaaaaaagataaaataaatggccaaaaaattgctttagtggttggccagttagtgggcctccctagttataattttgccactttatttcataattcatcttttcttttaataataccatattttcttaatcctattaatgtcaaaattatttatttaaaaattataattaatcatcaaataaaagtgacatttaaattatttattatttagactttacaaattctctcaattaataaataaaccccaaaacctcttttcttnnnnnnnnnnnnnnngcttagtgaaaattcataaaaaaaaaagacataatctaattttagaatt

SEQ ID NO: 154184 - DNA, 686 bp, Cannabis sativa
cgggtcgtgatcgttgatttctcagtcacttctgtcgaggtcattgactttgaataagaagcaggatgtatgtgtatagagtatgtggccttcgtgaggccttttttctgttcgattttgtggacgaaagcattgaagaccttaagcttttgttgaatcgttgtgtgattgctccattgtatatgaaaacagaaaaagggaggagattcattgcttttgcttttgggctaagtaggcagatgttgaatgatacggtctcaaaattataattgttttatgaaaaaggttataaatataaaagggaatttttaaaatatatacataaaatacaaaataattacaaaaataacttaacaaatctaaattacaataatatcttctgaggtcattaaaaataataaaactaatcctgattttttttttaatttttctgtattttaaaagtaaccttttggttacttatgatgttgataataaaccaataggtaactttttcatataaagtatcacttctctatattatatcatttgtgatacattttgattacctctaaaatttatatgtatgtactttaataaattatttaggttatattaatcatttaagtaacttttaagtttatttttaaaaataataaattgtcatccagtaaactactattttagtaaactttattttaaaaaaa

SEQ ID NO: 154185 - DNA, 507 bp, Cannabis sativa
ctgggtttcataagaactagaagaagaaaaatccaccaagaacattctctgtaataaatactatcataaatatacagactcgtggactaaggctcattaacgccccaaccgcgtaaaaacctttctcttaattccttaaagctctcttaattattattattatattggttgccgaaaacctcggtcaacaataaaatatttaataatgaaacaaatagatatatatgttactaaaataataacaataacaataagaatataatattataatttaaacctataacatggtataattaaaaatattggcgagatggttaaattttaggatgaatattattttgaatcatgtgttttgtaaaagttattcattggaccttttattttgttaaatgatcaaatagatactatattttccaaaatagtaaaaatatgacctttagtttaattttcaacaattttatttttaggctttgattagcaattatatggcaatttaaattgaaaata

SEQ ID NO: 154186 - DNA, 879 bp, Cannabis sativa
  modified_base (308)..(310): a, c, t, g, unknown or other
ttatgttccaattaatatattactgttgtaatggaaattgataccaataaaagttcttgtacacataatcacaataccttatttgagtgggtcctaagcccatcttcatttggatgacacttgtgatagaactttaaaatacagctgagaaagtaaatataaccattcacatggatagaaataacttgtcagttttttgagaataagatagtagaattcttgcatagtctattcaaatgacttaggcaaaaaattcctaatcctcatgaaatgttttatggtatctgtaatgattacttaatcttaannnagtattttacattaatgttaatactagattgctatgttgttgacttagtcacaacaagatatccctcaaaaataattgtaagaggttaaatgtaacaccctaactagcataggtgtattaatttgattttaaacaaactgtgcagctcgttgctaatcaaataggttattgaaaatcgtgaataattaaaattttcttatttgattaaaaaattaaagtattacatacaaaatatttcgggatcccgtttacaaaatactttataaaagtttgctatacacatatacaaaagtttgtcacatagcgacgatgcagcaaaagcctcgaagtcccaaagatcgtacgctctagggctaaccgccctgaaatgtacaatcttcatctgctcgtcctcacgattcctcgccttgcccttacctacacacagaaataacactgtgagtcgacagaccccgtaagaaaagcataattgaacatacaactaacctgagttataacctggcccccatacacccgataataaccctaatccccgtgtcccacacggtactgattctagaacgttcata

SEQ ID NO: 154187 - DNA, 806 bp, Cannabis sativa
  modified_base (91)..(92): a, c, t, g, unknown or other
ctgcagtatgaaacttataaaaaatacagtaaaaaagtaaaaaaataccgtctggcagtatttttataaaaaaatgacaaaagttagtatnncatgtaaatttcccaaaataaaatcattttttgcaccaaaaaaaaaagaaatataaaaatccttaaaatttataatttcctcaaataacaaacatggtatagatttagctagttgagtaggtttgacaaaattgactacatgtccaaaattttaaccaaaagggtaaaaaatatggccaagcttattacattgacaaacatataaaccaactaattggtaacgaaagtgactacatagagaaacagagagtgagtgcaatggacattaaattgaagaagacagcagccagaacagagggcggcggcgacgacgaagaaccaggcgtagacgggacattagcattagatggtgaaggtgggtgggagggttcttgggaagataggacttggatggctaacttctggccagattggcagtggtcgccgaaggtgcatatgtagtaatggtgtccttgggtgagagaaaagttggttgggcttgttgtgaaggtgttgcctatggcattggatgcactacaaccctcgtatgatgcttttggtacttcaaccacgtcgtgtctgccattcatgaacttgaatgctcaaacaataatggtacacaacattaacactataacatatttacatgggtaaatactattttggaccctgtatttttcaaaagttacagattggaccttgtgttttgtcaaatgacaaaatggaccctgtatt

SEQ ID NO: 154188 - DNA, 699 bp, Cannabis sativa
ggatgttattgttgggttttagaggtgttgtaattggtcgggacttgtataatgtctaaactacccttgggtgactttgaatgtttgatttatgttgagggcaaaaaggtgttttgggtaagactttatttgtcttatttggaattgtgtatagctgactatgagggtacaactttttttttaaaaaaaaagaaagaaaagaaattcattttgctttgcttaaatgagaaggaatctagaaaaccttaagagaaagcatctctctcttcctctctttgtcgtgcaccccaaagaaccagcaagaaggaatttggttgctggaattttagtgttgtaaaacctgaaaaagaagattcaatttaaggtaatgattcctagcttttctattttgattttagtatgcataagttaggttttaagtttgattttgggaattttggtgctgtgtgtataattgtcactctaattgtagttctggagcttgttggtaatagttttaattgttttgagttatctttgtggattgtttcaaggttttggcaaggattgagtttgaaaactcaaacctagctctctaatggtggattgagattttatttgttttgatgagttctgttggttgggattggtttagtgtagtgtatgcaggtattctggaagttattgtaaagtttgggattgaattgtgatgtggggatc

SEQ ID NO: 154189 - DNA, 609 bp, Cannabis sativa
ttttattgataacaaatcagataagattgaaatgggttttatttaaggcataaaatcccaacacgaacaggtaaactgggctccctaatctgaatcgtacgttcgataggcctgtgcccggccgaaagtttcttcttccttttgagcagagtctcctgctcttcctcaacctcatcttcctgctgaaagtgctcctaagcatactgtttggctcacgcacctcccttcaacttagcctcacgcttcagttgaatgggttcattctcctaatgagctccctcagcccgaccagcactggatttcctcttcttctccttcacaagctgggaaatgaaatcctttggataaagcccgtactccacaaagttggccttcgaggtcaacaaagtgatattccgggcgtcatccagcaactgagcgatcctttgagctctatccctaagagctagcgtgaagggtgggcgataatatatgggatctgctagaatcgagtataggtacccatgccttccaccatgtaatactcgtcaacaaaatttccaattttgctcacaggcttgtctccggtgcccatcaaccacttgaagtctggctgagaaaaatagaagt

SEQ ID NO: 154190 - DNA, 508 bp, Cannabis sativa
ttaatacaacagaggcagtgtaaccatcttaaatcgaattagatgatagaacactttggaatcaagaaaaaaatatatcctctactttgctactttatttttagatttagtcatattcttagaaaagtagtatttgttgaaaaacgaacactttcttatcttaatgaccataggattgtccacctctaatcagttagaatagctatcaaacatgcaaaccttagttaatagttctagcttttctaaagttcacaatcaagacatccatgaatctagtaatggtttacaataagtacataacgattccatcattctgaaaaattttcctatcactagggtattccctagaaggacttaggcagctgttaccaactagtcatacatctttcactttcatcaatatgtaatccaaattttcaggaaggtaagtttgatacaattcaaaatttaacttaatgatttttgagctgcatatccaccgaatatttctccacccctatcagtttgc

SEQ ID NO: 154191 - DNA, 550 bp, Cannabis sativa
ttttaaaaattgtacaaataggaccctaaactgattttttatcaaaataaaacttagtaataatccaatctaaagatgttataacaacactggttacattttcggtatcttttcgtgttagaaattatcttaaagttggttttattaaaaagtaaaattattaaaaattgagctcagtatcctattttcattattttgaaaagtataaggtctatttttttatttaacaaaacagagagtctaattagtaacttttacaaaatacaaagtccaaaatgatatttatctttttatttaatatgttgagaggttttattatttgtgtacgttaatattagtgaagaacttttttttctgttttttttttaaaaaaaattacttttataacttttttatttgaaatgaattttacttttataactttaaaaagaacattttaatatttgagaaatatatttttttcaccttaaaagagcaatattaaataaataatcaattagtttttaatatatttaattaactaaattgtaactaaacttactggtaaata

SEQ ID NO: 154192 - DNA, 610 bp, Cannabis sativa
agattcatcaagaatctcctgtctgatttctttgttaaccggtacacaaattctgttcttgtatcgcaacaacccatcagataaacatgaaaagtcctttgccaatccggcctcaaaattctccttatgcccttgtaactcaagatcactttgttgagctacactaattctttctaatagatcagactgcaaggtaatgttggcaagctttccaattataaattcaattcccgccctagcaatatcctcagcctgctctgctgaaattttctttagttcacaaacttgccctggtccttttcgacttagagcatccgctaccacatttgctttaccagggtggtagagaatctcacaattgtaatctttgaccagttccaaccatcgtcgttgcctcatatttaaatccttctcagttaaaaagtacttgaggcttttgtgatccgtataaatctcacacttctcaccatacagatagttacgccaaacttttaatgcaaagattactgttgcatattcaatatcatgtgtaggataccgttgttcatattctttcaattgcctggatgcttaagcaatcactttccctgactgcataagaacacaacct

SEQ ID NO: 154193 - DNA, 695 bp, Cannabis sativa
ctgattgattagagtttagaactacagattgtgaattatatacacccctaaattacgattcttaaaataggacaaagtccattttacaaaaaaaaaaggacaaagtgatatatgtataatatttgaaaaatactttagattttaagaaatgctaaatggcactacttgtcaaatagtctctcatcgttaatacgtggaaatataatagaatatataagaggaatgaactactacttccatcgccaattgattttgagatgaaacctcattcatcttatcccaaattataacatggtaacagagtaaaaataaacaaaaaagaaatcttctaatgactatccaaccccaacaaaaagaaaccgatcgaagtagagccaaaaagaagagccacccactaaaaaaaaatcaatccaaaaaaaaaaattgatccaaagagccaaagtcaagaaagtcacctgtaattcgggaatagtgtgccaaaaaaataaaaagagccccaaaaaaataccgattcaaaaagtagaaaaagagtcacttgtgatcaggaataatgagccataaaaagagccgcttatgaacgagttgtccaagatggtgagcaaatgaaatagctaccatcttgagaggcgatgctagatagtcccacatcgctaatgtgtggaaagataatagaatatataagaggaatgagctac

SEQ ID NO: 154194 - DNA, 1059 bp, Cannabis sativa
  modified_base (449)..(452): a, c, t, g, unknown or other
  modified_base (515)..(515): a, c, t, g, unknown or other
  modified_base (587)..(587): a, c, t, g, unknown or other
ctatggtggacaatgcaccgccaacaaaaaaaattaataactcaacaacaaacaatgcaaggcataatgttagaagatgtgttgggatttcatgccctaaataaaactcattttaatataatcttatttgttatcaataaaagagtagaagtcatttaagttggcatgtatttttatgtttatggttttaatatacaattctgttaaattcaaaacagtgatgtcatcactgtagaaagtaattgtgatatatgcttcaaagattttagtcccatgatttatcagtacactagatttatactgacgtgataatcaacgataaagtttacttacacttgtataagtggaatgtcctttccagggcattagtaaagtaggcaagcatcagatgtatggagtatacatcagactggaccgatattgacaatgaaaaagatatcataaacttnnnnttatatctttctaagtcaatatcgtttagttgatcttaggtcaatagatcttaatcttgaganggttaggttctagcttaactgtattatttgtattctttgatttgttcgttaaagttaaccaaatggatcttnccagtacttacatcttgggaacatggtagtacaattaagtgggagcactaatcataaatatagaatctatagcttctataattatatagaagtgaaaagatgatttcctttgagcttggcttaatagagataaatgtaagagtttttatttcaataattatattagcttattgaaatatcatttataggaagctaagtgttttaagaataaaatacattgagggatagaacggtaaatttgtccctactagatgtagatcatttatagagaatctttgattatttagattgaaacaatagataatgcatagcttatctgtatttggaacatatacagcgttatatgtaatctagagtacaattccgaatctatagtggaattaggagtaattaataagttaggaaatttacttggtagattttagatcttcttattgggagcttagttatataggcccatggtcctcacatt

SEQ ID NO: 154195 - DNA, 605 bp, Cannabis sativa
taaaattagaaaatatggcattagtgaaagaaaagataaattatgaataaaatgctaaaattgtaactattgacgtccactattggaagatcaaggcgttgattcttcaagcaagttctagattagatgttcgctgtttatacaaaaagaatcaaggataccttgataggcatcaagaggtaatggaatttctttcaatagattagatttaatctatattcattatgttgagatccttgagcttatggttcatattagataaaaaattattttattaaaattccttttctgcttttataactctagtatggaccataaaaactaataattggtaccagagcaatcttcataatgatatattaaatacggtgttgggtgattatacatttatatatatatgttgatatattgtgaatagatcgaattaagtttcttatgtatgaatgtaaatcgttaattatatggtaaatttgggttaagaattttacagttttattagaaaaattatacaaccatgtttgtagtatatgttttgatgtaatttttgttggatatattttatcaggatctagatttactaacaattatgtttcattaacatccta

SEQ ID NO: 154196 - DNA, 672 bp, Cannabis sativa
tagagctcttacaaagatatctctgagtatatactcttagataagtttttcgactccttgcctagtgaaaatggatcactatttataggtctataagctttgagggaaaggtttcccttctacttacgatgtctataattggtaagattacatatgaaatacagagaacactgattatgggatttggacagcttgccatatctctgtgatatgatcccaaaattatagggatttcttctgtgattcatgatgcaagtattaattgaagttgctaagtgttggcacgctgttcggaccgtccactgcccggtcaggaagacttcatctgtgcagatttatgcagtattctatttggcatatctctttccaatagatatgcgaagtcacttccacctgtcaccagattgtaatgccatgtcaaagtactaaaattgggataacaactttcttatcttaatgaccatagaatggtccacctctaatcagtttttaatagctatcaagcttgcaaactttatttaacagttctagcttttcttaagttcaagatcaggagatccaagaatctagactcagcatttccctagagggactcagacaactactagtaactaatcatagacctttcattttaatcattatgcaatcggaatttcttgggaggtaagtttg

SEQ ID NO: 154197 - DNA, 637 bp, Cannabis sativa
aagtacgtacaatcaatcaaaggggttttggtatgtatatctcaatgaagaatatattttttctttttcatttttacaatattatttctgtaattaattaattaattaataggcaatattgcgtacccatgatttatctattacattccccaaagtattagttacgattaatattcataataaattattatataatattaaaacaagaagaacaaaaccaattacagcatgaatatatatagttgttatgacttagatataaatatattgattttagaatattatatattatatatatagataaaatgtttattaaatatatgcatatggaaatattagtatcttaatttctatcaaaatgcatgtattcatcattaatagctacaaaattttgtgaaaggagttcttgttcaaatcaaggtttttttttttactaattataaaccggtggtcaaaattctttcttaatttctctaaactatttttgaatatatatatatatattcttacactaatatttttgaacatatagctacaagtcatgtttcttcatcgaattaattagggtgtgtttgaaagtaactgtgtaattactaagtagggtaattactagggtggtaattacacagtttagtaa

SEQ ID NO: 154198 - DNA, 744 bp, Cannabis sativa
acggtcaagaggaatcaaatgcacgtctattctttggatgtcctttttcaaaggcttgtttggttgaaatcaagaattggatgctttggcatactaccaccgattcagcaaccaaattggtgagatggattgcacggtccaaggttagcaaatttaggaagaaagtaatggcagcggcattggcaagtttgatataccatgtgtggaaaagtagaaataacaaggtatggaatgataaatgtgatgatgtagagaatgttgtaaatagagttaaggaaactacaaaagttagaataattgttgtatggccaaaaaaagttagtaaaattgatacaacatggtttcatacattgtaaaaagctttgagattttgaggtcttctattggaggatgctatttggttgtaaattggtatagtgaatgaatatacttgctgaattcccaaaaaaaaaatatcaaaaaaaaaaattaccaatttttttttatgtattttaaatttgattatattccattcttatttatattctcattatcattcctatatgttttcattccttctaactaaactctacttacatacttatattttcattagtcttaattaattttgaaaggctactctttgtttgcttctaattaaatttgggtaaatattattttggactctgtgttttgtaaaagttacagattggactatttattttgttaaatgataaaatagaccatatatttttcaaaatagta

SEQ ID NO: 154199 - DNA, 722 bp, Cannabis sativa
tcttgtgcattgataggtgaatattttatatgaacgagtatgaagaatttataaatcttgatctattttctattaatcttgaaattgagcgcatattcagagaaagaagaagaggacaacatacgacacaaggggatatcgtaatgatggattaccaaggagatggacagtgaactcaaggggaaatggcccctaataatggtcaaaatgcagtgatcatggctgatgataaagatcaagtcatccgacagtacgtagcacctcttttcagggagctcaatccaggcattgtaaggctagaaattcaagctccacagtttgaattgaggccagttatgttccaaatgctttaaactgttggacattttagtggctcacccaccgaagatcctcaccttcatctttgtctatttatggaggtgattgattccatcaaactgcccggagttacggaggatgccttgaggttaaagttgttcccctattctttgagagatcaagctcgagcttggtggaactcgttgccttctacgtcagttacaacttggcaaggagcggtttttgatgaagtattttcctcccactaagaatgcaaagctccaaaaggaaataagtcctttcaacaatctaaagatgagtttttgtatgaggcatgggagaggttcaaggaattgttgcggaaatgtcctcatcatggcattcctcattgcatccaaatggaa

SEQ ID NO: 154200 - DNA, 734 bp, Cannabis sativa
ataatatagtagaaaaatctacaatggaaaataaaaggaattattacatgaagcaattagagtggcgtactcgtgtataagagtcattatttcgtaagtgtaagagcctaatggaggtttgaagcaccaaaaatgtccccaacacctcaaaacaatcccaaacttcctaaaaccttccagaatacctgtagcaaccggtcgaccggttggtccccaagaaaccccatcaaactggaattctagttggggaaccggtctaccggttgggataattttggaaccctagtttttccccttttagggaattgtcatgttattcatcgatagggataattctagttttaattttaaatccccgggaagtgtcttagcgtgtctcatcggaattttgaatgttatgatttaggaccctgtaaagcgtcgagttgcagttccactcaaactgaccgacacacttgagcacggaaacgaggtaagatagcataaagtatacatatgtgaatgtatgtatgttagcactgttaaatatgtagttataagggtgttagtatagtgtagagttttagggtgattatagtgttaccaacacgagtaccaggggtatagagtgcatgtggtacaacactcagttactcccggaagtacaattatggccttaccaacacgagtacggagtcggtactctagtgcatatggtacagtggccgtacttccgttgagaacgttcttaacca

SEQ ID NO: 154201 - DNA, 525 bp, Cannabis sativa
  modified_base (387)..(403): a, c, t, g, unknown or other
tgaagtctacacgtaacttcggaattcccgtacagactcgggggcaaatgttatcccaatttttgcactctgatgtggcatcacatgatggtgacacgtggaatcgactctaagtatctgctcgtaagatatagttcaaacaggatacctcatatgcatgctcgaggcaaagcaatcagcaatccgcacagaattaccaacacttagcgaattcagcttttgcatcgtgagtcatcaaggaaatccctataacttggggatcagattgcagagatatggaaagctgtcataatcccacaatcggtgtattctgtatttattatgcaatctttctgcttatatccattataacgagaagggaaatactttctctccaagctcatagcnnnnnnnnnnnnnnnnnatattcactgggcaaagggtcgaaggatgttacatgagagatattttctaagaattcatattcagagatatttttgtaagagctataagaaaaggaatctttctccttgttcttgagttaat

SEQ ID NO: 154202 - DNA, 849 bp, Cannabis sativa
tgccttcccattaagagcatcgatcactagcctcgagtcactctccactataatatactaatgctgaagatccatcgcaacagacatcgccaagcagcaggccgcaacttctccacaaagagcatcagaataatccaaccgggacgtgtgaatactcatcacccttcgcagatggttcctagcaaccgcagctatacacatactctctaaacccacacgaacatcacaattaaatttgatccactccagaggtggtggaatccagctgtccctcctcaacggcgaaggacaaggcaaaagagtagtgtgtagctctgcaaaagaagaacaaataatgtcaatacattttaaaacatgaggagggctgttgttatgaaccgcttcatttcgcattcgccagatattgtcaacaacaatggatgcatagagaaagacatcctcaaccctaacacctttgttattaaggctccagataaatttcacccaatcccaaacacgaataccgttgtcactcactggaaaaattccccaaggtgatgagcgccacaagtgcatcgccacatcacaagttagaaatagatgttccacggtttcctctccccttccacaaaaaggacaattagtatcttcaattggaaatctcttacagatgattgctctaaccggcagggcattggagaggatgcaccaccaaagaaccttttggcgctccataatattactattccaaagcgcaggcgcaacatcacagtggggcgctctctccaaagcttgggaaagataagccgatttgcaagagaaacgcccattactttccaaagtccacaaccagctatccttgccactacc

SEQ ID NO: 154203 - DNA, 601 bp, Cannabis sativa
  modified_base (415)..(415): a, c, t, g, unknown or other
aactcacaaagttggtcttttacttcacgtgctatagctctagctagctagctagtgttataattacatctattgatcatttttaatattagtattttttttttttttaagaatgctaaaaatttacccatcatttaataatataatattttattttattttttttctatattattttttgcactcttacttctaaaaatactctaatgtataatactctttaaaaatattataattatgacctcacacattattatttaatatatatttcaatttctaggtataataattttttagttttaatttttctattcaaaaaaataaatagcatcaatgccacaacataacatctatgtaaatttctagattgacatccttatctcttcaataatatagcatctcaatattttaccanataatatgtccacctcaccaagcatcctttaagattttaccattggagatgctctaaagtagtttttcatcatatatccgattcccgatccttggcattaattaaaggctaattaggatttttacccctgaactttgacatgtaccaaatcatgtcccttgaaattttaagatcgttaaaaatatc

SEQ ID NO: 154204 - DNA, 860 bp, Cannabis sativa
ttgtataccttacttaggaagatctgtgagaaatctccatttagagttaaccaagaaaccctatgtggaggaggatcctaagtatgtcattaaggacattcgaaaaatttattccacccttaatgaggttttctgagatgtactcctgaaaagcatgatttcactgattctgactatgccgtcactggtgctaactatgtcgatgctgaatcggacattggatcagaaaacgaccattctttagctgtgcatttcaaatgagtgaaacgtgcaaagcatgatgattctagtcatattgaagatgtatccttcccactttctcaaagttcagagatgccgccatctgatacttgctttggagcttctagctctagggatgaagaacttatctattttgacgggtctgatgattatgttaacaaaggatttgacaatgaggcattgcctacaaagccagccattctactagaaccgattgtctcatcaaagatagatgttccatcatcagttgctcccttagatttgcttattcctcgatcggactcagtgttgacagtgtcagcttcaactatcaccaatttagacttgaatgagcataccaagaggtttgtgattgaatgcatgaaagacattcttcctttgttatcttctcctttgacaacaacagacatctcaaaacatcatgcggacgtgggtgtgcaacttgacgtgttgagttttctttgtgggcattacaaatgtcgcttagcagaggttgcatggttcactgactatatcaatgattttctcaaaactcaagaaaagtctctcgcttctgttcaagttgttgagaatgcccttagtcttgatgaatctcttat

SEQ ID NO: 154205 - DNA, 503 bp, Cannabis sativa
taaaaatgaaaaaatctcaaaaaatatatgttcaaatgactaagcaagggagttcatagataggtttattagcatagtttaatgtttaatatgcaataaaaggtgtgtttgggagttagtaatgtttatttatttatttgaaaaagaaattcaaattaaatcaagagtcctcatcatcattaatacaagtgtaaattacattataaaataaccaaaaaaaaataatacacaaatacataaaattaacaaagtagtaacaaaaatatggtacggaattttaaacatttaatgatttttatgattttacttataaaaaatacgatcttttaatgtattttatgttgtatttttattaatttattgttattttttgttacgtgtatgttattttttattattagtttgatgttgtttggatgttattttctagttatttttatataatttcttgttattttcgtattatttttatagaataatgtaaaaacataaaaaaaaaaaaa

SEQ ID NO: 154206 - DNA, 746 bp, Cannabis sativa
ccctgggagttgccttcttagctcccaccctaagcctcagcaactggctcagtcccctcaagtggcgtgatcgctcacccatcgcctgtgtcatgacaagcatgtctgggattggttgaggtcgacattgtactactggggacattggtcggtgctggttgagtttcacgaatctcaaccatttttgcctacaaaatttgaataaattattagagctgatgaataaaaattaagtataggacaagtttattaaagatataaaattacttacatctaattattgtgtgtgtttattgcgccatttgttgttcctttagtagaactcttgaaaagtatccacaatactgaggagttctctcgtgtcaagatcagcgtatttttatacaataaaaaaaaatatagatatattattcaaaaaaatattaatttttatacaattctgttaagaacatcaaaccccactgacaatgtggccaactatggtcttagacccccatctaccttgaatcttcacttggactcggtttttcacattttgtttaactcttgcctgtaatttaaagtaaatatattgttagaaaaatgagcaaaaaagcatatgttaatggtgttggattaaaaattatatgttggcacatatgtataatgtatatgctattataaagtgtgacacaaaattaagtgaccaattatgttatgggtatcaaaagggtattaaattgttatggaaataatgtgtagatacc

SEQ ID NO: 154207 - DNA, 508 bp, Cannabis sativa
tacctacacatgaaagtagaactttgagtcaacagactcagtaagaaaagcatataacaaataatataatatcgacttgtatctacgcgcccatacacctatttatttaacaaatgagcaggaacgttctttactaaggtacaaccattgtaccacatacactacgtatcaatattgtattagtgttggtagggtttgttttgtaccctgagtaccactaagtgatataccacacacaccctgtactttctcgtacttgtgctggtgtaacaccgtaatgtactctttaattattatacactataccgatgcactctgtaccacttccgtacaagtgttggtaatgtactaagcataacaagcatgcatatatatgacacacatacatacattcgcgtatatatataacatgttctacgctattcttacctcgtttcaaaattcaagtgtttggctgacctgaacagaaaacctcgtgctggatggatgccctaatcacataatataa

SEQ ID NO: 154208 - DNA, 535 bp, Cannabis sativa
aatttatcaccaaaaagtggtaaatttctaaatccatacaaaatggcacaaaattccaaatgagctcactaaaattaaagaggtcattcacctcaccgaattttaaaggggtcttaacctcacaaaaatctcaaaagtggtaattttacctaaaaaattaaaaagtgcactaaaattcaaagccatagcaaattaaatggcattccaaaaaaaaaaagaggtcattcacctcataaaaaattaattaaaactcggaactacgtttgacttgattcctataaaaggatacgtaggcaacttagttgctaagactaagtgcagtcaccgatactgcaaaaatggtataaaacacaaactctcaaaattccataaaaggtcatacacctaggaatttccctacatttttaaatggcaaatgattcctgaaagtggtcatctactggaatccttatataaaaattctaaattaccgtattctgaactacaagtggcttgatccttcacaaagaaggtatgtaggcagctcggttaatta

SEQ ID NO: 154209 - DNA, 505 bp, Cannabis sativa
aagaatcttctgtagatgaaaaagattattgggtaaaagtttgagagttgaatcactttaagagaactcatcagagaatcgatctgactgtattgtacctattcttactcaatcaataaagaggatttggtggtgttccaaatcttgagtagagccatagattatattgatttatcggacttgaaccagtatatatcttggtgttgattttatcgttttattgctttaattatttctggttgttcatactttgttattccctattttttcttcaattactgcttgtgtttgttaatcttgtcattaataatcgtttaaaccgtttaaagtttaattagtttaattctacatcatttgttatagtttttccacaacaatacaatttttttccgctgatgttatataatagtggacatataaaagattaacaatgacaaataattaatttggcaaaatcttcgacaagaaggaatacacaactttttaaatatataaatatatatat

SEQ ID NO: 154210 - DNA, 927 bp, Cannabis sativa
aatttatatttagaaatttattataaattggtaattttaattaaataaatatatctattaaaataaatagattaaaataagtatcaaagaaaatacaactctttaggcgacgtatcgggcgtagatacaggcgtcagtgatacaaaaaatgcttagttatggcatagatcgaaactattgttgggtttcttcctggcgacgtatcaagcgtaggtacgggcgtgagtgatatatgagtaccgggcgtaggtatgggctcgtctaattagacaatgtaatatattggtgtcaggttgtggcacaagctcacctaattaggtgatgcaattatgtactgggtgtaggtacgggctagtctgattaggcgatgcgatatatgggtgccaggctacggcacgggctcacctgattaggtgatacaattatgtgatatgggtatagatttttggcacgggctcacctgattaggtaatgcagttatgagatatatgggtatcaggctatggtacggacttgcttgattaggcaatgcaatacaggattatcagattaaagcttcaacttgcctgattaggcaacgttatgtaatgaagatggttactttatgaggtaacacacatatatatttatataattaaatcaatctattataggtataattattttatattaccaaatatctatatactgatgtttattcatggcaaatgccagtagtgatttgaatttcatcttatgaacaatgcgtgatggtttgattctgattgtctataaatgacattatttgaataataaactatatgattattattgttattacttttcttgctgagtccttatgactcacgggtgttatgtggtgcaggtaaaggcaaaaaaaagctagatcaaccttgagattatagtcttctctagcaatgtacatat

SEQ ID NO: 154211 - DNA, 635 bp, Cannabis sativa
attattttattatatataattgtaagacctatatatatataataaaattatatattttttttaatgaaaaatagtgtatttatatctttttatatacttttatatattcttatatacaattatatatatatttatgtctaatacaatatttttaaaaatttagagggggcacagctcctgttggggtgtatgtggctccgcctctgataaggagtacaacttagtagtgtcaaaagtttagagaataaaatgctaaataaatacactattcatagtcatataaaaatactcctgggttctgcttatccaattctaattccgtctcgaccgtttgtctagtttttcataatgacagagagttatgaggtcagaagagtaaaattcacaactttttaggtttacttttttgacaaagtaacttactcgaaactattcttccattttcgtaaaatagcaactaggggtgttcacggattagtttcatccagattgtcatattttttgaaccaaattagtatagcgatttttcgaaaattagaaaccaaaccagaccaataaatttctcaaatcaaaccaagccaaaccattaaaaacagtttggtttggttcgcaactacagtttaagtggaatttat

SEQ ID NO: 154212 - DNA, 505 bp, Cannabis sativa
ttagctagcttaatctatgttttggttgagtacatacattttcatcaattagatatgttgaaacaattggttcgattgagtggttcttgtttataatatgctagaattcattcttaagttatattatgtgctggtgaactattataggcttatatagtttcaaaaatctatgtgttggagctcttacataagagcaattagtaatgactttgagataagctgaagtagtttcaagactcatatttgagaagggagaacttaaaaaaaataaataaataaattaataaaacactactaatataaaaagttgtgaacagggttgtgattaacatcttgtaattttatgaatggggttgtgatttttttgagtgggtggatactgagatatttcaccccaattgtggagttggatgttgtattcatggagattttagtgggcatgctttgatgagtgggtgttgttcttggcagccacaaagatctccatcttgcaactatggtgatc

SEQ ID NO: 154213 - DNA, 576 bp, Cannabis sativa
cttgtgatagaatgtaagttactccgaggttggtgggtatatgtggctattcgctgacacctgtcgtgtttctttgcgaaagcgaaagcgtcctgtcgcaaggttggccaataatacccttgtcgcatgatttttaacgcaagggagttaccccctgtatgatttccacaaattcccccatgtacctcacgtagtatgtagtcgcattcttcactgtcgatgcatttgagtagcggttgattaaaacttctgcgatacaaccttttatcgtacatgacatatcgggcggctcgttgtcgcagctttcttgcttctaccttgtcattgggtaaaacgtctttttccaggtatgcgactattggagtcatccaggtgacttcttgagcagtatctatttccatgatctcttcttgatttatagttgggtgggccaaaacatccaccggaagtacatcgagcaactcgacctctctagttgaggcaaaacgggccagtgcgtctgcgtgcaaattttgagcacgcggtactcgagacacgattacttttttgaaattctgcatcaactcgcatacaatg

SEQ ID NO: 154214 - DNA, 858 bp, Cannabis sativa
  modified_base (707)..(708): a, c, t, g, unknown or other
gggtcaagatcttcgtccttcctttcactttcttttgccaagatttccattaactggtgatcggttttcctatgctgcagctctatgcgatagcaatcgcgagccaacatcttatcaccccgcaccacccccacaccttctagtgtttggaacttcaaggatatgtgtttgatcaaactaactgcctctagtccgatcaatgctggacgacccaaaaatatgttgtaagtcgatggcaagtcgacaactaggaagtcttgcataacagtggcggataagggtgcctcgcccaaggttaatgcgagctcgattataccaagactggcaatgctgtctctagtgaagctgtaaagatttaccataaaaggcctcaatttagctttttcgagccccatcttcctcgacgtttccttataaaggatatttactgagctcccattgtctattaacacccactttatccttttattggcaagttgaatggtaatcaccaatggatcaaatgccggctgctcgttctttatttctttcacatatcttttttgggcgttattgctcttccctgcgataccaggatgtcctccccttaaccaagaagaggttgtaacccctggttacttgggttattgagcaaactgggctggttgtatcaatggccctgtctcttcacgtactgtttaaagtggcctcgagcgatgagactttcnntctcatctttcaattggcgacattcgtcgattgcgtacccaatatccttatggaatttacaatacctgttaggatctctttgttaagttttataccctaaataaaactccatttccatgtaatccaaattattcaatatcaataaagtaa

SEQ ID NO: 154215 - DNA, 573 bp, Cannabis sativa
  modified_base (284)..(290): a, c, t, g, unknown or other
taatataaaagtttaaattttgcgctattttaattagtaatcccgattaagggattagggtttcataagcattttgggtagcgtgcctaattatttagggcgttacatttatggtaagctctcctgctcgtggaactttgggcttcctttcttccatggccaggataacttcttcttgttcgtgctgctctgtgcgggcatacctctcccgagctttgcccgaatctccagtaatatgcgggcctccaataatgacttgcagatgcccatctaccggtggaggnnnnnnntcttggttattgtcattcctctgaccctgatcgatcttgacatacttctgcaagtgtgggttgtttttccttatcaggaattcaatttctcccttcaagttgttgcattcattagtgtcatggccatagtctccgtggaattgacaaaagtttgtcatgtccttcttactgacatcttttttcatgggcctgggcttcttatatggggccaacgactgagttgccatgtaaatactttctacgtcttcagtcaagataatgaacgcagtgtactttgcttgat

SEQ ID NO: 154216 - DNA, 1302 bp, Cannabis sativa
  modified_base (1246)..(1247): a, c, t, g, unknown or other
ctaagggggggaaatggcagggtgagagagagagggtgaagggtgcttcagttattgtttatcactcgattacttttataaaagttaatgtttataaatttataaatgaatcaagtatttttgttttaaaataatgagatttcatgctttggttattttaaataaattggttcattatttttattataaatgttttaaacagactagtaagtgtgggcgttataacttttaccccaaactttgacatgtaccttgaacttttaaggtcgttaaaaatgttccttttgttggatttaaggatttttgtctaattttagtaaaaaaaaattaacatggatgaaaattccagaggtatgatttgttagatattaaagtctggggagcatagttaattacataaacaatcaatgaaattaaacaaaagtccttaaatctaataatctcaataatttgggagaattattaaaggtgaaaaaatcttaacctttcaaaaatatcattcgatcttggatattcaatttttggcggtcagttaacattatggcacgtttactatacaatattcagaatcagaataaattaatagagaaatgtaacagaataaataaaaaataatcagaatcaatatttgtaatatgttgtttactaattttttttggaaatggaatgatagtgatttatcttgtttactttattaagaaacgtaatcggaatgcttaaattgactaaattgcccttttaagttaaagtatattagatgatagttattttgtaagacatattttaaaagacaaaattatcattatatatttaatattaaaaaaaataaaaataattaaaatccattacccttaatgacattccttacaaaattggtgagagaaattctaccctatttaatcaaactaggcaatatagccgctcttcgcgcggctaatttaatttttttagtattataataaataattacttaaaatataattctaatatatagtaaaattataaatatattatctattttcatattattattaataattttatttattaaaaactaaatgctcaattttcgtaattattatttgaaattatatattaagaagtttaaaatttattatatgtagtatttaaaattggtttgttaaaagaaattatttttataaaaataaataaataggatagtgtaaaaaaaattacggggttccccataatgcattatttcatatctcgatcattcaaaactatnnttattattgtatctcacttgttattttcatcaccgtatctcacccgttgtcatca

SEQ ID NO: 154217 - DNA, 712 bp, Cannabis sativa
actttacaatctcccccttcggcattttagatgaacaaaatattttttaacaaagaagtacctgcaaatcaaagttagtaagacaaaacaaaaccccccctgagaaacacaatcgagaactgaaataacaaaataacaagctaacttttaatccaaagtaatcacaagtaccaaacacaactccccctggaaaaagggtccagagttgagaaaacaagaagttaaaaacaaaatattactccccttttttgtttatctaagggccaaaaacaaaaaacatgaaaatatagaaatatgtgcaacaaaagcaagaaaaagaaagaaaacttatgccccatagagcttgatcaatgaagacagctgcttggacatctcttggtgaacctcctccatggcagcaagacgattgttcacctgttgaacctcatgcttgacctcctggacatctgcagtagcagaactcaaacttgcaccaacaacaactgcaacactagcaaaattggagcagtaggaggatcattcgagggggcaggatcgaattcttccatcctttttgggtgccctaggttctttgtcttagccataggaatttgaaagatagaaagaagaacaaggaagcagaaaaacaaaggaataggaatcagttaggttgtgagaataaatgacaaaagaaaattggtttaaataaacatgggagagtggagtaaaaaag

SEQ ID NO: 154218 - DNA, 505 bp, Cannabis sativa
catcgagtggagactgaaatgctttgcgcttaaccctaacgatcacgggcttagcatccgttgtttgggacgaagaagaagagatttcgccaattttcgccattgaaattgaaccggtctcgccagccaaccagggctgggacggtcgaaggggtgggacgtcgttgaagtagctgctgcagaactccccttactgtttattttattttatttatttttagtctagtttggagtttcggagaaatacaaatataaaaataagaaggaatattggcggttaaaccacctgaactttacagtttgtaacacttaaccacaaaaactgaatttttggcggctaaactacctaaattgcgttttgctctgcacacctccctctaaaaatcactgttaagtgtcaattacggttaagtgtcacggtggactgtccacgtggaaaaattttagtggtcctcgtaatattagttttaaaaaataattataaatatttaaaataaaaaataaa

SEQ ID NO: 154219 - DNA, 705 bp, Cannabis sativa
aatttttttttattttttttgaaccgatggaataatgccaactcatatgatgtaaaagtgagagatttttctaattaaatacaaaaattaagcataaaaattaaatcttttttaattttttttcatttatgagtaatacccattaacagtgcattcgtaatgtatatttttatatctagttttttttttttaacactctttctttctcttacaaaaaaattaagagcactcctcatatatttttctatcttttacataattaataaaagtagtatatttttttttttaaatgtgttgtaatttattcagaattaatcatgaatgatttgcatattttattaagatgatatattgtcatttttcttatttataattgcttttgttattttataattattatatagttacttttatattattgtttatgtgttttatagttgttttttttttttattattttttttttgtgtatttttttttgtacacttgttgtttggtttatgtttattttttatcgactatatttcagtttattccagacaatatttttgttctatatatgtgcatttgttttgttatttttatagtttttagttatttttcagtatatagttatttttttaactatcactaactcaaaaaagaaaagagaaaaaaaaagttgaaagaataacttataataacaaattccatgaagaaaaaaaa

SEQ ID NO: 154220 - DNA, 833 bp, Cannabis sativa
tacaacagtatctctgaatatgaattcttagataatatctctagggtaaagtatcgactaaactgtttgcgaccctttgccttgtgaacatgcatcactatttttagggctgtgaacttggagaggaagtgtttcccttctcgttacaatggatataagcagaaagattacatgataaatgtagtatacactgatcatgtgatttggacagcttgccatatctctgcaatctgatccccaggttatagggatttctttgatgactcacaatgcgaaagctgaattcgctaagtgttggttgctctgtgcagattgctgatcgctttgctctgggcatgccagcgaggcatcctgttcgggctataccctcccagcaaatacttaaagttgattccacatgtcaccatcatgcaatgccaagtcagagtgcaaaaattgggataacatttgccccccaagtctgtaagggacttccgaagttgcgtgtagacttcatccgagctgcttctacctttggatggggacacgtgtcgggcgcgactatccgagactcgatgtgaggttgactgggtgtcccttcgatttttggctaataaattctctgacaattaatattttgaaatccgattttttctcaccacggttgacggctgcatttgattattttagatttcccatatttgcttttaggggggaaccgaggcgtctgaggtttctagaaatgactacctttttttgtgacttgcctataaattcaaagtcaaagacttaaatttataccaaatatacatgagtaattcttctttctcggaccaccactactaatctaactc

SEQ ID NO: 154221 - DNA, 827 bp, Cannabis sativa
atccagccaagaccatcggacccatcgggggtcccattgggtccatcggacctagagccaaaatttttttttaaaaaaaaaagaaagaaaaaaaagcatccagccaagaccatcgaactggacctatcggaccatcgaaccggacccatcgagaccatcggaccgaccccatcgaactgtcttcttccccaaaaaaatttgcagatccgaacccacccattccatccaaaatttcttagatctaacaaataataggtttcacaaacaatcccaaacaaaatcacaaacacaataaatctaaactttctaaaaaaacaaaaaatacaaaaaatgaagaacatggtttcggttcggcgtgggtgggctcgtcgtcgattggctgggtcaccatgggtgggctcgtcgtcaatgggctgggtcgaagtcgcctgcaccgtgcgccgtcaccatgagcacaacttcgggtttttgtgggttgaggaagctgactgagagagaggaagagagaggctgagattaggatttgaaatgtgatgggtagttttgggaaattagtaaagtggtcatatatgaccaattttaataattatccatttagggaaaaaattatagagtatgaaaattcaaatttccctaaataaatcatagataaagaacctctctaacactcgtaaaagttatttttgatatcgtgttttgcaaaagttactgattgaatcatctttttttaaaaaattaacaaattgaactcagtattttttaaaattgtacaaaataatacattgagttcaattttcgataatttttatttttttaatataaccaac

SEQ ID NO: 154222 - DNA, 872 bp, Cannabis sativa
ttttggagataactaactctccgccaggcagtagggttccaaaccttgattcataactatcatgcgatctatccattttactaaattctggcggccacatacgaatgagaggcccaagagtcaaataacacagagaaataagagttgttgaccgagagctgacctgttaccactgaagggctagcttctgcatcagcctgagttatcgcgaacacccttgctggagtgggtgtcgctgcagtcttcggtgcctcagttctaagcttgggtcaatcccttttgtaatgccctggcatgccaaactgaaagcatccttgccctttacactcccccagatggtgctttttacaactggggcactctaggtaagtgtatcgggtttcggtgccactctggcgattgccacgaccttggttcccccggaatctcttgttctgacccgagccaccggttgcagtggatgcctttcttttctggtccatggccgaaccactacctcccccgctaaaacctgattcaggaggggtaggagccccgccaacaactggagtcccaccagactctgtcatgaatccaactgcgccctctgctcgtagtgccttgtccaccattttagcataggtagttctgtcataagtagtgatcatcaagtcatgtctaatcttcgcatttaacccatccatatatttttctatcttactaaagtcagttggcacaattcccgaggccaacctcgccaaaaggttaaattgtgttgtgtactcagtaacactcgtactttctttctgagttaaatgagtgaattcttttctcttagcacttctaactgcttcattgtaatacttagcattgaaaagttcttggaacttttc

SEQ ID NO: 154223 - DNA, 596 bp, Cannabis sativa
aatatatttgtattatatgtattagacttttaaattattattattttttacattaaaatgttaattgtatacataatttttttaaaaaaatgtatataaagacgtgtgaattagattgaatcagttacttttacatgtcaatcaacattcaatttgtacaagtgcaaatatccgtattttatggattaaattagattggactggattgactattttatgaacactcctagttacaaatatctaactataactcgttcaataaaataataataaaagtttaaaccgaccaaaccgatcgatatacatgttattttcttattgtaatatttaaattaattttaaataaaaaataaaataaaaatttagtgatctaaaccaatcagagattaccatatggtcattaacttgacacggtcagttaaaattagttatttatctttaaccagtagtcaaacttaagtatttaaactcaaattactcgtatactaataattaattaaggaatattctcatctagtactttgtgtttctatgaaaatcatatttagtaccttgtattttcaataatatttaaagaaaaaggaaaaagaaaaaaa

SEQ ID NO: 154224 - DNA, 976 bp, Cannabis sativa
aatctgttgttaagcacaatgatattgtggcagtctatatttgtataatatagatagctattgtatattttttagtaataagaagtactaatcaaagagataaaaaaaatacacataatgagttattactatgatattatttaaactttatttagatgtgattcaatgttaactttacccattactatttcatattataagaatttagtggtatcctttagctattttgcatgaaaacgattttttttaaaaaaaaaaacaaataatgtttcaagaattatcaatatcgaatacaatagaagacaaaaaatcataaaaattttaaaggctatattataattaatagaggagaaaagtttataaaaggagcgaaaaaaaaatcatgaaaatagaaatagtagaaagtattaaaatagagtacaaattaagcataaatgcttagctgttattttcttatgcaataatagtatattaaatatgattgtcataactttacctcttattattttatataataattgtgaattaatacactgatttaatgctaatggaaatcaatattaaaataatataatattaatactaatggaaatcaatagacacaaacttttattttaatacatttatatacatataatataatattaattcaattaatagaaatcaataaactcaaaatttttttatacatttatatacaaaaataataaaaccataaaatatacctgaattaataaacactattaatttggcctattcataatttcatatgatcaattgggcagtttatattttgttttaaaagttatcataataaatgatatattagtacattctattacataaaaataaatctattacatatattttacttaatatggaaataatttaatgtaatatatatcaataactattaatataattacactttattattgatatttcaaaatgcatcagatttaaaaatatatagtaa

SEQ ID NO: 154225 - DNA, 500 bp, Cannabis sativa
caaaagcaatgtgtgagggtaagggtaaggacaaaagaaataaacttgcaatatatattaaatttgtgagggcaaattggtcatcaattatcacatcaacaagcgatatttataatagtaggataagattagataaaaattataataataaagacaaaataaattgtttgtcataaaattagatgataagggtaaaatagtctaaatttaatatagatactaataagagatttttaatatagtaattagaaaagtgaaagtttttgttgatttgttttgttttattttttatctttattattgtaattttacaaaattgttaggggtaaaattggtatactaatatatacaccattaccgcacttttataatagtaagatattacttaactggattactaagtgttgataaataaaaggatataataggaagggttattgtctttaataaaaacccttgggtgaagcagttaattacgaatgagatacaaccttatcgat

SEQ ID NO: 154226 - DNA, 593 bp, Cannabis sativa
ctcttctctggagctgctgatgggtggagtcttaaaggaattcacaagggtaagtctttcctgaaaatttcctttaatccttattacttcgctcaaattctaaagttttttctctttgcaggccagtctgaagttggcttgtacatactcccgggctaagtctgctgcttccaagaacgcagctctgtccaacaccatgagggcggaggtggacttggccaggaaggacgctaatgacgctagggtggaacttggagctgttcggatgaagttgggtgaagtcaacaagaagctttttacggcccacaagaaaataactgagttgactacggatcttgaggcttctgaccgaattgaagagatcatcgagaccttatctgccgaagtaaacagccttcaagatgaaagaacatcccttcgagcggtccttcgtcggctggaagaggagaagaagtctaaggaggaggagcttacatctgaggtgacaaggccgggagagaaagttcatgccttgtagacagctggtctcgagctcttctatgacttttcgagggctaatcctcaggaaaactttgactacttgggtgaagcca

SEQ ID NO: 154227 - DNA, 564 bp, Cannabis sativa
ctagcaaataaagattgtcataagaatttcaataaccagttccaataacatttgaatttaaagacaaagtaaactgattgtttccagatgaacaacaatatccagatttgtccaacaaagaaacagaaactaaatttcgtctaaaagacggcacaacaaaagtgtctttcaactccaaagaaaaaccagttcccaaaaataatatgaaatgcccaatttcttccacttccaccgattgtccatcgcccacaaagatgtatctttcaccatcacttggctttcggtagctcaggcaaccctgcatagaaacacttatgtgagtagtagcaccagaatctatccacgtagtatttctatgtattgaaactaaattaacctcagaacgaaccaaagcaagattaatacctttctttacatgccatgtgtgatatttggtacaatccttcttcacatgtccaggttggttacaaaagaaacaactcttagaatcctattgttgtttcttttgaactggacccatagcagcttcattctcaaatgtccttttcttgccgttatccttag

SEQ ID NO: 154228 - DNA, 909 bp, Cannabis sativa
  modified_base (844)..(849): a, c, t, g, unknown or other
aaaaaagcaaccatttagttgcttttgatttgaataaaatatcaattggttacttttccattaaacaatttattccagaattttacacatatataaataataaaataaccattttaatatgtgagaaacatatatttttctttctccaaaaaaagatgactaatattaaaagaaatttttttgtttctttttattatatatttttaggttagattatgttattttattgtttaagatactttgaggttacttctttttttttttttttttcaatgtaactcatatgatgtttcagatgctattcaatttatttacagatcattttatcaaattattaaaatagttttataaaaataagtttatttttatttaatcttgtaatgtctaaatataaaaataaaaaaaattattttttagcaacttattaagttgtttgatacatttaattttatttaaatttaaatattattcatttatttattaataaaatatagaaaaatctaaaatacttagtaaaaagaaaaagaaagagaatgtttgacaagtgtctatcattattaaaaaaaataacttcactgtctattcatgtgttacattaagacaaaacaacaaacaaaaaaaaaaaaacaaaggaaaaagagaaagcatgataattgttacataacacatataagaagagagagtatgtaagtacgtatacacattcctaaaaaaaattaataaaacaatggtatattttaaaattaattaggtagtgttaaatgtggtattttttacagtattgctccactcagcgtaaatttctcatatatatatatatttatatatatatatctattctatnnnnnntgtgtctatataacagaatttttggtttatgagaaattcataggtgactttttatttata

SEQ ID NO: 154229 - DNA, 695 bp, Cannabis sativa
atcaatttattttttgaatgctatttcaataacaggtgtttgcaagagatcaaaacatgattgaattggaaaatatcagatcgtcctctagcagccatgatcaggtggacttctcgggttaaaacattcaagttcagaaggaaagtttattcagcagtggtggctgctttgatttatcaaatctggagcaaccgaaatgattgtttatggaacggtaaaatgcaaactgtgcacgggtgtgttcaccaaatgaaagagaatgtgaagcatagaatcaatgacttattagatacaaaaaataccatagaagaaagagattggttcaattctttatacatgtaactagagtattattcaggcatttatatggtgctgattaagttgtaaaaagtctagttatatacaatacaaagtatctgattcagccaaaaaaaaattactattgtaactccgttacttattgtagttaccaaaaaatatattttttttataattacttaaaaaaaattcaaatgtatgatatttttaagaataaaaggtgatacttaatttttacttatttctcttcatatttttaagttaatattaaaatttaattaggtgtataattgaatatccaattaaaaaaccgataaaatctaattagtaattaaattggattggattagattttgaggtctaattagattggatcg

SEQ ID NO: 154230 - DNA, 622 bp, Cannabis sativa
taatacaccagcgcctcgacgaacttctggaaaattttatcaacagatttagcgaagaatacgtcagtatcccgaaatgcaccgattcagtggcaacgaacgcgttaatgcaagggtttatacatggttcaaaattaaagaaggcaataataatggaacctggactgtccctcataagggccctaaccatggcaagaggatacgtggccttggaagtggaagagaaacgacacaatgaggaagtatcgcgcgaaaccttgtgatcgggagatactttcctcttcgaatcaaagaaccggacaccagctgcacgacctcataataggactgacaaccgctcgaccaacgaaaggaacaaccgagggacagtaatggtgagtatgggtgaggcggggcagccacacgctcaacggggagaagaggagctaccacggatgaccattatcttaactgagttgataagacgactgcggggattgaaggaaaccaagtggcccccggcaagagggacaatggcgatattgcgcctttaacgaagagcacggtcatgcaacctacgagtgcaggcagttgaagatagaggtcaaccgtctggtgaaagaaggattcttccgggactgcc

SEQ ID NO: 154231 - DNA, 564 bp, Cannabis sativa
atttaagatcttggtaaaataatttctaacagccgcttggggggtgaggtcgccggcactaggaggttcgagtggtccggcgcgtgaggtccggcggtcgctggaggtgggtcaccggagggtggtggttatggagttttatgagttttcttgcttcgtgtttgaagagagagaaaaggagagataaatagaggtagagaggggacgagtgagggagggaaagtctgactgtttgctttttgtttttttttttaatatatataatatatatatatgtcctttttgacttggtcaaaccgaggtatcacattctcccctccttaacgaaatttcgtcccgaaatttcaaagtacaacctcaagttggaaattaaacaagtgaggataccttatatacatctcggactctaactcccaagtagccttgtcttctctgtggttcatccataagaccttgactactggaatctctctatttcttaacacttttagctctctcgccaagattttgacaggttattcttcataagtcacatcttcgtgaagagggatagcctcatactca

SEQ ID NO: 154232 - DNA, 539 bp, Cannabis sativa
ccacgtgtcccctctcgactggtccacgtattttgggcgaattctggagcaacattatgaaaaaaaattaaaaaaaaaaatatatgtcaacatatatttttaaatataaatattaattaaaaaattgtaataaaaagttcatactaacccttgtttaaaatttttaaagaaggttggtgcattacaattgtcatgaagttgaggccattgaaataaaagaggctttgagttggattaaagataaagattgataagtgtgatcgtggagtttgattgtcttagagttaaggttgcgtatgctttggcgcgatcttctcttatggacgctgaccgtacttttagtagtgttgagttacctactgtaattgctttcttagttttggaagataatttgaattaataaattctcattattattaaaaaaaaaatagagtaatttgcgacataaatatctaagtttaactcacagttacaaataaatacctaaatttaatttttggcggtaataatacctgagttataattttggaacttttgta

SEQ ID NO: 154233 - DNA, 679 bp, Cannabis sativa
acaacaataatgaacattatgaaatcaaacaaaaactaatttcgtcacacaacaataacaaagattatgaaaataaaacaaaaataatgtataatgaaaataattgaaactagctagtttcatcaatcaacacaatgagaaaagaaagcacaaaaaatactcacaaatataatcaaaacggcacacaatgcacaacaataatctaaaaataaaatataaatgtgaaaaccagttttgaacctagaaacaaaacaataaaaaaaattaaaataaaaaaaatatacaataacatcataaaattgagcaactccattacatagcccttaaaacctgtgaaaatagtttcgcatctgtgaaaatagtccctttacatacttttatttctgagcaaagtctattgggactagaccgccagcaaacttagataaacgatcaaattccagtgtatactcagtcactatcctcttcctttaagtcaattttacaaaatctttcatgtgagaagttcttatggcaatattataaaaattttcctcaaacagactcttgaatttgtcccaggatatagcactaacatctctagtttgtcccataatatcccatcagatgcgggcatgctcttggaacataaatgcagcacaattaactcgttcagttcctgtaacaccctaactacctt

SEQ ID NO: 154234 - DNA, 805 bp, Cannabis sativa
  modified_base (304)..(306): a, c, t, g, unknown or other
aatgttgcactaacctcagtttcttccaagtttgtttgtgattcacaggtgaaagaaagattggtatgtttgaataataccattgaaaaagaaagttcttattccgatgaatctgaaatctgtgaggagtcactgctaagtcttacaaggttatgtataaaaagtggatacaggttacttctgaaaatagatcattgtcaaaaataaataacaattgcctcatcaaactgaatctcttgaattgaaaattaaagaatatgagactgatttttgtttaataatgaagaaattattctattaaagnnngagcttgaaaatttcaagaaaaatattcaaatgcttaaccttggatcttctatttttgaggaagtttagaatgcaggtcaaagaggctttgatggtcttggatcaaatggtaccgaaagttctggaaaagtaaaaattgtaaaatctagtgttccaatgaatttacatgctgctacaaatttaagatcttttgctacaaaaatgtcttatgcagaagcaaagtctccagtaagttcaaaaaggataagatttcaggtaagaaggtttgttccaatctgtcatttttgtggtattaatgggcatattagacctaaatatttcaccatgcaaaatttgtacaaaacaaattattttggtaatttgaaattttttcaaaagaaacatagtgctttgaacacaaatatggattgaaaaagaaaaatgtctagctcgtttttctgataaaagtgctgcttctcaaacgtggtattctgacagtggttgttctaggcatatgaca

SEQ ID NO: 154235 - DNA, 785 bp, Cannabis sativa
  modified_base (433)..(433): a, c, t, g, unknown or other
gacatcgaccccctctgacacacctcccttcagcccttatgtatattatagtacttaattgcattatatatgcataaaaaaatatttacaatttataatacattttattaattatgaaaaatatattcttaatttttattaacaaacttgaaagaactacttattcaattttcaagattcaagttatcgaattgttcatggttagattgtttaatttcaactcatgcattcaagaatcggattgaagataaagcagtaaagcagacaatgatttacaagcttcatctgcactgtgaacaaatctcagccgactagtgcttgagttccccgaactagagtaataacatctactaaatccaaaagattcatactacaatctccagttcacatgcacttaagaatttaatacaatctttacaacaattagtaatgnattaccaacaacaatcaagattcttgattgtatgcacacaatcccttgtgcagcagctaagttcgtcttcgacacttttcttcaatcttaaatcccttcagatctgatgacgaagatgacactaaactcccttcagtctgaactcagcaacaccaggctctgatctttctgctatggatctccatctccaagctatgcaatcagacctgaaagacaacaacgagcaatacaggataccacacaacctcacacgatataacagtagaactaaccaaaaatatcaattagctagctgactcatttacagaatgaaactagctatttatagacaatagttcaaccgacctaagaa

SEQ ID NO: 154236 - DNA, 613 bp, Cannabis sativa
aatcctttactcttgtcgcagctttctctcttgaatatatatgttcgctatctcacattttctcacactaattttttctagtgcaagtattaaaaatctctttatctctttcttattatttcaatcagtttcaattttaattaggtgcaatgaatagatatataaatgttagggtttacactgttttctttcggtgcaaaccatgataaatttaccaattcataggattgggcagtgtccgtccactaataacatgtgtattttttatattaaattcatgtgattctgccgctaacaattttgttttgtttattcaagctgtatttagaatgaagtggtctctaatcatatgtgctctaactaagctatgatgacaagtccggtagagagggcacacttcaaaaaagcaaagcaaaggctaatatataattgaagtatgggactaaaacttaacattcccctgtttctctcattatttttagtttcatcaaaatctaaaactggtgtcatttcaatgttgcgaaaattattaattattaggtaagtgcacggaattggattaattattattaaactatacttataattctatttggcaaatcaaaagtattta

SEQ ID NO: 154237 - DNA, 531 bp, Cannabis sativa
cctagagtttgagaccaccaaaactttgagaaaacagcttgaaatccacagaaaaactcccaaccctagctgctctaagggggccgaaagagagagtgagattgagaaagaaactgtgatttttttctaacttttctaatttcgaacaaaatgaataaatgatgttttattaacttaataacatcatcataaagtaatataaggattgaataactaatttatctaaagtcacaaaaagataaagaggctaatggggcaaaatgactattttgcccctcccacactaatacaacataaaagggtactaagggtattttggaaaattttaaattcccaactaatctcgacattctcaatgtctaactataccgccccgctatactaaaatactaagatgtggttctactgagccatacattgcgttccaatattgttggacactgaacatgcaaaattatgaaatttctatatatgacatataaaatgcattctgaatccaaataaatcatcataaataattaatttaatatt

SEQ ID NO: 154238 - DNA, 585 bp, Cannabis sativa
gccaggctctcggtttggatcttcagggctggtaggagctagaggatctgttgtctgaacgggaggtacatcaacattctggccaaaggaagaagcagtcgcctcgggttcaccataagccacttgagaagcacagtactcgagatacatgtctctggcctcgcccaagtaatcgaaatttgcctaggggttagccttccaaaagtcataaaaaatctcgagaccagctgtctctaaggcatgtactttttcttcctgccttgccacctccaacttatacttctcaatctcagctgtaagctcctcctccttggtcttcttctcctcttccaactgacagaagacaatccgaagagctcccctttcctcttgaaggttattcaatactgctgacagggtgtcgatggtagcctcaagttggtcggaagcctcgaggtcctttgtcaactcggctattttcttctcacgcagctccatccgagcagctccgagctccaccctagcatcatcagcgtccatcctggccaagtccacctccgccctcatggtgttggacatagcagcgttcttggaggcggcagactt

SEQ ID NO: 154239 - DNA, 1202 bp, Cannabis sativa
  modified_base (851)..(862): a, c, t, g, unknown or other
caacaaaattaattttttagagatcagataaataataagtttgtaaaatttgaataaataaataaataaaaaaaacataataaatatgtaacaaatatctagaaagtaggttaagatatttctattttaaaattgaaatattaaaaaaatctcaactagaacttaaaatttaggttgctagattatatttaaaaaaaaaattaaaatctaatgaatctcctaaatatctaaaattctaactgaaaattaaatatctaataaattttcaaatttttcaatttatttgaataatttaaattatataatatcttaatttgaaatttagatatttctgatattatatttctaatcttataatttaataaataaattttacaaaataaataatttgaaaaattaagatttttagatggttaagatattatcaatttcatctaataattaaataaaaaaaatatctaagtttaaaaattttatggttacaaaccctaaaatttctattcaaaccaaaaattaacaaacttcaaaatttacatgttattttacataaaatcaattttttaataaatatctaataaaataaaatttcaaaactaacatttatttaatcttataatttaatttaataaaaatatatttcaatagtaacaaattttgaaaaatctgatatggttagaaaatttgagattttaactagattatttctaagttttattaaaattttaatatcaaaataaggtcatttcaaattttaataataaaataagtaatatctgatcttatagttaaaataaataaataaaatagaatatctaaaatttcaaaattaaccataaggctagtttgtggannnnnnnnnnnntcaaattcaaaggctactaatatctgaaacttattttaaattaaaaaattaatgaaaattaatattattctaataattagtgttatcccaatttgtgcactctgatgtggcatcacacgatagtgacacgtggaatcaactttatatatacctgctcgcaagagatatgccgaacaaaacaccatatatattcgctcggacgaagccttcttaacagggcagtgagcaatccaaacagcacaccaacactttgcagtttcagctttcgcatcgtgagtcacagaagaaatccctataattttgggatcagatcatagagatatggcaagctgtctgaatc

SEQ ID NO: 154240 - DNA, 1244 bp, Cannabis sativa
  modified_base (224)..(225): a, c, t, g, unknown or other
  modified_base (255)..(262): a, c, t, g, unknown or other
  modified_base (541)..(549): a, c, t, g, unknown or other
  modified_base (813)..(821): a, c, t, g, unknown or other
gaatttatattgaactatgttattttttgttattaattttagtataattttgaatctttattgttggtctatcttaccttgttgtttttaatgggagtaatcccaaaggattgtcatccgttagacaaacatattagtgttagatctcaatagataagtatttgtaaatgtaacatctagttgtacatctaaagatgacagcttagactagtatttacaatatnnaacaatgaagaagtttataaaataagaatnnnnnnnnctctcgcctaccgggacatcgttgaattcttattttaatcgaaattatcctttagttttttctcttagctttttcattttgaattcgcttgaatagtatatcattggatgaatggtttataaatcatctatttatgatgtcactctgatttctcttatgaaattgaatggcacagatgactatattcccgacattctatcccaaaatgatataaatcctcgatcttaaaaatctcctacttgtatatgcttactttaagcaacttaaacttagagttannnnnnnnntggtggtccaagctagaataattactcatgtatatttggtatatatttaagtctttgactttaaattttagattccaaatagaaattttaaatttcagtttcctagaatacattgcacaatacagtgtgactttcacaagttattaatatccattttctgtcaatggatccaaactgtatgttaatgtatggattatgagttttacatgctgtgaccagaatccacttggactattctaaaaactctttattgtaactagaccnnnnnnnnnaaaagaccacaaccacattctttatatctatggcatttgcgtcttattcatagtggttttgacaaaatcattttctgtaaagagtaaatatgtcaatatccacttgaaagtaagatcatctatattcgcacatatggatgtacattcaggggtggatatgatttttcgttatattcttaagacgatcactctagattctaccttatgcaaagaaatttgaaatgtttgagaaatttcatgaatttctagcaatggtgaaaagcattaaggtaagtggttaaagatcttgcgaactgatgggggtggagaaatttttaatagatatgcagttcaaagatcatttagttgaactttgaattgtatccaaccttacctccctagaaattcagattgcatattgatgaaagtaaaaggtctatgatt

SEQ ID NO: 154241 - DNA, 506 bp, Cannabis sativa
  modified_base (292)..(292): a, c, t, g, unknown or other
tttctgaaactttatatgagtttatttacattgttttagagattcatatttaggatgttaaacaacatacatggtactaaatctagatcctattaaaacatattccaacaaccggccacagagccatggtaatgatttactttcatgaaatatggatttaaaaacatgtttgtgttgatttggatcatttcatgatggtttatgtgcttatttgatgattgtatggaaatggcaatgtatgttgtaaaagtactttttattttgttctgaaaatatttttactggaaagtanacaaaaaattaatgaatttaggctgttacagaactccatctgatttttttttaatatgaattagttatgattttttgaatttggatgaaaatatcttattttgggtggcacacacatgcgcgcacaagggcatcactcggcatcatcacatggtttcagacaacctgaccgaggaaactcggacacgggttgtctgaagtcgtgtcacgccgag

SEQ ID NO: 154242 - DNA, 565 bp, Cannabis sativa
ctagaaggagacagaggtataacgcatgctactattttggtggcttgtctagagggtgccaacatgcgtggaggcatggtgccttaaggattggaccatggacgtataggaatccttggtcgataagggaggtggtttggacagtatcgaatgggcatgattagaagcgttggcacgtcagcttagtgttagcatcttgccacacatgattctttggtcactagtgactaggtgagcatcggtgttgggatttaccttatcctagtgagaacctatggatagtgtcagtatcttagctaaggagcctcaatgcctggatgcactcatcgatgcttgcgagcatgactctgtaggagttatacgagagacgagagtgtgcacgaggcacacggtcgcgtgaaaaatgagcccattgttacctggatggttggaaggctgaccttggcttagagaagtcaaggtgtcgcaagggtgttttgttgcctgaaaaagtgagctcgtgacagttggtatcagagccaagttcatcttagtgggaggggaacctggttggcctatcctagag

SEQ ID NO: 154243 - DNA, 624 bp, Cannabis sativa
gattgtgagatcctttatcaccctggtaaggccaacgtggttgccgatgccttgagtagaaaggggcagagtcagataaatactgtgaaacaaatctcccagcagttaacaaatgagatgactcgaggtaaaattgagttggttgtagggcagttggctaatattaccctgcaatctactcttttagagcgaatcgaagaagcgcaattgcaagatccagagttaatgaaatctcgagatagggtttcagctgggaagactagtgactttacagttgataaaacaggaatgttacgatttatgaatcgtgtttgtgtgcctatggatgacaatattaagagagagattatgattgagtctcatacaactccttactcagtacatccggggtcaacgaagatgtatcaagacctcaaggccatgttttggtggccaagcatgaagaatgacatcactgagtttgttgctaagtgtcttacctgtcagcaagtgaaggctaaacatcagaggcctgcaggattggtgcagtcattgaatattctagagtggaaatgggaagacattgctatggacttcgtggtgggattacctagaaccacgagacaatacgactctgtgtgggtc

SEQ ID NO: 154244 - DNA, 671 bp, Cannabis sativa
tttttttttttttttaatactttctctacttaatttttttttttaagaaagcttttttttttccttcttccttaaagtacttttttctttctttttttctcttctctctctatttcttatttttttcccaatttttttttatctttttttctcgataattcccaaaactatttcttagagagagttccatgggaaaataagcttttggacaaaagtgtgataccttgttcaagtcatggtgatctccactaatttactttttaaggttgtgatgagtgcatatacgtatattattatattacacgtgtcatattctttttcttctacctttcatatatactagttagaagttacgtgtcaagacacgtaaatattagtttttttagagtttagttctttgttgttttatttagattgtatttaaatgtatgatcatgcgaatgatttgtcttattaaagtaatatgtgtgctatcatatttggttagtaaaatataattgggtatatttaaaacaaaataatacttattatttacttatagaaaatttagaggattaagatataagttttataaaatttaaaacaaacattatgtaactaaaattaaagaaaatgttcgatcttaaaatagaagaaaaaattattaaaaaggtcttaatatatagaatatt

SEQ ID NO: 154245 - DNA, 636 bp, Cannabis sativa
ttcttggtttgtacttgatgtcgatcaggcttaactccactgaccattttaacaatctccccgatgtctctggtttcgccaagacttgcctcaaagggtagtttgttaaaacttcaatattgtgggcctggaaataaggtcgcagtttccttgacgacataccaaggcaaacgctaatttctccatttgaggatagcgggtctcagcatctaacaggagtttactgacataatacaccgggtactgtcgtccttgatcttcacggattagtaccgaactaatcgcatattctgacaccgctagataaattgataagacttcgccatttattggttttgataggattgtgggctgccccaaatgcgttttcaatgcttgaaaagcctcttcgcatttctcggtccactggaacttcttattgccttttaaaatttgaaaaaactccttgcatttgtcagaggattgcgatataaaacggttcaaagcggcgactttaccagtgagactttggacttctttcggctgagtcggtgattgcattgtaactaatgctttgatcttcgcagggtttgcctctattcctcgttgatgaaccataaacccgaggaacttccctgaaccaactccaaagacgca

SEQ ID NO: 154246 - DNA, 765 bp, Cannabis sativa
ttgtcaactataggctacatgcatatagtcttttttaaagttttaattggttaaaaaaagagaaatgttgaaagtcgccagtagtgttaagtaccctcctacatgtcaatattactattagtctaattaagtatcgggtcccaatatagtttaatataatagtttttaagaagtatcgctagccaatcgcaaaataacacgtcttaagggtgctaggcaccactgatgctcaataacaatactcttaaaataagcaccctatgctatagattaattacacttggtcctataatagcaattctatatatatatatgaaaagatattgaaaaatattatctattatatatatatttaatttttttttatgttatatttaagaataagttgagcaatagatatattttttatatatttattaattaaaaatattttcatatcatattttattaaaatgtacctatttttgttagtgagttatccaatatctttagggcccgtttggccagtaggatagggactagaattaggataaattatctcaatcctatatttggtggtaataattaactggaaaaataatcgtttcactaaaaataatccaactcttatgggataaatagtcccaacaaaatacatgagattaagtgggataaacctgaccactcctcttctcccaaaacccaacaacatgaatgccatatttgtgtgatgtgtgatgtttctgtaatgattttatttaaatatacaagtaaattatttaaata

SEQ ID NO: 154247 - DNA, 606 bp, Cannabis sativa
  modified_base (346)..(353): a, c, t, g, unknown or other
tcaacaacatattaaagttataaaatctttaatcaatggttgctagtacggttcattgttgcccgtttttcggtgcaagtaatcttggttcggattacggacgtagtatggcatcaaagtgaaggtgatgtatataatagagataatatatgacaaggaccaatatgaatgaagttatctttattaacatgtcgtttactataaagacctaattcacatcataatgataatcaatagtagatctgcctaaatctagagttatcatgaactcctgttcaagttattagtttctttgattcactcattaaaatttctcaaagaggatgattcttacaacttctgtttnnnnnnnntaataatgtggatgactgggaacatgatttacaattatagaatcctgactttcctaatggatcgaatattggttccctaagtgttaaatttaaaactggaatgttgtgcataaatttagataggatctaaattatacatctactagtgaattaatggtagtgaaggataaagaagtacttagaagattaagacgacaatttgacgaaaactaattatgaaccaacaaatggagggctaatcactagaattgat

SEQ ID NO: 154248 - DNA, 587 bp, Cannabis sativa
  modified_base (28)..(37): a, c, t, g, unknown or other
ttctaaaataacagcataaataattatnnnnnnnnnnataaataattttcataattaatcttaattaactgctaatttccaaattaaactaagcgatctttacaataacataacataaacaaaattataactaggtgcccatacaccccaaacataaccatatcccacgtcccacgcgtactgagtctagaacatttgtataacaggactattgaccataatatcagcctatactcggtactctaatcctatcgatgtgatagcgtcaatcagtactttgccaaacatatatctgttggtattctatggaactctaagtacaataatactgtctgttgacctcaaaaaatgatcaaccgacagtagggtcgtatgcatctaatgcttgccacgtgttacacatataagaatgaaaagcaataaacatagggatttgttacagagattggacccccttgtgatagagggtaatggcctactacccttttggttgtattgatacaaagagatataggtgggatttgatatagctctctataaggatacacaagggggtcgaacctctataacaaatccttgtgtttatt

SEQ ID NO: 154249 - DNA, 592 bp, Cannabis sativa
  modified_base (46)..(54): a, c, t, g, unknown or other
tgtttctttattgatactgaataaaatggattacattgaaatggannnnnnnnnagggcataaaacccaacagtaaatgcagtgtacttggcttgattctcccaaggagcctgctcagttttttcgatgaactttccgttcttcccattcccttgtctgttgttgttgttggaacaattaccatttgagctagaattacttgggtaatggggtagttgggcggacattccagaggaaggagctttcgacttgccaggcttttgctcaccttctgctcgctgaatagcctcttcaagtttgaagaagccttcagcacggtcgagaaaattactcatcaagtctaccgagccattcttccttatgtccttccaaagttcaccgaggacttcaatgccccccagtatcgcggacaagtttccatcttcagttacacgtgaaaccttagtcgcctccgtcacgaatctgcttatgtaggctcaaagatgctcgcccggtctatgcttgacttcgaccaggtctcccatgtgcaacgaaagttggcgagaggaggagaattgtgttggattttgtgccctaaataaaatctatttca

SEQ ID NO: 154250 - DNA, 584 bp, Cannabis sativa
  modified_base (302)..(310): a, c, t, g, unknown or other
atctaacaggcttcctaacatgcaggctaaacatgtaatacatatgcatactattataataatcttacctcgattccaaattcagctgtgccggtcaacctgagtggaacgaagtgcacggtgatttacaggctcctaaaccataacagtcacaacactaaatacgtgatacgctaaatcacttcccggggacttaaactagaaaccaaacatttccctatcgataaaaagcatggcaataccctaaacaacataaaaatgtgaaaaactagggttcccaaaaatcccccaaccggcagacnnnnnnnnnaaccggaattctggttctgggaatcctggaacaccatccgaaattccagttcctcgcacgaaacacacaaaattccataactcattcaaatcaaacccaattcataccaaaccttccagacctgctctgaataccccaaagaatattttcagagcattaaaacaatcaagaaatcacagatacgaaaaatgccattaaagctccaagctttgggttcaaaactcaagcttggctaaacccctctaacatacattcaaatctgtttaaatctact

SEQ ID NO: 154251 - DNA, 1283 bp, Cannabis sativa
attatatttatataacctcgtaaactgagatctcgagtttaaaatcatcgttgtaaatacaagtagtatatatttattcagggcagcatgtcttgtttatgttaactgaagaagctcctaagtagccatgtaacgccctgacccttaaggacgccacgtgtgtgcttttacaaacttatttcttactaatctattagtttagaaaataaaagtgtggtttaattaaaactttttgattaagttgaaataaaactttcatactaaataccataatatggggatcccctgtttataaaattcttttacaataggttacaaaaataaggttacatttccaaacatagaaaataggttgatcctgcttcccgaaagccaagacaccacaactgatatgtacattattggaagacctctgactcatggctgaacacagttgctttcctttttacttgcaccacaaagcaaccgtgagtcacaatgacttagcaagaaaagttactagatcataagcattggaaatacaagtattcttatcacaacataataaacatactcgtgattcgatacctatttagcatgcatatttaattagcgtcattacaaacccataaacatcacataataagaaaatcatagtaactcataattagcaattttatcctttcaccaaacaacaaacagacattcattcaacacatagccacataatctcagtgcttagtaaagcactctaattatacatcaccataaacacatagtttcaatgcttcataaagtattctaatcacgtaatccacgagttgtgtatgtcgctatcgttgtccgataaagtgaacgataagtaagaaactcatccgcaatttcaatgagtaattactcataacggtaatgaccgtatctttactcgatcataatcgagtctcaaacaataataatcgttccatatcaatacctcgatcataatcgagtcataaataataataatcgttccttatcattacctcgatcataatcgagtcataaacgataataatcgttctttatcattacctcgatcataatcgagtcataaatgataataatcatttcttatcattatctcgattataatcgagtcataacatacacataatgggatctcaattataatcgagactattacatctataatcgttagccataaatggtgcaaaaaaacttttcttacctcaatccagaaatcaagtgtgcgggctgacctgagtagaaacagagctggacaatcctggtcctatgtcacgaca

SEQ ID NO: 154252 - DNA, 643 bp, Cannabis sativa
  modified_base (58)..(60): a, c, t, g, unknown or other
tgctcttccccagcctcatcttcaagattcaaaggttcctgagcatactgcttggccnnngcacctcccttcaacttagcttcgtgcttaagttgaatgattcattctccgaaggagctcgttcggtccgacaacaccagatttcctcttcttccctgtcacggacttaggaacaaagtccttgggatataacccgtacttcacaaagttatcctcgtaggttaactagataatattccagtcttcccccgacagtcgagcaagcttttaagctttatccctaagagcaagagtgaggggagggcggtgatatgttagaatctgctagaactgagtgcgagtgatgccagtgccatccaccatgacgtactacatcagtaaaacgcccaatcttgctgatggccgagtcctccgtgctcgtcaaccacttgaggcctggttgagagatttagaagtaccccgacctgcctttcttgggggtggactttaaatgaaagaaccaggtaactttgtgaggagaaggtgtaccctactcctgggaagcgtagaggccgaagagggcagacagatatttaatgtccttaggagtgaactgggccggacagaggccgaagaagtccgccacattcttgaagtattgatg

SEQ ID NO: 154253 - DNA, 573 bp, Cannabis sativa
tgcaaatcatcaactaacaatcattaagcttcaaaattacaattctctttcaaccaacaactagtaatttgcaacaaatgtataaaaaagtgcgtaccgtcgtcgtcatctttcatttgtgacttttttcttatctgaataagatagaaggccactaaaattgacataaagcttaaaatgacaaccccaacagtgatccccacaatcaaactagttctgctcttcttattgcttaaacttggagaaatgttactgacagtaggtgtgaaatctgtatcaaatagatatattcaactacattatccttattgattgctgaaatgattccagccgtccaactagttggactatttattaccttgagtagcactgattgctgaaatggaaggtccataattaccaacttctggtatgcaacaagttccttttccagcccaaaaaagatggatttcaaggtaattctgggagacaacaaccttaaattccttcaggaccgccttgaaagagattccacctgcctcttttctgatatcaaaattttgcattacgcggtttccctgtcataaatttgca

SEQ ID NO: 154254 - DNA, 518 bp, Cannabis sativa
  modified_base (26)..(26): a, c, t, g, unknown or other
tacccggtgtttccccttacggatcncgggactactgactgtcacagccctcgctttaatttaaactggtattggggcgggtatagggtgaatttaagaagcgggtatggggttggtgggagcaatccccgcacccgcacccgccccgccccatttacatccctactatagatattgtaatacatcaattataacttataagtaagaaaattggaaagacaatattaaataaacataaagatatagtgaatgaactaatatatatatatatatagatatataattttttatttattttttctaattattttctctattaattcatattcacattaactcatatatagcactatcttttcattgacatatgaaaaaattattattattaaaaagaagagtatgttcaaatttatacctaaattaaagtaattattatgattttgaatattaatattattcagttacaaaacaaataagaggagtaaataatgaaaaatattatctttatatattaaaag

SEQ ID NO: 154255 - DNA, 607 bp, Cannabis sativa
cgttacggtgaacaaaaataaagaaaaagttgttggaagatgtcaccgctacaaggagtgaactccaacaaattttcgaagataaaaaattttgccaccaaatattttacgtagagagtaaagtgttacaaacacgattacaaaggaagtttcactgttattatcccttataaaccgtccaactcgaataaacgctcaaactaaaccaaataaaccgacaaaaaatacaactcaaaaaaatctaataaaaattcaaactgtccaataaatatattgggtggatttaaaactatttgaaactgcccaattaacctgaataaatgaattaaactgaattttatatcttttaataaaatatattacataaattatatttagtaaaactattttgtatttaaagtttaaaatttgtagtgtttaacttaaaatttaaattttataatttttattgtatttgaataatgaacttaaaacttaaagtctacaccatattattactcgaatgtttgtttaatattttaatatttactcaattatatttgtcttatgttaaagttcttaaaattaatttagactatagcactttaaatttaaaatataaataata

SEQ ID NO: 154256 - DNA, 540 bp, Cannabis sativa
aaaaaaaaaaaaaaactcatctattaatatgaaagaagaagtacacgtcttgcaaatatgaaagatgaagagacaaggcaaagaagaaatatgagctaaaaaaaagttttaccctaattaatgcattattatattagtggggtccataacattgaataaaattaaataataaattaataaaaaagtaattataagaaattggttagatgatacactatatgatggacacctgtgagacaaatagtatttctcaattaaatagcaaatgttagaaaaaaaaaagttgaatatgagaaatattttaatcaatcctagtttaaatatgttgtattcaagactaaggtattacaatgcacttactcaattagaacaatctataaaatgccctacaaatatgacatttagagaattcccatagaagagttctataattttaaattataaagagttttggaataaaattttaataatttaagagtaaaaaaaattactaaaagatccttatttaataataaattacaaaaaattaattaataatta

SEQ ID NO: 154257 - DNA, 527 bp, Cannabis sativa
  modified_base (262)..(264): a, c, t, g, unknown or other
ataataaaatttaaatataataatgaatattataattttataattagaattgttaaaaaatttaaaattaaaactatattttaatttatttataaaatatttaagttgagtatttataattaaatatttaaattctaataattttaataattttttaatatcattatatgtaaaatattattagaaaattttatatataagggtgcactcttaatgggtattacccataaataggtaaattttagtttttaagcttaatttnnntatctaattagtttaatctctcatttttacattatatgggttgggtttgttccatcggttggaaaaaaaattaagaaaatttttttcgacaaaaagaagataaaaaaaatcgagtttgacttaaatattatgtatcgaaatatatttttaatatagtataaaaagaggtagtttttgacatttttgttttaaattaagtagttaaactaagcataaatataaaaaaatttcttttgttattcgtcattggatcaaaatctaat

SEQ ID NO: 154258 - DNA, 773 bp, Cannabis sativa
tacatgccggctaaaaataaacattaggattattccacttacaaacttgaaactttgggtacttatctcgctatttacccaaatataaatgattttttttttctcaactatcactacacttgcatttaattttttaaacttaaattttgcatttaattttttaaacttaaattttaatagtaaaattcttctaggagcaaatttaaagtaacattcattttctatcgttaactaataatatagactatttatatgtatactttggtaatgtgtcacatttatattattatttaaaagatataaaaattatttcaaaatttataatattttttatttttttaaacattttatttttctatttttataatttcatttaatttcaaaagaaattttgaaaattatttttaaataataatattaggtataccaatataaatgtgtcatgtgtacaagagtgtatacataagcagttcatagtgacacttaaccggatgacactttatatttgctaccaatttagtagcttggatagttttatcgtcaaaatttgagattagaaggttaaatacaagtgaaatgacagttgagatgttttaaccgcaaaaaactcaatataaatatgcttaaataaagagaaatgctaaaagatactattggtatctagcatcattcccgttgtctagggtcggctctgaaaatatatgggcccaagatgaattaaattttggggccctcaaaaatatatataaaaaaatattaaaaaaaggagtgtt

SEQ ID NO: 154259 - DNA, 566 bp, Cannabis sativa
  modified_base (46)..(47): a, c, t, g, unknown or other
  modified_base (395)..(407): a, c, t, g, unknown or other
ccgaactagtgatagcggtgaatcgaatggaacctctgtatgaaannttccgcaagcaggcacctccagtttctctgggaggttcagatgttatgaaagccgagcagtgctaactgtgattaccaagatattaaatttcatgggtgtcactggtaacgatagagtggtctgtgccacttttcagtttcaagaagatgcattggtgtggtgggacatggtgtccatgatacacgatgtcacaacgatgacctgggaaaagttccaggaacttttcaatgccaagtactataatgaggtcgttagaagttccaagaggaaagagttcactcacttgaccaaagaagaaaatatgagtgttactgagtacacaacgcagtttgatcggttggcgaggnnnnnnnnnnnnnttgtgccaaccgatttcagtaaaaaggaaaattacttagatggactgagtgcgaagattcgacatgacctgatgattagcacagatgacaaaaccacctatactgaaatggtggaaaaggcattgcgagctgagggcgtagttgggtgtatgactgagt

SEQ ID NO: 154260 - DNA, 533 bp, Cannabis sativa
ttcattccatctttgctacgcccaagaatattgagcaaggtattaagcaagctgtctgacacatttttctcgatgtgcatcgcatccagattattatgtatcaacaaatgcttccaatactcaagctcaaaaaatattgacttcttcttccatggcccttgaggttcatttgcaacaacgtcacttttctcacgacgaacttttcttttctttggattcacttttcgctttctaaggtggaattgaactttattcaacttttctaacacttgttccccttggaaaggtggcagtggcaattcaaattcttgcttaccgtcaaatgcttttttccaagtccgaaacacatgttcttttggcaaaaaccttcagtgtcccatataacacattttcttcgagtgtttcaaatacatagaacatgttctctccttgcaaataggacatgctttgtaccctttcacactgtatccagaaaaatttccaaaagctggaaaatcattaatggtccacagtaatatggctttaagattgaa

SEQ ID NO: 154261 - DNA, 1085 bp, Cannabis sativa
  modified_base (27)..(66): a, c, t, g, unknown or other
  modified_base (551)..(557): a, c, t, g, unknown or other
  modified_base (1040)..(1049): a, c, t, g, unknown or other
tttccgtaaacctcgttgattagcaannnnnnnnnnnnnnnnnnnnnnnnnnnnnnnnnnnnnnnnagatagttagggtgttacactgagggtggccccagcactcagacaactcgctccaggaggacccaacttgagggtggccccagcactcggaccactcgttctaggaggacctaacctgatgttggtcccagtacacgaacgacacgttcgaggaggactcaacataggaatggccaaaatccaagaatgagagatgtaggacccaatcgtgaaagtgctcagcccgtgggtgagggtacttacgaaatggaaaactgccaccttaggcgccgcctggaggaggaaaaccagcggaacgctgaatgagagcatgatgcagccgccgctagggcggcataggggaataaaactcaaaatcaacctgaccctggagtgagaagaccacgaggcagaccttgttgctcacaaacgaggagacaggaaaatgctcaggaagaataacctggggaaaatgaggttccccctaaaaatccaaatgatcagcnnnnnnnctctcatagaaatgagaatgagagacaaccagaaaccaacgaacaggaaattcctcgtggaaatgcagaagaccctaacacaacacgaggaacataggtcaccggtgagatatcaccagcattcttcctgaacccatagagagagggctcgtacaaaccccagtgggggaaatacgacaaaccacgctcaggggggaagagcagggcgtgaagaagcaagtgtgacctgtgggtggagaaagtgctcatcacgctaatgatcgagaaagcacgggaaccagtaaatctgcaagtcactcaaggacgaggtacatgagtaggatgaagtccatgaggaagacgagatccgtaagtaggacacagtatgtgagtagaacgaggtctactagtaattattcccaattggatctgcgagagcacttgaatcagaaaaacctaatattcgtcaacaactcggtccaaagcaagaggatcctatccaannnnnnnnnnacgagttggaggataagttcaggagatatcaagtgg

SEQ ID NO: 154262 - DNA, 550 bp, Cannabis sativa
acacaagtattttgtagtttcttttaaacttaatttagttgtgtgttgtttttgagtttatcttgagttgatgtaatgtgttgatacctaattattgatactttatattagagttgttgactaattatttactcattattatttaaattattaattgttattaaattgctcaactaagataaaaataaatagatatgtataatattgtttttatgttatttttggcagattttagattgttgacataatatattatgcctaagttattatgtagcactgttgtctagtatttagtatatttttagttgttttatggttgcaaatatatgtaatgttagtttatttattatcatgtatacttagagattgtatacatatatatatttttaaaaatctattttttactttttatttaattttatgcactctaaaaaaatatattattaaaataataataataaaacagatataaagctattacttctataattggctaaaaaagtacaatataaaattattttttatattttataaaataaaaattatgtca

SEQ ID NO: 154263 - DNA, 1356 bp, Cannabis sativa
cgatttttccgacaccagcagctattctggtgacttttccggtaccgacaacaaactctggaaaagtcgtcagaattgacattgtcgccagaaaaattactagaaaaataccaaaaactatttcttgatgaagaaaccagtttcttggtgatttttttggtgatttttccggcgacaatgccaattccgatgactttttcgttgcccacaacaacttcggcgccgacagttactccgacaacttttttggcgccagcaacaaactccgacgcttttttccggcaccggtgacaactccggcgatcactgtagtttcatttgttttattttaaaaaaaatatatgaagggaattttaatatttttatggtcattcaatcctatatatgttcaatttttattttaaataccatattcttttctattaagtttcctttattatatttatctaaattaactttattttttccatatttatataaatacccctataaaataatatattttttaggctaacttagccgggtgccaaaaaggtagtgggaaccgagagagaaaagagaggttgcccaaaataagttgattaatatatttttaaaaaactattatttaaaaatactcttattaaaatatatcttattttatgagtgagttgctcaatataccatcactctttacttaagtctaataagggttgtttggcaaaaaattttaaaatgatttttaaaaaaccaaaaaacagaaaatatcaaaatgttgtttttaattttcaaaaatattttttttttgtctaacatattatattttatatttttgctcacatcttagacccataaccatacccgaacccagacccggataggttcatgtcatggtatgatattaaaatattgattttttatagtaagaaaaaatctaaaaatagttttaaaaaatttttgctaaacaccattaaatttttaaaatgacaaaaaactattttctattctcgcttataaaaatacaattttaaaaattaaaaattaaaaactaaaaacagctctaaagttcgttcacttttgttgacacaacttcaaacttagcctaaacatatatgtatcttatctaaccttgacagatccaacttggtggttacgcagagttcaatactatatttgattacatctcagctttcttttttttttttattattatttttttttttgatgaaatgagaacttcattaaatttagcattctgaatacataaaatccagcagacatgctggaacgttagacacacagaagctacgttcagataaagaccgagacaacctagcaacaacatgtgctagacggtttgctgaacgttttacaaaa

SEQ ID NO: 154264 - DNA, 516 bp, Cannabis sativa
tggttgactggttgtcgagtggctaggggtgcccctgtggtgtctcatatgttatttgctgatgatagttacgtgttttgtaaggccaatgagaatgaagctcagagtgtattgcgcctcttacaaagatatgagctagcttcgggacagcaggtaaactttgctaaatcttatgttttctttagcaaaaatgttacttcggctgtgagggatcgattatgtggtcttatgcggttaaatgcggcttctgatgatagtttctacttgggtcttccttgcatcatggggaaaaataaaaatgctattctgggctttttgaaggataagatgaagaagaagattttcagttgggagactaagtttttatcaaaagctggtaaagaagttttgatagcgcaagccttaccgagttatgcaatgagtgtctttcttttgacccaagaaatttgttcgagccttgaaggaatgatggcaaagttttggtggaagtcccagtcacaagcggggactaaagga

SEQ ID NO: 154265 - DNA, 1229 bp, Cannabis sativa
  modified_base (148)..(185): a, c, t, g, unknown or other
  modified_base (658)..(673): a, c, t, g, unknown or other
gtctcattatccaactagtgcttcaaaacctagttttcattctgttagacaactagtgttttgagacttcttcttcttcttttctctctactatttcgaaattcttagtgttgttcaccattagaattcgagccttagtgattgagtnnnnnnnnnnnnnnnnnnnnnnnnnnnnnnnnnnnnnngtgtaagactgtgaagaatctgaaggagttttgggctcagatcttgattatactctacaacagaaaggaacaagggttagagatctaagcagaaggagtcatttaattctgcttcaaccagtgtaaggtttctcatactttggatgcgtttattttttattgttttagaagttcatatttaggatgttaaaaacatacctgttagtaaatctaggtcctggtaaaacataatctaactattccagccacaggggaagtcactccatggccctcagtgggtggttgtgtatttatttgctcggggtttgtccctggtggtcctctcatgtttctaggagtttgcacgttgggatctgtcaccatcgggttgccctgatcaacaaggcctctacgagtttgtacaaccatcctgtttgcctgccaaaacttaaaacaaggaacttgtgttttttctctcaatgaaagcaccaaannnnnnnnnnnnnnnntagccaacgacagtgagtcaaataataagcgattgaataattataagagaacaaaaataataaactaaaatgaacaccaaatttttaagaggttcgaccctgtgagtgtggtaatagcctactcccttgtattgtattgacttaagagaaggaacaaagtgttcttcccctttgaaagctcttacaactgatctctaagtaattctcttagatcactattttctctctagcatctctctctctgaagcaattctttcgatccctttcatagtgaggctaggtcactatttataggggcttgatgcatgagggatagtttccttcttgcttacaatgcataaaataagaaattaccatacttacataattataatatataaaataggaaactagaacaggttgccatatttctctaactcaatctcacaattataaggattctcttcgtgttgggacataataagatcattctgaagtaattatctctttcaagttgctcggcataacaggcttctacctgttcagatgccttctctacagctctgctcgggtaatc

SEQ ID NO: 154266 - DNA, 779 bp, Cannabis sativa
  modified_base (27)..(33): a, c, t, g, unknown or other
aaaatagattacattgaaatggagttnnnnnnngggcataaaacctaacataactttgcttggttgactcgctatcctggagctaagctttttaatttggcggtgtctctttcggatcatactccgttgttcttggatattttgcaacatgttaaactggctgggggcaattcttttcgatttgaaaattattggactcggttcgaggagtgtgaggctgttattagtgagagttggagtcgttcgggtgggactcgaatgcagcagaagctttatcaatgtgggcaggatttaaaagcttgggggagtaacgttgctgggaattttttagcaaggattaagcagtgtaacaatgacctcaaagtgcttaagtgtaggcgtgatagggaggggaaacaactgtatgcggacacctagctttagcttttttaaacagttaaccagaaggagatcttttggcgtcaacgttcgaagaaattgtggctaaaaaatggcgatcaaaacagtaagtttttccattcaaaagcttccgctcgtagtcgtaataatattattgtttgtttgaaagatgccatgggagtgttgaagtattgggattccggtttgggtgaattaatgcttgattatttctcaaacatattctagatcgaaccttgtagttggaagaagttttgaattgtgttactcccaaggttaatgaggagcaaaatgatgttttaatcagacccatcgaagctcaagaattcaaggatgctttgtttcaaatgcatccgaataag

SEQ ID NO: 154267 - DNA, 610 bp, Cannabis sativa
gtgatccaaaggatcacattatccttgatccaaccctattaagtttaaacaatgtttaaacttagatagggtgatcactttagttcccatgtctgcaggattctcttctctaggcaccttgtcaatagttatgtgtccctgtgtcactttgtccctgataaagtgatactttatctctatgtgcttggttctgtcatggaacatagggtttctacatagatgcacacaactctggctatcagagtaaataactggtttcgagtctagtaattttagttcttttagaactcctttaaaccatatgctttccttaatagcttctgtagtagcaatgtactctgattcagttgtagacaatgccacaactggttgtagttgcactttccaactcacataatttccccccattagtaacatgtaggcagatgtagattttctactatctctatccccagcatagtctgcatcactgaagcattctattgttgtttttctttgttgctgtttgtatttaagtcctagcttagttgtcccaattaagtaccttaggagccatttcatagcaagccagtgtgtcttaccaggatttgtcataaatctgctaagtaca

SEQ ID NO: 154268 - DNA, 562 bp, Cannabis sativa
atactttgacaagagaatttttatatttatactttccctaactatttttttcttactattttttatttattaaagcttcaaaaaaactttttttcgtcttcacttttttatatcttttttttagtcattagttgatttttttaagttagttgttgatttgtttttattattctttctttctgtcttttctctctctatttctttttttttttttatatttttttccgattctttctcctttttttcctcaaactaattagaagtattcccttcgggtgcactcttaatggttattacccataaatatgtaatattataaatttttgagtttttataattaattttctatttaattagaaaattttttcatttttacattatatgggctgacattggtccatcagctgaaaaaaatattaaaaaaaacgttttttattggcaaaaaaagtgataaaaagaattgaatttgacttaaatattttttttatatgaacatattttttatatagtgtaaaaagaggtattttttgatattttctttaatgaagtagctaaattaaat

SEQ ID NO: 154269 - DNA, 919 bp, Cannabis sativa
  modified_base (188)..(194): a, c, t, g, unknown or other
  modified_base (506)..(514): a, c, t, g, unknown or other
attatttcgctgcaatcaatgtaagattttcttaaacctttatgtgtttatttcattgttttagagaattcatatttaggatgctaattcaacatacttgtaaggaaatctagatccttgtaaaatattcccaacaatttctaggtttatcccagatgaaagaaattacaaaatttacttgttacaannnnnnnatttgatctattgacaattggactatgattaaaatgaaatcattagatctgtcgacaagttaatcatagcaatttaaattaaataaataatagatttgtttaaaaaaattgaataaacaattaaataaataaataatacttttaacaaatgtgaattgagatatttatcaaatatataattaaattatcatttaaataaccaactaattttgtaaatttaaggttgttgaaacaaccttaaatatctttttcaaaattcaaaattcaaactaatttcaaaatatctgagtttatttgaattattttatcaannnnnnnnnaatatctaataagataaatgatatgaaaataaccaactagatatttttcatattattttctgatcttataatttaataaaattaaaataacaaaataaaccatatttaaaatagatatagttaggcaattattattctaagaataaaataataaacaaatgataattattaaaattatatgtcaaaatatttcagattaagtctttttcaaatttcaacaaaaatatttagataattaaatatttataacattatttataaatttttgataagtaaaatggtataatattgtcataaatatcattattctaacttataattaaaataacaaaatatttcacataataaccaatttattgatttgaaaatattatggttagggtatctataaaaatatctaggtta

SEQ ID NO: 154270 - DNA, 692 bp, Cannabis sativa
  modified_base (420)..(423): a, c, t, g, unknown or other
tgggccttatgggtgcctgatggcaccctagaaaaatgttgcatgttaaaattttttggtctggtctgattggttcgattgggacccgataggggtctgatgtgtgtgtccgattttaggccaaaatatagttttggggttttttatgttcgattggatgggtgtacgatttgtgtccgatggaggtctgatttgggtccatcaattggtttattatttaatttttgggatcggtccgattttgtcttatgctagtatccgcttttgtccgattgttttaatatttattgcgttaaaagattttgggtaactttttggtgaaatttttgttcaaaattgtaattgtattttttttaaatgtatgtgacaagttcaactgttaatacatgtgttatgtataatggtgtttgggagcttgannnnagagattgggtttataaacggggcaaaaatttgacatttgacattgatccgaacctaacctactaaggtttggttgaaattttgtatgaagaactggatgttgacaaagttgagtatgacttgaaattagaagtaaattacaagtacatgaaaggctatgagtatcgccctgaagttattggaattgataagcacgcaaggtactttttatctacacttgcgaagaagccagatgaatttattcctttgtttgtgactttgttaaagaa

SEQ ID NO: 154271 - DNA, 895 bp, Cannabis sativa
aatcagaagaaaactgaccttcgccaacagcttggtccaaagcaagaggatccaatccaattggggataaacgagctggacgacaagttcaggagatgtcaagtgggggaattagggaaatcatctggatacgactctgacaaggagcttgagccgtatcacctagatattatgaataccccttttcctttgggattcaagaacccgcatgtctcgtcctatgacggaaccacagatccagtctcgcatttgaataactttaacacgataatacgagcgagtaacgtgacgagcaatttacaatgtattttgttccccacctaggtttttggggcatcaagtagctggcttaacaagtttacacatcattcaataatttcctgggagcagctgtccagggatttcaagaaggaatttcaagccgctagggatagacgacccgaagcggcctcgctaaccaatataaagcaacagcctgacaaaacacttaaggcgtacttaagtcgctttagcacggctgccgctagggttagaaacttggatgacaacacgcaacttaaaaccctttaggcagggatctctactgatccattaaccgctgggggcgagttgtgggatgatttacaaggacttccggtaagaaacatcactgagttcaacaagagggctcatgtgtttgttcagtatgaagaagcccaaaaggaaatgaatttattgaaaacaagctcaggaggtaaacctagcaatgtttaaacagggactccttccacgagaattgataactggagggcttccgttctgaaaagaaaggatggaattagggaaccgtcgaaggatagaaagaaacaaaagaagcatgaaaaatacgtgctagtgtatactatttataccgagc

SEQ ID NO: 154272 - DNA, 863 bp, Cannabis sativa
acacactcttaagttagatggtaagaagtatgaatatcgtatgcaaagactttagagagaagtctgttataaaaatgagtcaggagaggacgattctatcatatagaaaggagtgtagcgtgctgaatagaatccaaaataagaaattagaaagagacattttcaaaggagaaagacaaagaaggtccaggcacaactagcaatttgggtacaacatgaatgagagagtacaagaggacaactacttggaacaggtcacaattgcacgtctaatacattgtggatacaatgttgtggtcggtggtacaacaaacaactatagagaggagatcacaaatcaaaagaggaagaagagaaattaactttcacgagggacatacttagattctacatacccatcgacacaacaatagaagggtagtgcataacttgaggagaaaatgttaggaaagactccctaatattagagacatgggaaaagtgagacacatataaggccaaaatgacgtatcttgaagaatttcatggcatgataaggactatacgagtttttgagaagtgttgggattagaaaatgctcatgaaacgtaaatggattcaaggcacatcgtaagcaaacaaaactacaatccacccacaattttgctttatggacaatagtataagtatgttggagtgtcatcgtaaggagaaactaagaggaaaattcacagagtccagccctgatgaaaagagatggtgtttctaggccctatagtgctcgagaagaggatgacaatggaatcgtcaaaagctaaaattgttaagagcaaagaatgtggaaaaatattagatgtttttctcaatctaaaaagctagtaaca

SEQ ID NO: 154273 - DNA, 734 bp, Cannabis sativa
  modified_base (132)..(137): a, c, t, g, unknown or other
  modified_base (227)..(247): a, c, t, g, unknown or other
  modified_base (312)..(314): a, c, t, g, unknown or other
ttgtgtttgagttggggtggagttggtggtagttgtggttgtttggatataaataacaggttaacagtgggttttgaagcttcggctggtggtgccatggtgggcatctgtggtggatgatggtggtggtgnnnnnnatatttttgaagaggagtgatggtggtggtgagatagagaaagagatggagttacagtgagggagagagaaaaagaaagaaaagaaaaannnnnnnnnnnnnnnnnnnnnaagaaaaagaaagaaaagaaaaaagaattttttttaatttatttatattttttaattttaaattnnntttattttaatttttttaaataattttttacgtggaccaataaaatggtgccacgtgtatattgtgtccacgtgaactagccaacatgacacttaaccgttaaattttgacagaaagggtaaattgctaacagtttcctggatttgagggtttatccgtaaaaatttgggtttttgaggtttaatgaaaccgaaacgaaagtattaggggttttgccgctttatcctattttttttaattggtatgcttaatgatatgataaatggaaaatatttgaaaagatataatttttattcttgtaaacagaatgactgggtttagcctagggctgtacatatattttcgtaaaccgcctaaatcgaataacccgcctaaaccaaaccgaaaaaactgccaaaaaaaaaaaaccgaaaaaaccga

SEQ ID NO: 154274 - DNA, 896 bp, Cannabis sativa
aaattgaaaaacatataaaaaaaactaataaactaaaaagaacaaaacaaaaacacaaaccaaaagaaaagaagaagaaaacataccttcccatcgaaacctggaggtttctttagaagataaactggttcgaacttgaggttttgcattgcagatttcttcagctcacgaccaacaggatagaaatccttcacagtggcctgaaaaaatgggaagaaataaaacatgttaaaaaaccagttataaataaacaatgaaaaaaaaaggaaaccagttataaaaaaaataaaagtaccgcaggattgttaaaaacctcagattcaagttccgaataacctccaatttttttcttgtatgtactctcccagtttagcaatcaaggatatatattcacaatcctcttgcagtacttaggagaaaggcttggaagtatctcaaacaaccaaataaggaaagcaaattgaaaaccttgaaatttaaaagaataagacttatccttttcatctttggccttctcaatcttataaaagatattgtcgccatccttaaaagctaagttcatgtaatgaaaagttctgtcccacaataatttcccaaatgctatattccacaagtctgacagctccccatcgacgaacccaaacaattcattgtcaactttcttcccattctcatatccatacaaataatgacttaacagaattacaatccccatcttcacagcatcaacatcatcctcaaaatccccggactaaaaccttcccctaacctcctcttgaataactttaatagtcaagtgaggaaacatcttcttcttgaacgacatcttctgcttaacccagtaattaaaacgaactcctccaaaccaaaccgtacaactctatcccgaatcagaa

SEQ ID NO: 154275 - DNA, 651 bp, Cannabis sativa
ccacttgagtagccaattgttccatctgagtttatagagttttaatagaagctctagtctccatcatgaattggagcaataagtcagcttggatatttaagtttccactaggattttgttgttgcagttgttgttggttttgttggggctgatttctctgctggtagaacccctgttggttgtgcccataattattgttttgagaatagtttccaatggcttttgcttgatccattggtaaactgttcacatccaccgagcattcctcataggtatgaggacccccacagagctcacaagcaacttgagcctgtttcacctgagcagtcatcaacttcgtcagggcctccacttgggttgtcaacttggtgatggcgtctacctcgtgcataccagcaaccttctttgtttgacttcttttagttggccattgttggttattcatagccatttctttgagcagatcatacgcctcgtttgcactttttctcataaatgccccaccagctacgacatctatgatcgttctcgtattacctatcaacccattataaaaattgtgaaccaacatccagttttcaataccatgatgtagacattttctgatgagatccttgaacctctcctaagcctcatagagagattcattgt

SEQ ID NO: 154276 - DNA, 649 bp, Cannabis sativa
  modified_base (602)..(603): a, c, t, g, unknown or other
ggtactgaaatggacgaaaattgagaaaataaagtgttcgggaatcctaccaaaactagctagccggtttgcaccagttctccccaagcccttcacctcttgctcaattttccaccaaatgctaccaaactttccagagtacctaaacaatgcatacacaatattttccaaccagtatatcacagaaaaacctaatgaatagtttatgccattagtgttcaaagctttgaactcgaagcttaaatgtgcacaaaactaaaaccaaacatcaaatccagctgctcaatgctatatttaactcaaatgaacctagaaaatcaaaccttaaacaaacctaaccctaacaacccctatttcacaaaattgatacattcaacctaaagaaaaagcttcaaaaagatgcttaagaattttagggttttacctttgcttgaatcctcctccaacctttgctgaaaataccaatttcagcaacaaatcccccttggtttgctttagtcgaaagagagaaagatggaaagagatcgttttcttgaatttttgacatttttccttgttcctctattttcttcaaatgaaaagagataatccccaattaattnnttgctgaataaaatggacaggtgtccacaccctaggcagccaccaa

SEQ ID NO: 154277 - DNA, 711 bp, Cannabis sativa
tgattgacatgtttaaacaaaatatacttataaacgggttacacgggtcgtgtcgtgtcaacccgtttataaacgggtcgtgttcgggtttattttttttgacacgattattaaacgggtcgtgttcgggtcgagcatgtacctgttatacatgggtctcgatacgatacgaacacgacccgcgaacacgaattgccacccctagtttgatgcaaccttcaaccaaccaccctacaaccatcatctgattgaaactttcgtctgatgcaacgacgcagcaaccacgcagcaactaccctgcaaccatgatctgattgtgtaagtaatagtgtaagaggtattttggtaattaaaatcacataaaaagtataaatattatccacaccttatgaaagtatttttgtaaataaagtattaatttatattttcaatgtaataatttattaccgaaggaaaacatttttgaataaaaagttgttcaattaatctttcgaatttgcttcattgttatttacatgcagaggaaagaaaagattctgacctacattaactattgtataagaccttgattgcctaagcaccgaagctatcagtaaaactttcagtcatttgtcttctattaatggcttgtaaatttatggatgagattttttatcaccattatactaatcagaagtttctataagggaaatttgacattttatgcttaaa

SEQ ID NO: 154278 - DNA, 593 bp, Cannabis sativa
  modified_base (438)..(452): a, c, t, g, unknown or other
ccaaacgagcagttttgatgaaagcacttcagcaaacttgaagcaaaaaacctctcttttcgctctgaacttacttagcaaggaaggttggtgaacatgagtttttggacaaatgctcactagtatttataggcaaacaacgaaaaggggtaatcatttcaaaagaaactcaaatgcctcggttccccctaaaagcgaatatgggaaatcaaaagtaatcaagtatagccgtcaaccgtggtgagagaaaatcagattttgaaatattaattgtcagagcatttatttgccgaaaaccgaagggatgcccagtcagcctcacatcgagtcgcgaacaggcgggcctgacacgtgtcacccattcaaatgcaaagacacctcggatgaagtctacacgcaacttcgaaagtccggtacagacttggggggcaaatgttnnnnnnnnnnnnnnnctctgacgtggcatcgcatgatggtgagacatggaatcaactccgagtatccgctcgcaagatatagtccgaacaggatacctcatatgcatgctcgaggcaaagcaatcagcaatccacacagaatgaccaacacttagc

SEQ ID NO: 154279 - DNA, 516 bp, Cannabis sativa
ttttttttttttttaatttaagggctttttgttttttgttttttaaaaaatacatatgtatatataatttacataattagtgattagtttaaaattgtagagataattaggacttatttttttttatttatttatttaagataagaatgtaatattttagtgtattactcaaaaaaaaatataacataatattattttttattctttgctctataaggaggtaataaagttttcttctagatacaaataaaaataaaaatgcattacctaaaaaaaataagataaatattatatattatatatattttttaaaaggagaaaatattatatttagtacaatatttttataaattactctaatgtatagtgtacagtaatgttattaagtactaactaataaaaaaataatcatgataataataaataaatcatatatttcaaaaaaaaaaataataattattgagaatattataacttaaaaatttaatgacaacattataatttaaataaaaagta

SEQ ID NO: 154280 - DNA, 676 bp, Cannabis sativa
ttgcatgtgtaggtaagggcaaggttaaagttgagcagccgtgagagcgagcagatgaagattgtatatgtcggggcggttactcctagaaggtacgatctttgggatagctggtcatattttgtatagtcgctaggtgataacttttatatcaaatacctgaaacagttgtaaatgttttgtacacgggatcccgattatatatatgttattaattttagtatttataagtatttaaatagatttttaattattcacgattttcaataatctcgttgattagcaacgagttgcacaattaagttaaaattacgaaaacacgcataaactagtagagtgttacataaataatacagttaagcttgagccgaaccatcttaggagtaagatctatctatctaagatcaactaagtgatattaacttagaaagatattacagatattacgctaggtttattatatcttatccaagtttaatatcggtccagtctgatgtatactccatacatccgatactagtatactttaccaataccctagaaaggacataccacatatccaaggtgtaagtaaatttatcgctgattatcacgtcagtgtaaatctaatgcactaataaatcatgggactatactttgaagcatataatcgcaattactttctactgtgatgaca

SEQ ID NO: 154281 - DNA, 891 bp, Cannabis sativa
attattctattagtattaaactagtttataaaatcacacacgtgtcatccctatagaatagggccttacaactgcataacatgttatattgcaatacaattaatattattgagaattgattgttattgggattaaaatttggttattattgttatgcaatgaaaagattgcctgattaaacaatgacaatgtgatgatacatgaatgtgatattaatcatcaccatattaggtaatgtgatatacctggcggcgtaccttattcggtacgacgacagtgatatgtggtaccaagctatggtataggctcgtcttattaggcgatacgatatattggtgtcagattttggcacgggctcaccttattagttgatgcgacatatctagaggcataccctattaagtacgggcgacaatgatatgtggtaccaagctttggtacaggctcgtcttattaggcgatgcgatatattggtaccaggttttggcacttgctcaccttattaagtgatacaattatgtgatatataagtgccaggctatggcacgggcttgcctgattaggcaatgcaatacatgattatcaaattaaagcatcgacttgcctaattagccaatgtgacgtaatcaagatggttactttatgaggtaacatatatatatataaatttctattattatatagatataatttttattattggtataatagtttgtattaccaaatatctgtatactgatgtttattcgtgacagatgccagtagtgatttagatttcatcttatgagcattgcgtgatcgtttaattttgattgtctgagtataaatgataatatttgaataataaactatatgattattgttattacttttcttgttgagtcattgtga

SEQ ID NO: 154282 - DNA, 656 bp, Cannabis sativa
agcataatattttgccttatagagcctactaaccaaagagtcatcattaaccaacaatcgccaatattgtttccctagaagagccaaattaaagtctctcaagcttcagaaacccagtcctccggcatgtttatgacgacacaaccgctcccaactcatccaattaatacctttaccactgctcgaatttgaatgccaccaaaacttagccataagtcgctctaactccttacaagtgtttaaaggcaagagaaatacattcatagcataattcggcaatgcttgagcagtagatttcagcaatacctcctttcccgcacgagacaaaatatgcccttcccaaccttgaattatcttccaaagcttatccttaagaatgtcaaggatagcattctaattcctcccaatcgaacaaggagggcccaggtaatagccattttcatctgcctcataaatttccaacatagcacagatagaatctcgcacctcactaccagtattattgctataaaacacaaaatacttagtgaaattaattctttgacccgaagccgcctcttaagtactgaacaactccttcacattatacgcttcctcctaagtggccttacaataaatatagctatcatctgcaaaagagcatatgagagattacc

SEQ ID NO: 154283 - DNA, 500 bp, Cannabis sativa
  modified_base (431)..(436): a, c, t, g, unknown or other
tacttgagaaggtcgggcaggtagcgtatcggctagcattaccaccagaattgttggttgttcatgatgtattccatatttctatgttgaggaaatatgtttcagactcgactcatatcttgagttatgaagcccttgaactgcaatcagatcgatcctatgaagagcaacctgttcagatccttgataggaaggaaaaggttcttcgaaacaagaccattgccttggtcaacgtactttggaggaacagtaaggtggaggaagccacctgggatttggagtctgacatgaggactcaacatccaaagcgattcaggttagatttcgaggacaacatccttttaacaggggaataattgtaatgaccgctttagtattttggattagtaaaaccatttagcactaatttctgatatttttataattatttnnnnnnttaattatttgtgggccccattgttggaaatgggcaatagagttataatttctcaattctggag

SEQ ID NO: 154284 - DNA, 505 bp, Cannabis sativa
ccctgtgcacagatgtccactcttcttacctcagttgttaagaacaccttcttgctactccaagcacctcaataaatttccttgttgagaacaagatcctaagcattcattaacacaagaatacactcaaaatacattcaagtatgaatctttgtactcatacgaaaacttacgtaaaaatacgtaacacataaatcaatttcacttgcatgacacaccaaacacaatcatttatcactataatttacactaacacattgcatgtaccaatatgaatatttttaacgtaaaacatgaactcatacaaatacatttttacgtaaaatttcactaaaaaataccttttattaacaaatataccaatatgtaattatttatcgaaatcagaagctatcatatttcttaacaatttatacagatcataaaacatattcaatatgcttagaaatatgtgtgaaatactatccatgagtatgtataaatttattgttaaaaatgaataaaa

SEQ ID NO: 154285 - DNA, 590 bp, Cannabis sativa
tttttttgcctacttaatgtatggttttgagaaaaaaacaataagtttagaatttgatttgatttttttttaaaattcaaattgagagagtttctctattctatcaattacataactaaaattcaactttatttaattcaccttaaatttttactctacactatatattaaatttttatttttttatttaaatattatattttaaatttacataagaatttaagtacaacaaaataaacaacataaatatttttactgccaaaaaatttaagtactatagaataaactgcataaatatttagaggagtgctaattacaacctcttattacaatttttagtcaacttctacgtctgaaatcatatgccggaatattttctttcaattttttttttatgatgatattcattataattacagtattatattatctttgtaatctttgtaaattttgtaaattttttaaaattttttaaaaaaattctgaatagtttacaatgccgaaaacagagtacttaatatttcaactaatcacgcgcatttgaaaattttcaaacgcattttcggcactgtaaactattcgaaaatgtt

SEQ ID NO: 154286 - DNA, 545 bp, Cannabis sativa
  modified_base (497)..(497): a, c, t, g, unknown or other
cgggatttatgtgaagaaagaaaaatttacacaaattataaaaatacatcgaaaaatattttatttttactctttaaacttttttatttacaaaaatatatttttaattaaagtaattaagtattttttaattattttatagtttatttattattgtattatagtaatcatcagatatttttattataattttatagataatttataattgtcgtgggatttattttccgttttttttttttaactttttgatgaacaaagtatatttttataattataaaactttacaagagtatttttataattaaaaattttaagccttaaaattataaataaaacataaaaaataatattattaaaaattctcctttttttagccccgctcctttttaaaacaaaatattaaagttcgtgcctattttgtttccagaaaagtttctcctatttcattaatactagatagatgttacgtgtcaagtcacgtatgttaattttantttagtttttagttttttttaatatcataattttaaaattaataatat

SEQ ID NO: 154287 - DNA, 592 bp, Cannabis sativa
aggtgtggcttggaactgtagagggttagggcagacctctacagttctggaattaaaagccctgattcggtcgtgcgatcctgatttcatcttcatttccaaattaaaagtggaagctataagtttggtacgtactcttaaatatctccatttttatcataatattgtttttccggatgtggggctagcagggggtattattttggcttggaaagaggggtttatgtttgaaactattatgatctcgaaacttcagatctcttgtcttgtttattcggaccctcctacgaatccttgcttactgtcttatgtctacgggcccccttattaccatgaaaagaggctcttttggtctaacttgatggagtttggtcgtagttcaatctcttgccacctgcaattctgatcataggcctctcttcattaagtctgctttccaggaatccataagcagacgtccttttcgtttcaaggcctggtggaccagggacccccgtagctctctaattgtgaaacatgtgtggggatctgtttctcatgattgggccccggccagagtttataagagagtgggggcatcgcgccttgcttt

SEQ ID NO: 154288 - DNA, 743 bp, Cannabis sativa
aaaaaaaaaaagaagaagataaaattggctaaaaatactccctaagtggccatacaatgggccccactagttacaattttgtcattttattcaataatttatcttttctttcactaatgccatattttttaattttagtcatttaaatgtcaaaactatttgtttaataattaaattgtcaaataaaatttgcattaaactatttattaattagaccttacaaagtcttttcattaaaaaataaatcataaaagctcttttcttcacaatttagcccttgcttagtaaaaatctatatatatatatatttatataaaggaaaagcatgaggcggtgacatggcattctaaaatcactctaaaattatttttctcttctcttcttaattctctcaattttaatattttattaaaacataaatctacaaattgatattatactattattttaataatttttctataaaaaaccattgatctacaaattgatattttactattattttaataatttttttattaaaaaacataaatttacaaatcgatattttactattatttttaattttctattaaaaaatataaaatatttttaaaaagaaaataaaaaatagattccaaaaaaaataataaaacttaaatcaaatataattaatcgtaaatttcgtttatatacatacataaaatatcaatcaatacatataaatctatatctatatgtctatatatatagtagagacataa

SEQ ID NO: 154289 - DNA, 637 bp, Cannabis sativa
aatggggaaacacccaaccaaggcaccgcaaagacggaaattgagaaaatgaaaggcccggggaaccctgccaaaaccagctagttagtttttgaggctctgcaaaccggctagctggtttgcaccagagttcccaaaacccttcattcattgctcaattctcccccaaatgcaatgaaaccttccagagtacctaataagggtatacacaatatattccaaccagaaaatcacagaacaaaccattgaaactcaacttgccattaaaggctaaagcttgagtttcaaaactcaagcttgcttaaaactaattccatgcaccaaaatcagctactagaacctctgatcaacctatattgagcataaaaatcgaaccctaaacatttctaaacctaacagccaccaaaaccaagaatcacatactcaaccactcataaaattcaagaaataaagagggatgctactagggcttaccttagcttcaaaaaccctttaatctctactgaatttccaaaaaaagaagcaaagaattagctggtttctccttggtttggtgtagctcgatgggaaagagagaaagagaaggagtttctcttgaattttggtgttttctctctaattaactaaatggggtaaa

SEQ ID NO: 154290 - DNA, 502 bp, Cannabis sativa
aaattttcgagaatagtcacaatcaggtccaagcccctaaagcgaagaagaaaaattcatcactattcaaagaaacagacactgtaggggtcttactccgtaacacaagtatttttgaagattcacaagatccatacatggaccaagaaattaaccagaatccctatctctttcagtacaatggactagaatgggagattgtttattctgattatgatgcgtgtccaccagctgaaagtgatgaagaggatgaaccatcaggttggcacccacttcaagaggaccccaattatgactcagactacaatgctgatcacgagccaattatcgactgctaataagaagaataaagagattccatatctcttatttgtgtaagatagcaataagtgaaaatatttctgatagtcataatgtttataggaatttttcctaatcgtttgtttgtcggtttggcgttttctatgtttgtcagtttgtccatttgttgtcagactgtcct

SEQ ID NO: 154291 - DNA, 1026 bp, Cannabis sativa
aaaataatttccaacaaaaagttactaacgaagtacatgttgccctaagaacagtaggagaccatccacattgattacctcgggatgcatcttcttcaacttctcgaggggttgcattttggagataatgcacccgagccacataatcttaactttcctcgtcacctaggactagaaccttctcccacgatgtatacttgggaaatgtgtaatcacaagtatactcgtttgcagtgagaaggccaacagacttgagattggcttcgctcagaagaaactcagtcgatcgcagttcgaacagaagacccagcaaaagtttacgctgctcggctatctcaggagttggagttggtctttttgagactgctattaatagaattaatgagataagtcagcgaggccaagattataaacatggagtaattcaaaaccaagtgtaagataaatatttacttacgtattatgcaaaaagtggttgtgttgattagggaaatgccagttgtccagaaaaaatcctccttaaaagcaatcttgtttggtaacctcacaatgatcctacgatcatttgtgtgagtcccaagatagtagaaaccccctgcacaacatttcctcgcaggaactgtcttaacaaaataaaggtaaacaatttcctcgggagtgggacactcccatcctaaaatcttatacagaacctttaaacttgcaaggattctgtaggaaattgaaagcaattggaatggagctattccaagataattgatgaactctttaaagtactctctcaaggggagaattgctccagccctaatatgctcgaggctccaagcgcctatcccagccaagctactagtactagcttcgtcactggtttcaccactggccccctgcattcctcgcgggtaagtcgctctggtggataacaactaaattcaccaggtgcaagggatctaacacgacactctcacttttggtcaatgccacaagtccttaaaacaccaccaacatagtcccctatggcccttattc

SEQ ID NO: 154292 - DNA, 617 bp, Cannabis sativa
gtatttatatcacaaattactctttagattatatttttcttgtaaataataatgaaatatatatttgatctcttatattttgaaatatatttttattatatgtattaaattttaaattattattttttacattaaaatagtaattgtatatataatttatttttaaatatttttttataaatatgtatggatttgattggattagttacttttatatatcaatcaatatctaatctgcactttgtgaattagattgaattaaatgccgcagattaaattagattgggtattttgtgaacacccctacaattaatatccttttgtctattttttctttttaatttgtaacagttcctctatataaagtaaattatttttattataccccactttcttactcatttgttgtcttttagaagaagtgatcaatgtaactattaaatagattttttttatttcattatttttttcttggagaaagtattcaacattacatattatatattattacattttttttcaaatagattcaattatttgtaaaaattattaattagatctttttttttgttaaataataaatttaattttatatttttttttaaaataatactaaa

SEQ ID NO: 154293 - DNA, 504 bp, Cannabis sativa
  modified_base (99)..(104): a, c, t, g, unknown or other
aagtgatagtttaagaggtatttttgtaattaaaattacataaaagatataaatgttgtccataccttatggatgtatttttgtaaataaaatatcaannnnnnttttctatgtaataattcctatatatattagaaataaatcttttctatttaagtttattctttgtaaagttatcacactattatttaggaaagttaaaatggggtttaattccccatctttattctctgatttttttcttattaggaattcttgtaaagcttatgtatacacggcttgtgtattgtaaatatattagaaaaatatatttctcaattttgattaaactttttttttttgaataatgattaaatttcactaaactaaatcatccaaaatcaaggatgcaattacaaaaggcagggagttcatactaaaaatacggtcagcctcagaaagagaagatcgcgccaaggcatgcgcaaccttattagcagaccgcttagcaaaattaaaaaaaaa

SEQ ID NO: 154294 - DNA, 603 bp, Cannabis sativa
atggaaatgatttactttcatgaaatatgaattaaaacaatgttatgtgttgatttggatggcttcatgtgatttatgtgttatttgatgaatgtatgggttgtacagaaccttttttatatgattttttttttaaatattttatttggattccttgtgaaaaattaagtaatttttgttttttacggaacttaattccgataaaaaacaaagaagttgtgaattttggaaaattgggtttcatagctgtcgaagcttggtgcacgcctgcaccaggagcttcggacaaggcacacgcatgggcttcagacaagccgtgtcttcagacacgatcagcccaagcccagacgctgcatccgcctgcatgacaccctgcatccgccgaggattctcgcccagcaccccctgtccgagcgcgtataggccaatttgcagcctccgaaggctccacgtccagcctcctaggcagcattcacctcaaacccggatttctagggattttttccaaaaatttgaattttccaattttaaaaatctaatcttaaaataaaatattattttttaaatatatttgaacttaaatatcatttttttaaattaata

SEQ ID NO: 154295 - DNA, 511 bp, Cannabis sativa
  modified_base (299)..(306): a, c, t, g, unknown or other
tccaaatcagacctagacccgaattgggagccggacctagatccccacccaaacttggactcaggtgccgaacgcgaacttgaactcagacccaaacatggaaccaaactagggacatagaaccagggttgggacgtagaaccgcaccacagtcgcgatcccgaacccaaactcagaaataggactggggacctgaaacagaaccagtctgagacccgtgaccatgatccagatcttgactcgggattcgagtaacggggcctcgaacataccagtactcggtgtctagatctgggacnnnnnnnnggaccagaacccagacgaagaaccaaacctgaacctagacctagacctgaacacagactggaactgagaccctgatctggaggtagacttaaatccagacccaaacccaaactcagaccatgacacgaactccgatgcgaactcaaaccgaaactcaaactcagaatcgcaaatggaactaaactgaactaggacttggaccagg

SEQ ID NO: 154296 - DNA, 596 bp, Cannabis sativa
acaaatcttttgtgtcaagtgattaaattttttgcaattatttttatattctgcctgttctggtttgtctctgtaaaattggtttctgccgtaacagaattacattagactgttgcagacgtatacagttttatatttagtatatttttgtaattattattggtatttgcaaaaaatcggtttttcatttggtatcaaagcgtgacactaaactcttagtgtggtccttttaacagtttcgtgtatttttgtgtaaaatgtcattttttgcagaatgaagttcaatttctagaccacatttgctcaatgattctagctatccttattggaaagttagaatgagggccttcatcaaatctcaagatgagagagcttggaggatgattctatcaagttggtcttctccagttgagacagattccgaaggtaactctaaaataaaatatgaactggaatggtctattgaagatgataaactttcttcttacaatagcaaagctttacatactatatttaatggagtaggtgaaggttatattaagcttatatcatcttgtgaatctgctaaggaagcttggcagattcttcaaactcag

SEQ ID NO: 154297 - DNA, 562 bp, Cannabis sativa
cgccaaaaactcagaataatatttatttaaaaaaaattgggattattttcgaaaatacacaaaaacaacaaaaaaaattacaaaaatatgatatacgaaattttaaatattttttacagttttaaagattttatttacagaaaatacggatttttgatgttttcatgttatttttatgtcgtactcttgttgttttgttgttagatttttgttatttgtatattacttttacgttattttgattttttcatgttactttcatgtgatttttttgttgtttttatacaataccgtagaaatataaaataataataataattgaatgtaaaaatataaaatcttttaccaaaaataatattttgtgtaaatttcccatttgttattcatacataacattcttgcaatcatttttagctaaaattattcttaattacatgctattcctatttgttaatatattaattcacttttaaaaatagttaaatgagttaataatatttaaaataaaaataaataaaatttttattatttgaagaaacattttttatcaaataatttattt

SEQ ID NO: 154298 - DNA, 570 bp, Cannabis sativa
aaaacaaaagtgttaccaaacgactttgtaagtttagtttttttagcttttttttttgtttttgtcttatttatattgtcgataattaattatatttattagtacttttttaataaatttatttagatttttttttttttgacattaggggaggaacgattcaaacttgggacctcctctttttcaagacaagtctagaaccactaggctacggttatgaccacataaatttatttagtttatttttattttacgatatacatatatatgacgtattattctttattattaaatgttaaattaaatatattaatttttacttaaaagaattaagtaatttaaatagttagataattacatattaattttctttttcaaaattataagtaattttatatagtaaattttatatgggagcttgtataataatattcgagtataataatatttttttctaaatattttatgtttattttttatattttttatttaaatgtaaaaaagaaataaaagaaatttttatgtacaaaattaaattttggattttatttttacttttctgcatgtata

SEQ ID NO: 154299 - DNA, 704 bp, Cannabis sativa
agtgggtaaaaagtatcaagaatggtagacaagatacgacagagtatgcatgccgctctaacggatgcagaatgatgaggatttaacaatgataaaaggtgaccgtatgttcttaaaggtcacttcaatatagatctattatgtacctcaaaaggaaggacaagtaaggcatgagatatatagatccaccttcaatagcgaatatgcataacaaattttacattttaatgtgaaaaagtatgagaatttgaaactacatcaggatatgggttgtacgacacgtcagtatgcgtgataggaaaaaggagaaacaaaaaaaataagagtttacccttagataaagttttgtagagtgaaaattctaatagaaaagctgtgaaagggtaaggatataaggagatgatagcccgagttttgctgggttgaagttaattttgaggacaaaattcctttaaagagggtagattgtaataataataaaaaattgttattattatttaactatgttacttattattattattatttatttattttttttagctaactcgatgtggagatagtagattccttagaatatttcattttctcattaaatagtatttttctatgttatgagaattatgacattttgataaattagacttttataaattattatgagatttagacttagtccattaggtgtgggacttatagaatta

SEQ ID NO: 154300 - DNA, 1059 bp, Cannabis sativa
  modified_base (462)..(462): a, c, t, g, unknown or other
gatctatgtgtttattgatgattgtttgatgtttgaaaattgtttacgtaaaataattagaattttattctggaattatttttttgaatagtgtggaaaaaattaagcaattcttctttttacagaacttaatttcgattttatttaaattagtcatgattttttgaaaaatcaaaaatatcttaggggtggtgacaccccatgcacgcgcggacaccacgtgacacacgggtgtcacgcgcattcagacacgtacggacaggctgtacccagcctccttggccgaggtttctcggctagtcccctatgcgcgcgcggatggtatgcactacataccatccataccaaatgcatttttttttttcatttttttcaattttttcatgctttttcaaaggtagatatttaggtttgttgaaaagctaattttttaaatttataggtttaattttaaaattaatnatttaatttaattttataattttcaaaaaaaataatttattatttagattttttcgaaaatattttaattatttaattaatttaaattaaataagtcctatatctatctatccaacttgttacatgtatgtgtgttttatatattctttattatcaaaacttgttttataatacttattattgtttgatctaaattgctatggttaacttgttgatagattcaatgatctgattttaaccaatagttcaaataaataatttgtaacaggtaaattttgcaatattctttcatctgtgtataaacctagtaacataatacgatccatccaaattagtgtgcatgtgtgagcctatatgtttgcttcgggcttagatgcatataggagcccatttaatttttgtaattcaaatggactaggttgctaaaaaaatgatcactattgatagaatttatttaggcccaatttgtgttgggcctattcaattaataacagttcttcatttaaggttaaatccctctccttttggccttgtgtgagagttaggggccattagtagtgggtacgacatactgaactcagccctccctcacatgaa

SEQ ID NO: 154301 - DNA, 539 bp, Cannabis sativa
aataactccctcatctgacggttgtcgtacatcacggaatgcattctgtgaaagtacaatcatgggacaaaatcatattcctatatatataatatataactctattaaaaaagaaaatgttatttttgggctttcttaaagtaaatgacaaaaatgtcattgattttcttaattaattacttttaaatctttctattttttgagagagaattaaatccttctatttaatgggatgagaattatagtttctttaaatatgttttgtttacacaaagagaagattatagggctaatgatgatatttttatcattatctattagtaatattgtttttaataatatcattttgtaatatgtatatttcacatttgataatacgaacctatatatatatatctatttgaagaaaaaaaaaaattaaaaaatgaaatgaaacataatgtacatcttaatttatagagttactacattttttattattattttataagatttaaaaaatttaattttaataggtttgtattatttaatttgaattt

SEQ ID NO: 154302 - DNA, 537 bp, Cannabis sativa
ataatggcaaatgaagttcaagtacaagtacactaaattggcaagttatcgtctcaaatattttagaggctctattctaattttaaaaagtaggtccctaacaaaaaaaattataatttgcaaataatacttttaaatattatcatattacgaaatatattttgcataattaagcacccaaaaattttaacaattttattaaaattgttgttatttctaatgcaacttcaagctaatatcaaatattatggaaaaaaattaaaagacattaaataaggaaaaaccttttattttttatttgagataacaaatcagtagaagattgaatttaaaaaaaaaaaaaaaaaaaaaatcctataaatttatattgggccttttttaatttatgggccatgtgcattagcacttcttgcaaaggtaggaatccaattttgggtttcaaagtttaagttgaaaaataccaattttattaattaattaatcaaagttacctttaattttatatttaattgaaacatacctctttttatatgtatt

SEQ ID NO: 154303 - DNA, 516 bp, Cannabis sativa
  modified_base (134)..(153): a, c, t, g, unknown or other
agtgtaaaaatgaaaagccccttattattattataattattaggctaattagcaatttttccacctaaattttgatatgtactaaatcatgctccctgaaacaatctcttaaacagtaaaattgaatgaaattnnnnnnnnnnnnnnnnnnnnaacaatctcaatagttcaggggaatttttaataaccaaaaaagttgagggggcatgatttgatatatgtcaaagttcgggggaaaatcgataattagcgttattattattattattattattattattttgcttaatctcttatttttggtaacacttttgatttaaattttttatgacaaaaataaaaataaaatttttgtttttaaaattttatttttaaaaaacaaaaaacaaggtgcgtttgtaaattttatttttagtctcatttgttgaattatttaagggttttttttttcagttttaaccaaaaaaagtaacaatattataaaaatactttcagctggccaaataaacaaatata

SEQ ID NO: 154304 - DNA, 574 bp, Cannabis sativa
ttttttttaattttttaatttttccaataattttataattttaatttttttttttgttttaaaataatttttgaatttattttaggaaaattactatgtataccattttttaactttttttttcttttaaatttacggttttaattgctccggtaatttctatgtgggttgttatgtggattttagttgcaatttaagttgctcccttggttgctatgtgaatttttgtaaaaatacaaaaaaaattattttgaagtataaaaatgaaaagacttttttattttaataatttttaaataataatattaaatgtaacaatataaacgtgtcgcgtgcacgctatttaaatttgtgaacaatttagtagtttcgagcgttttataccaaaatttaagcttgcttagaaggttattaaatgcaagtgaaataatagttgagacttgagaggatttagctggtcaaaactaaaaaaaattaggaaaattactctatatactttttttttttttaatttaccgtttaagtttctatgtggattgttatatgaattttggaaaaaaaaaattaatttaaa

SEQ ID NO: 154305 - DNA, 915 bp, Cannabis sativa
ataagggtgagctactaaactcagtaagaaaatgtttgtcacgtagtcgcataaaataaaaaaaaaaaaaaacatataattaaaacttagatgcacatatttagacaaatagcaatacatataagcttaatcttgtcactagtaactaatcactagtttctaagctaagtcacataataatggttacgcccgaaataaattcgaactattagactaaatggcggagggcgtggttcagtaaaatcgtacacacgactagatggcccctatctaccatatagacccaacagtcaagtatttaaccattatcttctcggtcaaaccatgtcacataatctacaattaatctaatttaataatgtttaactactatacattatttaaatagcatatcataaatcatatcataattatgtcataatcatattataatcatatcataaccatatcataactacataataatcatatcataactatatcataatcatatcatattcatatcatattcatatcataatcatatcataattataccataatcatatcattgtttacataatgcgaattcattgtaccgtccattatccaaacaacataactagtttaaataatgtgaatctattgtaccgtctattatccaaacaacataattagtttaaataatatgaatctattgtaccgaccattattcaaactaattatacatatttatagtttaaataatgtgaatctattgtacagttcattattcaaaccacatacacatatctattacttaaataatgtgaacctattgtatcgtctattatttaaacaacataatataataatgaacaaataaaaataggatagaagtcttatacctcactcccactccttttgaacatcatttcatacaaaaaacttaaaagt

SEQ ID NO: 154306 - DNA, 877 bp, Cannabis sativa
tatatatgcatgctgtgtttgtgattgtatatgttttgggtgatatcatagcggcacaaccattgtgtcgattcggtagtacatgcactgtactggttaagagtgatattcaccccagaaagttttaattggcgctatcatagcggcacaaccattgtgtcggttcagcaatatgggcatagtactggttaaaagtgatattatggccaattgtactttcaggtgctattgatgctatcatagcgatacgaacatagtgccggtctcgcagtgtgatcgtaatgctggtagtgagtgatatcatggtcagtagcaccaaccattaagaatgttcttaatcatctagtaagccttgtggataggtgtatgggcgcctagccacaggtcgataatatatatttgttacatgcttttcttattgagtcttttggctcacaaattctactttcatgtgtaggtaagatattggtggaagctgaatagaagtaagatccgagctcaggtgatgattgtacatgtcgagacggcgcgacctggagtattcggtcttgggacatcttgggctatacctagtagtcattgtataacaagttgtaaaagtattttaagaatgtttatataagtttaaacacggattccaattatgtaatatatgtttatgaagtttaataattttaattaaagttttaatttggcacgattttcataaaaaattctttgattagcaaatgagacacgttaattagaaaatcactgtagccagcctaagtgttagggcattacaaaagatgacctaaaagatctcaaggatgaccccgaagatgaagatccttaggacgaagatcatgaaggtgttggaaaagaaaaagaagatgag

SEQ ID NO: 154307 - DNA, 553 bp, Cannabis sativa
tctatttctcgttgtggcggtaatcttggcaactcttcgggaaatacacccaaaaaatctttaacaaccttgactacctcagtcccaaatattttgggtctactggagtcaatcacgactgctaaaaatcatacacatccactgtgtagtagatccctagctcttaatacagtaataaccgtgatctgaaacccctgaaccgatccaacataaacaaatgtggatcttcgtcttctggcagaaaaaagttaccattttctgcttgcaatctatagtggccgaatacttggatagaaaatccatcccaagtatactgtcaaactctgttaattccagctctataaggtcagcactcaactccctatcttcgatcctaactgggatagacctaatgcgcctattggagataaccaactctccgctaggcattagggttccaaactagctttcaattaaatcacatggcctacccaagagatcgattacccatgtagccacatatgagtgtgtagctcccgaatcaaataacacagtataaaaagagttgttgaca

SEQ ID NO: 154308 - DNA, 583 bp, Cannabis sativa
aaatgtgaccgaagcaattggggtccaagaggctttgagttggatcaaagatcattcgtgcctcagtgtggttttagaaatggattatctttaggttgtacaagctatccgtagctctgtggttatgctttccttgtttggcaaagttgttagtgattgcaagaatttattaagtattttgcgtaatgtttctttttattttgtaaaacgatcagcaaatgtaacggttcattcctttgcaagggccactatatctcaccctgatcgccttttcaatttggacactgttccggttgagctattaccgagcttagtaacggaatcattcgtttaataaatgatgactttcactttcaaaaaaaataataatattttttttactaaagtcatatttacttatttattatatattaaaaaaaataaaaatatttaaaataaattaattataataaaataaataattattgaattatattttattgtaatattaacaaacatcaacctaaaatttttcttgtatacttgaatttttaatttttttttatatttgataaaatataatataaaaatactataaattatt

SEQ ID NO: 154309 - DNA, 725 bp, Cannabis sativa
tgatttgaatgagtacacttgtttatatatattttggacacattcttagccaatgtcttcaatcttcttgtgttgcacctccatcactagcttgtatgggagcatccttgcttatatatttcaatttttctctgtttttcattaatttcagatctattttgaaatggaaaattcagactaaagttctgtttgttttatcagcttgttcagtgctaaagctacccttatgaagattgagaattaggatcctaaagttgaaagtaattcttcatgtagaatcaaaactaatataaatgaatataagagagaatggataacattatttttgcaagtgaatataattctgcagtcagactgaggttgcccgtgtgtgccaagaattgcaaaatacttaatgtataaaagaacttgtgaataattggtcaatgtccaaaagaaggtgagaaaagaaagcttgttgatgaactcttttctaatgataagaggtacatgagatacactatggatgaaatagaaatagcaacagattttttcttagaggctaatgtgattggaagaggctatggaaaagtctacaagtgcagtctggatcacatcccaatagctattaagtttcttcaaaatggtaaagatgacaagaaacatgaatttttgaaagaggtattacttttcaagtcattataacatttctatctataaatttattccatttcacgttttgtttg

SEQ ID NO: 154310 - DNA, 538 bp, Cannabis sativa
agtacattacattaacacatattattaattattatattttatattttttgaaatagcactaaataatattttgaattaattttttactaaaataaaatttaataataaatcgatttagaaatattattataaatttggttatatatatatttttttttcatctgttcgtgttaatttttttttttaagttagttatattaaaaaaaaaaattgagctcgtggttctattttaaaaaatacagcgtttattttataattcaataaaataaagagttctaataggtaatttttataaaaaatataatccaaaatagtactaaccatttttctagggcgttgtaataagtgaaaagccaaatatatatatgatacatatatttgtgtatatattattggaaaattttataatgtatccttaaaagaaatgcattgatatactcttatttgatttggtattcgaaataaatttttaatcaaattttttctcatgctcgtgtacattatagatctttaagagacatcttgtaaaattttaaga

SEQ ID NO: 154311 - DNA, 611 bp, Cannabis sativa
tttgaagagaagaacctgaatattcctgggaggagtgaacaattttcctgaaccaaagctatatgaaaccattataccaaaaacgttagcaataaaataatgactgtaattcttataaggttgagattttcttttaggacaaagacaaagataagacattatgaactctaagttaactaaaaaatcaaggatcatgaagaacacaaacattaaacagtacaaacccctaaggatttccttagagagataaatcggaccgagtcaagagctttagcaaaaatatctgctatttgcttgctagtttcaacatattctaagacaagagttttattttccacaagctctctaataaagtgatgacagatgtctatgtgctttgtgcgtgagtgttgaacaagattttttgaaatatttatagcactagtgttatcacagaaaatagtaaaagttttcaaatcaaacccataatcttccatcatttgtttcatccataacaattaggtacaacaactacccgcaacaatgttctcagcctctatagtggatagagaaattgagttttgcttcttgctatgccatgaaacaagattgtttccaagatagaaacatcc

SEQ ID NO: 154312 - DNA, 861 bp, Cannabis sativa
  modified_base (35)..(35): a, c, t, g, unknown or other
  modified_base (160)..(161): a, c, t, g, unknown or other
  modified_base (790)..(797): a, c, t, g, unknown or other
tcattatgaatcgcctattcatattctgcacgatnccctagatttctcaatctttggctttcctgtcactgagcttcgtgtgtaaaaggatggctcatgcttgtcatttttcacaagccctctggctctttagtgaaatccattttcagaatggattacnnccttcctgccaaaatgtctcttctgagttcaggagtttatcttctcagactcataatacccagatgcaccaaccaattttcattcgttcctacagacttcaagcctcaactaaacccgaaaatgatggattctagggctaaggagcttccaaccaatccaaaccaggggaaccccgtgacttgccatggccgatcctcacaagtgttcccagagggtattgatcttgtgagtgctctcaaagatcctcctcaggttgatgaagaattctagaggaagattggtattattttaggtagatctggggaggaggttggcgtggtttctatcaaagaaaccaatcaacttaagaccatatcctgtgccaggagatctttgcgtcagcctctctctagtgttgagaaatttcttgaggctaggaaatagatctcggtttcagggaatgaggcctgtgtagagaccaaggttctctacgtgtagccagtctttctcaagctatgtgtagtcggtctttttttgatctattgtagacagtctttttcaagctatatgaagacgatctttctcgagttcatcggcttcctctctcatcataggcttatgagaatgacttaatggtttgcccccagtnnnnnnnntgtaaagacaagtttgtaaccagtcttaggcttttcttaccttaaatgccttgtactattttta

SEQ ID NO: 154313 - DNA, 642 bp, Cannabis sativa
agcttgccatatctctgtgatctgatcccaaagttatagggatttcttcagtgactcacgatgcgaaagctgaatttgctaagtgttggcgtactgctcgagttgctcactacccggttaaggaggcttcgtccgagcgaatatatgtggtgccttgttcggcgtatctcttgtgagcaggtacatagagttgattctacgtgtcaccatcgtgtgatgccacgtcagagtgcaaaaattaggatagcttcagttttcagctaattaatgcttcgaaacctagttttctctcaccacgttttgacgattacacttgattatatttgattctcgatatttgcttttggggggaaccgagacgtctaaggcgtttgaatgattaccctttttcatttttctgcttataaatagggatgtacatccttcacaaattcacttttaccaacttctctattaagcaagcttagtgcaaaaaagaggttttcgctttaattctgtcgtgagatttccacccaaagtatctgagaagcttcgtttggaccaaactcaaacgtcgaacaatgagtaagttttcaattctttcctcttttattttgcatgcttaatttctgggttccatacatgtgttcttgactttgctgt

SEQ ID NO: 154314 - DNA, 608 bp, Cannabis sativa
gtgatctactcattgaggtggtcgttttgatatatactacccttattttcagcgacgtttctagtacactgatttctactaccaccaatagttaatgtgcaccgcttaagtgaggttttaaaactctaaaatttaaatatagtcatattatatgtcgttagactcggttatagatgtagaatgcaatgatgataattatttatctatttgatgggagtgatatctatgattagactaaagaattggagttcaggacttgagagcttaggatcatctttttgaaaaaagttcaacgactcgggagaggtagggactcaagttgattttagaattgattttatatgtgttgaatattattagacatattccaatttttatgatttttaatttgtttgaaaaattgaaaacttaatccccatatttttctagactgttctggggcagtgagtgccaaatagatttttgtacaaatatttatataggttatgatttttaagtttattcaaaaaagaatatgctcctttgttattcttattattttcctactttggttatactgacgagagccatgttgatcatgatttgtgcatattgttgtttcacgatct

SEQ ID NO: 154315 - DNA, 560 bp, Cannabis sativa
tggcccactagtggaattcgcaacctgggattgggcagctgaccattagtagtctgggaagtattcatcgttgggtcatcttccgtttctcccaggggaatgacgttcgtcgtgtgctgacttatagtttgttaggctcttcgtatcagcacggtagcctgccgactacgttcttcgatctctgcatggtgagcccttactgtctccatttctttatctctccattcagcgaacatatgcctttgttcgtcaaaggtgagatttactgcagctcgcagttcatcctaatcatgatgcagagttttgctatgactttgcatgagtccgagcgtggcacggagattttgtaatttggttgcatctccgatggtcgtctgggcgttggttccaggcggaacggtcgtattatgaatgccctggttgggtgcggaactattattcgcagtctctagcacaccaggcgcagtttcaataacaggagttgtttcaccatccaccacgcttcccgtctgtctggaattaacagcaggcgggacccttgaactccctgggtcctgtaa

SEQ ID NO: 154316 - DNA, 510 bp, Cannabis sativa
tctaagtccttggttctgatgcttgtctgggttagagtttgggttcgggtccgggtctagcttttggtcagattctaggtgtgggagtttgagttcggggctgactctttgtccgggtttgtgtccaggtctggacctagatctgggtctaggtttgggtccaggtccaagttcgggtcttgagtgcgggtccaagttagggtctgggtcaggatctcggtccaactaggtccagcatttcaatcctagtctaggtcttggtcggaggccaggttcgtataaagatccctatctaggtccaagtttgtgtttgggatcgggtccaagatttaggtccaagtgcgggtctcagttccggtctgggtacacgactgtgtctgggcctgagttccagtcttagtttgggtttgaggctaggtctgtgttcggttcaaggtctgggttcgggtcctagtcacgatcatagtcttgttttagggtcctggttcggcgattcttgttcaggttcta

SEQ ID NO: 154317 - DNA, 627 bp, Cannabis sativa
actgtagcgtgccttagcattagggcgttacagttttcatcttcgtcaccaccacctatggcggaatcttcatccactagcgacgaggattggttttattttagagagagaatctacaaaaaaaaatattttagagagggagagaggcgagaaagagagatgcctgtaaaagaaattggggttatcatttttgttgcaatttgaatgtaaaagagacaaagtcaaagtgtatatacacgtaacctgtcttttcttttttctttttttcttttttatttttttttattaattcagcattaacttttttttagtagaacccaatattttcctagagtaccgcgcttaattcattagtataaataattaattaaatttagagttatgatatagtgacgtgccaaacacgttgggatacgtttacctagtcatacctggcgtgtcactatatgttaatttttttaaaaaaaaataaaaaaaattatgagaattactagtgacacttcatattttgagtgacacgtattgtaggacactaacattgaattttagagtccttttgtgtgtgtcactaaagctcacccttaactctttagtgacccgcatatttgtgcgtgtcactaaagtgtg

SEQ ID NO: 154318 - DNA, 549 bp, Cannabis sativa
ttgcaatgtttattcttttgaggcgaaatccttggcaatgttctataggaatatgaatttaggcatttgttggatagtttgagcctttcaagcctaccatgaaatttttatccctagttgaccctcttgagcctaaacctgttttgtttctcatctattgaaccgaaaaaaatttgtatccacactgttaattttgtcttcaccattttattcatgatatcataagctatacaattagtttgggggagcaaaagtacttagtgtgagataaaggatagaagggagaagaacttgcaagattgagggaaaaaaaaatgtgtaattcaatgccattgaaaagaaaaagaaagaagaaaaaaaaaaacacaaaacacacaagaaagtaaaatgtgtttgaaagaaaaaaaaaattatttcagtgatgttgggaaataaaatatatatatctttcactacaagaaaaatgagtattaatgaggacaaatttcgttggtaaaaacccctgttttcgtcagtattccttatcaatgaggacatttcgttggtaaa

SEQ ID NO: 154319 - DNA, 513 bp, Cannabis sativa
gttgttgaatcttcttgcttccccgagctctgataccactgtaggaaacaactggcagttccaagaatgccccctacacacaacaccaacgttcaaaaaagcaagggcaattctgacttttggttttatgcagatctcaagggaatattcccttttcaaatcagatctgatttgaacaaaaccctacagccatttatttcatataaaagctttattttctttgattgaaaaaaccctagcacaatcacataacacacccggcccttcactccttttctctctttattctctttcctttgaacagcaagcaaaacccagcaacttcttctccttccttctttcttgctacagatcaacaagcccagccgaaccccttcttcttccttccttctctctttgctgaaaaaacgcagcaactcaacaatggcaagaaaaatgctgctgcgttatttttccttcttcttcatttctccttttcttcaagctactgctgtagctttcatggcagcccct

SEQ ID NO: 154320 - DNA, 668 bp, Cannabis sativa
tgaatccattgacagaaaatgaatattaataacttgtgaaagtcatattgtattgtccaatgtattctaggaaactgaaattaaaaatttctttttggaatttaaaatttgaagtcaaagactttaatttatagcaaatatacatgagtaattattctagcttggagcaccactactaatctaactctaagtctaattagcctaaagtaaaaaattacaagtaggagattctataagatcgaggaatatcatttcaggatgaaatgtcgggaatatagtcatctgcatcattcaatttcataagagaaattagagtgacatcataagcagatgatttataaaccattcattcaatgatatactattatagcaaattcaaaatgaaaaagctaagaggaaagttaaaggataattttgatttaaaataagaatccaacgatgtcttggtaggcgagagtcaaagttattcttattttataaatctcttcattgtttcgtattgtaaacactaatctaaattgtcatcttaatttggatgtccaactagatgttgcgtttacagatacttatctgtcaagatctaacgctattatgtttgtctaatggatgacaatcctttgggatttgtcccattaaaaacaacaagttaagttagaccaacaatgaag

SEQ ID NO: 154321 - DNA, 569 bp, Cannabis sativa
aaaacccaacagttagtagcctgatagtagaataggcgcatattttcaatttctaaatcagcggcattaataagttgttcttgatcgcgatcagaccagactagctcttggaattacgaaggcctttccagtagtgtgaacgccgggtgaaataccaggagttaggtaactcggttaaatcctgtggcggtcaggaagttcagattcccctaaacgtttgtggctggagcaggggccttagaggcagggcacgaggtcgggttgatgctagctcgcctcaggttgcccaggctgcccaagattgggaaataggtttacagaaatgtaaaccaggattattgatcaagttgaagagattcggcagttaagacagcagggtgctcctacagtccttgctccagaaataccagtaactcctgcccctactgtgcaggctgaaccgattgctgcaacgaatcggatggaaccactgtataaaaggtttcgcaagaaagcacctccggttttttctgggaggtccggacgttatgaaagccgagcagtggctaacagtgattacaagaatcttg

SEQ ID NO: 154322 - DNA, 1076 bp, Cannabis sativa
  modified_base (111)..(111): a, c, t, g, unknown or other
  modified_base (318)..(318): a, c, t, g, unknown or other
  modified_base (371)..(382): a, c, t, g, unknown or other
  modified_base (749)..(767): a, c, t, g, unknown or other
aaggtttccaacaaactgatacatgtgtcccatttaggcgagagtcaaagatatcatccattgaatatagtagtaagctcatctataatgacaaacattctagcaaccttntattcgatcaagatgagaatccagtgttgtcccgtttagacgagaatcaaggtcattctatcttacgagcttccaccattatttcataattttgtaagtcttactaatagtcgccaccattagggtgatctatactaaaaataaaacacttacaaataatacttatctttcgagattctacggtgctaaattgctaatgaacgttcntccattagggaagattactcactaaaacaagagctatgtagaaccaacaatgnnnnnnnnnnnnccttataataaagctcattattcaaagtgtattttcatctaatatttattttaatctatttattttaaaattaccaatttagaaagttctaaatataaattttaatttaatatttgtaaaatgatacttagtttgatctgaaaataaattaaattattttccatgttagtaataattttcaataaatatttcgaaaattattcaatttaaggtgatccaaagttaattaaaaattaatttttaactcaaatttaattttttataaatatatatagcaaaatttcaaaatccaatgtatttaaaaataaatacattttcaaaatttcttaaaataaaataaaataaatccttgaaaaattattctaannnnnnnnnnnnnnnnnnnaattaataaattaattttcaacagaaatataattttcctatttaactaaatttctaagaaaattatcaaatatttaagtatcatgaataaaatatacttaaatattatttttctttttaattaaatataactcgaaaaatacttcaaacaaatagaaaataactatctagattttcactaactaattattttattttctagttaaaatatgatatattttagtcaatttattttaattaataattaatgaaaaatttatttgatttaaattaatctaaaattaattaaaaattaattttcaaccttaat

SEQ ID NO: 154323 - DNA, 867 bp, Cannabis sativa
ttgacttgctgtccacaaatgaaagctgcacaccaaacacttggccggccatatagtatctgaaagctggctcacctatgctggccataaggccagctaggagtggccagccagcctccttaaggtggctagtttgtcatttcattatccctcctatatactcggacccctcgttggttaaagtgttgagtagatggcttgaccttcttgttggcaaagtgtactcccatgtggcattggtgttggcctaactaaaactctatttcaatgttatcttgaatattcatttatcaataaaggaataaaattattttattacttgtttaaatattgcttggtgttgagcttaaaaagtaatcaactgacagcggggtcgtatggatctgatgcttgccatgtgttacacaaaccaaataaaaaattgaagaacacacatttgttatagaggcttggccccctttgatagtgggtaatgacctactgcccttttaaatgtattaaaactgagggttaatactctttagatcactataggtgggatctaatgcaacacccttaaggatacaaagtatgaattgggattggcaaatcttaagtgatgagaatgcttatatgggcgtgtgagagaaagtagagaagaggagagttatcaaatttaggcttagagctttgacgctagtatcaggtttaaactgaacttaggttttctaggttagagttaaggcctttatataggaagcctaaaaccctcatttacacttgaaaccctagatatttgtatattaaattaattaattacaaaactgaaaaatgcccttgaacatagatattatttagctattctattgggcttttagggtccaattc

SEQ ID NO: 154324 - DNA, 528 bp, Cannabis sativa
tttgttgcagcttagttactaaggtggcaaactaatatgattttggtttatatgacatcagattttggttgatatgacatatcagattttggttgaaataactaataaatgacatattcgattctggtttatatgacatatcagattttggttgaaataactaaggtgcagcaaagtaagtttgaaagaaaatgcagtcgctagttagaatgttttatcaattttttgtgttatggtattatacttattagccaaacaatttttataatagtggagaattaaggcaggcatttggatttcttatcttcatatatttttccaggtataaggcaagtgcagttgactcatgtagtcccacattgattaaatagagaaggtcttcttgtatatgtggctatttaagtggaactctttcctgattcaattcatacctttctcggccttttggctaagatcaagtgtagtatctgttcttatcagtttaatatctgatatgtgggccaatggcccacacgatattaaattaat

SEQ ID NO: 154325 - DNA, 538 bp, Cannabis sativa
ttcttctttttctttttttttctttcttcttcttcttcctccttctaaccccagctgctcttccctccaccttcgcacctccattcaccaacccagaaaccccaactcgaaccacctgcaaacgagccaccttcaacatctgatccgaagccctcatcacccaaacaacccacctgcaaacgacccaccttcaacatcgaagccctcatcacccaaaccgaacccagcagcacctccatttcaccattccagtcgacaccatccgagccccgttcatccaacagaggaagaagaagaagaaagaaggaattttcgtatgttgcgactggggtttgatggaaggttcccgtggatgtccccgttcacggctagggtttgatggaaggttcccgtggatgttgcggctggggtttgatggggttaattttggggactagggtttcaaagatgaagaagttatatagagaagaagaaggaggcgtgaagaaagaaaagagaaagaaaagaaaaaaagaaaaaaaatataaaaataaatttt

SEQ ID NO: 154326 - DNA, 580 bp, Cannabis sativa
ttctctctaaccaaacatcttaataacctttgtaaattcttggaacttaggtggtgtttggttggaggtaataaaatggaataaaataaaaaaaaaatactacttctattctattttttctatttgattgcattttaaagtattagaatatcattccaatgaaatggtctttccactatttgggtggaatgactattgcattttaaaatagtaagaaagaccattccaatgcaagatttgaaaaaaattaataattttttttatgcattttaaattttattccatttcattcctatttcaattcccattctcattcacattcctatattttcattcctcccaaccaaatgtcaccatactttttactcaagctaagccaaaacctgattaagactagtcttgttgtaagaacaataaaaaatcttcattgtcgattattttaattttttttttcacctcttgtctttcgtctattgtaggtgcgttgcggtccccttcctgtaacattttgtaatcatcgcatgttggattaaaatcctattgtgggtacatatgtataatgtatatgctattataaagt

SEQ ID NO: 154327 - DNA, 689 bp, Cannabis sativa
tttatttttaggcaccttcccaaaaggtctcaagaaggtggaacacttatatccaagacaactcttgtatattcttccaatgtgggacttgggttgggttgataccccaacacttctctatctttttttttcttatatgagctgatctttttttttttctttctcttctccttttatttatcattttttttttcttttttcttttccaactctctctcatatcttttttttttctagcacttttttactgtcttacaaaattttattttattactttttttaaaaaatacaaatacttattatatttttttttatctcttttacattttcttattattcacactcaaattatttcatactataattaattacattttataaaaaaaatcataattaatttcttgtaatctttactaaaatataattattttattttcacacttttctcatttctttaaacattttttctctatcttacaaaaaaaattaaaagctagcactcctcctttacatttatctcttttacatgattaataaaaataatatttttatagatgttctgtagtttattcggagttgatttatgaataatttgtatattttaacaaggttgtgttgcattaaaattctattatgggcacatatgtataatgtatgtgctattataaagtgtgatacaaaattaagtg

SEQ ID NO: 154328 - DNA, 563 bp, Cannabis sativa
acggaggacaagcggcagaaaagggggtacactccccagtatacccagtacacggagttaacagactcacaagagcgtgtgtacttttctaccaggcacaatacgcaataccggagacggcctcctctgtacaaggatagctcccagagggatccaaataaaaggtgcgagtaccacaacgacattgggcacagcaccaatgaatgcaaaaacctcaaggacgagatcgaaaacttgatccgattgggacatctctacgaatggatcaagaagcggttgcctgacctcaatccggttcatgcagcaggaactttgcctcaaggagcagaacggggtgtatccggagcattggccccaattgctccccccggagatgcccatcaaattcctggcctgccaccaagacccaacggaagagtagccatgatctcaggaggacctcacatcgggggaactaccgggaaggagctgaaacgttacgcatgggccgtgaaacacagtgaggtttgggaggttactcaactcccagctcaaaggctccggctaatggatcagcccattac

SEQ ID NO: 154329 - DNA, 538 bp, Cannabis sativa
gtaactttctttttagtttcttgaattgtaagaaagtgaaattttgcatgatttgagatttcagttgttgttcttgctgtggttgtttgatattgatttcacaagttaaaatatgtttatatgtgttgatttgaagtggttttaggggatgtagtgttgattgagcaggctttgagttttagaactcaagcttggctcattaatggtgattttggattctgagcttgggttattgttttattgcttcgaaatggtttattggggtataatatgcaggtctggagagtttggttaagtttggaatcgatttggttagggtttggattgttttgggttttctgggtaaaattggctaaccggttttacaatgcttgtataaccggttacccagattttgcagcagggtatcgcaaaaattcagctcgtcgatgtgatttaggagcctataattcgcggagcagttgttccacttagtttgaccggcacacctgaattcagaattaaggtaagattagtataatgtcatgcatatgttatt

SEQ ID NO: 154330 - DNA, 557 bp, Cannabis sativa
tctctctctctctctctcttcgtggtggtcgttggggttggttgagagattggggacaggaggaggtcagggttttcggtttcggggcatggggatttcgattttgtggtctcctggtccgttggtggctccgacaccgcacaagaaaagaaaggggggggttggggttttcgccggcattagggtttgctagggttttttagtgaagaagaagaagaaaagaaaaaggaaaggaaaaaaaagaaaaaaaagaaaaaaaaataaaagaaaataattttttataatttatttattttataatttttataattatttattaaaattaatattacgtggaccactaaaaatttgacacgtgtaaagtgtgtacacgtggacagtcgatcgtgatacttaactgtgatttttaaacggaggggtacagagcaaaacagaatgagagttttggtagttttgcccccgaaaaatcgatttttgtggttaagtgttaaaaaatttaaagtttaagtagtttagccgccaatatccctaaaaatgtcgatgatcttccaagagag

SEQ ID NO: 154331 - DNA, 537 bp, Cannabis sativa
gaattagtgatcccaagttcttggtaagcttcttgtagctttctcttaatttccttaagttgtaagaaatgaaaattttgcatgctttgaagttttgttgctgtagctgttgtagttagttgttgttgtgttttgaggtttggttatgggctaatatgttgatttattcattaattataggttgtttgaaaggttagtcaagttttgagtttttgaactcaatcttgaggctttaatggtgaaattcgtttctgtgagtggatgattgttttgtcgcttggaatatgttcattgtggtctatatagcaggtttggaaagtttggtttgaattggggttgatttgcttgggttatagaatttttggtctttcctgcactgaatcaaaattccggttcagtgggacctgtaggaaccggaattccggttggtcccaggaaaaccccacaaaatcagaattttggttggggaactggtctaccagttggggtaggtttgggaaccctagtttttcccatttttacaatatttagggtatt

SEQ ID NO: 154332 - DNA, 647 bp, Cannabis sativa
  modified_base (437)..(441): a, c, t, g, unknown or other
tgaattaatatatgtatatatctacatataaaaaatttgatgtatatatttgagtgagggctttagcccacacatgggctaaagtccctccgtccctgagtacgggtgctgcaagttataggctttttttttttttttgaacgaaatcacatatgtggtttttgttaattgcacctgcaccccgagatcatcttaaaaccgcaaaaatcatactgtagaaatatagtgtggtttttgttaatttatctaataaaattattacaatttaaaaaattaaaaatctaattaaatttttaacatgataataacacatgtattagattatctaaaaaatatatattaggttatctttaatagcatatatattaatcatcaaattattgtattaaatcatttataaaaaataaggtaaatactattttagaccctgtgttttnnnnnagttaccaattggaccctctattttattaaatgacaaaatggaccatgtattttccgaaattttacaaataggatcagaattgattttttaccaaaataaaactgaattataatccgatctagaaatattatgacaaaactagttattttttctgtatctgtttgtgttagaaattatcttaaagttgattatattaaaaaagaaa

SEQ ID NO: 154333 - DNA, 740 bp, Cannabis sativa
gagaaatctcactataacaatatttaaaataaatttatcggtaaaatctctacaacagtcggccttcctcaaaactgacctacaaattaacaataaataaaactctattaccacataatttaatgaaaaaaatagttaatgtgaataaaaatggtaaaacaatccatattataatgtcaagacttgaaaaactaatctgtcggatttgaaaagtcgtttgtagaaatcatgaatataaaatgaaacacttctcgtacccattgaccatatcacaaatctaccttacaaaattagggacaagtcataaaaattgagacaaaaaccattgaaggcatgaaaaccataaaaaaatagtacaaacaaccagcgtagtcatcaaacctaaaattattttaaaaaatctattcgtacctaaaaattaaattgagttttaaattataaaacaaaaaatagccaccaaacaaaggcacaaccttccaccaaaaatagcactactaacctccaatcaagatacaaattagctactataaatggctatacaagaactaaacaaaataactcactatgcaaatctaatccacaaagtatattattaaaaggaaaaaaacctacaaaatattaattggtttgactaaaataaaaaagaacctaataaatacatattattataaaagttgtccattaaaaataaaaaataaaaggaattaaaataatatattattcataaaattaatatatta

SEQ ID NO: 154334 - DNA, 1587 bp, Cannabis sativa
  modified_base (1390)..(1395): a, c, t, g, unknown or other
atatattttattcattttatattaataattcatataatattacacacatacataaaaaagttaaagaaaaataatatgaaaatatgttagttatctctacatttagctaagcactattcattgagctaaaaaatatgtaaaatagctaaggtcacttgttggaagctcaatttcgtaattttttttttctataatttaaagattgagttattttagctcatctattgggagtgctctaatacgatgtttggtaggagggagaagtggagggatggagaggagaggagggagggaggtgagaggagataacaaattcctttgtttggcaagagggattgaatgagagaaaggagagttgagaggatagcaaattcactcaaatctctaatttgtaatccctctaataagggaaggattaggagtctcctcctttaattattgtaaattacataaatacccttaataaatattattaaaaaataattatgaagataaaatagtaattttataatttaataattatttatccttcaatcactccatccttcctaccaaacaatataataggattattactcttctcttcctcctttatattctccatcctttttcaagtatccatccatccaactctctctctttcctaccaaaaatagcctaaatgtgaagatatagtatttatgagttcaaatttttaggtattataactcatttattggatgggtttttaagagttttgaggtataatttagttttgtaactattgtacctcatctattaggaagtgttttaaaaattgcgttaaatttgatacaagatataacactgtgctaaatttataatgctatttttttatttactataatgccactaattattatgatttattgtactgttttctttttttttttttaaatggtttttttcagttttaaccaaaaattgtaataatagtacaaaaatacttttagtttgccaaataaacaaatatacaactcaaataaaaaaaaaaaattacacaaatacctcttacacacaccttcaacacagtattcatgcttcttggacaaccttcgggcaaccacgcaacaacccaacacaaccgaaacaaaaatccaacgagaaaaaaaccaccattaatttcaacgacttcacatgagaagacgactagaataaattaaaacatgggctatttcgaattcataaaaaaaagtgtagaaaaactattatgaaactaaaattcaaccagaaatccagtttaattcgcataaaactaatgttctgacttcaattttcaaattcatgaaatcaagatctcaaaaagttgaactggagtttccaaacaatcaaactcaagtataatccaaaaaaaattacatcaatattatannnnnntatttatcctggtgtatttttgttcttttccaaatttctaatggtgaatttgttcatattaaatcacgatgagacatgtagatagagctacgtacgtgaaaacacttttctaatttgtaatgtttcataacagttgcataaatattttgccaacagttatttctccacatattactacagtagaacctctat

SEQ ID NO: 154335 - DNA, 708 bp, Cannabis sativa
  modified_base (657)..(660): a, c, t, g, unknown or other
gttggtagggtttgttttgtaccccgagtaccactaagttctgtaccacacacactctgtacctgtccatactagtgctagtaacattgtaatgtactctttacatatcgtacactataccaatgcactcggtaccgctaccgtactattattggtagtgtgtgaatcacaacaagcattcatatatatatatatatcccacatacacacatttgaatatataatatgttttatgctattcttaccttattttcgaattcaagtgagttggccaacctgaacagaaaacctcgtgttggatggatgccctagttacattacataagcgggtaaacaacacgccaaaaccctaatctggaaaactcaaacccccaactaagggttctgctattgacaactaatataacaataccctaagtattaaggaaataaccaaccaaggctctggaaataacacgtattgactaattgaacgatacgggaaacctgccctcaatctggttaactagttttacacgacttgtcaaactggttaaccgatttgcaccaggtttcccaaagagaaggtgtggactatgaggatacttttagtccggtcgccatgctcaaatccgttagaattcttctatccatagctgccgctttcgattatgaaannnngcaaatggatgtcaagacagcttcccttaatggaattcttgaagaaac

SEQ ID NO: 154336 - DNA, 520 bp, Cannabis sativa
gtacttaatcatttcatccgaacccttgggcaggatccgcccagaaggccattcactaaaaagtaaatgttctttaattttgtacttaaagtggtcatccgacctggtaattttacttatagtactttcttaaatgttccccattccaataccttggcactagaacgagttccatattttcgtcataccatccaagtttgtatgctcctgattctagaacttcgaccacctgatacggtccttcccagtttggtctgagcacaccatccgtgctgtcttttgtgttcagaaatactcttctgaggaccatatctccaacaaaaagtttatgtgcctttacttgcttgttgaagtaccgagccaccttttgttgatgggctacaaactttaggtttgctgaagctcgtttttcttcaatttcgtcaagtgattctgctaggagggcatgattagcctcttgattataggttaaccttctatgggatggaggttctagttctacggtcaacatagcttcata

SEQ ID NO: 154337 - DNA, 608 bp, Cannabis sativa
gctctatgtgattatttgaatttttaatgccatgaatatattttatgagtgtggaaccaggggttaacccttgttgtgtaaaatcccggtattgtgactaggatcactggcacctggtcaggtgcacccggggatttggaatctctactattgcgggacatcaggtaagacaatagttagcacgtagaactatacgtggtggcacttatattagaaatgatatatgtgagtaatcattaatcgagattagggttattaccctaacattagcggtttaattgcctagagttattaccctagtgatatatgttgtatgaaagttatgccatgatatatatgggtatatgaatatgtaagatttagggttatgtgttcaaggcataaccaggttggacttggtaactagaaccgagatgaaccattctaaggccttatggtatttagacgtgtgagcgcaacacgtagatctacgctacgtggagataaataggcatgtgagcgtaacatgcaggtctgtgtcatacaggcatatgagaatggcattactgtttacatagtgtgacaaacatgttattgatatattatgctgtcttgctgggcttggctca

SEQ ID NO: 154338 - DNA, 605 bp, Cannabis sativa
ctgcctccttggaggtgctcttagaaattaaaatagagagtttttactccaatctctctattttaattattatttaattattttaataatattttataatttaaaattgtgaaatataaactaatttaataaaataataaaaagtaataatacttttaattaaaatactattaaaaatatttactattcattctttattattgataattattttttgttagcttattttatttttttaaaatctcactctttattttaactaagagtgtgtttaaaaaatataattggagattttttcaaaaaaaaaaaaatatatatatataattggagatgctctaattaattataaaacatcacatcataataatatcataataatattaggtaccttgatattaatactctacattatttacaatcaaaattgtccattaaaattttggtgcattatataaggtcactactacaaaaaccccttttagatgcggtttttaaactcttttagcgtcggttttcgcaaaattcgctaccgacgctgatcagggcgacactaaagggttatatgaaccgacgccatatggactcctatggcgtcggttcctagc

SEQ ID NO: 154339 - DNA, 993 bp, Cannabis sativa
  modified_base (108)..(108): a, c, t, g, unknown or other
tatttgaattcagaatgcattttatatgtcatgtatagaaatttcatattttgcattttcggtgccccgcaatattggaacgaggtgtatggcttagtagaatcacantttactattttagtatagcggggcagtgtagctagacattgggaatgttgagtttagtcgggaatttagaatttctcaaaatacccttagtaccctttttatgtcaacttagtgtgagagggcaaaaaggtcattttgcccatttgtaatttatcttttatggattgttaattatgttattaaatttgttttttctaatttagttgggtgaaacaaaataagggaaaatcaatccatttattcatttatgcaaaaattagaaaaaaaaaaaaccacttttcctctctctttcggcccccccctttgagtagcaagggttgggtattttctttgaatttcaagtgatttctcagcaagtttagtgattcctagttgttggtaagcttctaccaaccattcttttagtttcttgaagtttaaggaagtaaagatttgcatgcttgatgattttgatgttgtcgctgatgtgtatgtttgttgttgattcttaaagtttaattgtgtttagatatggagttttaagcatgttttgtggttgttaattggttttattcaagtttgaagctttgaactcaaaactttgggttttattggtgaaatgatgtttttggtactatggttattgtttgtgtttgggtttgttttctggatgttagatatgttgttttatgttgaattaagctggttgtaatggctgattgtggtgttagccaagctttgagctttgaagctcaaacttgaagctcccatggttgtttttgtttctttgcatgctgggatgttttgttgcttttgaaatgttatttgggatgttggagcaggtctgcagagttttaggtggtttggggttgttctggttgagttatgaatttttgaaaaattcct

SEQ ID NO: 154340 - DNA, 547 bp, Cannabis sativa
aaaacttgactaaaataaaacactaaaaatagataatataacggcataaaaagcgtattgtggggatccttgttataaaaagttttacaaaagaactaaatacgacgatgcctcaaaagcataaaaccaaaatacatagtagatacagcccaaaacaattcctagcaacctcatgattcataggtcaatatgtacattgctggagaagactgtcacctcatgattgatctaatttttctttgcctttacctgtaccatatagcacccatgagtcataaggatttagaaagaaaagtaataataataatcatatattttattattcgaatattatcattcatacacaatcaaaatcaaactatcacacattgttcataagatgaaatccaaatcactactggcatctgccacgaataagcatcagtatacagatatctagtaatacaaaactattataccaaatatagaattcatattcatttaataatataaattatattatatatgttacctcataaagtaaccatctgttggaaatattttacca

SEQ ID NO: 154341 - DNA, 521 bp, Cannabis sativa
ataatgatgctgtgggggaacaaattcaattgataatcagtcctcttttgtaaaatcagtcctttttcttatatatataaattttatttagtgtattttttaattccccaacacgggtaattagcatgggttttgggcatttaggatatagattttttaggctaagaattcataatagtttcttgacggtgataaatttaagcataggaaagtctgatgctttatgtaacaaatctgatttagataaacttgtcatgtataatatttgctattattgctctctttttaataatttctacgagtgttatattaaggttttacatttatttgatccaagaaagaaaatttatgggaaaacatttgacgaactaggtacacatacaccaatacgagcaaatataaaatctaattgttgatttatatgtgtgaaagttacatttattattattattattattattattattattattgatttatacgtgtgaaagttacattttttattattacaattattacaa

SEQ ID NO: 154342 - DNA, 669 bp, Cannabis sativa
aatcattttgttaaattttgctacattttactaacaaaataataaaatggctcttcagtcactggtttgtctatataggggtgtttattgaatcacattcaatgaatttagattcaaccgatccaatctaattatttattagatattaaattttgtcatctgattcaatcaaatcgaattgagagtcatccgatccgatcaaatggatgtattagattggatcggtttcaaccattagatgcattgttgggttttttattggattggattgaatccatccaatctattttagctaccatttaagttgattttattaaaaaaatatatatttatataaaacataatttacgacttaataatctaatatacataataaacatattaatttagtccaatttaattctcatgatctcataataaaaccactaaaaaataaaatttattcaatacgtattgacaattttattagtgtttaggaagatgagaattaatatttagatctaatttttttttttaatctcatgtgttaaatgtatattaaattaattattatatatttttaaataaaatatattaaatgcataaaattattatgataattggatcgatttggtcggttatctattggatcggatgtcccatccaacaacctatccgatccgattggat

SEQ ID NO: 154343 - DNA, 548 bp, Cannabis sativa
ttctaaagaaaaatattacaaggcttataacttaatttttttatttatcttgtttgaaatgttctctgcttgtagttcattcatttgaagaaaaatatcatagtagagagttgttttatagtttgtttaatgttgttttgatgttgttttaattgctgcagcacttgatttctagtgatgatgatcttcaaagctgatgagaataaacttgttgttcatttctatttctttggtagaatgaagtgagttacatacatagaaagtgtaaaataaaatgttcaaaagtcttccaagaagattgaagctactgtgcatggattaatgatttagaaatgtttggttttagttgtagctgaagagcaacatatttttgtaagaaacattgctttatatttttttgaacttttttctaattaatttcacatgtatcttgcatttgatattgaatattataatttctttttaagttgtttatatcttttagtacaatgagaaacaactcttattatatttttaatttctacatcaagtgttggtatatttatatt

SEQ ID NO: 154344 - DNA, 522 bp, Cannabis sativa
ttgtagcaatttatatgtgcggttttaatatgtgtatatacatttacttatataccgtcttgttttttttcgttaaaagcatattatggttaattgttctaatttttattagtgttctatccttatctttaaaatttgacaaatcacagactatttaatgattgttctatttatattttttttctacacaatcttatacctttgtatctatatataaaaaaataatatcattataatattagactcatttaaaggaagtttatatttttaatgattaaatatttaattttttttttttttgaataacattgtaatatacaagaaattagatttcaaattattcataattaaagaaactattaaatttataatacatatgattttacaaaattatgaaaaccgcgcaaagccggtatcattttctagtatatatatataaaggaaagcatcaaaagatttaggtggcattctctatcttttttattctattttttctaatttttgagggcttaacattttctc

SEQ ID NO: 154345 - DNA, 578 bp, Cannabis sativa
cctaaagattatgaatacaatgaagaagagatgatcttattgtggatggctgaaggtcttttacttcctaataagaaagacagaattgaagaaatcggaaagaaatacttcaaagatttgatctcattgtcatttttccaaccatcaaatagcgatgcaaaggagcctacttttctcatgcacgatcttacacatgatttggcaatctttgtttctggtgagttttctttgacgatgaataatatcagtaaacattctcaaatggttcgtcatttttcgtacctacaaggatgtgcgaaagacaatgaccttaaggaatttgaggagttatttaaagctaagtgcttgcgcaccatattgtggaaacaacgtcgaaccgttgatcagctaaagattgagcagttggacaagtcattcccgggcttgagagttctatcattaaacaatgatgagatcaccgagcttcccgattcaatagggaatttgaagtatttaagatatttgaagttagattgttataatcttggagagatacctaatacaatatgtaagttgtataatttggagacactattgtt

SEQ ID NO: 154346 - DNA, 516 bp, Cannabis sativa
aaggatgtctataagaggaaaaaaaaatatatatatatatatatatataaatatctttactcttaatggcatgtaaggatgttcataagagaataaaagcttttactcttaatggcatgtaaggatgttcataagagaatgagaactgttataattaatatcatgagcatgcaattgcaaaaacttgtatatttaaagtgtatgtgtaagttattattatgaagtaagttttgttgttaagtaaagtatggtagcataataattcttaaattaagtagtatatatcaaatgtgttatgattttacagttagggcaaacctgtatgttaggcccataacatagatagaaaaaaaaatgtagtaggtggaaaagggcatgatgtgacaatactccgagtgtttagaaagttaaattttgaggacgaaatttctttgaaggggggtagaatgtcatacccggtttaaaaaaaaaataaaaaaaaaattaattaaactggtattcttacgagtggagtaa

SEQ ID NO: 154347 - DNA, 789 bp, Cannabis sativa
  modified_base (39)..(55): a, c, t, g, unknown or other
tatgtgggtaagatatttttttaatttaaaaaaagattnnnnnnnnnnnnnnnnntaattattgggtttatttatttgttaacgtttaacgttaactaaacgttaacagtctgttaagttaagaatcgttaaaccaataatagaattgccgttaggcacttttaatatataaagatattttttcatcttatattgaaataatttttctttttattttaaattatgaaatacttattccaccaaaatgatagaaaaattattataatattaaaataacattttaatactttaaaatacaacaaaataaaagaattgaataaatattattcattttctatttcattctattttattataaacatcacctaaggatactaaaaatacaaatttagtgttatttctatttgaaacgaattcaatagaacattaaaagctattctatttatgggattgtctattgttttagtaataatagtaagatattgtagattatactattttttttttaatttttaatgattaaataatggttttgaatgattaatatttttttaatatatattatttatattgatatatgatatataataaagaatatgtcttttttagtgtaaactaattagtgttatgttgtagttggaataaaaaaaaataatgataaattatacttttttcgtttgtaggatttttaccgttttaaccctacaccaacaaagccacaatatcagttatcaaggtcaaaaatgacctttcctagtctaagtaaacccttagactaaacggcaccgt

SEQ ID NO: 154348 - DNA, 876 bp, Cannabis sativa
tttctattttattagataattaacaattggagtttagaaggaacacaattttacaataaattcttcttgtcagacactagtttcagcgagaagataaactatctcggtgcaaactgtaagatatctattaatgtgattgtgtattgtaatttatctttgtttttttttttatttataattaaaaatttatttagagtttttctttagttttttttagagaggataaattacaatgcactattgttattttgttttatttaaaatcatttttagagttattaggggtgtatcatatatttaattagtaactttttttttttagaacaagtaactttccttatattgatatcaagaaattattaaaaaaaatattataagaggaattaattaaatattattattaaatatgagagtgacacataatgaaaaaaaacatctgtatgtagagacgtttttttgactctacttaagcattttccaatactatattatccatacaagtttaatgcaacaataagtttgaaataagtaaaataacactattaaataataaaatagaacaaaacatcatgaaacaaatacataaaacaagtaaatattacaaatttaacaccaaaaaactaacggtcagtataaatataattaatatatatttttaatatattttactatataaataaatataataattttttaatagataataaatgtaattggattttgagatcgacattcaataatcgatccaattcaattacaatctaactttttactatccaatccaatctaattgtatatttaatttttggtgattagattagattgaattctatccaccccttatacaaaacagtacatgtttaaggactaaaaatg

SEQ ID NO: 154349 - DNA, 523 bp, Cannabis sativa
tgatgttttttttaagtcttttagagttgtttatagcaggaagagttagacttgagaaaccacactaattgttaacaaattaaaatattctataaaatgttatgcataaagtaatatattaaagttttctacatataagtcatgggtcatggacttatggatactgcaataccattattaattgttcccccacgaatctcactagatataattggggagctttcactaaaaataatatagtaaataaaaactttaacgaaatgatctaatgggcatgtgtgctctaactaattataggttgactaaacctcctcatgtacaacatatttatctccttaattttgataatctaaagacctattacatatatttttttttttttgcttaaaaaacctattgtatataatattattgttttacttttattctacacagactaagagtatgtttggtattgttttctgttttttgttttcaaaaaatggtttttagaaatgaaaataaaaaatagtttttgaagttt

SEQ ID NO: 154350 - DNA, 622 bp, Cannabis sativa
  modified_base (474)..(490): a, c, t, g, unknown or other
aaatcaaagaaaatggatagaggggagtgttttattggaatggtggaaggaaagttcgtacgtttatgtttcagttttaaaacatattacatatatatatactgataagtatacgtttatatatataataataaaaaaaaaaatttattattgatagttatctttttatttcttagccactaagaaatctatatttttaggatatttggtcaactctaagtactctaaaataccctggtatttctaaaatcaacttatcccaataatcccatcaatatttctaactaaaacctttgtgacattttttagcctccaatcaggtctccaaggtcgccgaatatgaaaatatttttattacacaaataactcatattatatccacatatttcaaataaatcttcgtaactaataaattacgcttatttatccactatggggtcttcaaggtcgccgaacctgaaaatatttttattnnnnnnnnnnnnnnnnntacattcacacatgctatataaatttctataatttatatattacacttatttactcacttataccaaatttaaatgttatgttgaaatagattagtgggatcataatcccacttattatctgattaacccat

SEQ ID NO: 154351 - DNA, 564 bp, Cannabis sativa
  modified_base (198)..(201): a, c, t, g, unknown or other
acaattttaatcttaaacattatattatataataaataatataacaaaaaccaaacaaaaatgcataaataaattaaaaaaaaacatcatagaataatttgttaaggtttatgcgctgaaaaagcctgtaaagacatttatgtttacaaataagagttaaacattttcatatatacttgaatgttaaattattaatannnnatattgaataatttatatataattattgaaaaattaagatcacttggccatgaataaaacagtcagcaacatattaaagttatgatatttaatcaacggttgctagtgcagttcactgatgctcgtaattcggttttagattgctgatgtagtatgacatctaattgaaagtgttgtatataatagagattatatatgacaagaaacgatatgtaattaagatgtctttatcaaacatgtcatttactataaagacctaattcatatcatgaagatgatcaatagtaaatcagcctgaatcctgagtaattatgaactcatgttcatgttattagattcattcactcgttaaagtttctcaga

SEQ ID NO: 154352 - DNA, 565 bp, Cannabis sativa
tatgggtaatgtttttttttttttgtgaaaaatggatgaaatggatgttggaaattgatagagggttagaaatggaagaaaacccccacaaaatccaacaaaaacggtggttggatgtgtcggtttcaggcgggtctgatttcaggtcctgtcgacccggttcgtcgacccgcgcaccggttccaaggtcagggatgacccgcgccaaacgacgtgtaattcacatttgtcgttttttgctgaaacgacatgtcatttggcaaaaatgacatgtcgttttctgaaccaaaaaaacaacaagggcgcatgaggggtggatggataaatcatgcacaagatcaacatatgaattttttttaataaaaaaattgtatttatatttaatcttttgtgcataaatttttggttaacaacaattattgtttattttcttgcccattgcaagagtaagcatatgaactgtttggtaatgaggaacatttaaatattaatttatttaaattttgtatcttcctctaaattacattaagattcttataagtaattaattatcctatcgataata

SEQ ID NO: 154353 - DNA, 549 bp, Cannabis sativa
  modified_base (481)..(482): a, c, t, g, unknown or other
taggaatggaaccaatcaagatacactcatggccccattcctcctggatcattacgggggagccaatcttcgttggcctcccttctgtcttgacaaactttgccgcaaaccttttcatttcctgggattgcctctttttaaagccctttgctgccttgcctctcaaggcttgcgtagtcttagggatactcttcacaccttttcctctctcaacctgtctaacttgtatagctgtcttcacagtctccactgtttcgggtaccctggatggaatgggtgctcgatcaatagagaatgccgccaagaagcggttctttttccctccttgggcagaagaggttgttggtagtttgtggaagtaaactgtgacttgtggtgccattttttcctgaaaatggtaaacatgattagcaccataaaattaaagataaataatagtcatcataattgaagatgaaaaggagaatgggtcccaccgggnntgccaaaaattatgttaagcaaaaattttacatttagaatattaaaaataaatgcaaaacagaattt

SEQ ID NO: 154354 - DNA, 525 bp, Cannabis sativa
gaattaaagtttcattcagttcaagtaagaaaatcatcatggctggaaacgaaacaaatggaggtgctaacaacgagtccatcaacatcggagttatgaacgtgccattatcttgagctaggacgccacctgtggatgtcgttaatggcggagtagggagaggtaacattagacctctcaatctattccctgaaacaactgaccctcaagtcggggaaacgtccacgccaccagcaacaatgcaatttccgcctgtcactccggcggtggtatccgagggaatcgtccaactcaccaccgaccaatatactgcgattcaggatcaactacgcgcgttgcaggccgaggtgaatggacaaaacagggcccgacgcccccctcgagcgcctgctactcgcacagataaccctcaggtaacaaactcgagacgtcgtaataatcgtgttcgcagggaacgaagaaccaatccggaaggtctagacctaaaccagccaacctcgagagaccaatctgcgaggtatccta

SEQ ID NO: 154355 - DNA, 923 bp, Cannabis sativa
aattattctcgataaaatcttaaataatacgtttttttatataaaattaaaatttataaatatcttataaaattgaataaactttaaaatatataaaaaaaattaatcaaaatagtattaaattttttcttattatatattagaataattttttcttctattttaaaataaaataatccgtccacaaaataatataaaaaaatatttcattagaataacattccaatattttaatatgaaaccaaacaaacgaatagaatgaaaattgtttcatttcgttacctccaaccaaacgccacctaaatgattgaatgtattttcctttattatatgatttagtttcccattctttcaatattattttatattatatttttttttatcataatagtaagtagttttttaaccgtaaaacttgccaaacttaaatttggtaacaaacaaaatattaactattttgtcaagacattaagaatttgtatgtaattatcacattatatttaaatacattttttattttaaaatatagtataatcattaatacctgtaattattacctttagtaattacataataacgtctaaacacactcttaagttaagtgtagttaatttactaatacattaaattatctatgttaacccaagtataagtggcatgtgtttaatagtcttcttaaatttaattatttaaatattataaaattattaaacaaaatcttttttttaattgaaagtaataattaaacataatattaattaaaaaaatcattttcttttcttttcttttttgagatccatcgtctcatcttttttcttttcttattcttccttttagatctcaccacactactacaaaaacaccctttagaggcggtttttaagccctttaggcatcggttttcgcgaaattcgctaccgacg

SEQ ID NO: 154356 - DNA, 568 bp, Cannabis sativa
taattcctttttttttgtaaatatatattatatgttaggagaattagaacttaggaactttgtgaggagatgtgtgaaatcactaaattatgtctatttattttttgaagagctaaattttgtatcaaatatttttattgtcaaaatatattacataattattatatggtaaccataaatttgtttcacatggcttagagctagtttgacagagttgtgttgtgggaaaaaacaactgtagctgtgttatgagaaaaataaactgcagtagaactatagaaaaaagttgagcagagtgtttaatagattataaattttataataatgtaagaaagttaaattctattataataataatgataatgttatattcatttcattataattacaaatatataaaacttacgttatataattttttttatatataactttaattattttctcttaaaagtattaatttatatacatttgataaacataaattatagtgtttttaaataatatttttatcatatttaaaataaattattagaaactcaaataagaaactctaggttaatgtgaa

SEQ ID NO: 154357 - DNA, 715 bp, Cannabis sativa
tttttaaaaaaaaaaaaagaaatccctaaaactaatttaaaaaagggggttttatttataccctataaaataataagtataccctattattaaaaaataaataaacttaaataatttttaaaaattactcttaatatctttttaaatttttttcctcacataattctatgttaattttgatacttattttgattttattttcatatatttttttttgaatcatgaatatttttttctaaaaaaattttgtataaatttttattttaattttttggtcataatatttaaaatataatttatttttatttaatagatatattttttaagtatatgatttgaaagaaaaaagttaaaaaagtttaatacaattaaagttataaattttatataaaataaaaattattaaaatagagagttttacgaatttttagaggtgtaaaaaaaacaaacaatatgattttttgaaaatttcagaaacatttttgtgctctcatattgtttttaacaaaaaaaagaaaggtaacattaacatatcctaaatttccttcttaaccctattttatctttgctaattaggattttttttccccaaactttgacatgtaccaaatcatgctcttgaactttttttgtcgtccctaaacgattgagattgttagatttaaggactttttgacatgtaccaaatcatgccctgaactttgacatgtaccaa

SEQ ID NO: 154358 - DNA, 646 bp, Cannabis sativa
attttcttcaattcataaacttaccctgaaccctttcggcttagtgcatctgctaccacatttgcttttccaagatagtagagaatctcgcagtcataattcttaactaattctaaccattgtctctgcctcatattaaactccttctgagtgaaaaaatacttgaggcttttgtgatctgtgtagattttgcactttttgccatacaggtaatggtgccaaactttcaaagcaaaaatcactgctgctaactcaatatcatgggtgggataccacttttcatactccttcagttgcctagatgcatatgcaataacttttccaaactgcatcaaaacgcagcctaatccttgtttagaagcgtcacagtaaatcacaaatttctcaacactaactggcaaggttaacactggtgcagtaattaacctctatttcaattactggaaactactttcgcacttgtcagtccaaacaaacctacagttctttcgagtaaatttcattaagggtgtagaaatcttagcaaacccttcaacaaaccttctatcctgctgatctcaggaaacttctaacttcagtagcagacttgggtcgaggcaaatctcgaactgcttcaatctttatcggatccaccaagataccatct

SEQ ID NO: 154359 - DNA, 641 bp, Cannabis sativa
aaagagttgatggacaaatattcaagggctttaggacaagttgtgagctttcacaaatctaaaatgtgttttgggaagagggtttcggagtctgcaaaggatagaatggcagcgttgttggatgttcaggtagttgaaagctatggtaagtatttagggcttccatcttttgtggaaagaactaagagggagctttttgatgtgatcaagaatcgagtgtggaataaattaaaagggtggaaaggatcattattctcggctgtaggaaaagaggtgttaatcaaagttattgtccaagctattccgacatatataatgagtgtcttccggcttccaaagagcactattaattagggttgtacataaacttttgtaaactgcccaacccgaataactcgtccaaaccaaactgatataaaccaacaaaaaatacaaactaaaatacccaacgaaaacataacccgcccaatttttatattgggcaggttgaaaataatactaactcgcccaatcaacccgaactatcccaaccaacttatttaagagggtttttttatatatttttatgatatacatttatacatcatataatttatatgactatttaaaaaaatataaagttaaaactaatatgttttttt

SEQ ID NO: 154360 - DNA, 867 bp, Cannabis sativa
  modified_base (260)..(263): a, c, t, g, unknown or other
atcatttcacttctatgtccatatagaagctatagattctgtatctatgattagcacaatgtctttgtggtacttgcaaaatttggttgcgtctctctcatgtctcgcgtgccttatgggctcaggtttacgaaatgccaccctgtgctcatgcgcgagatagatgttttcccgagtttcattaagctcggtgtaaatggtgtaaatcggcacgtacttatcgtgcttcttttgctttttcttgtccttggatgactccnnnnagttatccttcctctttgaactagaggctcctggattatcagccttggtcgagacggtacttgttgagacattgctaggtttatttcccgagccagtctgcaacaacttcatctcctttctggcttcttctttttcgaacaaatacttgagccctttcattgaactcagtaatgtttttttactgggcgaccctatagattatccaatagctcgcctccagtggtagagagatcattcgtgatccctgcctgaagagcagtaagctgagtactatcatctaggttcctcaccctcgacaacaactgtgctaaaacgacttaagtaggccttaagcgtctcgcccggctgttgctttatgttgatgagtgaggatgctttgggttgcctatcccttgcggtctggaactatttttttaagtccttagacaactgttcccaaaaagtgattgaatgatgagtaaacttattaaaccagctgcttgctgtcggaaatattttaccaggaaattagatttactaacaagtatgttgtttaacaccctaaatatgaacttctgaaacgatattaaataaacacatataaagtatatgaaaccttacagt

SEQ ID NO: 154361 - DNA, 787 bp, Cannabis sativa
gagaccaaaagaggcaaagagatgcacacccattacatgaatcggtcattccctgaggtgaatgagcagctatccggagttgacaacgagccttccctggagttgttgatgggaggagtcctgaaggagtttacgagggtgagtctttcctgacagtttcctttaattcttctttacttggcttagattctaacattttttctttgtgcagactggtttgaagatggcttacacttattcttgagccaagtcagttgcctccaagaaccagtccaacacaatgagggcggaaatggacttggcctggaaggacgctgatgaagccagggttcaactcgaagccgtccgaatggaactgggcgaattaaacacaaagattcttgctgccgagaagtaggtggccgagctgaccaaggatttataggcttttgaccaacttaaggctgccatgacctccttgtccaaagaagtgaccaacctctaggaagaaagggaggttcttcgaactgttttccgtagcttggaaggctaaccctcaagcgaattttgattaccagggtgatgccaaccacttctacttccggtctgaatgttaacatgccccctgcccagacaacaaatcctctagctcctaccggccaagaagacccgtacaaggagcctgggactccagtcgtctaaacacttctctttttatctttcttctcttttacatctgtccggccataaggccttttttaagacatcgtgaccggccaagcagtctttaaacttggaattatttttc

SEQ ID NO: 154362 - DNA, 512 bp, Cannabis sativa
ttgttgtgcggcttccgacagagtggcggggaagattctgcaacatacatccccccgtactccttgtaaatccattttcatcttaaagtacttgagatgggaagaggatcttctctcctagtatacatcttccacgttggcattttgaacttgtgaggcagtggcaagagattgatctctggtgagaggggagttccgcgagcacgatctaactcaagatcattgttacgctgtccggcccatgccatgaaatatatttttcaactcatcaagctgggcctgtacgcctgggctaacctgctcgacattctggtcaacttggattacgtcagcatctttctgagcggggatttgagtatgggctccaggctgcacgatcgttgtaatattctgctcgtctgttccccttcttctgtttagatcattccttaggtcatgggttgttccccacctatcgaacacagaagagcttggttgccttagtgattgattcgcttggttgacaggcggaa

SEQ ID NO: 154363 - DNA, 502 bp, Cannabis sativa
agagagagagagagagagacttaaagctataggaggctaagtgacttaaaggaaacttaggttttcagctagagattaaggcctttatatgggaagtcttaaaccctaggtttacaattcaaatcccttggaaacagcataattagttagatatttacaaaagacccaaatggccttgattctatatattatttagctattttgttagacttttagggcccaattcgtagcccacctttgatgtccacgtgtagagttgttcatggagtcctaccaggtcaatcctagccatccatagacctacagggaagtctgaccagccatggtcctcccaggtcaatacttgccggccattgtcctaccaagacctcgtacgacaaggcctatcgattctggcaggtcactatagctccacatgttgggaatattttaccaggatcttgatttactaacaagtatgtttcattaatatcctaaatacgaattctctaaaacaatgaaa

SEQ ID NO: 154364 - DNA, 515 bp, Cannabis sativa
tcaaaaatttgaattgtaaaaacagtttaatagcttatttaaagtaagataataaaaaaataatgtaaatttatatgaattaatgtaataaataaaaaaaaaatcatatgaggatatacataaataaatcaattacagatataatattttatgtaaatgttctaaataaataccataaaataaactgtacttttcaaaactataaacttgtaaaaaaataccaaaattagaaaatattgttgttattctcgaaattcagcgagcacatcaaatgaagacacgtaccaggctgggaagaataaggaactcaaacacataatcataattacactcgaaatgaataactcgttagaagcataattagcaaagtatgtttacaactcgtctgactgaacagtcttatgcgagttaaaaatgtacaaattgttgctttgtgcctcgatgagaaaccatgtaacttcaggtgtaaaagacgaggcactaacctcgtcacgtagatgagatatagcgacaat

SEQ ID NO: 154365 - DNA, 1188 bp, Cannabis sativa
  modified_base (1117)..(1132): a, c, t, g, unknown or other
ttaaaaaaaaataaaaaatattacaaattttaaattaatttttatattttttaaataataatattaggtgtaccaaaataaatatgataaaattgtattgtatactcactttattttacttgttttaatttttacctttatttccatattctttaagatatacctacttttgtaaatgatgttttcattatatcccttaatgtaaattatgtgctagacttaagtgaaatgtgagggtatattggacaacccactcataaaattgggtagattctaatgaaatctaatataagagtatttttgtttaatagatacaaaaaagaggtattcctcaacttatatatgacacatgtacaaaagtgtacacataaactgtatatattgacagttaactgtgaaaaatgaatgacacctttaatttactattagttcagtaatttagagagtcttactgttaaaatttcagcttagaagtttaaatacaagtaaagtaataattgaggggaaatttgactttttatgtttacaaatacataatatttttcccctaaacacatgacatgtaatatttgtgggatatgacacattttacaatattcctaaaatacccatatttacattatcccctatcccctctcttcttctctctttcttcatacccattggaccccaatcggggtccccatcggacccgtcggacccacatttacaacacatgcatcgaaccccaatcggggtccccatcagacccgtcggacccaaaagtttttccagtatatgcatcggacccccatcggactcgtcggacccaaaaactaaatttttttgcacatgcatcggaccccattggggtccatcgggccatcgtcttccctaaactgcgattttcccaaatcgcagatctgaaccttggacattgttgggcaccgttcaggtctcctccgtgccgaagtgggtctccgtgacgcggtgatgagggtcggaatggtgggtgtgggtctcggtcagagtggtctgtcggagtgggttgtgtggggggttgtgcgatgtgggttcgcgaagggcggtgatgaggatcggaatggtgggtgcgggtctcggtcggagtggtcaatcnnnnnnnnnnnnnnnngggttgtgcgatgtgggttcgggcgaaggggaagaggcagagagagtttgagggaa

SEQ ID NO: 154366 - DNA, 1021 bp, Cannabis sativa
  modified_base (41)..(46): a, c, t, g, unknown or other
  modified_base (557)..(563): a, c, t, g, unknown or other
  modified_base (657)..(659): a, c, t, g, unknown or other
tattcttattttataaatttcttcattgtttcatattgtannnnnnagtctaagttgtcatctttggatgcacaactagttgttgtatttacaaatacttatttgtcgagatctatcactattatgtatgacgatcctttgggatttgtcccattaaaaacaacaaattaaattagaccaacaatgcagattcaaaatttatactacaacaattaataacagaaaataacatgattcaatataaattcatacacattcaaaaattatcatacattcagcaaataagaaagacgtgtgaaaatacaaaataaacatattttaaataatttttaaggttttcaacaaactgatacagtgtattgttaaggcgagagtcaaagatatcattcattgaatagagtagttaactcatctaaaatagataccattctagcaacgtacttattttgatttcattttcataatcttttctaactcatgtatacatttttctatttttttccttaaaaaatttcacacacatattttttaaaattttttttgtcataatatttaannnnnnntttatttttgtttgataggtatattttttaagaatgtgaattagaagaaaaaagttaaaaaaaacacctagtataattaaagatataaattttnnntaaaataaaaattattaaaatgatgtatctttaaaaacttttggggtgaataaaatttccctttattaaattcaaaaatgttatttttttaggaaattacattgtatacccactttacttcacatgttttaattttttaccgttattttcatattttttaagatatacatagatgatgtccccattataccacttaagttaataaaaattatgtgctaaacttaagtggagggtgagggtattttgggcaacccactaacaaaaatgggtacattttaatgaaatattataaggagttctatttgcaccccataaaatgataaatacaccccattatcaaaaaaaatataaacttaaataat

SEQ ID NO: 154367 - DNA, 597 bp, Cannabis sativa
gactaatgagtctttagtctttgttacaaagtggaaataatatagaagaactgactacagatgagtctttttaacacaaacgcgcttctatactaaattgcaatataaaaaaatgaaattaatattgggttttgcaaatacacagtttgcttaccttgaaactacttatgatacaatacaaccactgactcctcatatgtacccttcactctttttttttttttttttgagaaagtacccttcacttttcagtcggtccaaaatgaaactagtaactcttgcatattttttttttcttttttttaggtgcagttaccgaaataccctcaacaagcatattatgatggctcttcaatgagcattttgggtagggttgttcgctgtgccggtggtgcggttttcgactaattttttaaaccaactcgcacatgcggttttttcaatttctcaaactgcacccgcaccgtaaaactaaaaaattgtaaaaaccgcaccgcaaaaaatggtgcgatgcggtttggtttatgcaatttagaatattactaaataattaaatcatcacaaatacaacaaaatttgagcaacacttgtcaaaaa

SEQ ID NO: 154368 - DNA, 554 bp, Cannabis sativa
gagaaattggtaaaagtgaatttatgaatgatgctcagccctatttataggcagaagaatgaaaaagggtaatcatttcaaatgtcttagacgcatcagttcccccaaagcagatattgggaatcaaatataatcaagtgtaactgtcaaacgtggtgagagaaaactgggtttcgaagcattaattgcgtcaaatcattaattagtcgaaaattgaagagacacctgacacgtgtcacccatccaaacgtaaggacagctcggatgaagtgtacacgcaactttgaaagtcccgtacagacttggggggcaaatgttatcccaattttttcactctgacgtggcatcacacgatggtgacacgtggaatcaactccatgtatgtgctcgcaagaaatatgccaaacaaggcaccacatatattcccgcggacgaagccctcctaaccgggcagtgagcaattcgcgtagcatgccaacacttagcaaatttagctttcgcatcgtgagtcatcgaagaaatccctataactttgggatcagatcacagagata

SEQ ID NO: 154369 - DNA, 563 bp, Cannabis sativa
aaaagcattgccaaatagggaaccgcccaaggtggggacaaagatgtgaatcctcgacttggggagccaaatacaaatgttgggccggttgaagaataagaggagatagaaattgatccaaatgtctcgacgaggaacttaaaattggaaaaggtttgttgcttgaagtaaaatcagctctgatgaaatttttaagagcaaacctagatatttttgcctagtcacatgaggacatggatggtattgatccttccataatttcacatgccctaaacatcgatccaaacttctggcccgttcagcaaaaaagaagattgttggataaagaacgggcccaagaattaatagaagaggtagaaaagttgcgcaacaacaacttaatcattgagactttctacctggccatggtaactaaccccgtattggtacccaagactaacaaaaaatgccaagtatgtatcgacttcaccgacctcaacaagcgcgtgccccaaatactgttttccacttccaagaatagatcagattgtggatgcaacagccgggcacgagatattaagctt

SEQ ID NO: 154370 - DNA, 560 bp, Cannabis sativa
aggctgccgtacggaccacccatttagacagctgcagcgcaatactctaacgtgcgcactgagcaccgtgtccacttcattccttctccacgtgtcaccattgagaaagaatattttattagatattaagtgtctaaaacattttagacatgttaagttagtacattaaattatattagatttgatacttaattgtactaatagcgatagtgacacgtagaagtaaaattgtaatgtgtaatatcactgtgagttattggcaaaatttaatatcgaatctcgtattattttacattaataaaaattatagaaaatcactaataaattataagacgctaccttatttaagatgggtcttacttatcaaaaataacttattaaataattatgtgctatatttgtgtgtaatttatgtggtatattttattactctaggtctcgcttgaaacatcatattaagtcgtagtgtactgtattgtattatattaaattggattatgtatcatatttttatataatactatattaaactttaatttaaactaaaacattatatattt

SEQ ID NO: 154371 - DNA, 593 bp, Cannabis sativa
  modified_base (254)..(256): a, c, t, g, unknown or other
ggctagttttagaccagcgattagagcttcatattcggctttgtgattagattccttgaatctaaactttactgcagcgtgcaggtgttgccccccaagtgtgtcaagggaaattcctgcaccacataactgatctgtagccgacctgtccatgtgtagtttgcaagtcggcttgtcttcattgttacttggctgaggtatttgtacttgctcaggcttgctttctggcatgctttcttctttgcctgtgcatnnnaccacaaagtctgctaaggctttgactttgattgctgtttggggtttgaaagtaatttcgtactgacccaactccactgcccacctgagaagtcgtctagaggcctctagcttttgcaatatttggcgtaatggttgcttagtgtacactcaaacatgatgatcttgaaaatagagccttaacgttcttgtttctagaataaggcagtcaacaagtttctctatcaatggataccggccttcgacctcaatgactctttcactgatgtaatagaccgggtgttgtctgttgttttcttctctgattagcacgatactaatagcatgctctgtgaaag

SEQ ID NO: 154372 - DNA, 533 bp, Cannabis sativa
tggaataagacttggaccgtgacgaagacccaaatccagacctagaaccaaactcagacctagccctagacccaaaccgagattggaactcgggctcggagacggttgtgtagctaaaccgggaccgataccagtagttggacctaaatttgggattcgatcccaaacatagactcagacctagataggaatccggataagaacctgaacttggacccaaacccaggccgggattgaaacttgggaccaagatctggtccaagatcttgacccaaaccccaaccttgacccgcacttgggacccgaactcggaccttgacccaaacctagatacagactgggatccagacctagacccaaacccaaacctagactcagaccaaaactcataccccgacctagacccaaaatggatcccgaaccaagacacataatctgagtgtgggtcagtgtttcagtccaagtctgagtccctatatagttttgggtctgggtccaagtccttgtcttggtcctgttcttgggtcccgatc

SEQ ID NO: 154373 - DNA, 855 bp, Cannabis sativa
aattaatatatatttctaaataaaatatattaaatacataaaattataaatgtattttaaaaataaataaatataatggtatggccattagatgataattggatccgttttgttggttatccattgggtcggatgtcccatccaacaaccgatccgatctgattggattttcaaaatttacatccgatccgatccaattatgattggatatccgattctataagatcagttgggattggatcgttcggttataattagattggatgactttctgcacacccctaagcaaatgtataagttgccttgttcggcctgtcttgcgagcaggtacccagagtcgattccacgtgtcaccatcgtgtgatgccacgtcagagtgtaaaaattgggataacattttccccccaagtttgtacgggacttttaaagttgcgtgtagactacatccgagctgtctttgcatttggatgggtgacacgtgtcaggtgtgtctattcgcgactcaatgtgaggctgactaggcgtctcttcggtttttggctaataaatgctctgacgcaattaatgcttcgaaatccaattttctctcaccacatttgacggttgcacttgattgcttttgatttccaatattcactttttgggagaaccgaggcatctgaggtttctgaaatgattaccctttttcgctgttttgcctataaatacgactgagcattgtacacaaactcactttcaccaaccttctttgttaagcaagttcagagcaaaaagagaaatttttagcttcaagtttgttggaaaaattttcacaaaacccattcgttcagctttgcgtaaactgaatccagatgt

SEQ ID NO: 154374 - DNA, 832 bp, Cannabis sativa
gataataatctcatatatgtatatagcagcagtaatttttatttaagaatacatttggaaccaagtaaattatattttaaatgagaagttataaataagtagagttacactataaaaaagaaattaaaataccaaaaaatatgaatgtaatactaataacaataaataatcattaatattgtatcataatagaattaaaagagtattttaacaaaaaaaataatgattttaatatgatttttatttttattattttttatatagagaaaacaataactcgatcactatttaaataaggttaattacctcatattctattttttttttaactttttttttaaatttacagtttggatttctaaagtggttgcagcgctagttgtaataggggtttctatacgattttttgttgcaattttgcagcgctagttgcattaggggtttctatataaaatttcgtaaaaatgcaaaaaaaactattttgaagtgtaaaaatgacaaagcccatttaaataaataggactcccccttacaaaaaaaaataaaatacttacttagtactccccaaataatataggaaattaggaatcatatgtggtagactctcttaaagggtttggtagatcttttatttgtttcgacatcaatttttatgattatatatgttgtaactatttaagatcgcttgtaaatttttagaaaatttcgaatagtttatgataccaaaaataagatttaaataattatttaaatgcatataagaaaaaataatcatttgttgtaaatcttgtttttgacattgtaaattatataatttttttaaaaaatttat

SEQ ID NO: 154375 - DNA, 798 bp, Cannabis sativa
  modified_base (652)..(654): a, c, t, g, unknown or other
taaaccataaacatgaaaactacacgtaaacataaatgacttctaatcttatattgataacaaattagattagattggaatgggttttatttagggcataaaattccaacagaagaaccctcttagccatcaggtaatcagaagcaaaagaatcaagagccaaatcttatctgttacccttccaaaaattcgcccaacgggaaatcctacagctaatccagaaaggaactcaaaggcttgagacccacaaaaagtttgtttcaatctccctagagggaaaggtccgtaaagggcagttttcataagggaaagactggtcgtcatgatcgggagatagaaggagcatatatatgcatccagagccaggggagagaaaggggaaaagccaaaaggaccctccgatcgatttaaggtaaaaactcaacgccaaacacgagaacctgatgagccatttaaaataagaaaagaaaaccataccagttttggagagcaccttaaatgaaggaccctcatgggattttatgcactaaatataactcatttcaatatcatctgatttgttattactagaagattagaagtcatttatgtttacatgtagttttcaagtttatggtttaatataaaagttctattaagtccagaacatatnnntattcacaattatagtgatgtcaatatagtggaagctaattgtgattatatgctcgttccaagacattggcaaaatatcctagtattggatgtattgagtatacattggactgggaccgatattgatcttggtaaagatattat

SEQ ID NO: 154376 - DNA, 689 bp, Cannabis sativa
cccaaatgcgtttttagtgcttggaaagcttcttcacatttttcggtccattggaacttcttgttgccttttaagatttgaaaaaattatttgcatttgtcagaggaatatgagatgaaacgatttagagcggggactttacctgtcagactttggacttctttttgcttagtcggagatcgcatttctactaaagctttaatcttcacagggttgcctcaattcgtcgctgattcaccataaacccgaggaattttcctgagtcgaccccaaagacacacttaagaggatttagccgtattttgtatcgtcgccgtattttgaacattgcttgtaaatggttgacatggtctttcgcatgttgagaatttacaagcatatcgtcaacatacacttccatggtgtccccaatcaaatctgcgaacatcatattcaccagcctctgatacgttgcacctgcgtttatacaaccaaaaggcattaccttgtaacaatacaaacctcgatctgtaatgaacgaggtatgttcccgatctggttcatacatcgggatctgattatatcccgagtatgcatccatgaaacagagaagctcatgaccagtttgggtaaaacgactcccttatgaagccgcatgccaaaaggcggtctacttcttccttcagcgcttggtacctcacggggtccat

SEQ ID NO: 154377 - DNA, 567 bp, Cannabis sativa
accaccttggcatcattggttggactagctattgcttccacccatttagaaacataatctacgaccaccaatatgtaaagattcccaagagatggagggaattgccccatgaagtcgattccccaaacatcaaaaagttccacttcaagaatgcaattcaatggcatttcatttcttgctgaaatattgccaactctttggcaacgatcacaacttcttgcaaaatcatgagcatccttgaaaatggaaggccaataataccccgattggaagacttttgctgctgttctttgaccatcaaaatgtccaccataaggagatgaattacaatgctctaggatgcttgcaacttccccttccggcacacaccgccacattatgcgatccgcacactgtctatacatgtaaggctcatcccaatagtagaatttcacttcatgaaagaatttttttagatactacctattcagttcaggagacttcatcgcgctcactaagtaatttacaaaatcagcataccaaggagtgattgattgggtcacaacaagcagctgctcatccgggaaa

SEQ ID NO: 154378 - DNA, 673 bp, Cannabis sativa
  modified_base (67)..(71): a, c, t, g, unknown or other
aggacccagggagttcgagggctccacccgctgtcaatcctggacagacgggaatcgtggtgaatgnnnnnacaacttctgttactgaaactgcgcctggtgtgcaagagaccggacacgacggttccgcgcacagccaggacgttcataacatgactgttccaccaggcatcaacgcccagacgaccatcaaaaatgcaactgtattgcaaaacctccgtgctacgcttggactcatgcagggtcacaacaataccctgcatcacgatcaggaagaattacgtgtcgcagtaaacctcttgtttgacgaacagaggcgtatgtttgccgagtggagggacaaagagatgaaggcattaagagctcaccatgtagaaatcgaagatcgtagtcggcaagccactctgctgatacgaagagcctatcagactgtaggccagcaggcgccgagcgtcattccccttggagaaactgaggatgacccaacggtgaatgcttcccagacaaccaacggtcagccatccaatccctggtcacaaggtccactcgtgggccaagaggtaggcagacagagcttgttcaggaattaatcaggaggagtcatgctcgatggatccatgcaaaataatggaaccattccacttgccaaccaagcgaaccaatcgctaaggca

SEQ ID NO: 154379 - DNA, 1483 bp, Cannabis sativa
  modified_base (28)..(29): a, c, t, g, unknown or other
ttaattaatcacgttttccataaacctnnttgattagcaacgagctgcacatcatgtttaaaaatcacgtaatacgcctttgttagttagggtgttacataaacccaaacccagatcgggatccggacctggacccagactcagacccagactcggaccaggaatcaaacctcaaccctgacccagacccaaactcgaacccagacactgaatcaaaattgaaactgggactaggacccaaatcggatcctaggactcggaccatgatgggggacctggacctaagccacggaacccagaccaaaatcggaacacggtactcggacccgaacctggacatcggggcgaaactcaggacccaagaaccagactgagacttaggactcgaagcccagaccgagaatgggtgtgtgacccatactcggaccctaacccaaatcttgacctaaactcggaccgaacccgaactcgaacctgaacacgaacttggattcggaccgaaacctaggacctgaacatagatgggggacccagaccttggaattgggcccccgaactaggaccagaaatttgtctcagaacttggatcgggatcaaggactcgaccccagacccaaacctggacataggacccacctcggaacatgggatctgggactcgatgcttggacccgaccagtactcagtgtctggatcaaggacatagaccagaactcgaacccaaactcgaactcaaactaagacttggacacatacgaagacccagacccacactcagtaacaaaaatcgaaacatgaattagaaagggaccaagatctttgaacaggaccgggacctgggccgagacccagcctcaaaacctacttgagaccgaaacttggacctaaaccttgcctcagacccaaatcacaacccgaacccagactctgatccaaactcaaccaaaacccgtaccccgtgacttgaaactgggatcgaaactagtggcagatcaggacccaagaacaagaccatgacaaggacatgaacatagagccaaaactataaccggaccaggacccagactcggtcaaagatcgactctaggattgggtccaaaatataaatccaaacccgaactgggactcaggacacgaacctagacctgaattcagacaagaacattgaacatgactcggacccagaactcgatcccagtctcggtcctggacctagacccaaacctagatcatgacctaggacatgaattgaaacaagactaggacccgtgattgggatgcagatcttgtccaatgattagagaaccggggcttggacacgacccatagtcgatgtcttgatcagggactcggacaaggacccgaagctggaaaaaggaccaagacccaggcccaaacctgggacccgaaaccgaaacttgaaaaagaacgtgatcaggaccatggaacaagaccgggaccgtgacctggaccttgacccgga

SEQ ID NO: 154380 - DNA, 506 bp, Cannabis sativa
gcaccaaaatggccggcaacagaaagaatgatgagaaaaaagcaaggggatttgaagtaaggaataaaactgattaccaaaggaatataacttgaatgaacatagtatacaagaaggtttgggtatagaaaaccaaggtcaacacataggcagtagagcttcggagtgaactctggttaaagacatgtagtcaagttggacttccaacactctcatgaagagagaaaactgatttaaaaagaaaagcattattgttaattagttttgagatgaaatttatacactttaatgacacatttcacttttatttccaaattctaacactattatattgtttggtttaactttgatggcacaagaattaatggtagtcattcaaagaaaaggagtatttaatgacttctgtgaccctactatagttgtagcctaaaattatgatatacaaacaaatagctaagcccttcaaaaacttagctagaatccattttcatgatttcccaactcca

SEQ ID NO: 154381 - DNA, 1089 bp, Cannabis sativa
caaccattaaatagtaatccaatggcttaaaaaaatataaccatgatggttgcaataaaaatgtaaccatgatggttgcaataaaaatgtaaccattgaaacctcttccttaaaaaatatatatatgattaaagatgctcttaaagagctaactcaccaatttctctattctcttctccaaagtatttcagtaaaatgatatttatttttattttaccccatacatttacataagatcatattcttgataatatttaaatattatatttttaaatatattctatcaattaaaataaaatagaaaaataactaaataaataatagataatagaaaaatgaaaggtaaaaaataagctaaaaaaattattaaaaaataagctaaaaataaaattacataaaaattcatatgccctataatggcttatattattttctaaaaaataacaacaataaaatcctacacccaattataccacataattaacgattcatcacctctaatacattcacaataatataaccatgcattcacatacatatcatataatataaatacataaaatctacacaacatttaatgtatacacattcatagaattgctcttgataccaattattactcttatggtactaaatcaggtacgtaacggaagagtttcatattatttaattatcattgtatcgtatcccaaaggatcttgagatgtgtgcacattaaatcaaaacataaaataataagtttagaatatatatctctggaagactatcacggtatcttcaaaacttcttatatgttgtatctcttaatgtagatgatgaggatgatgcaattgaactcgcactagggtcttctaaatagatccaccacacacaaggaatagttagggatattagcctattaggataagttgaattctcaacacatgagcaagaacaattgagagaaaaataatttattttcttgctctctctatatttattgtaatgaccgctttagtaatttagattagtaaagacaattagcactaatttctgttattttatgattatttatgaaattaattatttttgtggaccccaatatttaga

SEQ ID NO: 154382 - DNA, 575 bp, Cannabis sativa
ataggccgaaggatccaaaggaacaggctccggaggtctagaacccatccgggaccggcctagataatctcctaagttggagaaataataatccttggcatgatcctcccaccgggtcgaagacatcctaaacctaaggagacgttcatcgagccctacaggcctaaggctagcatattcgctaacaggagggacataatgtattgctaaaggtgacttaccagagccagaagtgggagcccctgtattcggcacctggacgataggccttgtcctgggagccctcttcttaaccggactcccaatgcgaagggatctcccgacagccgcttggctcctcctctcgatcgggctcccaacgcgaaggggcctccctgaagccgcctgggccctagtataagccttctcttaggccttccggtagaggtaatcctggtacttcttctccgcggccgagaccctcacattcgggcagatgaccttcaaaaggttggagtcctccaccgactggtgcgccaggatcagcttggccttctagcagttctccgtcatgaccaatcccccgacgtcgagat

SEQ ID NO: 154383 - DNA, 513 bp, Cannabis sativa
ttagtgttgacatgtcttcaacgtgttttctgcttttaaccacgtggaggagccacgttaggtggacaaaatttgggattacatttgccccctaagttcctgtccaaacatctagtcggatatggactttacactatgtctggtattgcaactccctttgctgtgtaggtatgcatgaccaggcattagactcttcaacttacgtgacttaatgacattaattttacatcgatcaatgtgggaagtcgtgtgacggctgtacatttttccatattgcaactcttggccttcactttcccatgcatgcctatttttgtggcattaactccccattaacttttttggaggaaaatttccaaaaactatatataagcctcattcttcttttcattctttacttttcacttttgaataacaaaatttctctcaaagactacttagagcctaaatcttgtgagcttgagttcttcgtggatttttgagtttctaacacccacacttgtcatgcggact

SEQ ID NO: 154384 - DNA, 681 bp, Cannabis sativa
gtctcttttgtctcttggctgggtaatttgggtcgatattcaagtggtgacagataatcttagggttaatccctatcatatctgagtggctccaggcggattgatcctggtttgcccttagaaaacttattagttgctattttagttttcatctaggtttttcccactgaatacacactttgtgggattttctggatataaaataacctcttccgattcctcgattggttttaattggttttgttcatcttgaatccgaggatcaagatcctcatcctgcttctcgccttcttcagttgtgactgccattagttgatggccagcttttctattctgtagctctatccggtagcattcatgagccagaagttggtcacctcgcaccacccctacacctgttggtgtctgaaacttcagggataggtgtttaattgaactaagtgcacctagtcccattaacgctggtagaccaagcagtatgttgtaggccaacgacaggtcgacaactagaaagtcttgcattatggtagtggataaaggcgtcttgcccacagttaatgggaattcaattatccctttacttgctacactatcttttgtaaatctgcacagatttaccatgcatggttttaactttgctttctccagtcccattttctttagtgtatccttataaaggat

SEQ ID NO: 154385 - DNA, 606 bp, Cannabis sativa
atgttcgcttggggtgttagtcatgttgcagagcctcaattcctagagctaacatgctctcttgctctacttaaagcgctcgtggattatctagttctttgtttgacaaacttgcctcttgaagctttcttctccagcttttcccgttttttccgactcttttcgtcctcaacatctccctattttaaaaggtgaaacatatacagagttagattatacactcttactgccaagaaacgaggagttgacgaaatgtacagaaggggaaaatcgtaatagttacctctgagcccctgaaaaagatttgcttaataaagccagaacattggtatgctccaaaagcaggtatctagagttataaacataacatgagttagccaccaaaccgtttccgtctcagccatctcaccaaaaacaaagttgcccgacaaatttttctcaagacattcatttatttaaacgtaaccattacacctacttttataaaaggagctatataatatatgtgtacgtgtgtgtatattgaataaaggtcctggaaaggaatgcaaactagttgtacatcccaaaaattataacaaaaccagctctaactaactagattac

SEQ ID NO: 154386 - DNA, 725 bp, Cannabis sativa
  modified_base (63)..(69): a, c, t, g, unknown or other
  modified_base (478)..(497): a, c, t, g, unknown or other
atattatggtccttctaccccctcatctagtgatagctcgccttctagtgattttggtaaatnnnnnnngtggaaatttatactcctcccctttttaatcgtcttttataatgattctaatgcctcgtctcattttgcagacatgggttacaaagacatcctggaccgtaaggggaagaaaaggtcatccaaccctagagtccccattgtcgccgaggtggttcctcccaagaagcaaatgaaaccaacgctcaaaagaagaagttaccggccaagcctattgatctcgaggtttctgacaacgagattcaagagcaagttcttcctccagttgttcctcacaccaatgcccctaatcccgaggcgactcccattaccgcttctccgagtcaagccatcgagaccctatcgttcgtagctggagaagctggctctgagtttgcccaggcatacggggtcgctttttggcacaaacttnnnnnnnnnnnnnnnnnnnnttgggattttctcaatcttaggagtccaaaggagatgctttcgaggaccttggactgtcacttcatggtacgtcagctttgttaatattattatactatctttttatacctcttttgtactcattattttgtaattctccaggcttcctttgcttcttttgcttccaatcgactactctctgagcgacttgagtatttggagggcgagactcacaaattaatatccca

SEQ ID NO: 154387 - DNA, 749 bp, Cannabis sativa
atgataatgataggaaagtaaggtaaggtagtatgttaatgtcattagccaactggaaaatttggagctaagtccaatccaaattccaatgacagccaatcttttatacataaatactaaataggtgggtttgtaatttttgtggaccaaacccaaccaagcttagaaccaaccaagagccatggacccattggacccaagctccaaactcacccaaccccaactcactagatgtggatgtggtcacccttcaaaccctagtcccttttaacctcttttgtactttttcttatatacttaatgacactcaccccaccattacaaacaatcaaacaaatattattttttaacatcattacacgttacaatcatataatatgtatattatagtacttatcataaattctaaattcacaatactaatcattgaattgaacattgttgttcataagtaaaattatttaaagtgactatgaatttcttattttatctatattttattttgatcttcaaaaattaatttgtgatgatttcacaaaaaaaattcatcacaaccgacactttatgttggcatttttataataattatgtaagaaaaacttactgtttcatcttccaatagcaatgtggcaacaatttttagttaaaagaagaagaaaagtgagcataaaataatgggtaaatactattttggattctttattttgcaaaagttatagattggaccctatattttgttaaatgacaaa

SEQ ID NO: 154388 - DNA, 894 bp, Cannabis sativa
cctcaacaaagcatgccctaaagactcttttccactacgaaggatctatcagctcgtagatgcaacaacagggaatgaaatactaagcttcctggatgcttactcaggctacaatcaaatcaaaatgcatccaccagaccaagaacatacaagtttttgaatagacatgggtctatattgctacaaagtaatgtcgtttggtatgaaaaacactggagctacgtaccaaagattggtaaacaaaatgtttaaagaccagatcgggccaaatatggaagtgtacgcggatgatatgctcatcaaatccagaaaggctgggtggcacatagacgacttggacaaatgcttcaaagtcctcataaagtacaatatgaaactaaatcccttaaagtgttcctttagagtcagctcgggaaagtttctaggcttcatcgtcaatgcccgagcaattgaagctaattcagagaagattgaagccctccaagatatgaactcgccaataaaaaccaaagaagtgcaaagcttgactggttcgatagctgcgctcagcagatttgtttcaaaataaacagataagtgtgtcccattcttcaccatcctgcgaggaaacaagcaattcgagtggatgaaggagtgtgaaaaagctttccaagagctaaaagcagaacttgcaaaacctccagtactctcaaaccccctggaaggagaagaactgggaatatacttagctgtcacagaacatgccgtgagtgccgtgctaatcggagaagagaacagcataccaggaagttgaggccttattttcaagctcatcctgttcgagtatacactgactagccactacgccaaatactacaaaagccaaatgcttttgagtccgagtcccaagttcca

SEQ ID NO: 154389 - DNA, 659 bp, Cannabis sativa
aataatattgatgtgaactatcaaatatttaatttccctttaagcatcaaattctcaaatatgtgtaagcaagtttaaaaataaataaagaagagttaagaagaactcccctcgtcaatgatgtgcaaacttgcttgtgtcaacctccataagtgcgtccaattccatttgactttatgcttgcacctacaagagagaaaaagaaaagaaagagagaaaaaaaactacaatgcaattgtcaagaccattcaacattgcttatttattgaatttaaaataaaataaaaacaacgtttagaaagcttgggttgccttccatgaagcgcttgatttaaaatcgtcggcttgactttttgagaagcactagtcaaagagcggctttcgcccatggagagtggcaaatgccctcacaaatgggtctttgttgtggtcgccctcaagcttggcgagatatgaaattgaataggcaaaatgttcaacttgacttgaattcgatgaatgctcatgatggataccaaggtaccatgccaatggtgggggaggaggtagtggccaaaaatgatcttcataaacataatattccattgtcatgagctctttgacttaaggaatgcaaaaatgctcttgctgaattttttcaaaaactgggcaattttgct

SEQ ID NO: 154390 - DNA, 850 bp, Cannabis sativa
agatcgtagtcggcaagccaccgtgctgatacgaagagcctacgaaactgtaggtcagcaattgccgaacgtcattcccctgggagaaatggaagatgaccccacaatgaatacttcccagactactaatggtcagctgccgaatccccggttacgagttctactcgtgggccaagtggtaggcgagcagaccttgtccggtaattcatcaagaggagtcatacccgacggttccaaccagactaatggcgctattccacctgtcaaccaagcgaatcaataaggcaactaggctcttctgtgttcgaaaggttgggaacaacccatgacctaaggaacgatctaaaaagaagaaggggaacagacgagcagaatactgcaacgatcgtgcaacctggagtccatactcaaatccccgctcagaaggacgctgacgtaatccaagtcgaccagaatgccgagcaggtcagcccagccgtataggcccagcttgacgaattgaaaaatatgtttcatggcatggctggacaacgtaacaatgatctggagttagaccgagcttgcggaactccattctcaccagagattaatctcctgccactgcctcacaagttcaaaatgccaacgtggaagatgtatactgggagagaagatcatctttcccctctcaagtactttgtctttcccctctcaagtactttgagattcccctctcaagtactttgagatgcaaatggatttacaaggagtacgggggatgtgtgctgtagaatcttccccgccactctgtcggaagccgcacaacaatgatatttcaagttggctcctcgcgccagctcccattgcattt

SEQ ID NO: 154391 - DNA, 516 bp, Cannabis sativa
  modified_base (463)..(481): a, c, t, g, unknown or other
taattccacgaaagaattaacattgggaattagggggcttgataaggcccgcctcctcggccactggaaaatatgaatcctcctgattagacaattctttagtcctgcacttcaactccttagacatcttcgaagcttccgaacaaccgtcctcaaggcgttctttaaatctcgaagagcctccatcaacttctttagaagaacaattcttctttaccatcaccccaccatctctgcaagttttatattagttactttgttttatagctatttatattttaattttgtatattttttttggctaaacaattaatttattacctgagtatttctttgcatcgagatttgtctttttataattctaatcaccctttaaaaagaatagtgagagtctaaattttaataacgagtacacttttaagcattcataattaaatttgtttttttttggctaattagtaannnnnnnnnnnnnnnnnnnacatgtactaaattgtgccccttgaacttttttgg

SEQ ID NO: 154392 - DNA, 669 bp, Cannabis sativa
ataaatataatataatatatatacaaaaaaaaattaattatatatatacaaatcagaccccccccttcatcctcctctctctatctatctctctttttctctctcttcaaacacaaaaaagaaaacccacaaaccaccatcaccaccacactccgacgacccacctccggccaccgcccagccccacgcgccggaaaaatcgaaagcccaagtgccagcgacctcaccccccaagcggcgctgctcctttcgctgtcgttagcttgggatcgcaagtcaaagtttggtgattcaaactttgaacagatttttcggtcacctccggtgtctgtttgacgagctatcttcaccactagactcagctcgtcgaggagaacaacctacactaagctatttcgcctagctcgctactttttctagtgatatttttgtagcttcgtccctttccgatgacatcgtgtaccgttttgacaaacggttggcattggtgtgatctactcgtcgaggtggtcgttttgatatacactatccctatttttggcgacgttttcggtataacgttttttaccgccaccgattgttaatgtgcactgcttaggtgaggtttcggagctccatattttaaatatagtcatattatatgtcattggactcggttttgaatgtaga

SEQ ID NO: 154393 - DNA, 778 bp, Cannabis sativa
ctaccttctgcaggtctggccagctatggaagagtcgcgagtggccataccctaccctttgcaagtttggctggctatgaagaagttatgggtgaccagactctgcctaatgtaggtttggccagccatggacagcagccaagtgtagacctggccagccaaagccaacacccatacctaggaatggccaaccaaggtctgtaattcaacacaggcctagctaacctccaccatacactttcttagactatgttcggccaaaccctatcgcaccagaatctataacccctccaacgagggccagttagtcaagtcccaacaacaacaaatcctttagtgaaagcacagttggaccaacttagggacatgattcaatgcatagctggtctgaagccttcagatcttgaattagatcggtcaaggggatcaccaatctcggcatacataaatgccttgcccttgcccaaattcaagatgctagtatggaagatgtatgtcggatgagaagacccgttggctgatatcaaatactttgagatgcggctcgatctctagaaggttactggtgatgtgcaatgtcacatatttccatccactttgtccaaaatagctcaataatggtacttcaaactcaccccaagaatatttaactcttaggtagagttctcttgagaattcttgttgtacccaaaagtgagtgttttaatatttatactcgcaagtgcacgaatcgtttcggaatataatgttcatgtaagtgcaaggtcgaacccatggg

SEQ ID NO: 154394 - DNA, 946 bp, Cannabis sativa
caagtggttctcttatttggttttgagatgaatgttaggctatttttaccctaagttccgggtcgaattaataagcattttctcagttaatgttgcctttcagaatggttttacacttggttttccttgtttcaggttcccgatgcattgcagttcaaattctgtcgattggtgaaaagacaggacaatgtggtgaaaaatctgttgaagctgccagttcttgctccagttgtcgcggccaggatatgccatagtcacgaccattttctttggtcgcgactaggttaatttggcagaaagggtgatttttcccatttgcctatggtcgcgactagccctttatgtagtcgcgaccagatacgaaacacgggattttcgaccagttttgaatatttttccattcagaggcacaacccacattcatatataagggactcgactcatatgacgaaggacatcagaaatcagccctgaaaagtgaatgaaggaggagaggaagctattgtgacaatccggagcgaaatcaccaactagttttctttcttaactcttgaatttctttatgttaatttttgttctagatttaatcatggatgttaatattgtttttatgaactgaattcccaattggggaagacaatgaatgttgattaaagtttttgcctagttaatgtcaattgccattcattttatcttgtttgtaaaattatctatatttgtgtttaactccatgtttaagcttgatcaccttctacatgttctatgatctcaattcaaaatctaaaaagtgaaaattgagaatgctaaaatttgataatctaggttttacgtgaaacgaaagtatttgcgtggcctgtgtgacaattagattattgcttaatgttgattacatattactctaattaagatattgattagagaacatgtgatttagaacctaaaagat

SEQ ID NO: 154395 - DNA, 624 bp, Cannabis sativa
tgagcctcaacccaccgaaaaccccaagcctcaacccacggtgacggcgcacggcgttgaggccttcgacccacccaatcgacgacaagcccacggtgatcggccttcgacccacccaatccacgccgaaccatgtctaaatcgaaggtatgttttgattattttgtttttgttttttttttattttttttaagaaagtgtttaagatttattgggtttgtgattttgtatggaattttttgtgtttaagatttattgtttgtgatttaagaaattttttgtggaattgggattggggtgtttcggatctgtgaaaggagaatggattggggtgtttcggatgtggggaagataagggttcaatggtcatgtgttgggtccgatggtatgggtccgatggtctgatgtggggaagaagagggtccaatggtcactgggtccgatggtccgatggtcggactgtcatgggatctgatggtccgactgtttggggataagtggatccgatgggtgtcacaaattgggtgttgtttgggtctgatggctaccaatcagaccttcacaattggtccgattggtagccatcgcacccgggtattttttttttggttttattaattatta

SEQ ID NO: 154396 - DNA, 745 bp, Cannabis sativa
tcgaccagttagtgggtgcaactaatgggtacgagcttatgtcgtttatggatgcatgtcctggatataaccagataaaaatgtacgtcccaaattaagaagatacaagcttcgtaaccaacatgggactctattattataaagtcatgcagttcggactgaagaacgctagggctacgtatcagtgactagtaaacgaaatgttcgcaaggaggtttacgtcgatgatatgttggtgaaattgataaagagtaaggatcatacctcagacctcacggattgatattaaaaaagtataacatgaagctaaacccaaaaaatgttcctctggagtctcctcgggaaagtttttgggattcatagttaacacgaggggtattgaggcaaatcctaaaaaaatcaaggcattaatagacatgccattcccaacaaagcctaaagaagtataggccctgataggaagaatggcgacacttaacatattcatatcgaagtcaactgataagtgtgtgccattcttcaacatattgcgagacaacaaaaagttcgagtggacaaaagagtgcgaagaggcctttcagaaaggcatctcgcaacgcctccagtatatgcaaaaccaataactggagagacattatttctttatttagccatctcaaaagatgcaattagtgcagctgtagtgcgggaagagggcaaacactagcaacctatttactactctagatatccccctctagaaaaa

SEQ ID NO: 154397 - DNA, 658 bp, Cannabis sativa
aaattcaaaggttctcggctaaacctctttaacaaaagtggagtcgaaccgttataactccctgaccaaacctttttgacaagagaggggtgaaatcattacaacaccttgatcaaacctttttgacgaagaagggatcaaacaactataatttttgatttataacctgtccgacaggaaaggaaaaattgaaagttataactcgcgtataaaactgaatactaacggttctcgcgagctaggaaagtgaaaaacaaggcatcacaatgccttgataaaagttcttaaacctagaaaatggatagataatataactattcatacgagaaaattaaaaatatacgatgatgtggtgaataaaataatccttaaagtatatttaagttttcttaaggaaaattataactgcaattgcgaggcagaattgacaaactactcgaaaaccataaagtttggtagattattactgactacttaaaatataattatttacattgtgaataaaaacgcaagcaaacacaattctaaagttcaaatgaaaatagtacaaggcatttaagataaggaaaaacctaaaactggttacaactttgtatttacaaaaataccactaggggcaaaacattaagtcatcttcctaaaccaaagatgagagagg

SEQ ID NO: 154398 - DNA, 596 bp, Cannabis sativa
  modified_base (26)..(34): a, c, t, g, unknown or other
tttcaaataacatagaaaaaaactannnnnnnnnttagtatacgtgcctcgcatgtaatttttgctagtatatatatacatatatacattatgttaacattatatccatttaattatatttttaatttttattttgattatatatatttttaattatataataagtttttttatgaaaaagtatttaatttaagtaccatttataaaaaaaataatataaaaaatattttttaattataattttagtttagccatttttttttaatttattaatacttttttattttttttagaaatataatatatattttttattttttttattattaataaaaaataattttatggtaattgcaataagtaaaagcctcacaaaattaattctttaaaaaacataaatatttgtttattttattgtttaagaaggaaataataacacaaatatattattttagataagtagattgggtaaaaaaaattataatagaaaaatattttattagatatgtgtagtataggtttaattttaaattgcaatgttagaaaaaaaaaatacaaccacatttaatataagataaaagataagataaatatgt

SEQ ID NO: 154399 - DNA, 577 bp, Cannabis sativa
gatagtcggcgcgtcgcctcctcagcatatgcattgctgcatctatatgctgcatataaaggttagagaaatcagttagacaacaaaatatattaattgtacattagttgtaaagtaaatttataaaatactttacttacgtcatttgtaagtcattcctgtggtatcagcagcttccaaaagaatgatggaccgtaatcaccacttttcaaatcccgaagtcggtggtaaggaatgagtccagaacaccactttcgaaaagtatccaacaattgctcatccggtggcgccaggggatcaaacgtcgaagaaggcctctatttcttcttcatctctgtgtagtcacagaaccatacatggggatttctcttcctcttccgactcttaacccctgcaggttgtgcctctatcgccaaaatttcaccttgggactcgctatcatgaatatcgataaaacctgcaccgatgggagtatctggagctccttcataaggatcatacccgtcaggaaagacctcctcctcttgtagtgggggtgatgcagctggtagtaggggtgatgcagttggtagtgggg

SEQ ID NO: 154400 - DNA, 513 bp, Cannabis sativa
gggcataaaacccaacagaaggaagggtttatggcacttaagttggacatgagctaagcttatgatcgggttgagtggggctttttacaggctatgttgaggaggttgggatttgatgagctagtggttaagctgataatgcaatgtgttagttttatctcctacactatcagatctgggggtcatgaaattgggcctatcattcctacacgaggtttaagacagggtgatcctctttcaccttatctgtttcttctgtgtgcagaaggattctcagcattgataagagagtatgaacagttggggaagattcggggttgcaaagttgcgagaggggctcctatgttatcacacatgttctttgctgatgattgttatgtgttttgtaaagcatctgaggatagtgctacgaaatgattgagttgttagaaattttccaaaaggcttcaggacaacaagttaatttgcagaagtcctctatcttttttagtgctaataccggcagtggggtgc

SEQ ID NO: 154401 - DNA, 738 bp, Cannabis sativa
acactaagaaaagaaacatattttgaaaagtaataaatgcacaaacaaaatcaacttcaaaaatactacacacataatttttatctattttatcaaatatgccaataaagaattttacaatatctccctttgacatttgatggataaaaataagaataaaaacctactacacaaatgttagaaataagtgtagagataaataaaccctctgtaagcattcataacttatatcaaacatataaaagaaactaaaacttaattctctctcaaaataagaaggtccagagttaaacaaaacaaataaagctatgttattagtatctactctcctcttttatgtcttttaaagcagccaaggagccaaaataataaaaaaaaactgttggaatttatgccctaaaagccaacaattaatggataatatattagataatatataaaatacaattataagatacatgatatattaattataagagtataagtattaaatatctaaaaatttcttattcatatataatcttgtaaggatgtacaagagaattaagattatatgatatgaataaaataagtccgtagtttactaaagtaatgagaatcttcaatatagaattgctaagtacgatttattataaactatacatctagtgtgtatgattttgattcggatcacatatgtagatagacatgtagtaaagatactatgtataattagattatgcatgactggatcgatat

SEQ ID NO: 154402 - DNA, 586 bp, Cannabis sativa
  modified_base (27)..(40): a, c, t, g, unknown or other
aggatgttaatgaaacatacatggtannnnnnnnnnnnnntggtaaaatatatccaacatattaaagttgaggaagcgacttgggaattagaatcacatatgcgggagctgtttcccgagttattcaggtaaatttcgaggacaaaattcttataaagaggggatagttataatatcccaataagctcaataattaataattaaggtttatatttatattatgagttaaccaggtaataaatagaattatgatcctactaatctagttcaacataaaacttttaaatttgctataaatggataaataagcgtaatttttaaattacaaagatttatatagcatgtgtgaatgtaatatgaactatataaaaaatattttcaggtttggtgactttggagactcgatgggggccagaaatgtcataacaagcttaattaataaaattaatgggaatattattataagttgataatgtaggtattagggtacttaaaagtatgtaggatttaatgtagcgccctaaaaatagaagtttcttagtagctaagaaatgataagataattattaataataaagtttttatt

SEQ ID NO: 154403 - DNA, 756 bp, Cannabis sativa
gttggaagttgtgcaaaatatgaagagacgattcataatgactctcaaaaccatacaaccgcaagaattaaaggatacatttttccaagaaaagatcctgacgaaaatgtcctctgtaattattaaaaagctctttttactaaaaaagaaatttttaaggggcaattgttacaccccaaattcggctggaggacacgtgtcaagataaaaggaatgtgaagcggtgcaatatctttttatggaataactcattaattacgtaagtatcagagtatatttgtaactcgccgaccgtaaggtcttaggcgagaaatcaatgtacaaactggcacttagtgtattaacgagaaaccatatgtcaccaaaggtgaatagcaaggcactggagaaaagtgacacctaccctagtttgcaataagcaaactaagtgtaaaagtcagatcagctcgaagaacaagtatgcgagatgaccatctcgctgtgaggagacttcctatagtttcatccaactagaaggcgcgaggctcataaccctggaaagttagaagctttctttatacccgcgatcgacgtaagacatacattgtcgacctcagaaagaagaattctcccagctcgctattgggatcactacaatcaagtttctgttgagacctatccatattcaacaattaaagacgtgtttaatacacaatatatttgacccaataaaagcgggaaaattacagctacacgattttcaaaatcatacaccgc

SEQ ID NO: 154404 - DNA, 550 bp, Cannabis sativa
tagacttcaaaaaggcaccttgccaattgcgaatatgttgagaaagctcaagccactgccgattctttggcaatatctggctcacctgtcaacacacaagattcagttctccaactcttgaatggtcttggaccagaatttgattcagtggtatcgggcatcacttctcgcagtgatcagctttcttttgaggaggtccaggcattattactctctcatgaatcccgacttgaacaccacagcagtataaccgatctttccctcaagatgcaagccaacttgagtgtaaaccagtcaagaaatgggggaaatcatcactctggtgttccttcttctcgtgctccaaatgctgaacatggccgcactacagggtgtttctttgggcctggaaatggctcaaaattgatgtgtcaagtttgcctttgcattggtcacacagcggttgtttgtcactaccgctttgacaagaacttcatcacccccaagtatggtagttcctcttcctctcatgcttttttaactgaaattgactctacctatgatccacagg

SEQ ID NO: 154405 - DNA, 570 bp, Cannabis sativa
  modified_base (318)..(320): a, c, t, g, unknown or other
aaacaacataaaaacgagaaaaacaagggttcttaaaaatcccccaatcggcagaccggttctgcaactggaattccggttctaggaatccctgaaccccatccagaatttcagttgcacaaccggaattccggttcgtcgctggaaacatgcgaaattccaaaactcattcaaatcaaacccaattcaaatcaaaccttccagacctgttttaaaaactccaaataacatttctaaagcaacaaaaccatccagaaaccacagatacaaaaaatgccatgtgagctccaagcattgagttcaaaactcaaacttggnnnaagctcacctacaagcatcaaagcttgctttaaactacataagcatgactataaaaactgcagaaaatgaactccaacacaaacaaaccctacaacaactaatttcacattttcactttgaaaaaccataggttttgaaccaaaactctaaactaattgaaaactaaccaaacatgtatcaaaacagtttcattccactcaatccaacatgcttaaacctctgaaaacaacatataaacacagcagcaac

SEQ ID NO: 154406 - DNA, 623 bp, Cannabis sativa
gtctaaaatcaagcggcgtctcaatcgtcaactgggtggttacgttggttgattgaggatgtttgaaacctgtccgaaccgacttcaataacggtgtgatgtattcctaacactcatttgaaatcatccgtgtcactaccatctgatgggatttcggcaggcgttcatgtttggtgattgaggtgtttgaaagccatcttgaacggcttcattgttagaaggatgggggacactcgtctaacatcatgcggcgtcacaaccgtcaactggttggttacgttgtttgattgaggatgtttgaaagttgtctgaaccgacttcactgttggagtgatgtatcgctgacactcatttgaaatcatccagcgtcaccacccttcgatgggattttggcgggcgttcaagttgggtgattgaggatgtttgaaaatcatctagaccgacttcattgtcagaaggatgggggacacttgtataaaatcaagcggcgtcacaaccatcaactgtgttgttatgttggttgattaacaatgtttgaaagctatccgaaccgacttcattaacggtgtgatgtattgttgacactcatttgaaatcatccgtgtcaccaccctctgatggga

SEQ ID NO: 154407 - DNA, 584 bp, Cannabis sativa
ctggttttctgggtgacattttcaaaaacccgcctcagggccctctggaaagcttagactacttaatccatgatcatctctcccctttggagcagtctgaacttgaggtaatcccaggtcacgaggaaattaggcaaacgctgttctctatgggaagcttgaaggccccgggtcctgatggtatgtcagtgctcttcttcaaacactactggaactttgtgggacaagacttctgtgatgcagttgtggactttttccagtcagggaatatgcatagaggctttaatgctacaaatattaccctcattcctaaggtccccaatcctaaaaaagtatcccagttcagacctatctctttgtgcaatgtgatttataaggtaatctcgaaaatcattgctaatagaatcaaaatgttcctacccagattgatttgtcctactcaagcagcttttgtctcgtgctggaacatccaagataataatattttaatccaggagatcatacactctttcaagaggaaaaaagggaaagaggggttttttgcaatcaagattgacctggttaaggcgtacgacaaactaagt

SEQ ID NO: 154408 - DNA, 555 bp, Cannabis sativa
gatgagtacttcctggtggatggcacgggcatcactcgcactcggttccagcagatttcgacatatcaccgccttcccctcactcttgctctcagagatagagctcaaaagctttctcgactaccgggggaagaccagaatattatccagttgatctccgaggataattttgtgaagtacgggctctatcccaaggactttattcctaagtccgtgacagggaagaagaggaaatttgctgctgcacggaccgaacgagctcatcaggagaatgaactcgttcaacttaagcgcgaagctaagttgaagggaggtgcaagggccaaccagtatgttcaggagcccttgaatcttgaagatgaatctgaggaagagcaggggaccccactgaagagggagaagaaactttcggacccgcccaggccagttgaacatgccatttgcataagggagcccatttcacctgcttgatcgtcctttcccgtgttcggtaaagggaaagttgttatgtctgaaataagatcgatgtcaggtgatgatgaactttcaagtctt

SEQ ID NO: 154409 - DNA, 572 bp, Cannabis sativa
gccaaggtcttttagttgaaatttcgagttaagaaaggttttgaacgcagcagcatctgtagtattgttactagcaattaagatgtcatcgacatagactagaagagcaagaagtttgttgggggtgaccggatgaagagagagtgatcataggcagattgtatgaagccacgttgagttaaggtggtgcttagtttggcaaaccattgtctagaggcctgttttaagccataaagacttttgtgtagtttgcaaaccggattgggaggaagctccccctcatgcacatatcctttaggaagagacatgtatacttcttcatctaaatccccatgtaaaaaagcgttatcaatgtccatttggtggagagaccaattatggatggcagctaaggctaggaagtgtttcaaggtgttgaatttcgcaactggggtaaaagtttctgcatagtcaatgccatgttgttgagtgtatcctttggccactaagcgtgtcttgaatctctcaatttcacctttggagttgtattttattttgtaaacccatttgtttccaatgggatgaaaacctgg

SEQ ID NO: 154410 - DNA, 876 bp, Cannabis sativa
attaataaactcttatgctataaattcagcataggtgaaattgtgttttgcatttattttaatatgttaaatgtgaaatttttgcttaacacacggcttcagatcattgtctgttactactggagccaatctcgaataattttattgttcctttacggcaattccattttgagaatgcgtggttgcgtgagcccatgtgtctacaagttgtacctgattgttgggagcagtgtagtggtcagccaatttgtcagaaattgaagtattatggtgagaggcttgctgtttggggaaaagagtatactggtaatttcaagaaaaaatctcgcagtgcaaaagagagattcggcgatggaagcaagggagggactctctatctattcagagatttcgtgaggctgaattgaggttaagtgagaccctaaaccagcaagagattttctggcgtcaaagatctaagcaattatggcttcgtgaaggtgatagtaatactaagtttttccatgctaaagctactgctaggaaaaagcataatacgatttctcgccttcaagatgattcgggtagttgggtctcgtgggatgatcgtcttcttgatgttatgttgaattattttaagaatctatttacgacatcagctttaaagttttctccggtcattgatgctactcccagtgcagttacttggtctcataatcagcaactccttgatccggtcactgaggaggaagtgaggcgtgctctgtttcatatgcatccggataaattgccaggacctgatggtatgacgcctgggttttttcagaaatattggaatgttgtgaaggatgatgtggttatgcaggttagaggtttctttgatactgctattttacc

SEQ ID NO: 154411 - DNA, 521 bp, Cannabis sativa
acatttatattaatttttttttattaaattataatatatatctttttatctcatatgtacatatacataaaattaattagctagatagcatataaatttgattagtgtgtatggttcgaagatatcttaagagcaagaaggaataaaaattatcattgcaaaattttctgtgcttatctttggaaaggcggtgagatgctaaatggctctatagtcatgtggcttggtaagaaatttatagtgataaaaaagtgggaggtcttggtgtcaaaaatattgcattatggaatctttgtgtcataggcatgtttgggctatcactaagaataaggataacttttagattaagtgaattgactctatttacttaaaaaaaagatgattggttggactatggagttccacttgatgctagttggtattggaaaaggatagtgtaaactaaggaaaaaaaaaattaagagcatgtttggtattgttttctgttttttattttcaaaaaattgtttttagaaatgaga

SEQ ID NO: 154412 - DNA, 657 bp, Cannabis sativa
  modified_base (231)..(245): a, c, t, g, unknown or other
tttgatgttaacttgtgattttcagaaattagggatgttagggtttgaatagattatggttcgaattataagctttatttgagttgattttaagctctggatactagtcttggtgtatgcacatagatttgagaaagtttgagctttgaactcaaaattaggtctttaatggcataattttattcactgagtttttttgtgattttctggttggaatatattgtgtatacnnnnnnnnnnnnnnntggaaggtttggttgcatttggtggagttttgagcaaaatatgggatttgtgggtgaactggtataaataggctagccggttttactagtacctgtaaaatccgttagccagtttttgcagggttccctgaatgttccattttctcgattctcgtccatttcagtgtcgtagctgggtgtttccttgtttcctgagatagtgtaatccctaaagagtataacagtacctagagttgtgggttcaggtttcccggattagggttttgattatgtgatttacccaattttcaatatgtgattagggcctccatttagcacaaggctttccgttcaggttggccagcacacttgaatttggaaggaaggtaagaactgtatataatatgtaatatgaatatctaagtgtatatat

SEQ ID NO: 154413 - DNA, 945 bp, Cannabis sativa
tccaaaaatcgtgcaatttcatggggacaaaaccatcaccattgtgcattacttttctatgggacacgttgagagaaaaagtagttttgatgcactaacaaccattttaatcgaaatagtgaaaatcccacattttgatagtggtacccctttgtgaaatgtgacccagactcatctcagaatattttttggcactagtcacattgaattcgtgcttctaagacgttaatatgaagattggtttcgtgttaatcttagttaaaatggccccctaattcaaaaattgaaaatatttttctttttagggtaaattttaacaagttttttccttactcttacacttattagtgttctgttgaaatctcatcctacacagctccaaaaatcgttaaatttcacgtgatgaagccaagaccgttgtgcatcatttttctatgggatgcgttgagaaaaaaagtagttttcatgcactaacagtcatttaatcgaaatagtgaaaatctcactttttttataatggtacccctttttgaaatggtgaccggacccatctcggaatactttttggcactagacacattgaattcgtgctactaagacatgaataagaagattggtttcgcgttaaatttggttaaaatggccccctaattcaaaaattcaaaatatttttcttttcaagggtaaattttaacaagttttttccttactcttacactcgttagtgctctgttaaaatctcaccctacacatctctaaaaaatcgtgaaatttcacggggacaaagccaagaccgttgtagatcacttttctgttagacacgttgagagaaaatatagtcttcatcctctaacaaacattttgatcgaaatagtaaaaatctcacatttcttgtagtggtacccctttgtgaaatgtggctcggacccatctcgaaatattttt

SEQ ID NO: 154414 - DNA, 521 bp, Cannabis sativa
  modified_base (493)..(495): a, c, t, g, unknown or other
ttttaccgcaaaaaataggacttaagtatttatctgctactcgacataaaacttaagtatttatgccgcaaattactcaataaaaaataaaaatctacgatcgtgctaattgaatgaactataaataaatatattttaaattatcttattgaaaggaagtaaattacaaaacaaaccttttaggatatgattaagtcaatttagaaaatccatgtaagcagggacggactaacaaaaaaaaataatttttttttttaatttgataattatagatcaaaatagtaaaaaagtccctacaaaattaaataaatctaataagagtaatatatgtataaatattttttaataataaaaagtcaagaaaaaattctgggtctgaaactacatgtaagggtacatatacctaacttatttgaaaataattgtaatgggtaccagtatttggaaatgtatatatctccaatattattggtttgatatttttaaaattaannnttatagttaaatttatttagtaacca

SEQ ID NO: 154415 - DNA, 606 bp, Cannabis sativa
gtatttcgatcctttcactgcatatacaatttcgatatgtttacagattagtccgcattacatatcatttatatatgctttatcattcatattatattatagtctaacagttggtatcagagtagttttaacatatgtcttgatttatatatgagtttcgtttttatatgtatataatacacgttcggctttttttattttatatatatacattcacactcaatttatttttatatatacatatatattaatgttcaccgttatatatatataatatatatttatatctatggtgtatacgtatatatgacatcatgcgttaatattctcatctctttgcatttgcgatggtatttaaagcatctccaatggtaaaattatagaagatatttagtgaggtagacatattatgtggtaaaatattgagatgctataccattagagagaaaatgatgtcattcgagaaatttacatggatgctatcaggagttgagctacacccatgacaacggtggctatggctccccaacatttatacatcctcatattatatatacacattgtaaagtccgtttttggcaagttaggtgacaaaataatttttcc

SEQ ID NO: 154416 - DNA, 798 bp, Cannabis sativa
ttattattattattattactatatcttattttttttaaaaaaaataaaaacttacacattagagtcatcatttttatattattattatatttttttaaaaaaaaaacaaaaacgttaaggtacataatgttgattgatattttatgtatataaacaaaatttaagattcattatatttgatgttttaatattttttttttttgaatttaatttttaatttctaattttttaaaatatttttttatatttatagaaaaatatttaagaaaatagtaaaaatcaatttgtagatttatgcttttttatagaaaaattattaaaataatagtaaatatcaatttatagatttatgccttaataaaatatttaaattgagagaattaaagagacaagagaaaaataatttaaagtgattttagaatatattgattataatagatatttataataataaaaaaaatcataattgcatgtgtgtagttttttttttcaatttaaattttatttttttaattaattaataacataatattataaacttaataatatatataattttttttaaaaaaaatatcattcaaaaaaaatttaactacacgtgtattttttcaatttaaatttttattttttaattaattagtaacatattattataaacttaataatatatattgattttcttttaaaaaaatatcccttttaaagaaaaaaaaaattgatttaaatttagagttatgatatatataaaaatatattttagattaattgatatttataaattaataaaaaattaaaaaa

SEQ ID NO: 154417 - DNA, 587 bp, Cannabis sativa
cgcctgttccacatgcacttcggcctataaaagccaccattcttccttcatttggttactttcagactttcaccaaatttcttcgaatttttctgagagaaagaaccctcaaaccagaaaaccttcaaacaccataggtttcttattgaccttccttcgctatggtcagtctacgtttcaccgtcgatcaacaacaacacccagttctaaagctttatgtaagtttttcgcatcccgtactttattgcttgtgttcgttgcatgcttcactgtttatctgctttttttgggtttgatgtttgaaatttctgggaagtttcgtctcgagtttttgtgtaatacgttagactcctcttttctggtgtttgagtcactcttattttgcgtattatattttttttccaaaggcccatcttttctttacgtgatgaccttcaagggttcagagaggactttgtctttctcagtttttaccctttcttttgcttttcttttctttgcttattcgtaatgtcaccatctgtgagattcttgcacccgacttttgtccaggaaaaccttctaaggctttcttgttgacaaccgtc

SEQ ID NO: 154418 - DNA, 905 bp, Cannabis sativa
  modified_base (848)..(848): a, c, t, g, unknown or other
gttaccgatggctgagcttgtgattggtgctgttctctctgcttcttttgattttttgcttgaaaagattgcttctccttatgttgaagagttctttttcgagggaaaaaatgaaagttcatctgttgtttctgagaggcttttcaagttgaagtcaacattcaactgtcttgctgcagttcgcttggaagtggagaacaagagaataaaaaaccatgctgtggagaagtggctggacgatcttttggatgctgttgatgatgctgagaacttctttggcgatattgaatacgatgctatgaaacccaacaaagtaaatgaatcaaagaaagagaaaagaaaggctcttagtaagttactctcttgtttctctaaaccttcttctcattcaactgatcgtgcaaggaatgcaaatatggaggagattcttaagaggttggagtacttagccaatcagattggaaacttgaatcttgaaaagaatgttgttgaggtgaaaccatcaaaaagttcacgtgcgaaaacttcattgcccgatgaacctgaaatttacggtagagatgctgataaggatgtcttaatgaagttgttgatgttggatgaaaatagtggtgagaagatatgtgttattcccatagtgggaatgggtgggattgggaaaactaccgttgctcaaactcttttcaatgatgaacgagtgaagaagaagtttgaatgtagagcctgggtgtatgtttcagataaatttgattccatggcagtcacaaaaactctccttcaagaattagcaccgactggtgctagtaatgacatgaatttgaatttacttcaagttaatttgtcaaatnagttaatgggaaagaagtttttgattgtcttagacgatgtttgggaagatgattatg

SEQ ID NO: 154419 - DNA, 675 bp, Cannabis sativa
ttattattataacataaacataataatataatatatatactgtttcaaaaaaactatatataaattaaaaaaaaaataaaagaaatgaccccctgacagtcacgatcgagacccctcatcttattctatttgtctctcttaagttcatttgggcgggttaacccgaccaacccgtcggtcgggttaatttttttttaaattgagaattttacagcccaatctttacgttaggttagaaaatacataattttattttttttatataaaattatgtattatgtatttattattttataaaattatgtattatgtatttttttttttttgaaggaactacaattattatagtcacaacttgttttaattataaagaatgttacaataatttttttggataaaaaatttaaataactaaaaaaattaagagttctttcctacaatatatgttggctcaaggaatcaagttataaagtattattacctagctgctaaagttatatatatatgggcaagactatggtagtaaaattattttttaaacataaataccaatataaaaataattaaaattaattttataaaaaaataataataacaattcaaaataaaattatttttaattattaatataattttttttaaaaaaaaaaaataaatattattataatatgtata

SEQ ID NO: 154420 - DNA, 858 bp, Cannabis sativa
ggctaggctagtcgctaaaggctttacacaaaaggaaggtattgatttcaatgagattttctctccggtggtgaagtataaaacgattagagtggtcctacgcttagctttgacatggagatagatcaaatggatgttaccaccacctttctccacggggaattggaagaagaaatatacatgacctaacctgaagagtatgttgagaagggaaaaatgaaccatgtttgtaaactggttaagtccttatatggactcaagcaatcccctaggcagtggaataaacagtttgacacctttatgatgaaacaaggatttttaaggagttactatgatacatgtttctatcacaagggaatagacatcaacacggtcatctacctgttactttatgtagatgacatgcttattataagcaaggagagatctctagtggatgagatgaagaggcaactcaaggctgagttcaagatgaaagacttggggatagcatctaagatactaggtatcactataaaaagggacagaaagctgggcaaactgttcttgacacaagaggactacattcaaaagatcatagagaaattttcaatgaaagattcaaagaaaacctctcagccaataaccagctagtacactttaaataaggaacaatgtcctaagactaaagcagagaaagaagcaatgagtaaagtgccttactcaagtgttgttgggactattatgtacttaatagtttgtacaatgccaaatctggactttgccataagttctttgagcaaatacatgtcaaacccaggaaaaatttattggcttgcaatgaaatgggttttcaggtacctagtaggaacacctaag

SEQ ID NO: 154421 - DNA, 736 bp, Cannabis sativa
aaaaatgggttgaatgtatttttccaaaaaatggattgaatgagaaatgagtttctgaaagtcttcctacctccgccattctcgattaagatatatgtggatttaatttagatgaaatgaattctctgtaattaatcttcaccactgattgcttctgaattaagatatatgtggaagtctaattttagtaaaaaaaatgagttttattataattattataattaaatgatttaactgtcaaaataattataatatggatttttatataaaaataaaattatttataaatattaattgctaaaagagtcttgttaaatatataaattaagatttagttattttaagaaaataattaattataattaatttaataaatctaatttttctaagaaaatggctaaatttgaaaacaaagtaaatgagatatttttaattccaaagtattctatcatcttactctatataagatggtaccattgcctctgttgtattgacacaactaatgaggacaataccattaatgtttgttatagtgtgaatttttcacctagaaaatcgagaccaggctcccataaatatgacacgtggactcactctccttgaggaggggtgagatgtcagaaggagatcacttgaatatgaacctcgcctaaaccagactcagcgagatggtgtgaccctgatagagtctagtcgcattattatgcctcacacgatgcaagatcgaagaccggat

SEQ ID NO: 154422 - DNA, 637 bp, Cannabis sativa
ttttatgtaaaattttgtaaaaaatgcaaaaaaaaaaaaaaaactatttgaaagtgtgaaaatgaaaaagcccttaaattttattactttatgacaaaataataattaaaaatgaaaagagaagataataaaagagaaatattaaaagatactagtagtgtttaatatttcttttagtgtcatattactattagtataagtgaatattggatttatataatttaagataataatttttagagagtatcagtaatgctcgttcataataaaaggatgttagagtatctctaatagtagcatcttttaaggatactaaaaatttgcacaaaaataatattttattttatctattttccacattatttttggcactcttacttctaaaaatactcaaatgtatagcactctttaaaaatgttataattatgatctcactcattattatttaatatatatctaatttttaagtacaataactttttagccttaattttttattttaaaaaatgaatagcatcaatgctacaacatagcatccatgcaaatttctaagatcacacactacaagaattccccccaatagcggcggggctattagcggcggagctcctctgccgctaataatggggctattagc

SEQ ID NO: 154423 - DNA, 614 bp, Cannabis sativa
  modified_base (447)..(448): a, c, t, g, unknown or other
  modified_base (555)..(568): a, c, t, g, unknown or other
ataacgaaaattatttaatttaaagttggtccaaaattaattaaaaaaaataattttcaactttaatttaatttacagtatttaatttaaaaaattatatataaatatataaaatttgaaataaataaataaattaaaatataataaaataaatatttgaaaattatctaatttaagttgttctaaaataacaaaattttcaacttatattagtatcaaaaaaaatttaattaaataaaaaattaagttatttgaactaaccacttaattgaactaaccacttaatttaaaaaactaaccacttaatttaaaaaatattccattttaagttgatctaaaattagcgaattttcaacttaaaacgatatttaaagaatcttcaataactaatttccaagaatctcttaacttaattatgaatttcaaaaaatattcaaattcaagttnntccaaaattagttataaataactgattttcaacttaaatatattttaaaaatattcaataattaagcttctagaagaatctaattagttaaaattctttatttaatnnnnnnnnnnnnnnatacatatagtttatcttgaaaaagtttcattaaactaagtgtgtt

SEQ ID NO: 154424 - DNA, 1070 bp, Cannabis sativa
catcaaaccttgcattatgagtgttcagggattctagctaaacatttaataatataaatatatattgctttaaatatacacatattatataaatatatatatgaatttaaatacacacatatatcatatacattgctttaaataaaattaggcacaaatttacgtagttcagtaaactttattcccctacatctacagtagcaaggagtcagtattgcatctttatgtaaaagattataaagattaagaggaaaatactgtctaattttttgggcacgtgtggtaacctagattaggttacttttttgtgtgagataaataggatgtattagacaatataattatgtttgtaagaagaaaaagaaactgtaaggattgtcgacgtgtttgaaggtggtgtgaacagtttagttttttttatagaaggttatgaaataagcaacctaattttcatagaaggttgtgaaattggcagcctgactttcatagagggttataaaataggcagtatgatttttatagaagcttgttaaataagaagcctagaggttgtttggctttacagtttaaaagttgttttctgtttttagaactgaaatcagtttttaaaaactattaggagtcgtttggcaaaaaaaattaaaaactgttttttaaaaattgaattttaaaaaactagaaaacagaaaacatcaaaatgttgtttataattttcaaaaacaattttttttatctaacatatgatattttatattctgctcacatacttggatcctagacctgaaaccatacccgaacctaaacccggatgggttaatgtcatggtatggtgctaaaatattgatttttttttcgtaagaaaaaatctaaaaatagtttttaaaaatttgtgccaaacactattaaatttttaaaataacaaaaaactattttttattctcacttttaaaaactcaattttaaaaactgacaactgaaaacacaaccaaacaagttcctagtcttttatcgaagcttgttaaacaggcagcctggtgaatgataaatgtgattaattaaaaagactatta

SEQ ID NO: 154425 - DNA, 651 bp, Cannabis sativa
tgaggccagaaatagttcatttgtccatcaatccattcaaatggacattactcaactgttccttcggttagttcattttggtagtgaaacttgtcactacctacactgatgggatacttaccaaaattcatatattgtctggttattatgccaaatcagtggcaaagttagttggggtatgttaagaatagaataaatagatacttgtttgttatattggataaatttagaagttgtatttgattttaattattacaagcatgcatgcagtcagtctgtagagaatgtgaagagtattttcttggaatcattgagatggataatatgaatttgaattttacttttatacttgagtctcttaactcttatctgctaagaatttgtatatataggtatgcttctgaattttattccttttatgatatcttatacttgtttgtggctatatttttgttcttattattcttgttatttttctaatgttcaattaacagctttgaaaatggatcaacactgaagcaatcaattgctgaagtgcgtaaatttatttgacttgggtatcccgcccgatgagtgtgcttatatttactgatttcgttgtaggtgctgataggaagttacttctgccccctggattgtctatgctactag

SEQ ID NO: 154426 - DNA, 640 bp, Cannabis sativa
cttttctttatttttttcatttaaagcggaaaaagataatctagtggctgtgaaaatgatgatatcagtagaaaaataaattactgtgacagaaaaaaaaaatgaataagacaaaccaaacaaacagactattctataactaataataatataataaaaaaataattaagaccataaaattataaagtaagagaactcgagatgaagcttattaatggggttaggaaaggattagatctaagcacagattttaataatttagattggaatacataattcaaagtaggtgttccttccacttgcagcctctacttgtggttggctaaatattattattcaaaacaaataataatgctaaatcgttaagaaaggctatagataattgtaacaacttgcattgcacatacccatatatgaccttatcttataaaaattaagacacgagaatatattattagctcagtccagagagagagaatatatgccaaatcaggtcacaggtcacagtgttatattgttacaaagagccaagaaaatgttatgatattggctaagacccatgtgaaatttctgaagctgcttttgtttttgattccatacaaaggtcaatttacaacagctgctgccaaaagaaagaaaa

SEQ ID NO: 154427 - DNA, 510 bp, Cannabis sativa
ttgcttcttttgctcaattaattgatatttttgtagagcgatttgctagtaggaagaaactggaggagctattagatgacctctatagaattagacagagaagggacgaatcgctaagagactatgtagcaaggtttaatgctgagaaggtgtccattatagcctgcaacgtggaggatgtgcttgccaaagcatgagctcaaatcaaatgggaggaagatgaatcgaacaggcaaccaatctctaactacttaagttcttgtgagaatcgggggccaagacgagtagagcgtaagtcatcttatcatgttgaaccataccccaccaacaattctaaataaatttaaggcagtggaagagctccgccccaacaatcatgtgattactaagaaaggagacaatcatcccaaaagtttagaggctatcaagataaagcaccaatcccagattatactctaacaatagaccctgttgaagtggttgctataatgaaaggcatgggaaataaag

SEQ ID NO: 154428 - DNA, 1264 bp, Cannabis sativa
ttaatgcctttcatcagagatattaagagaaataccatgtctccgacctggaaatcaatatcccgtcgcttttgatcagcataactcttctgtctactctgtgctgtgagcatttgtgctctaatattatcaagtgcctcacttattctctgaacagcttcgggtccaaagaactttctttcacccatttcatcccagtgaatatgtgatctacattttcttccatataaaagctcataaggagccatcccgattgttgcctggtaactgttgttataagagaacacgatcaatggaaggtaatttacccatgatccctcaacgtcaagcaaacatgcccgtatcatgtcttctaaaatctgaatagtcctctcggattgcccatccgtctgaggatgaaatgttgtgctgaactctaactgagtacccatagctcatggagacttttttagaatctcaatgtaaacttcgaatctctatccaaaataatggactttgggacaccatggagacgtacaatttctctgagatataactcagcatactagtcaatggagagattcgtcagaacaggtaaaaagtgcgctgactttgtaaacccgtccactatgacccacacagagtaaaactgttccgtggttctaggcatacctaccacaaagtccatagcaatgtcttcccatttccactctggtatgttcaatggctgcagtaaccctacagaccactgatgttcagcctttacttgctgacaggtaaaacatttagcaacatactcatcaatgtcgttcttcatgcctggccaccagaatatggctttcaggtcttgatacatctttgttaaccctagatgaactgaataaggagtcgtgtgagactcattaatgatctctttcttgatactctcatccatgggcacacacacgcgattcccgaacctcaacattcccatttcatctaccaagaagtcactagctttccaagccaaaacactagcacgggttcttactaattctgaattttgcatttgtgcttctttaattcagtctaatagagtggattgtagagtaatattagccaattgtcccacaactaactcaatcttggctcgggtcatctcatattctagttgttgggagattttcttcacagtgctcaattgactctgacgctttctacttaaggcatcagcaaccacgttggccttaccagtgtgataaaggatctcacaatcataatgcttcaccaactctagccaacgcct

SEQ ID NO: 154429 - DNA, 520 bp, Cannabis sativa
cacggtaggcaacaagctcaaaaagtatgacacaaaatattaaaaaactttaaaatttattattattattattaaatatgtatttatcaattataaataagttaaaataataataaaaattaaatataatactgaacattatagttttttaattaaaactactagaactgtaaaattataattatatatcaatttatttatagagtatgattaaaaatttgagtttttataagtatatattcaaattccaataatattgatatcattttgtttgagataatatcatcttgtagactcaactaactatattaataattcaattagaatttgaaaatagattatgtcttatttgagaatcttcaccaaattttggttattttgagaaaaaaaagcgaaataggaatttatttgttaattagtatattttgtaggtctaattaataaatatatttaaattgtattttatttgataattatttataattattaaaataaaattaatatttaaataattagatga

SEQ ID NO: 154430 - DNA, 766 bp, Cannabis sativa
ttcttggaactatggtaagtcattctgatatgggaaattttaattgaaacctttagtggtgaggtgtggatttatataaaatgtagtaggagtaactcatgcatgcccatagtaagtcattcttgtaaattttcgtttattccgcgttgttgtaattttgctgcccataatgtggctaattgggcgttcgcccagaacatctcaggttttgtggaaccctccgcaatacctgatactatcctttgtaatgaccgtgaggtctaattttgatatctatctaacgctttatttcaaaaaaaataaaaaataaaaaataaactcatgcatgcttggtgtttgccttatgcctacttgttttgtttcctttactttgaatgtttcttttattgtctactttttttttttcagattgatgattggaaggttatggttttttaaataagagcaaggacaagaaatgggcggattgaactgtattatggccattgaaaatttccttatttgtctcaaagctatcatttccttttggaatcttaggctcaatatcaaaggtacctatacatatacatatagataagtaaatatataattaaggtactccatatatatataattgacagttattcgaacaattgctatgaaggacgatataagctccaaccattgtctttctcttttctcttttctgttgcggagtggctagtgtcaagggcaagccacaaggttagctcataacaaaccttttccctttagttgcatatgtata

SEQ ID NO: 154431 - DNA, 563 bp, Cannabis sativa
cctctcactacttttgcttaataatcctcttcatctttagagatctgaataaatcctctttgtagttcccttgtacaggtcttcaaggctacaaggtagcatattctcaatcggaaatgctttcttaggcgcaccatggttcatggagccactgccaccacttccacctccttccccaaacgagtcaaatatgtcatctctgaaaattccacttgaaaaccttgaacccctcatacttcctcctccaccacccatccctctcaagcctccaaacggtctcgaggacccgaaaaactccgcaaaaatatcgtttgcattttgagcattgaattgaaacgtcgtgggtccatctcaggtcgagaagtatgaagctccacccggtcctccggcgcctagtggtggcatttgacccttaagcccttcctcacggtactgatcatacactgcttttttctggaaatcactcagaacctgcaaaaatgaaattaaccataaattgacagctaattaaaaagcttcatattaataaagttctatattttggagagaaaaagaggggtggg

SEQ ID NO: 154432 - DNA, 721 bp, Cannabis sativa
attcaacgagcagaaggtgagcaacagccgggcaaaacaaaggctccttccacttgtacatccgcccaacttccccattattccagcaattcaagacgcaagcgttcaggcaacaaccacaagcaaggaaacgggaagaaaggaaagtttactgaaaagtccggacagactccccgtggtcacgccaaacacactgcattcactatcctaattgaagatatagagagtgtgtatatggcaactcagtcgttaatttcgtacaagaagcccgcacccatgaagaaagataccagcaaaagggacatgacaaaattttgtcggttccgcggagactacggccacgacaccaacgaatgctacaacttgaagcaggaaatagaacatctgatcaagaaaaacaacccggaacaaggccaaccaaggccagaacaaccagggtctgttgtctccaccgatagatggacacttactagtcattattggagccccgcacatcgctggagatacgagcaaagctcgagagagatatgcctgaacaactcagtacgagcaagaagaagtcatcctggccgtggaagaggggaagcccaaagttccacgcgcaatgacacgctggtcgtggaactccagatagcaaacaaaatggtggttagaaccatgatcgataatggagcttcttcaaacattttgttcaagactgcttacgagaagatggggctcc

SEQ ID NO: 154433 - DNA, 806 bp, Cannabis sativa
tctaggcaaacctaccacgaagtccatagcaatatcttcccatatccactctggtatgttggctgcaataacccagcaggcctatgatgttcagcctttatttgctggcaggtaagacacttagtaacgtactcagcaatgtcattcttcatgcctggccaacaaaacatgacttttaagtcttgatacatctttgttgaccctggatgaactaagtaaggagtcgtaatagcttgatgtagactctcccagaatcttgatgtaaactacggatctctagccgaaataatagagtttgggacaccatcaagacgaacaatttctttgacatataacttagccaactggtcaatggagaaatttgtccgaacaggtaggaagtgcactgactttgtaaatctgtccactatgacccacagaaagtcaagctgtcccgtggttctaggtaaatctaccacgaagtccataacaatatcttcccatttccactctggtatgttcaatggttgcagtaaccctgtaggcctctaatgttgagcctttattcgctgacatgtaagacacttagcaacgtactcagcaatgtcattcttcatgcctcacgaccaaaacatggcttttaggtcttgatacatctttgttgaccatggatgaattgaggaaggagttgtaatagatcaatgtagactctcccgaaatcttaatgtaaacttcggatctctatccgaaataatagactttgagacaccatgaagacgaacaatctctctgacatataactcagccaactggtcaatggagaaatt

SEQ ID NO: 154434 - DNA, 575 bp, Cannabis sativa
tagggcataaaacccaacaaggaccaccagggataaaacttgaacaaactaatacgcaaccacctatgtaggccacgaagtgacttcccctctggctgggctcactccaggaatacaagagattgggaacactagtatgacggtcgatcaaactactcctaccaccaagctcctgtccaccaataacactcaaaggcatgttagagatgacactaaacttcaaaatctgcaaaaagcacttgggcttatgcaaggccataacaacactttgcatcatgatcaagaagatctctaagtagctattaacgttgccttcaacaagcaaagacgttaattgatagaatggagggatcaagagatggaagtcatgagagcttaacaagcagccattgacgatcgctctaggcaggccaccgtgctaattagaagggcctaccaggttaccagtcaacaaccagtaactgaatctagtatccccctgagtgggtcagaaaggtatgtagctagtcataccacacagaatcatagtggtcagccgtccaatccaaggccataagtccaaaatgtgggccaaa

SEQ ID NO: 154435 - DNA, 536 bp, Cannabis sativa
tgtattaattattacgaccaaaatgtgtaatacaatgtatgttgtattatttaatacataacaaatggtcagtattataatatttacaaaggatttggggtcagcacaaatctttgacccaaactcgaattcaagacccgtaccctgaaccaggacccgagaccaggacctggacccagactcggacccagacagggacttgaacccagactcaaacttggacccgggaccaagacccgggacctggaccgagagccggacccgggacccgaggcccaaacttggatcgagaccggagacctggacccggacctggacctgaactcggaccccgacccgaacttggacccggacccgaactcagaccccgaccaaaacctagacccgaactcggaccccgaccccgactcgaacccggacgcaggacccggacccgtagttggtgttggggtcgagtgtattgaaaatatattataactttacacgatcaatatttaatacaagtcaataccaaacattgtattgtattaaataat

SEQ ID NO: 154436 - DNA, 558 bp, Cannabis sativa
taagcgtgggaatgattcatgcaacttagacaacaattcttcaccaatttctgatcctcctaacaataataaggtacgcaagaagcacttcactttagataactcttcgaagttcttcagcatactcgcttcttcacaacgtaaatggcgaaccttgggagaacatttattactgtcattcatcattagacaaaactcccccgagataaacattgctaaatcatgtataagatcatgcataaggaaagtttcttcaccgtcgggtgatgtttctttaccgtcgggtgatgaaggttggaaaaatgacttcgagattagatcttcgaaatactcttctccaacttcatcaagcctctttccattttcagaatgtaagaaaccttctgccatccataacaagatcatcccgtattctgtaaattcaaaatcttttggaaatagagagcaataagcaaagcattgctttaatttagaaggtagataaagataactaaaccacaaagatggaagaatattaacttgttttctttcatacaactcccatatatcattgtttag

SEQ ID NO: 154437 - DNA, 626 bp, Cannabis sativa
tcccggtagtgtaaactctatgtcctatagtgctagggaaactcttttttatactcttttttacactttctttttaattaagtgacatgtgtaattttctaaattatgtttaaaaatagttacaattatgccctcatttaacttttattaatgataattaaaatgagtcacctcatttacgtacttttctttttattattttttaaaactaataattaatttattatttttactgataattaaaatgtctgattctatttacttgtttgtttattttttaggtaataaaataacttaattaaattatatttttttaattaaaatttcgtttttttaatagataatatgtatcacaacgaattattctattaatttcttttataataaatattggctatttactttataaaaaatgaaaaaatatattttttcataaattttgcaccaattttttttttattatttttctttctttctgttttttttttcctttgtatcattcttttaaaaaaaaatcgtgttttttatattcttacattcctttaaattgttctcaaatttttctctaatcgaatatgtatatatataatatatgttaaatcaattagttttttttgcttattcat

SEQ ID NO: 154438 - DNA, 556 bp, Cannabis sativa
accggtttcacaggcatagtgaaaccagtcaaccagttttggcagcaatgggggaaaaccctagttttggcttcgaaaccggtttcgctcggggtgtttttcaaaacatagaataggttatattagtgatgtttaagctattttaaactagtggagagttggaaatttgtctgattatggagctagggtttgtttggaatatggataagttgtttatcaaatttctttgttgtgacatatgacccgggatcgcttagcttgttttccactcaggtcggcccgtacggttgacttctgaacaaaggtaagaaaagtggtaagcaccatatgtgttatttgttgacagttgaatgattatatcttgattattatcaagatcctgattaaaagtatgtttagcccaggttataacctagggattaggagtggttattaccattacgagtaattagtcttgaaacagaggttaggtttcttacttatcattcgctttatcgggtaacgatagtgacatattcagcttgttattaacgagtggtaaaggggtactttataa

SEQ ID NO: 154439 - DNA, 904 bp, Cannabis sativa
tttttttactttttcttcttttttctttcttaaactttctgaaaccctaatctctcaaccctccctcccagatcgaaagagagagagaagagggcagatcggggttagattttttggatgtggggttcagttcagtagcccgtctgacatggggtggtcggagaaggccgacgttgtgcaccgtgagagagagtgtgtgagaggggagttggagaatgttgggtcgtgggttatgcgactgtgtgctagggttttttcagttaagaagaagaagaaaaaaaaggaaaagtgttaaaaacgaaatgagagtttaggtagttttgcccccaaaaaatcgatttttgtggttaagtgttaaaaaatttaaagttcaggtagtttagtcgctaatatcccaaaaagtaaatattttttaatttttttcttctgatttttaatttttttaaatattaataattattttttaaaattaatattacgtggaccactaaaattttttcacgtgtacaaatatatacacgtgggcagtccattgtgacacttaactttgatttttggacggagaggtacagagcaaaatgaaacgggagtttaggtagttttgcccccaaaaaattaatttttgtagttaagtgttaaaaaatttaaagttcggttagtttagctgtcaatatccctatattaatatactaggcaactaatccccattgcaaatagtatatatcacatccattgattaagtagacacttttataatcgtgaattacatttgattttgtttaaaagaaaaagaatcagagcgcctgttaggctatttttagtctacattttgggtcactttttatagttgttttccttctttgttattctttttggaatagaattacgcttgttttctttgatt

SEQ ID NO: 154440 - DNA, 811 bp, Cannabis sativa
catcggcctacaacatactgctgggtcgacctgcactaattggactaggggcagttagttcaattaaacacctatctttaaagtttcaaacaccaacttgtgtaggtgtagtgcgaggtgaccaactactagctcgtgaatgctaccgcatagagctacagaaaaacttggtcgtcagctaatggtaatcataactgaggaaggagagaagcatgtccaggatctggatcctcgagttcaagatgaaaagaaccaattgaaaccaatcgagaaattggaggaagttattttagatcctgaatatcccacaaagtgtgtattcattgggataagtctggatgaaaaactaaaatagcaactaacaagttttctgaaggcaaaccaggatcagttcgcctgcagccattcagacatgatagggattgaccctaaagttatttgtcaccatctgaatatcgacccaaattacccaaccaagagacagaaaagacgacccttagattctgaaagacaaggggcacttaaagaggaagttgataagttgttgactaatgactttatacgcgaggcattctacccctcgtggatatcaaatcctgtacgtccttgtaccaaaaccaaatggaacttggagaacttgtatcgaattttcagatttaagcaaggcatgtccaaaggattgctttccactaccaaggatcgtccacttagcggatgctactactggatacgagcttatgacgttcatggacatatattctggatataaccagattaagatgcatatacttgatcaagagcatacaagctt

SEQ ID NO: 154441 - DNA, 505 bp, Cannabis sativa
gtcctgctgactttcaccttaggctaacattgccatggtgttatcttagtacctgagtcctgtagacttttaccctagataaccggcactgcctgtgtcccgagtcgtcttgactttacatcctgaacaacaatcaatctccatgatacccatctcgatgctcgtaatgaatcccacatctgatgagtgaactgtgaggatctctccccaactttatctagtggcattctcaacaacatgcccacacgcgaatgcctgaccgcccaactcttcatgcacactatgccatataaaagtgcatcccgcaagatgtgactctcgagtcaactatctcatatagcacccctgtcgatttccatatgcatgcaatgtctgctcaaccatccaactgattcacacttgcatcacgcccttctggctcccacgatgtactaagtaccaatgattcaaccctctagccatcatgcaaactctagcacctctcttgtgttgggttttatgccct

SEQ ID NO: 154442 - DNA, 570 bp, Cannabis sativa
ttacgcgagatgcaaatatacaaagtgttgcctcgtgcattaacaagaaaccatacgacattggatgtgcaaggtgaggcatcaacctcgttacacatgagtagacgtaggcgaggtataatgactgttaagacacttagcgtgtaatacacagtatacaaactaggtataacaggcaggtaaacccaaacttccaatagcgaaacatcaatcttgccataggaaggcacactcgtggtaccttcgctaattagctccagacatctttcaatgagattcacagctccgtcgagtcaattctttcagaaagaagctgacattcaaatgatgttgactgttgaagttaaccttgtcaccaagaactgtgattgccagatggagcattatgtcttcagcgtggaaacaacaggatttacattatcaacctcggaaaagatgtgggaaaagctcgctattagaattattgttgctatgatcccaatgagacgtcccataacaatatgagttgcatcgtatttaatactgttggaaattattttaccaggatctagacttactaacaagtatgtt

SEQ ID NO: 154443 - DNA, 756 bp, Cannabis sativa
  modified_base (594)..(595): a, c, t, g, unknown or other
gataaatcgactaagtctttttggcattaggagtgtcaatgagaagatgccctcccggaggagaggtgaaggctccacatactccgggagaccaggggaatgcgaaggtatctctgggaggaacaggaccttatttgaacagtcccctctcattgaatgccgcatgggagaaaatgtattggaacagccataagcaataagtattacagcggaacccctcttttgcagctattacggtatgattaataaggctagtgacggctactttatgagggatcacatcaatcaagaagggataaataattatatccacctaacacctaagatacccacattataggccatatatttcctattttgcatcgattaggaatatgtgcccctatcaaacctgcacagaaagacaagtgattcagttttagggatcacccctaaaaaatactataaataccccccaaatgcactgagatgggggtcgagaattttgggttcataagaattaaagagagcaactaagaggaatatctacccaaaaaattctctgtaataaatactctcataaataagaaaaactcgtggactaaggctcattanngccccaaccacgtaaaaatctcatgcattaaacatcctaaaactttcttacatatctacgatgcctacgacgaaggcagtcacacagaattactgttattaagacaaaaggctactgatcatgaagctgagatcaccgcccaaaaagaacaaaacaaaagg

SEQ ID NO: 154444 - DNA, 747 bp, Cannabis sativa
attgtgggttaagtggattaactcgatttatcttaaggggagtgatttctggtcctatagaatgagcatggacactagttggtattggagaaagctttggaggttgcgagcaaccttcaacaaagctgatattgtggcagcgggaggagaaaagttcaaaaccagcagattttattgcagctcgctgaagcagactttatttcctgcagcaggggctatatggtatggtttgaacatgcctaaacatgctttccaactttggcaagcaacccaagacaagttgttaacaagggaccatcttagcaagctgaatattcctatgtataatctgaattgtgtggtttgtgatcttgaaccggagagtcatagccacttattcttcaagtgcaggctttctttgttggtcttatacaaaatatttcaatggttgggcacggttggttggtccgagaactatgacagttggagagtttggcttggcctccctaggccgactatggtggacaggataatggtccttttgcttgcggctgtgatctaccatctttggtggaactgaaacatttgcttagtctcttccttttccaattctgtaaattgcattgtaaatacaattaaatgtgaagtgaagtataaactcttattgattaaaaataggaagtggtctaggaaggagaagaacttgattcatactttgatttgtaattaggtggagttgaggtagtgcttctcttgtagaagtgaatt

SEQ ID NO: 154445 - DNA, 654 bp, Cannabis sativa
gtaccggctcggggttgctttctagtatgctttcttctttgcctgtacattctaccacaaagttcactagggcctggcctttgattgctgttcggggttggaaggtaatatcgtactgacccaactctaccgcccacttgagtaaccgtccagaggcgtctggcttttgcaatatttggcgtaatggttggtcagtgtacacccgaataggatgagcttgaaaatagggccttaactttcttgttgctagtatcatacagtaagccagtttctctataattgggtatcggccttcggcctgaatgagtcttttactgatgtaatagaccgagtgttttatgttgttttcctctctgatcagcacgacactcacagcgtgctccgtgacagccaagtatattccaagttcttctccgtccaaaggttttgagagtacgggaggttttgcgagttgcatttttagctcttgaaaagatttttcacattcctccgtccacttgaattggttgtttcctcgcaggatgttgaagaatgggacacacttgactgttgattttgaaataaatttaatgagtgcggcgatccgaccaatcaaactttgcacttccttggttcttgttggcgacttcatatcgaggagggcttgaatcttct

SEQ ID NO: 154446 - DNA, 912 bp, Cannabis sativa
  modified_base (681)..(695): a, c, t, g, unknown or other
atatctcccactttgattgaataaatcaacactctctatagagtccttgcttaagtgcataaagttaagtgtttttcaacttgaacttaactatagtgtaatcatcgcaaatttttttgaaaatttggttgacaaagcattgaaccaactttttttttataataaaacagtgagtgatgacacacacacctttgctaagttcacccaatacctcatgtctcgctttgcactgttaatgcccttgtgcacattccattcattgaccttgttgagaaaatatactccctatttctcatttagggtggcaccacccttaagtcaatataggtagaattttacagtatttgttaccaaaatacttgttttccaaactgaattctattaaagacttttaaaagtctaaccctcaaatcggtaactcactaagtactttgtagctttataggatgggacatataatacttatcatacttgttcacacattgattttgttcgtacctattgaacctcacactagtaaagttactagtattaagataggttaccctcaattgctaaccgattgagggagttttagtcccatccctttagaagttttttctactaaatatctaattaatggcttcgtaaatggatccgccaatttttcacttgagctcacataagatattgagatgactnnnnnnnnnnnnnnnttacttacatatccatgtcttagattaatatgtctagacttcccactgtatactacactatatgctctagccaatgttgcttggctatcacaatgtatcaatattgtagatatatcctctttaataatcgaaatctcaattaagagatctcttaaccattcagcctctttcctagtggtaggggtgttcataaaaatcgaaaaaccgaaactgacca

SEQ ID NO: 154447 - DNA, 548 bp, Cannabis sativa
aagaattcggttatataggcacactttatatagaatagatatacattcattcatttactatgtgtttatgtcttttcaactttctcctttataaattgtaacttatatgtatagataaacttatatgtatataatatttctattatttattcgtcatgattattttgtaactgaataatattaatagtcatgataataattacatttggtaactgaaaatactttttttttttttttttttttaataataatagttttttcatatgtcaattaaatgacactaagaattaatgtgagtatgaattaatagagaaaaataattagaaaaataaataaaatagtgaaatgctgagaaaaaagaaaaattggtttcttgaaaagttagaactccacctcacctatcctaacaacacaattatataaatatatagatatataaattggttttgtagtaactatttggtttaatttggtagggaaagtaaaaaaggaatattggatactatattattattgtgtaactgttaagattgtaaatcaaagatcat

SEQ ID NO: 154448 - DNA, 531 bp, Cannabis sativa
aaaaatgacaagcttgagccgcccatttatacacgaagttcagtaacaagaaagccaaagattgagaaatctaaagattgggaatcgtgcagaatatgcatgggcaattgataatgatcttcaaaaccatacaactgccagaatcaaaggaggcgtcctttccaagaaaggattttggcaaaaatgccctccataattattaaaaagctctttttactttaaaaagaacatttttaggggcaattgttatacccgaaattcggctggaggacacgtgtcaaggaaaagagaatgtgaatcgaagcaatataatttatgaaataactcattaattgcgtgagtatcagagtatatttgtaacccgctgaccgtaaggtcttaggcgaggaatcaatgtatgaattggtacttagtgtattaacaagacaccatatgttgctaaaccagaatagcgaggcaccagagaagagtaacacataccttagcttacagtaagtaaactaagtataaaagtcggatcggctcaaagaa

SEQ ID NO: 154449 - DNA, 618 bp, Cannabis sativa
tattattattattattatatcattctttttgtattcccatcacaaataacatttaatttgtattttttattagggttaaataacatataattatcaatcttcaaaaagtatataaggtttcaacaaatagttgtgatgacttagcttaaagagtgaatgatagatttgcttaatggctgaagaccataacaaagttgtcatgcaaggtatttttggtttggacattgaaagtatcttttttctttttagtctttgttttttttttattaagaatattatttcgtgtagttttttttagtttgaaaatagacttctaagagatgatcatagtaaagtttttggtttaaacattgtaggtatattaattttctccatttttttatatgaaattatttgtctcaaattttaatttttcagtaaggctactaatgttcttaatgcaggtaatcaaccattgtatacaatcaatatatatatataagtctttggctcacaaagtaatgaagaaagaacagcaagaagtgagatgaagttttatgagaagaaaaaaacttataggtcatagcaaaataagatggtaatatatgcttatttaacattgtgtattattatatttaa

SEQ ID NO: 154450 - DNA, 662 bp, Cannabis sativa
atgaagaaagccaagccatcatcttgttaagatcacttctaatcgaatatcaagaagttaaggcagccatcaagtatggcggggatgttattacgttgaaagatattcttgccacacttaagtcgaaagatttcgaattacagttggagaaggaatccaagaaagaagaagtgtatttggcaagaggaggatcacccaagaaagcaagtttgaagagtaaacaccactactctcaatcaaaatcgaagtctagagagaaggacataaggaagtgttacttctgttgaaagtcttgacacttgaaaagatttcacaagtagaagtacaaggagcaacaaagcttcaacaaatctcataatggagataggatggacttccggcaccatcatcatgggaaagactctgctgcaatcattgaagatggtgacgattgttccacagacggagagtcgttctctatcttagagtcgtcaatgaacagggagtggattctcgattccgaatgcacttatcacatgtgtccaaatcaagagtcattttttcttatgacaaatcagtttatggaggtaaagttttaatgtgtaatgatcattcgtgtagggtcattggaactggaaaggtggccatcaaacagtataatggcagaatcaaggtgctgacaa

SEQ ID NO: 154451 - DNA, 1060 bp, Cannabis sativa
tgcgagctcgattataccaagactagcgatgttgtctctagtgaatccataaagattcaccatacaaggcctcaatatggcttttttgagccttatcatccttagagtttccttataaaggatatttactgaactctagttgtttattgataccctcttgatccttttattggcaagttgaatggtaatcaccaatggatcgacgtgaggatatctcacgtttttctcatcttcctccgtgaatataatgggaggtggggaacaaaatacaacgtaaattgtatgtcacattactcgctcgcattattgtattaaaatgtgatactgaatcagtggttccgtcatatgacaagacatgcgggttttcaaatcccgaaggaaaaggggtactcatgatatctggatgatacgactcaagcttcgtgagagggttctggctggtgattctgatttttgggggtatctcattttccctgggttgttcttcccgggcattttcctatctcctggttcatgagccacgaggtatgcctcgtggtcttctcactccaggttcaggttgattttgagcattcatcccttgtgccgccttggccgcggctgcatcacattctaattcagcgttccaccgctgcgcctcttctagacggcatcttaggcgacagttttccatttcataagtaccttctcccataggctgggtacctccacgattgggctcttcatctctcatcctagggttctgtccattcccacgctaagttctcctcgagcgcattgtttgcgtactaggaccaacgtcaggttgagtcctttgggaacgtgtgatccgtgcggtggggctaccctcaggttgagtcctcctagaacgggtgttccgtctggactgtgggttggaagtccttctggagcccatgggctctttcccagaacaatgatgagtttcctcatgcggtgtattaaacttttctggatttttagccatgaacgagagggttttttcttcaaaagaaatgagggtttttctgagctttttcaaagaggctctcaatgaaagtac

SEQ ID NO: 154452 - DNA, 683 bp, Cannabis sativa
aatagataataaacatttattctttaataaaaaaaaatatttaatttgtttatttttataagactttttattatttatttagttaattttatagaattcttcatttttaattttaataaacatgttttattattaataatttttaaaacattaatataataaacataaaaataagatattaaaaataatattagaaacattaattacagtaatctatttatggtaattagtttaatcattaatgatttatattatttaatgattaaaatttatagttttatgtaataaattttcaaaatgtataatttttcaaataatttttttttttttatattttttgtaattattttatttttgttgtacatttatgaaaaaagcctttaaaatatatgcgtataaaataattatcttcccctatgtatgttagcttaacatccaacatattagtccatcattagtggcttacacaaaaaaatacataaaatagaagagaccctcatttatcaagatatcattaatttcacgtatgagtatgaaaactgagcactggtgatagtacaattgtattttacaatgtagaaaacaaaatcaaagtaaaaaccatgggctgattctacaatgcaccatcttaaaagagatgtactgatgcacttttaacttgtttcgacatccagaagaatttt

SEQ ID NO: 154453 - DNA, 504 bp, Cannabis sativa
ataagacaagtaaaactgtttaaatgttgaagatttccaaatagactttgctcttgtgcaaccaataagggcgtgagagactgattccgtgctgtgcccacaaattgagcaatttgggtgagggagactccttttaaggaaaagattgagagaacatggcaaaatatggtggaaggctctccaaataaaatgtttaatcttggggggaacaggaatggaccaaagggttttccaccaatgaaggtacggattaggattggaagaggagggagcctgaacagaatcaagagagcaggcaagatggtaagcagttttgactgttaaaatgtcggaggagtgaaaaccccaaataagagaatctgaagatgcagggtcaatgggggttgtgaggatacggtcaacctgatatgaagggaagtaatgctgaagcttacggatgttccaagttgaatcatcatttataaagaaagagacaaaagcttgagactggtggagagagtgcaa

SEQ ID NO: 154454 - DNA, 624 bp, Cannabis sativa
atctaacctgaacaactctggaattgagctcttatgtctgattctaactcccaggtggcttcctccaccttgttatttctccagagtactttagccagagctatagtcttgttccgaagagccttatactttctgtcaaggatttgaactggttattcttcataagacatgtcaggttgcagctcaagattctcatagctaagtatatgagcggggtcttaaacatattttctcaacatagagacatggaatatgctgtgaactgccgaaagagttggaggcaaagctaatcggtatgccacttttccaaccttctcgagaatctcaaaaggtcctgtaattctagggcataacttgcctcttttcctgaaacgcttgatccccttcataggagacacccgaaggaacacatgatcccctacttgaaattctacatctttgcgtttcggatttgtataactcttttgcctgctctgagaagcaagcatcctagctttaattttctcaattgcttcattagcctgttgcactgattccgggccaagatatttcctctcccctgtctcatcccaatgaatgggagatctacactttctgccatataacacttcatagggagccatc

SEQ ID NO: 154455 - DNA, 590 bp, Cannabis sativa
tgaaagccatcttttgagtaagctggaactttgtaattaagagttatgaagatgatgcactaccatagaaaagggctaccttcagtatggtgtgataatatctagttacgggatcaaattgaaaaaggagaaaaagaaaaatcttgctaaggacaatgatcctattttcactgcaaaaactaatgtctaacaagtgtgtacaagtttgtaagtctcctctactaaaattaaaaaaaaaaattcgcggttcacattttatgtaacttgtctattttctctcaacatctggtaagtatggtttgtatttgagatactaattaattatcatctttaaaagcataacatagttatttgtcctttttatgaaacttagaaagatgcatgcattagaataacttgatttttgtataaaatattttagtctcttgtttttttttttatttcaaaaaaaaaataatatctaaaaaaagggtgtcatgtggcttgacttttgggctaagaaaaattggtcatttgtctttcttttggtaagtatcaacatgtgctttatttggtaaatttttgatgagtttcatcttaaaatttaattt

SEQ ID NO: 154456 - DNA, 953 bp, Cannabis sativa
  modified_base (298)..(304): a, c, t, g, unknown or other
  modified_base (875)..(882): a, c, t, g, unknown or other
tggtgtgccaaaatctatagtttcagatagacatccgaagtttacttcaaaattttggcaaaggttgcaacaggctatgggtaccaaactgaagttcagtacgaccttccattctcagactgatggacagtccgaaaggacgattcaaatactgaaagatatgttacgagcctgtgttatggatttcaaagtctccaggagtaagtacctactgttgatagaattttcgtacaataacagttaccaaagtacgatagggatggccccctatgaactgttatatggcagaaagtgtagnnnnnnnattcactgggatgagacaggggaggggaaatatctaggtccagaatcagtacagcggactaatgaagcagttgagaaaattaaagccagaatgcttgcctctcagagaagacaaaagatttatgcagatcccaaacgcagagatataaaatttcaagtaggggctcatgtgttactacgggtatctcctgtgaaggggatcaagcgtttcgggaaaaagggcaagttatgccctagatttacaggacctttcgagatactcgagaaggttggacaagtggcatatcgattagctttgcctccagctctttcagtagttcacaacatattttatgtctctatgttgagaaaatacgtttcaaaccccgctcatgtacttagctatgagaatcttgagctgtaaccagacatgtcttatgaggagcaaccagttcagatccttgacagaaaggataaggttctccggaacaagaccatagcattggttaaagtactcgtgagaaaaagcaaggtggaggaagccacctgtaagttggaatcaaacatgagagctcaatatccagagttgttcnnnnnnnntttcgaggacgaaatcctttttaaggggggataattgtaaagactgcttgctttaatttggaaattagcag

SEQ ID NO: 154457 - DNA, 648 bp, Cannabis sativa
  modified_base (170)..(170): a, c, t, g, unknown or other
  modified_base (596)..(597): a, c, t, g, unknown or other
tatcctagagaggatgtaggcgtgtggaaggatgctagaaagataactaccacgtgcaattgtggagaggcgcaacaaaatgtttgaaacatgttggcatagtacaagattgaggagataatccatactgtatgcttgatactctaggccaagtttgcctgagttacatngtaagccgtaggaggcgcttttgttgaaaaggaagcttgttgacaagggtgtggaagtagtacagggaccatcagattctttttagtcacgacaaaagtcgagagttgatgactgagatggttcagattaggatacacatggaatgcttcagttgctacatggttgtgtcaataggaacgcacatggagaccaaggggtagaggccgcaatcgtcagaggatggttgtacttggaggtgttcgcatgcgagttttatttgacccatatggaagagccgaggtaattgagttatgttggcttgtcaaagcgccagagggcgtaagtcacacaaaggcatcgatagagatgcagagttgtggaatgaatgcatggaagaagccagcaaggctgagaagaccgagcgcaagcgttgagatggcgctagnntttgtgtggaggccagagggccgtgctagtgaaacttagtagtcatgtgag

SEQ ID NO: 154458 - DNA, 852 bp, Cannabis sativa
attttagtcatttaaaggggtagtttgggggctgcctagggaggtgacatgtggcctcttttattcagcaaggattagttaggaaacccttttctcatttgaagaaaagtaaaaaaaaattaggaaaaagacctttcctcatgaagctctctccctctctcttttggctgggacaaaaccagagggaatcaccatcaaaacttggtgttttactggataaaatctaaggaatcaagcactcttaaagctaaggtaaccctagacactattagctaagttttctcaaggttttagttggtttcaagttgtgattttaagatttagtggctattagggtttgggatgtttaggattcgaattttagggttcttttgagttggtttcaagttcttgcagctggttttaatgtgttgtgttggatttttgcaaatttgagctttgagttcaaagctgtgatctctaatggcatattttgattcgttgagtttttttgtgaaatattggttggaaaatattgtctatgcattgtttaggtactctggaaagtttggtgggcatttggtggaaaattgagcaagaaatgaaaggtttgggggtgaactggtgcaaacctgctagccggttttaccagacctctaaaattggctagccggttttggcagggtcccctaacacttcattttcttgattttcatccatttcaatgccgtggttgggtgtttccctatttccagagtttgagtaacctttagagggtatagcagaacctagggttataggttcgggtttcctgagattagggtttgatcatgtaacttactcgattttataatgtgaatagggcatccatct

SEQ ID NO: 154459 - DNA, 1058 bp, Cannabis sativa
tagaccggctgaacatgtacattcatcgtcagagacaagttcgactcatggtgaagtaagtgttgagagtaaatactttactgcttatgtgatcatttgcttgctgctttccattctaggcagtatgtaagcatctagagtatttatgtgttatgtgatgccatgctttaaattctatgtgattaagtgtttatttatgtggggtaaatagatgagttagggtttaaggcaacaagtgcataagtgtggtattggtgcttaactcactggggttgttgattacaggggtactagtaatggaccctccgcaatcatctagaccagagggcaaggaagtagagtctttggttgcccaaaccgatccaccggcaccgcctccacctctgcaaaatttgggggataatgcgggggttggcaatgctaatcctcctgctgattagcagcaaatgttccaagaaatgcgaggtattatacttcgtcaagaagaagagttgcgtcgattaaggcaaccggtaccggctgcccttgttgatcaagtgttaccaccagcacctatgccagtggtgggtaaccaggggttcataatgccgcatagggattctctatttgagcggtttgtgaagctgcaacctctaacttttttgggaggtattgacataattaaggctgagcaatggatgagtactattacccgtatcctcgataatatgggggtgacgggaacaaaaagagtaaactgtgcagccttcatattgcaagatcatgcccacatctggtgggatattatggggcagactcgatacgtcagtgtaatgacctggaaggaattcaagagtctgtttgaggaaaaattttataacattgttctgaggacttcacacatggaggactttgtgaaactaactcagaggaaaatgcctacagatttcaccaggaaagaaaagtatgtaacaggattgaacaccacaatcggtcgggacttgaagattaccacatcacatgacactttgtataaaaaagtggtagagctagccttgattgctgaggaggctgagcaa

SEQ ID NO: 154460 - DNA, 569 bp, Cannabis sativa
ttacatatatagattttaataatgattgttcatcttctgttttgtggctgagactggagagaacataattttatatattatatataggtctgtattttacgtggtacaaaatcgatggtgggttcttataagtcaactttatttgtttttgatcttatataataattattaattaatggcgctgagtccctttacaattaaactaatataataccaagttttatctgttcttagatttggaataagttcttcggtgtatagattactgaaaaaaactatgaaattaatatatataacatcatttttaatccttatggttaatatagtaaaatagctagctgccccgacttgttcatagaaaattaattaattaatatataattttgcgtataaaatataacaaaataaaacccccaaaattatatttatagaattaagtatagagatgattaggtaactggtgacgatttctatcatgttcatacatatatatacatacagatgtatgcatcgatcacttatttctttgaaagtattagtcaataagtgatatcaaattaagtaaccca

SEQ ID NO: 154461 - DNA, 1084 bp, Cannabis sativa
caaaaagggagtcttggccctcatgatcgagaggaccgaaagagtgtttctgtgcaccaagaacccggggaaagaggaaaagggaaccaaagataccctcccgttaatttaagacaccaaatcaacgaaaagcacggtgacttgcgggatcacctggacaaatagaagcatataccagcggtctccgcaggaacgctgaatgaaggaattttagcagagctggtgacgctgcgcaaagacatcgctcgggtctcccggaggcaaaaatgggatgactcagactcagacttcgattgtgaggaccgggaaccatgcgcccgacatattttggaggcggagctcccccaaaattttaagatgcccgagatggcagcatacaccggggacaaagaccccaacgatcatttgtctcaattcaaccgagtaatgacggttatgagggtcagtaatgacgccaaatgtttatgctttccactaacattgagcagttccggggaagaatggttcaaaaagttggaaccaggatatgtggattgttggaaaaagttgcaagttagtttccggagacagtttgtcgcagcgagaaagattaatctcaaagtcagcgccctaactaacatcaagcaactacccacagagaccttgaagaattttataaagaggttaaaggaagaagcctcgaaaaccaagaaacttgatgacggacaacagcttacacttcttcaagccggaatacgtacatgaaccccattttggaacgaattgcaacaggaaggagctgctaacctccaagatttctagaagagggttcaaaagtacatcaacttggaagaaacccaaatagtggcttacggggcatactatccaaccggaatggcaggatatgtactcggagttcaactctcgggaaccctagctcaagttactcatgagcggatacagttctccgctaccctaggatacaattagagcccagccttggctcctgcaacttcgcattacgggaacccctcaaggatgagtggacaagttccgtctcactctgctcctgctgcgagcctaaccggacctcctcagagctccc

SEQ ID NO: 154462 - DNA, 697 bp, Cannabis sativa
tcagccactacattggctttcccacgatggtaaaggatctcacaatcataatcctgaaccaactctaaccaatggctttgtctcatattcaaatctttcttagtaaagaaatatttgagacttttatggtcagtataaatttcacatctctctccgtagagataatgtcaccatatcttcaaagcaaacactactgcggcaagttctaggtcatgagtcgggtaccgctattcatactctttcaactgacgggaggcataggcaataacccgattggcctgcattaatacacaccccagaccctgtctggatgcatcacataacaccatgaacttctccttgtcaaaaggtagggctaacactggagttgtgactaatctctgtttcagctcctaaaaaattgcttcacacttatccgtccatacaaaacgttgattctttttagtgagctcgatcaagggtgttgaaattttagagaacccttctacgaaccgataataataaccagccagacccaagaagcttctaacttctgtcactgttttcagtgtcgatcaatccctgacagattctatcttccgcagatctaccttgatcccatctttgctaacaatgtgcccaaggaaggacacctgagatagccaaaattttcacttcttgaacttggcatataacttatgtcctcgaagtcgttgca

SEQ ID NO: 154463 - DNA, 651 bp, Cannabis sativa
  modified_base (28)..(28): a, c, t, g, unknown or other
aagaatatgactaaatctgaaaataaantagcaaagtagaggagataattttatcttgatttcaaatttttctatcatcttattctatataagatggtcccactttctctgttgtcttgatacaaccgaagaggtcaataccatttaggttcttagacagaaagttattgtaccttgtcatagtgggagggtttcaaggaactcaccctcttatgacttggaagacacttgtgaccaaatccattgtttgtttaagcatgtaatggatagtcagaataatgaactaagaagtaaagccaagagaactatggttgaaaccattcatatggactaaccaaaagatttctattacaaggacaagaaaggaaattttgataattatgtctattcaatggactcaacaaatcttcctattcctagtattataggtttgattttatctaaacttatggcttatggtatgcctggtaatttactttagtgcaagcgacttactttagtaagatgctagagcatttttctaatgacaatctataaaagctttttgacttcatagatttaatatatctaaggaaaagtctttactattcaagaaaatataaatgccaatgaaagatttccttaggatcaatagtgagaggtctcagatat

SEQ ID NO: 154464 - DNA, 558 bp, Cannabis sativa
gtgctcaatgattaaccacattttaaaaaaaaaatgcatccattcatttctttattgtcttttgttgtgtaattgacaaattgtattcatgattgttcttggagtgaaaaaaaaaattgtgatctaagtgtttctcccaatctcatgtgcatagcttgactaaatctatcttgaattcttagaacgagttagattcttaggagagcttaagtctctagaattgtttaatgtttcctttgaggagaaatcctagacaacacttaattaaggatatgatttaggccatctttggatcatttgagcttttcgagcttaccgatatatatttctatccctagtcaccccattgagcttaattgccttcttctttctttaacccatgctaagcctccctacacacattattttttctatacctacttaaacagcttgatctatctaggatatgcattaatttgagagaaagtgagaggagtgtgaagatttgtggagtctttggtgccaccatatcatatattcatattcttagtggtgacaatggggacaatattgggttta

SEQ ID NO: 154465 - DNA, 739 bp, Cannabis sativa
aggggctgaaattcgaagttcttactactggttttctggatttttatcaaaggtgccgtggcactgcttttgcatggcgcggcccgcccccattttgaaacttgggaattggccccaggtaccgcagcattgctttgagttccgcggccgaccctcgtgtttctgggcaaattcgaatgcaaacttagaaaatgcataaatttgtgattcgaactctattttgggagttatacataccgttggaaagctcattccgagctctatgtgattatctatattttgtatgccatgtctatttataaatgtggaatcaggggttaggatgtaaatctcgaaattgtgactaggattaccgacacttggtcaggagctcctcggaatttggaatctccatagttgcgggacatcaggtaagacaatagttagcatgtagagttatgtgcagtggcgcatatactggaaatgatatatgagtaattggtaaccgagattagggttattaccctaacatgagtggtttaatagcagactagggttattaccctagtgatatatgtcgtgtaaatgttatgccatgttagatatatgattatattgagattcaggattatgtgttcaatgcatagctaggttggactcggtaactagaaccgagatgaaccggtctaaggccttattgtatttaaacgtgtgagtgcaacacgtaggtctatgttacatagacataaataggcatgtg

SEQ ID NO: 154466 - DNA, 595 bp, Cannabis sativa
gtatttatttgtatatttattagaaatttagaacaattaactatacatgaattgtatatttatttttaatcatccaaatttttaggaatttttacaaaaatattagattttgaataaaaatttacaattttattaccacacggaattttttacaaaaatattatctttttataaaataacagtaaaataataaaacataataattaaactagcagtggaacaactaaaaaataactgaggaaaaacagtacacagtatttttgaaaaaaaaaatcgcccacagaataaaagaaaaaaagttaaaaatttcaatgtggtataaaaatctcaatttttaatcttacttaaattaaaagttgatttttcctcattgatactttctaaaataatatttttattttaagtaatttacgcataaatactttagtttaattttaggttgtaaataaatacctaaatatttttttacggtaattgttatttcgatttttgcacaaggtaagattaaagggtcgggatcaatcagattcaaaatgtatgatgggataataagaaccctaacagcagtgaggtatgtgcctaatctctctagaaa

SEQ ID NO: 154467 - DNA, 537 bp, Cannabis sativa
  modified_base (86)..(86): a, c, t, g, unknown or other
atgctagtaggcccttcattttttggaggctcgtcggcctatgctggccatagggccagccaggggggtcaggctagacccctcangtggtcggttcgttgtctcttcgtatcacttaagcacttagacatcctgtcaactgatgtgttatgtagatgacttagccttcttgttaacaagttgtactccacatggcaatgatcttgcccacatggacatgccacatcatgtgggaaaatttaggataacacataatacaaacattttaatgtaggtatttaattttattggcatgctatatataattatttttatatattttaaatgtatgatatattatttattttaaataatatttaattagtttctaatttattatatattattgtggtatataattttattgtcataatatgtatatatattctaattgtggtatataatttagttattggaaaaggtttcaatggttacatttttattgtaaccatcatggttacattattttatgccattagattactattaaatggttgt

SEQ ID NO: 154468 - DNA, 512 bp, Cannabis sativa
  modified_base (58)..(69): a, c, t, g, unknown or other
gccatgataatgatttactttcattaaatatgaattaaaacgatgatttgtgttgatnnnnnnnnnnnnatgtggtttatgtgcttatgtgataatagtttagaaatcccaatgtgtgttaatgaaatattattaatttcgatctggaattatttttactggaaagtagacaaaaaattaatgaattttggcttttatagaacctaatttgaatttttaatgaactagttatgattttttgaatttgaacaaaaatatcaggttttgaatgcacacacgcgcgcgaatggggacaagtgaggctcgctcggacaaaatcgcttcagacaagaggcgtgtctgaagtttacccctctcccgcctatgtttctcggccatagaggctgcacgcgtcctcgttcctcggccagacaactccttccgcgcgcgtaggggtatgcaatatgcactgcatacccctgtgcctcaaacttgttttcttcatatcttttgattcaaaaatcgtttttcat

SEQ ID NO: 154469 - DNA, 638 bp, Cannabis sativa
ctcaactggtctctttttagtttaagaaacttcttgtaagagaataaattctcttatgcaaagttgtctaattttgggaaacttgactttcccttttttttttatagataatttcagttttgcctttattagaacaaatcaaataaactttatttggcaggtttgaagtccaaattcatgatcttggttcaatttggaaagtttcattttctggtctaatttgctgcgacagaatctgtctctaatagtgcaaatcaagaattttttaagaaagttttgtacagctgggaaatcgcttttgtggctgtctctagggtttctatgttctataaataggatccagagagcagccaaacgattttatctcttctattcccatattttcatatcttttgttatgagaagagtgtttcatttgtaaaaacctagagtgttcaactaggttttggttttcttattatgatctcatactatttatagaataggttgaagagatgcttaataagtgtgggtcttcgggagagatgtttccaagtctcattttgggaggaagtgagcatatatcttcgggagaagatttgtttaagccttacttcgggaggaagtaagcacagatcaatagctgaagggagttcact

SEQ ID NO: 154470 - DNA, 592 bp, Cannabis sativa
ttgaaaattaatttatcaattaatgttagaccaacataaattagaatatttttcttagacattaaattagaattaataattaagttaattttatttacgatacttaattatttgtttctattttttataaatttaatcaaatagaaaatcatatttaagttcaaaatttttaattttagattaacttaaattagaataattttcagagtatatttcactttattttaatactcaatttttcatgtaaattttgaaatacatttttatttcaaatctgtatattttgaaaaaatttcaattttgaaaattaaattaagttaaaaattaatttgttaattaattttagatgaacttaaatcaagtaatttttattaatgatttattaaaataaatacactaaaatatattatattttaattagaaaattaataattagtttatgaaatatctagatagttattttttaagtagacttttttatattttgtagatgtaatgaattaaatggaaaattaatatttatgttgattcgttcaagacacttaaatatttgatatttttcttaagtgatttaattaaataggaaaattat

SEQ ID NO: 154471 - DNA, 530 bp, Cannabis sativa
  modified_base (420)..(430): a, c, t, g, unknown or other
actcaagaaaacaagaaaaaaaaacaaaaaaaagcaaaatttggtcaaaaaatatcttttgcatgggccgctagcgcccatgtgtgcatatagggtcgtgacatccaacgagtccacaagcaactaaaaactttggcttgcatgaccgcataagatttttttgaatgaaaactaaaagttaaactcaagaaaataagaaaacaaaacaaaaaaaaagctaaactttgtcaaaaaaaatcttttgcatggtccacaaacgcccatgtgtgcatagggtcgtggcatcgattgagtccacaagcaacggaaaactgtagcttgcatggcgacttaggatttgtttggatgaaaaccaaaagttaaactcatgaaaacaagaaaagaaaacaaaacaaagccaaacttggtcaaaaaaatctnnnnnnnnnnntctgtaggcacccatgtgtgcatagggtcgtggcatccactgagtccataggcaatggataaccatggcttgcatggccacataggattcgtttagatga

SEQ ID NO: 154472 - DNA, 760 bp, Cannabis sativa
  modified_base (68)..(68): a, c, t, g, unknown or other
  modified_base (406)..(411): a, c, t, g, unknown or other
aatccaacatccaatggatgttggatcgattggatgactgaaatcaattggatcggatcggatggtanaatctaacatccaatatataattggatcggatttggatggacctaaaacattgaatgtgatccaattaacacccctattctcaattatctttatttaagatatattttacttattaaaaataatttatcatataaatatgttcatcatgtttgtctatgaattatagactagttaaaatttttactctcaaattttaatatgtactataaattatgctctttgaactttaaaaatcattaaaaatgctctttgaactattgagattgttggatttgaagacttttgtatataatttagtacataaaacaatcaccgaaatagtaaaattgaatgaaannnnnnaaaagtccttaaatctaacaaattcaatagtttagagagaatttttaacggtaaaaaaagttcaaaaaacataatttagtatatattaaaatttaaaaattaaaaattctaattagcttaaattacacacgttcatataattattcttatacaaattcatgcctaaaaaggtacaaattttgattggaagcgtggtcgtgagcagatacatacattattattaatatcatcattataatacatacccaaatttgaaattttatgcttaaaataccatttaatttttttttctaaatgcatagttattaaaattggtcctatatgacaacttttctaattttcctaaact

SEQ ID NO: 154473 - DNA, 551 bp, Cannabis sativa
cctttatgtttactttccacatttgctttctgaatgcactttcgattttgctatagaggatatgtaggaaaccctaagtttagaaactctacgattttccttcgttatagttcatgcgatttcatcgcccataatactttctttttgaactgcataatgcctgtgttccatcttgcttattctaagcttcatgaattttgtttttgccctaactcgcgaaaatttcaaacttcctgagttttaaccttttgttgaatattcttattctttaatctgttgagtactcctggtcagcatattttcccgttttaaagtttgatatcccgaccaaacactcatcctgtgtgttgtcttttgtagatgaacccaggtgagttttggggaagcgaacaccaaatcatccaagatctgcttcaactcttgcacgaggatcatcctcgtcttcgttctagttcaacttcttcgagtgacaagcatccttccatacgtcttttgtcagccaaaggatgatgggtcgtaccaaaaagacaatgcgtagggtcgatgcatcc

SEQ ID NO: 154474 - DNA, 618 bp, Cannabis sativa
gaattattagtttggctaatattaaatttacatgtggcactttattgaccaactaacagaaagataaattgagtgttaagtttagaaatttaaggatattagtaggaactacaatgaaaaaacaatgcattatgaaaaaatttgattcataatctcacacctatttcttcttgtatataatctcaaacctgttttttttttttttttttcaatttataatgtttgattcataataatttttttttataaaaaaaacaatttttttatattctgcaaagttaaaaaaaaaaattacacatatatatagttatgaatacatatatatataagtaattgaataatatttaatttaatattattaatttagtttatatttattattatgtgttttttaaaaaataattattaaaataattgtaaattattaatttgtaaatttatgctttaataaaatattaaaaaatgagagaattaaggagaaaaaagaaaaataattttggagagattttagaccaccacgtcaccgcctcacacttttcttttatatatatctttgtatattaaaagtgcttatctaacggtatttcttggtttaacatttcttggtttaacagaata

SEQ ID NO: 154475 - DNA, 560 bp, Cannabis sativa
  modified_base (495)..(495): a, c, t, g, unknown or other
aataataataattattaaacggagtcaaaaaaaattaattaaaaatcataaaaaaaaatcagaaatttaattttaagcatcatgacaaaaaaaagtcgaaaaacgacacccggaggtgccgcacgcgcccccacgcgcttactgtgcgagtgggctatgtagctggtcaccttcttcaacctccagccgggttggaggcgggtcacgcgacccgattgcaggtcagtcgggtttggtcatttttctggcccaaaacacgacgaaaacatgcgatttttgataggttttgttcgggacgaagtttcttatcaatctatggtattaatttcgggtataaatcacgataagggtgtcgatcggattgtgttcaatccaaaagctaagaacaaacaaaggagccggttttgatttttttttctcagccgaatcaaaaattaaattacgtagaaacattgtaaatcaatcggttatgagatttgcactatcaatttcagngtataaactatagaatcaaaaatcccaaattgaatttcataaagaaaaatacataaaccctaaaa

SEQ ID NO: 154476 - DNA, 882 bp, Cannabis sativa
  modified_base (802)..(805): a, c, t, g, unknown or other
ttgatatgattgggtttagcagattgtgatattatacttggaatcgatttcttatccaagtactcagctagtattaattgtaaacggaagatggtgatcttccaacccgagggcgaggaaccgttcgtttttgtgggatcatttcagggatcccaaattctaataatttcagtattaacagctagagatttattacaaggcggatgtttaggatttctgacagtggcataggataccacacgacctgagacagatgggccagaagatattagggtggtttaggaatttctatatgtttttctgatgaacttctgggtttaccaccgcagagagaaataaattttattatcaatctagcatctggagtagaaccagtttctaaggcatcttacagaatggctctggcaaaacttaaaagaattgaaaatttagcttcaggtgttgcttgacctagggttttctcggcctagtgtgtaaccatgggaagctcccgtattgtttgttgaaaggaaagacggatctttacgcatgtgtattaactatcgagaattaaataaactgactgtcaagaacaagtatcctttacctaagatcgatgatcttttcaattagcttcacggaaagacagtcttctcaacgattgatctccgattgggctatcatcagttgagaatccgagaggagaacattccaaatattgctttctgcactaggtacgggcactatgaatttctagttatgtcttttggactaaccaacgcacctgcagcttttataaatttgatgaatagggtattcaagnnnntcctcgatatctgtgttattgtatttatcgacgatatccttgtgtactctcaatcagaagaggagcacgaccatcat

SEQ ID NO: 154477 - DNA, 622 bp, Cannabis sativa
  modified_base (154)..(154): a, c, t, g, unknown or other
  modified_base (561)..(579): a, c, t, g, unknown or other
aataattaagttgactttaatcaagatacttaaatatttatttctatttcaagaaatttaatcaaatagaaaaatgtatttaaattgataattaattttaattaattttagaccaacttgaattagaatatttttcttagatattaaattaganttaataattaagttaattttttttctagatacttaattatttctattttaatatagttaatgaaataaaaaattatatttaagttggaaattttttaattcaggtcaacttaaattagaataatattttagagtatatttattttattttaagaatcatttcttttacaatttcgaaataaatttctctaaatgtagatattttgattttttttttcaatttgaaaattagattaagttgaaaattaatttgttaattaactttagatcaacttaaatcaagtaattttcattgaagattaaaataaatagactaaagtatattttcattcaaaaatcaataattagtttatgaattgtcaagatagttattttctaggtaaattttttggtatttttctagatatnnnnnnnnnnnnnnnnnnntaatatttaagttgatttattcaagacacttttaaatatttga

SEQ ID NO: 154478 - DNA, 549 bp, Cannabis sativa
  modified_base (134)..(145): a, c, t, g, unknown or other
cttttatcatgattcatgaacatacagatgaagtttactttgatgaacaagttgttagttgtttggattcattaatgcttcttttcttcaatagttgatttaatgaacaaattgttatattatatatgtttaannnnnnnnnnnnaaaaataaaaaaaataattatttgaataaaatattaattttttttttaagagttgaccgggtcaactaactgaaacccgccaccccgccaacctgacccctatttgggtccgagttcgattttgtttttttaaacccgaaacccacgaacctgaaattcagtaaacccgcctgatgttcagtcctaattttcaacaagcaatcaaggagtacgaattttagagagcaaaatcaatactggaggctttctcaataaagttttcagcattcttttcttctgtattcttaaatcaaattactaaggctaattaagatttttacctcctgaactttgacatgtaccaaattatgcccacagaacttttaaggtcgttaaaaataatcctgaactattgagattgttaa

SEQ ID NO: 154479 - DNA, 502 bp, Cannabis sativa
  modified_base (111)..(113): a, c, t, g, unknown or other
  modified_base (173)..(185): a, c, t, g, unknown or other
taatataattactgaaatgagcgctcaatcatttatcgaattaagccaagctcgaagaaaatcattgtctcacttctaataattatagacgctatagattccatatctatnnntagcgctcccactcaattgtactgccatgttcccaagatgtaagtattgggaagatccannnnnnnnnnnnnaacgaacaagtcaaagaacatgaataatacatttaagctagaacctagccatctcaggattaagatctattaacctaagatcaactaagtgatattgacataaaaagatgtaacagtaagtttatgatatcgtacacaatgtcaatatcagttcagtctaatgtattccatacatctgatactagtatgctttaccgaaaccctggaaaggacataccacatatcaatgtgtaagtaaactttatcgctgattatcacgtcagtgtaaatccaatttactgacaaatcatgggacctagaactttaaaatatataat

SEQ ID NO: 154480 - DNA, 862 bp, Cannabis sativa
  modified_base (153)..(156): a, c, t, g, unknown or other
aatcaagggctagagacctgaacggaaggagtcattatattctgctgcaatcaatgtaaggttttcttaaacttttatatgtttatttcattgttttagagaattcatatttaggaattaatgaaacatacctcagagccatggtaatgattnnnnttcatgaaatatggatttaaaatggtgaatattgtttttgtattgatttggatgtgttcatgtttgtttatgtgataattgatgattgaatgtgttttacgaaatttttccatgaatttttttttatttggattctttgtgaaaaattaagcaactttcatttttacggatctcgatttggataaaaaatgacagagttatggtgttttgaaaatcggcgtccattgagtgcccatggtcgagcaatcgcacgcacaacactcggacaaggtgaccaagtgctctgtctgaagcgtgcctcgcgtgtgtgtctgaaaggcatcttgtgtttgaagcccacccgtgcacctgcgcacacgaaggctgcaagcagccccctctgtgcgcggacaaggctgctagcagcctcctgcgcgcgcggatgaggctgtacggagcctgtgtgtgcacagcaagggtgttgtgcacccaaaatctgatttttttggggatctttcacccaatttcggatttttccaattttcaaaccctaatttcaaagtaaaatattatttttataaaaatatcaattttaaattaataatatttaatttttcatagattattattaatttatgatattttgacgtttaaatataaaaaattgattattttattttttaattatggttaaattttaaaaatttgttaatttctttaatattta

SEQ ID NO: 154481 - DNA, 684 bp, Cannabis sativa
  modified_base (630)..(636): a, c, t, g, unknown or other
tcaatagccttccacctgagtataatggatttgttgtatcatacatgatcaacaattttaactcatccgacatagacaagctagacacataactgcgtacttatgaacgacctttgctaccttcaaggagggctccctccagttttgcagataagggcaagaggaaagctaaagaaattaatgatgatgcctctgacgatgctgcttcttggacttcaattttgagagctagaatcaaaattgaaccagcaattgaaacaattaaagaacaactgagcagacatactcttctgtgttctcactgtggagagaaaggacatttgaaatctagatgtcctagacttcaaaaccattggaacgaaggtaatgcttttatttttgaatcatatgttttagagaatgacaaatccatttggattgttgattatggatctactaaccatgtttgttcttcattgtagttgcttgaaacttgggattatctaaatcaaggggagttcaagctcaaagttgggaatgacgaattagtattggtccaagctaggggaaaagctctcctcaagttttagaataaattattgcttttagataatgttttgtttattctgaattttagtagaaacttgattnnnnnnncatgtttacaaacacaattttataaattaaattttttgagttctattt

SEQ ID NO: 154482 - DNA, 657 bp, Cannabis sativa
agattgtaatgggttttatttatggcacaaaacccaataggccgtttccaggctttccacctccttctcaagctcttcctccttgatctgcttagtctagacgtccccctccaactttgtgagaagagtgcggagattctccctcttgtctttaagctcattgacctccctagacaagtcgtcatcatctgccttcaattgctcgaccgagggcatctcttgcatttccttagtcagctcctcaacgcggatgttagcagtaaggagatttttgttcacttccccgagctccttcctcacgtcctgaactttctttttagttgtattgacctccctctgcaatatgttggtggtggaaaggttcttggtagcagtggacttatctcgggaataggcgtaagcaatcttcatcgctgacttcagaaagtgatcgattcaagtaatactggagcatgtccttgcccttcttagcctccgtgctaaccaccacggccgttgaaggggtcctagtctgatcagacccgtacaagctccccctctagaactctttgacttcgagaccttctggactggagggtccagggcaggtcattccttagaaaggtcaatgacctcttcgaccggccccttctctttggacggagtctcactgccttt

SEQ ID NO: 154483 - DNA, 836 bp, Cannabis sativa
tattttggaattttggaggtcttaaaaaaaataatgtaagggttttcgggagtttgagaatccttggagtaagatcaacaaaggaggagaagaaaaaatttctcattgaaagaggaatcgtcgccaaaaaaaattactaccttggaggatgaagaacacttcaaggctttttgtaaatgcttggttgtggagaacaaagtgggaggaatgggaaattcgattgaaaactctcttgtttatttatgagttcactctcttaatcctagagcaattgggaggcttttaaatttaaagctttaaaagaagagataaatgacaagtaaaagatatatatatatatatatatatcttttcccttcacttttaaaatggatttcaaaattcctatagaaataagaatatgaattcaagtttaaaaggtaacatcaattcctaatgttactaagattaataaaaaatgagagattaaaaaaaaaaggataaatgataagcaaaagatcaaaagtcttttctcttcttcttttctcctctaattttagaatgacatcatcaactaggattagaattcaaatccaattaatcctaattccatagcaaatataagaaaatttcaaatttttaaagaaaaagataaaagataattttttcttctgtttctttgttaactaattttcaaaaattccaaaggactaagcaagggaatccaaagtcctaattgtattgagaatgcttgaagaacaaaaaataattgcctaagattgttaaaattaatatccatatggtagtttcaagtgaaatgggctcaattcacatcatcaagtcaactccacacaagt

SEQ ID NO: 154484 - DNA, 514 bp, Cannabis sativa
aaatattatatcttcacatatattttattaataaaataaaaaaaaaatacacaatagagtaaaaagaagaataacaattaattaaaaaaacaaaaaagagaaagagaaaatataaaatatgtttacctctccactattcattgagctatatgtagagaatagattcttggagtttggaaatatgtataatagctaagaaattaaaacatttgatgaagctcaattttaaagtctttgctattttattttacctttttagttattatagctcacttgttatgagtgctctaagagcatctccaatgcagtgtcaaaaaagtggtacattactatattttagtacacttcagaaaaactatactctaacgatgttctaaaaagtgtgctaaatttggtacatgctaaaagttgtgttaaattttgcacaagatataacattgtgtcaaatttagcccacaataaatgttacttttttatttactataatgtcactaattattatgattaattgact

SEQ ID NO: 154485 - DNA, 781 bp, Cannabis sativa
  modified_base (327)..(333): a, c, t, g, unknown or other
cctagtaaaataattccaacactccatacatatgatcctagcatacttttccaatgccttagaaagggcataactcttatctaaggtgtgagtaagctctattcatgattatcatgtaagtgtaaatccagtgtactgacaaatcatgggacataaattttgaaacatataatcataattatattccactgtgttgacagcactataataatgaataactatatgttctagatttaatagaatttatacattaaacatataatcatgaaagaaatcatgtgaaccacgcaaaataaaatgacttctgatcttttattaattagtaannnnnnntatattgaaattagttttatttaaagcataaaatttagcaaaatcccagttgtactaatgtaaaactaaaagcgcatttcaattaatctcaacaccttgatgtccaaattaagtgtaatatgtagtattatctttgtaatgggatctgataggttgtattcaatacaaccttttatccaccatttcatctccttagtcacaaaatctttgatattgtgaaattcctccttatatgtctactcctcttgggatactgaattctttactatttggaaactatatctgtgttagtcaagaagtaacactagtggttaatctatcactggaataacgccaaaaagtgtatataaactttccatagactgaataattatctagtagccttcctggccactttaacattcaatctcactggtagagttagagacttcggataagatcggaagag

SEQ ID NO: 154486 - DNA, 672 bp, Cannabis sativa
catgtgactaggcaaaaacatccaggtttgctctaagaaattttatcaacgctgattttacttcgagcaacaaaccctttccaatttttatctttttggtcgggatatcgggatcgatctcgatatcttcttcttcttccacaggtccaacattgctgcttgtgtccccaagtcgaggatcaacatcttcatccctgccttgggaagttccctacttagaagtgttttttcctttgtttgtgctttggttggaggatatttccttcttagccttggccacaacaaggttataaattcctgagcaatctgctggttttctcttagacaccctaccccattctttgttggaaacttcaggcatgaatggaatatcgacgtaacaacctttaagtcatacaaggctggtcggcctagcatgacgttaaaggttgatcgaacgtccaataccaaaaattgtgccattatagttatgctcatcgaagcttgcctaacagtaaggggtaggggaatttgttgtagaggtgcgactccttggctgaagaaaccatacatgggcagaagataagggttagatcttttagttggagccccatctttcataggtggtcttgaataagatattggaagaggctccattatctatcatagttctagccacaatcttgttggcta

SEQ ID NO: 154487 - DNA, 512 bp, Cannabis sativa
  modified_base (466)..(466): a, c, t, g, unknown or other
aaatgaaaaaaaagaatacaaaacataaaaaagaaaaaaaaagcgtgtcacactaaatttgtaaataaaaaaagtttttagttactaagtgtaaatttctcttattatgacaagtcctttttctttcagcaggcctaagcggcaaaacagagtctcaaaaacacaacactcgtagaccccaactcgcttggtctgatatggcccagacatgtacattcatcgttcagctcctgcactcatggctgatcaacaacattcttaccctttcctacaaaatagaccgaccgtgagccaagcccagtaagacaatataaaatatatcaataatatgctcatcatataatataagcagtaatgccattcaaatttgtctgtgcgacacagacctgcatgttgggctgacttgcctgtttatgtttacgtgtcgaaaacctacgtgttgcgctcacacgtctatttatgtctncgtggcgtagacctacgtgtttctctcacacgtctatttacaataa

SEQ ID NO: 154488 - DNA, 679 bp, Cannabis sativa
taacaaaaattaaagaaaatgtgctatcttaaaatagaagaaaaaattattaaaaaagtcttaatatatggaatattatttgaaaaactaaaaagagtatagcgaaacttcttcctattcgtccattggttcagctgcttgtatggtgaattgattgtactttgaactcatcgttcgtgttggatctacatacaactgaattctccatttttgggtcgataatttctccgcaattttttggacaaacaacctatgtttctgtaaaaataattaaaaataagatttaatatacttctatttatgaaaatgtataaattttatatatttattttttattatatttacctcgttcgaatatgactttaattgaactgcagtacatgagaatatgttttctgcaacatctccgaacatcacagcatctagcaactcagtaccatcgtcgagttgtacataggtccttgcactaataatttatacagaatatataacggttagtatgaatatcaaataagttcaaatattaatttagttatgatgtgtttacaaaaattgctaaatacttatatataatagaaactcaaaatcgtatagcaacccacatagaaaccaccaaagaaaccacttgtatgtgagttattttattaatttccttttccgtatagaccttaaaatttct

SEQ ID NO: 154489 - DNA, 576 bp, Cannabis sativa
ggactaacggacaaataaaaagtgacattgaggactattgccgctatttttggaggttggggactaatctgcatcaaagtgatctttttggggatgtatttacaaaaaaaaaaaaaaaagaaaaaagaaaaaaagatatgtatttcaaatggtcatgaaaagtgtattaatgttttgagattacaatgtcaatttgctattctttttaataagagtatataaaatcaattttcaagtaaatagagaaatattttcaactggaaataattcacaagtctttatttttaggaaaataatttataattactataatttttttagattatatctcttttttttgtgtatatatatatatatatgaaatttcttaataaatattaggaactattacatagaaaatataaattgacactttatttacaaaattacttttataaggtaaagacaacatttatactttttatgtgattttaattaccaaatatcacaatcagacgatggttgtagagtggttgctgcgtggttgcggggtggttgcatcagacgaagatttcaatcagacgatagttgcagggt

SEQ ID NO: 154490 - DNA, 532 bp, Cannabis sativa
  modified_base (234)..(234): a, c, t, g, unknown or other
  modified_base (387)..(390): a, c, t, g, unknown or other
accatttgtacaggtaataggtgccccaagtgaccgagcagacgtatgactcttggtcacttctcttttacaaatatatttttaatctgttcggcgttttgggtttgacgaaaccttttgtatgcattgtatggtaaattataaacatgctgataatttcgactcaattgaattttgaaataactatctttattcatttattgatcaaaaagtgtatttgttaccgtagtaacntacatcagagctatttgatctaatctgatcttttagtttaacatgaaataaaacaaattgcagtcatcaagtgattctgcaaggagtatgtgattagtaccttgatcgtatgtcaatcttctttgggaaggtggctcgagttcgacgggcagnnnngcttcataaccgtacgccattgcaaatggcgtttgtccagttgccattttttcaattgtacggtatgaccataggacttcaggaagctctcaatgaaagcaccaaaatgttgacctcacttttagcgaatgacaatgagtct

SEQ ID NO: 154491 - DNA, 516 bp, Cannabis sativa
  modified_base (471)..(472): a, c, t, g, unknown or other
acatgagtgtgatgtttactctctcttcatctcaaatggacccatcaaatatggaccctgcaaagctagcaatgtttaatatgcttaagagtaagtattccactccagcgcctcaactgtcagacacacatcgatcaaggttcccctgcacattctcaacattcagcggcatcatctgacatgcatacatcttcgacatcacagccccagcatccagtacagccactctcgcagcctttgccacaaccattacaccctccaccgccttacccttacatgtatggaccaccgtatccatacatgtacagaggaatttcgcaacaacatccttctgctttctttctaggttcgactgatatggctggatcatcacagcaactttcgtcgtcacagcaagctcagctagtctatgtcacgaatttttctgtttattacgcaagtgtacgtatcaagtagtatctcacgcaagtnnggtcgaaccacagggaattggattgagtactactaaattataat

SEQ ID NO: 154492 - DNA, 500 bp, Cannabis sativa
  modified_base (448)..(453): a, c, t, g, unknown or other
gtgattatccaaataatttattagggttcaaaaaaaaagttcattagagatttacatatctaaagttattgactcaagatcaagagcaagagcctttctatagccttctgctcctatcacaatgcacactcattaaaaaccataataaacaaaaataaaaagagcatatcacaaaagtcaaaattatctatcttaattcattaaggtaatataaaactaatagtaattaagtctataaataaaaaattatctactaataaagccttaaagatgtgtatctaagttaataaaatcaaactaacattatgtatggttcaaagaataaagaaacactaaagagaataatataataataaaattatcatcttatatgaactatattgtatattgtaatccaatgagagaataaaaatgagagaaatgaatatatacatatatggaacacttnnnnnngggtaatacccattgatgggaactaaaaaaaattaataaggtaataa

SEQ ID NO: 154493 - DNA, 951 bp, Cannabis sativa
actcaccctctcgtactgatctaacttggcatgattgcccaagttcgattccacaggtcttcagaatatcgcccgtgtagcatgagatagatcgcactttcgattctatcgacttagcttcaaaggtgacgctggggtcctggggagtctttgatgtacgtggcttgtgataattctatgaaaatagagttatttatatctttttgggcattaaattaactttgttctcaagtatttttaatttattttagtgacttttatttagttttgcataaatattaattttagtattaattttagattaatttttaattaattttgtaatattttatcaattttatttagttctctattttataagtgttaatctcaatgttgtgtgtgtttgataagagataaaatgtaaaatttggacttatgaattgtcaaaatgagtcaaaaaaaaagaaggaatttttcattaatatacgttatttataaattaattacaataataacgttatttaaaataattaaaacaattaacgtgacacctcagcctaaataatcaaaacaataaattaaagatgcctgaaaaaaaaaatcatgtccaaaccatttttttaaataaaaaaaaaattaaacctgacaaaaattagcccacgtatatcaatccttattggtatcattagtacttatgttatttttttctttaaatatcaaaactatttaaaaaattaataaattacaagtaaaaaaattcacataatattttaattaaatttgtagacttctaagtcatcaattaattattttaaagttacaatatgatgataggttatacaagaagttactatgtaaacatcgtatatgaaaataatttatttcaatatgtcaaaataaaatagagtaatttgcggcaaaacccccttaactatcaatttacttgcaaaaaaccatccaacctcatat

SEQ ID NO: 154494 - DNA, 657 bp, Cannabis sativa
  modified_base (290)..(300): a, c, t, g, unknown or other
gtaaaataatttccaacactaaggccttattgtaaatagatatgtgagtgtaacacataagtttatgccatatagacataaataggcgtgtgagtgtaacacgtgggtctgtgtcatacagacaaatatgaaatggcattaatatttatgtgatgtgttcattatgattattgataattataatgtcttgttgggcttggctcatgggtgctctactgtgcaggaaagggtaaatctgtttctgatcagccatgagtgcgggagttgggcgatgtatgtacatgttcggnnnnnnnnnnnccaagtgggttggggtctaccaatgttgaaatttttgtaactctgtttcgctgcttaagtcggctaaggggaaaaggcttataatattttttggattattttgtttgagatcccaaagcatgtaaattttggttgtaaagttaaaattgtaacaagttcattttcattccgttttgtttaaagtttaatttcccgcgttaattttattagtaatcccatttaggggattaggatttcttaaacatctttggtagcgtgcataattgttagggcgttacaatttggtatcaaagtaccaaggtttttaaacttcctataaaccggacgaacatgtacaatcatcgtcagagagaagct

SEQ ID NO: 154495 - DNA, 614 bp, Cannabis sativa
acatatatgactaattttttttttttaatttacattgtaaataactgtttgaattttattttgaatattgtaaattattcaattatttttataaaatttatatatgatcccaattactaacaacttacacaataccaaaaataaaagttcttctaaaatgttaaaatagagaagatatccactgaaacatccatttaaaaaagtgtaatatatatatatttttgtattaaattttaagaatttgacacgacatgaaatttatttaagttgtatttgtgttcatattttatatatttttgtatcacggatggtgttcgtcttggcggtttttaaaaaaatttaagacttcaatacaatccgaatagaacacgccaagagaaattgtcatcccaatacagatgattgtcatttttttgtcgcagtccatttcactcttccactattatacgcgttttctttctggcttattattctgacatacttttgtgttaggcaatcatttataatgcagaacatttcctttgttcatgtgcagttattttatatgcagctataaatacactttttctttttttcttaaaccgtttattttctatttctttcaccaatacctt

SEQ ID NO: 154496 - DNA, 752 bp, Cannabis sativa
cctgtgaagccctaacccacgaatttcaacctcccatctatgccacgatctcccctatcttcaataactgcatttctttttccctcgtacagttaattttcttcttctataaatggccaccactagatcgggttccaagtccccttcacctgctaaaaaaatttcaaaaaatactaagaaacctccttcaaagtcctttaaagttgatcctaaaatgggcttgaaagacattgcgaagaaggggaatgggtgatgctgcagagccatctatttctaaaaaaagacctcttccagctaagattgaatctcgtaaggcaaagagatccaaatcttcgaaatctgtcaaggatgtaagttgggttctgttgtttttttatttttttttagtttttttcttgttgttttgtttttcatttgctgttttgtgtttcaattttcccccaaaatgttttaggttctcttcgattctgacttcgaggatgaagttcctgatttgaaagtgaagcataaagttaaacccaagggttgtttaccttgaagttttttatttttttaagttaaaatttttaatcaaccgttatttttcattttgtttttgttctcatttttttgagttttttttttttttgggttttgttactgctattaaatagtttttagcatttttaaccaaactacacaatttttctgtttctcagtttggattttcttattagttgtttttaagttttaaatgtgttttttagggttta

SEQ ID NO: 154497 - DNA, 551 bp, Cannabis sativa
gacccgatcccaagcacagacttgaacctcgatagggatccggatacaaacctggactcaaaccaagacccagactgggatcgaaatgttggacctatatttggacaaagatcctgacccaaacccaaacttggacccgcactcgggacccaaactttgacctataccgaacctagacccagatcggtatctagacctggaaacccggacacagactcgcacccgaacttaaacacccaaatctagaatacgacccaaagctagacccagacctggacttcaactcgaacccagaccaggatcagaaccaaggacttagaccctgaactaaatacagactcagatccgaattggaacttgggattcggacccaacctagaccaagaacctggacgcgaacccacaccaggagcctaatctggacctagactgaaatctggacccgaccccaaatccaagtttgggtctaggtcaggatctcggtccagatctaggtccagcatttcaatcccagtctgggtcttggttcgagtctaggtttgtatccggat

SEQ ID NO: 154498 - DNA, 633 bp, Cannabis sativa
attgttacatttataaaatttgggatcccgtatctatatttttaattgtacataatcaaaagatgcaacacaacgacaacaaaattgtgagccctagctatcccgaagattgaaacactctaggtcgaactgtcttgatatgtacaatcttcttcaagctctaaactcactgtcgttcaataaaagctttacctttatctgcacataatatagcatatgtgagttgacagacttagtaagaaaagcataaaatataaacatataaccgacttgcgactaagcacccatacacctatcaacaagtcataaataggggtgttcatcaaaccgttcaaaccacctgcaccacaccgcactgcgaaaaaaatgcggtttaaaattctttgcggtgcggtcgcggtttgaatttttcctaaatcgtgcagggcagtgcggtttgcggttttgaattgttaatatgcagttcaaacagcaccgcaccgcgcattacaaaagtaccaatttttatatttagttaggtccaatatgtgaatgtccaacccagagcacactaattattatattattgaaacttaatttttttttcatatttattttcaagccttatactatttttgacaagtgttcctcaag

SEQ ID NO: 154499 - DNA, 788 bp, Cannabis sativa
gagtagtagactatagaaaaaaaattggctcttattcaaaaaaaatgtggtatattttaaaattggtaaaaaaaaatgtataattttaaaagagtaaattttttttggcccctaactaagttggtcctattcctaagcacagacttaacccgcctatgcacaaagagccggacctgcttctgtacaatacacccttttaaaatagatacactggtgtattacctattttgctatacaaaaaaaattttagtcgaatttttttcttcatatttttgcacattatagttattttagatattttacaaattttgagaaattcaaaattatttatattatagaaaacaatctatttcacatgcgtataaaataaaataatcacgcatgcaaatttacaagggaaatttgatatttcatgcttacatgtggttaaattttttcttctaaactcataatatttgtaagatatgacaacttttatgatatccctaaaatacgctccatttacatcaccccctctctcttcttctctctttcatttcactactgtcgagctcccctaccacaaaatcaacacaattttttttttctcttcactcattctcttcacttcattacactataatctactacactacaacatatacttttctctcatttttggacggagcatcatatacaagcaatgtgtaattatttttttaagaagtcttatttgttgttgttatatttagtttagaatgttgttttgatgcttgatctgtggattgttgctgttattttgttgtttt

SEQ ID NO: 154500 - DNA, 696 bp, Cannabis sativa
  modified_base (518)..(533): a, c, t, g, unknown or other
atgaccagggcagcaacaataatcaattatattaaatttcctagttttccaatcacataattactccattaagtatgtaataatatcaccacatgtaaatacatgttatatatagagttagggataacatattatattcataatttaatttaattcaattcgattaatagaagaagtagtactagtaatagtaggctccaactgatgtggagttagcaaaatacatatggtgtgaccaatgtgggaaaccgcagagaaaaggacttgctaacggaaaacaggatgagagaggaaattgagtaagagtaagagcaagagggacctacctaatacaattcatttccaatcaaagagaagacaaacgcaatgcgtggtcgaacctcacacaccaaaacccaaaaataaaaaaactatagtttctttaattaataaataataatcaaatttaatattatataattatccttcctctcattgtccatttcacacgaaccatatcttttattattattattatnnnnnnnnnnnnnnnnattattattattattatgtaagttttcattttcttaataaaattttaataagagtttaaactttttgtcgtgtgatttattttttttgaatgaaaataatttttattagacagaaatatccgctaatacagaggactgaagagcaatgggaatatcactctca

SEQ ID NO: 154501 - DNA, 695 bp, Cannabis sativa
caaattcttccttgaacattagtgttagcagttcaatctcttcctttgcacggttatacaaatcctctgattttgatgcatagaaagtcatgttataagttagtgagctgagggatccaaatctagtcatctcataaatgtgttgttgttgttgtgctgggtggttaaaatgtaggtagagatttgtcttcacagttttgctccatcgcttcatgagaagagtattaggtattcttctcatgtttaatcttttcattgtaccccataaatgtctacaagggtacccctgaatttcataaagcatgcagctactgtgtagtgctcattggccttcacagtaatgaactcgatattggacttctgaatgctgaaactttccaatggtgaatatctaccactttccttcgtcctcatgacctaggacaaaataattattctctaaatcaagctgctcagcaaccttgtggtacatatttcttatgtagaattcagcacattagttgtagtacgtggtcaagcatgtaggattaggtgggtgaggtcgagtgcatttgcttttgaagtcatttgcagtctcgttgtgtttgagctttgagactttcatatctttggttgttacaaattcacgcaagcaataattcttcttaaaaatttttttagagcggagttgatcgattcgcaacgttgtgtggttc

SEQ ID NO: 154502 - DNA, 518 bp, Cannabis sativa
  modified_base (31)..(31): a, c, t, g, unknown or other
ttttttttttttggataatttcaaaaaaaanaaaaaaaatacaaaaacaacaaaacaaattagaaaaatacagtctatacgaattttttgatatttttacggttttttaaattttatttacatcaaatacaatctttttgtgtattcttctgttgtactcttgttattttattgttgattttttgttatttgtatattttttttaggctaattaggatttttacccttaaatttagacatgtataaattcatgtcccctgaacttttctggccgtaaaaaattctccctgaaatattgaatttttttagatttaaagatttttgtccaattgcattcaattttactaatttggtgattgtttatgtactaaatcatgctctccagactttgatatctaccaaatcatgcccttcgaactttgacatgtaccaaatcatgttctctcatctttcatccatgttagactttccttactaaaattggataaaagtccttattaaatctaacaatctcaata

SEQ ID NO: 154503 - DNA, 786 bp, Cannabis sativa
ttcagattactaattcatgaaaatcaaagctccaacttgagcttaattccatgaaattcttatcttgaattcttacaaaattaagccaagaattcatgcaatcaatttttagagcttaagaacagcaacatacacaaataaaatcctctaattttctgtccaaacttaacccaaacaaacccaagaattaaagctccaagcatgcataagacaacccaacaacaagaacatgcatctcaaatccaattttacaaccacaacccattttcatgctctccaatcaataaattttcagcaataaaacagagattaaaatcatagaagattatctcaagctcaatccaaaaacaaactcaaagatcctcaaattaaaagcttcaatccaagcaaacattcaccaaatcaaaaattgaaaatcaaagagggttgagagataaagagggattcgggtatgagggcttgaaaccagaaaaaaaaaaaccaccttcatttccttaaaattcacctctttaattaaatgtaaatcaataggtcaaaagaccattttgcccctagggcttaataacatacccacacacatacaagggtagaaatatcatttcacatacacataaatctaaatatattttcagattattcaccaatatttaaaatgccactaaatcaattccaattgcatttcgggtccgaactcagttcggcccaaaacacccggttgtgactataccgcgccaacctgtcagaacgcacatgaagaaagacaacacaggcatactatataataat

SEQ ID NO: 154504 - DNA, 549 bp, Cannabis sativa
tgttgttgtatgagaactcaatcaggggaagatactttacccatgatccttcaaagtcaagcacacatgcccgtagaaagtcctctaagatctgaatagtcctctcggattgtccatccgtctgaggatgaaatgttgtgctaaactttaactgaattcccatagctcaatgcggactctcccagaatcttgatgtgaattctggatctctatccgaaacaatggaatttggaacaccatgaagacgaacaatttctctaacatataactcagcatactaatcaatggagaagttcgttcgaacaggtaagaagtgcgctgactttttaaacctgtccactatgacacacacagcgtcgtactgtcccgtggttctaggtaatcccaccacgaagtccatagcaatgtcttccatttccactctggaatattcaatggctgcaacaaccctgtaggcctttgatgtttagccttcacttgctgacaggtaagacacttagcaacaaactcagcgatatcattcttcatgcttggccaccaaaacatggc

SEQ ID NO: 154505 - DNA, 555 bp, Cannabis sativa
ctttctcatttttcctctcttctcaaaaatttcaaaccctaataccaaccccatttcaaaatccagtaagaaccctcagcctcccccaaccgcctccgcctcccccaaccgcctccacctcccccaaccgcctccgcctccgattttggtgacaatcgcacggcgccttctcaacacaggttttgaatctacactttctcttttttatttgtgtttgaatttcttttggggttgtttgtgatttattttcatctaaaactgctaaactgaaaaatgtctaagttatatctatatatattgtttattgtgatatgtataatctgtgtatatatgtatatttagattggttttttttttttttgttttgtgttagatcagtatatatattgttcattttggtatatatataatattatgtgtatttatatatatatattttatttgcgtatatatatattttattttgtgtatatatataagatttgggtatttatataatataatctatgtatatatatatatatatttgatatgggtatttattattttatttgt

SEQ ID NO: 154506 - DNA, 585 bp, Cannabis sativa
aaaatttaatttaatattataatgaaatatctctaaccatttataaggtgtcatttcaaggtaaactaatcgcttgtacctaataagaatgctttattgtcacctatgtggtgggggagaggtaatgatatcgtttaaaaaggtaggtcttttgtaattattttaatgctaaaaaagacctgcggtgactagcatatttttaaggtgtaatatcactattatagtgcaattaagtattaagtctcatataatttaatgtaataattttcagaggatatcgctgaccaattgtaaggcgtcacttctagaaggtgctaagcacgactaatgtctaagaacatctctaatggtaaaaatttagaaaatgtttgctgaagtggacatatgatatgataaaatattgagatactatactattagagagaaaaagatatcattttaaaaatttacatggatgctatacagtagcattgatgctatttattttttttcaataaaaaatcgaagctaaaaagttattgtaattaaaaattaagatatatattaaataataatatgtgagattataattatagtatttttgaa

SEQ ID NO: 154507 - DNA, 754 bp, Cannabis sativa
  modified_base (727)..(727): a, c, t, g, unknown or other
tccaagaaagaaaaaataccaatatataatctataaaataaatttaaaaacaactacaaaacacttgtacaccaactcaaagatatatgtacacataaaaaattaaacatatacttattttttttctttgttaaacaaataataacgaataaataacacgataacaatctcatttgaatatatataaaaattaattggacatcaacacattgtgttaactttaataactaaatatatactccttcttttcttagttgaacaactaaataacaatgagacaacaaacccgaccatataatatataaaaaaattattaggcatcaacaaatatttgtgttaacttaaaaataataaataaaaaacaaagtcacacacataaaaagaatcttaaaaaataaaataaatttaaaaataactctaaatcacttgtacatcaactcaaatatatatatatatatacccatttaggataatttgatttgatatataaacttggttatattttaggattatttcataaagaggggtggtaattacaatctcctattgcaacctctttagtcaacctccacgcctaaaatcacatgtcggaatattcttttacgaatctatatagtttttttaacaaaatacagaaggttgttttttactttatttttaaaataaattgttttcctattgctattatgggaaagtaacgtgaaaaaatagtttttttttaaaaaanaaaaaaagaaaagaaaaaaaaacctaa

SEQ ID NO: 154508 - DNA, 1276 bp, Cannabis sativa
tagtattcagctttatgcgctaatcgtaacttttgatttcctttctcgtcagataggttttaaaccaaaaattataattatttgatccctttcctatcaaaaaggtttaatcaaggcgttataacgattcgacccctcttctgtcaaaaaggtttggtcagggagttataacagttcgacccctctttcgttagaaaggtttggttgaggaccttttaaaaagatttcaattttttttttttttgaaatgatggttttgcattgtactatgtatttccagattagttccggttaatcatacaaatatgcccctcaagtaactttaaagggtttacactttataattacttgtttgaaagaaatgattattttattcacaactgaagtttaaaatatttcattagtaatgtgatttacaaccattaatctcataagaacttatccagttcaatcgtttattttatcaatcttcaaggagcatctggttttgataaaacgggttttgatgttcagggtcaatccctcacatactccctcaattgcttcaatatcaagggtcaatccctgacatatcctggggttccaggtgaagtaagcctggttttgtctctgaccgctactggttgacgactagatttcctcgtggttgcttggtatggaaatcatagtgggtcgaaatctattcacgttacaatttttcttacaaaattgctttaacggagtaactgctccttgtattcttgtgactcgctccctgtaaagatcgcgtagctttaatttcgaaattagaagattattagggctttattatgaaaattaattattaatattgaattaattatttatgatgatttatttgaattcagaatgcatttttacgtcacatatagaaatttcataatttttgcatgttttgtgcccgggaatactggaacgcggtgtatggctattagaatcacatcttagtatttttagtatattgggacaatattttggacattgggaatgtcgggaatagtcgggattttagagtttcccaaattatccctaagtgcccttttatgttgtttttgtgggaaatgggtaaaatggtcattttggccactagtctttttgtcttaagtgaattaatttattgttaatgatctgattttattagttgatttagctaagattatttttagaaaaactaagttttatctcatttttccaaaataagaaaaaaatcaaaggaaaagctttttcactcaaactctctccctctctttcgttccac

SEQ ID NO: 154509 - DNA, 644 bp, Cannabis sativa
agaaactgatgaacgagaaattccccatgaagatgaggaagatcttgcgactcaaccagaaaaatgcaggtcacttgcgagaaatcacaagcattctttctgaacccatagagagagggctcgtacaaactcaaatgggggaaatacgacaaaccacactcaaggggaatgaacagagcgtgaagaagcaagtgtgaccttagggccatcaatgacccacaatcgatcaacttgaagaggagaaagtactcgacaagctaatgatcgagaaagtatgggaaccagtaaatccgcgagtcactcaaggataaattcgatgagcaacaaaaggtccgttagtaggatgcaatctgtgagtaaaacgaggtctgtcaacaattaatcccaatcggatctgtgagagcacttcaatcgaaacaaacctgaccttcgccaataactcggtccaaagcaagaggatcctatccaattgcgaatagacgagttggaggacaagtgcaacaaatctcaagtgggggaactagggagacaagctagatacgactcaaatgaggagcttgagtaatatcacccagatatcatgaatacccctttctcttcaggatttaaaaactctcatgaatgcgagcaagtaatgtgacgaa

SEQ ID NO: 154510 - DNA, 1062 bp, Cannabis sativa
gttgataagaagctgacctgtaattactgaagggctggcggcagcatcagcctgagtgatagcaaatacacgtgctagtgcaggcttaacctcaggcttaggttcctctttcttcaagtggggacaatctttcttgaggtgccccactgaaccacattggaagcaagcactccggttacaagtcccgggatgatgtttcttgcagcgcgggcactcaggataggagtaagtgtggcgtccccctttattctggtttcctcgaaaccttttaccttgccctgaactccccgaaaatggaaaagttctctttttttgctcaaaagtggaatcaccactctcctttccagggccaagaatagggagagtagtggtcccaccagcaccagtagtctctcgagtttcttgcaagaacttgaccgccccttcagctcgaagagccttgtcaaccattttagcataagttgtggtatcatttgttgtgataagcagatcgtgcttaatcttggcattcaaccctgccaagtacttctcctttttactgaagtctgttggtacaatcccaaaggctaacttagccaagcgatcaaacttggttgtatatttagtcactgacataccctcgccttgtaccaactcaacaaactcttttcgctttgcgctgcggaccgcctcattataatatttagcattaaataattcccgaaattcttcccaggtcattctagcaacatccttggtaagggatatcatctcccaccataccaaggcatcctcttggaactgaaacgtggcacatgccactctatcatttccgaccacacccataaaattcaatattctttcgataacagtcagccactgttctgccttaagtacatcaggaccacccagaaacactggtggtgcttgcttcctaaaccttttatacaaaggctccatacggttaccagcaacatgctgctctgctggcaccgctagagctgcaggaaccgcaacaggcggttgcgggggaagttcagtaggagcatcccgctgcctgagtcttcgaatctcatcttcttg

SEQ ID NO: 154511 - DNA, 912 bp, Cannabis sativa
  modified_base (721)..(724): a, c, t, g, unknown or other
ttgtgtggatgtcctcatctacctttgagaatgtccttatgtctatggtgggggtagtgtcatctaccccctagactaacttggcctgtaggtgtgtgcgtggtgattgttcatcgtacttatgaaggtgttagtccatcgtttttccttcttggagatgcccaccttactcaagctaagggtaaaggtgaccgtctgacttccattctaacggtcatgaccacccttcatgattaacagtccccccaacagtcatgactttacatattcttcattaattcagtctcagtatttttgtgccacatgttgctactcttgactcgtcattgtcgttaaaatttgggtaaacacacacccttaaaagagatgcactgatgcaccctctacttgtttcgacattctaaagaattttttagtctaattttttcatattcgtatatgttacagttatttaaaatatctgttgtggtaatttcaacacgtaagtgtacgtgtcgtttacaagtaatagattcactaagagtgaggtcgatcccacaagaattgtagttaagtactttaaaattaaatctttacttttatttggttatgtcaaaactaagagaaaattaaaactaagaaacaataaaaaaacagtgaaattaaaaagcaaataaagcaaaaagaaattaacgatgattaaagttagggcttcgatttcaattgtatctattgattatgnnnnaatatgattatcttcctattaccaatttctatgtaatagcaggtttactaaggtaacttatagtcttctcagatatataaacctcaattaaatgtaaattttatactatcgtgataaattaaacatgcaacatgcattaaacatagaaaccctataagctatctaaaccatacatgtactctcgtcct

SEQ ID NO: 154512 - DNA, 757 bp, Cannabis sativa
  modified_base (519)..(519): a, c, t, g, unknown or other
  modified_base (648)..(649): a, c, t, g, unknown or other
gatttatcaatacacaagatttccatttccactagtatagttagtttacgtttacttggacttggaccttggataagtgctatgtttttttagggcattggtaaagtaaacttgaattgaatgtattgttatatatagaattggaccgatattgaacttggataagatatcataaacttacctcaatgtctatctaactcaatatcacctagttgatcttagatcaatgatcttaatcttgagatggttaggttgtattatttatgttctttgatttgttcgttaaagttgaccaattggatcttcccaataattacaaattaagaatatggtagttcaattgagtgggagcactaatcataaatacagaatctatagcttctataaatgcatataagtgaaatgataatttccttcgagcttaacttaatagagataaatggtggagtactcatttcagtaattataatagtttactgaaatattttttataggtagctaagtgtcttaaggataaantacattgaagggtagaacgataaacttgtccctactcgatgtagatcatctatagaggatcattgattatttatattaagagtgcaattctgaatctatagtgaagcaaggaggaattaataagttagnnaatttacttggtaaattctaaaactgcttattggaagctttgactgtataggcccatggtccccatgttgggctttgtgccctaaataaaactctattttaatgtaat

SEQ ID NO: 154513 - DNA, 683 bp, Cannabis sativa
  modified_base (651)..(658): a, c, t, g, unknown or other
attacattgaaatggagtttaatttagggcataaaacccaacgggtagttgcttgatgttagtcagggcattgacttcgagattaatcttccttgcggcgacgaactgtcttaggaagctaacttgaaacttgttccagcaatccccagatcctggttccaactttttgaacaattccttcgcgggcccgcttaacgttagtggaaagcataagcacttggcgtcattgttgactctcatgaccgtcattactaggttgaaccgagacaaatgatcggtggggtccgtgtccccggtgtaagctgccatttcgggcatcttaaaatttttggtaagttccgcctccaaaatgtgtctgtcgcacggctcccggtcctcacagtcagaatctgagtcatcccctttttgtctctgggagactagagcaatatctttgtgcagtatggctagctctgccataaatccctcgttcatcgttcctgcggagaccgccggtgcgtgtttctttttgtccaagtgatcccgcaaatcaccatgcttcccgttgatctgatgtctcaaatcaatggggggtatctccgtcccctccctcctttctctccgagttcttggtgcacaaaaaccctctttcggtcctctcgatcctgaggnnnnnnnntccctttttggagtttgcccctctg

SEQ ID NO: 154514 - DNA, 670 bp, Cannabis sativa
atctcaaaattttgtaggttatcttgaatagttataacgtacatgaatatgaaaaaaaattagactaattttttttttaagggtatatgagtacatccgtgcattgtagaatcaccctaaagaatattctattaagtaattgggatatttcgttaaagttaacatagaaaatctaaaaacaccgttaaactaagaattttgtcacgtagccacattttatatagaatattctgttaattaattaaaatattctgtaaaagttaagtaattgtgtcggagtgatcaatcattcaatgtctcttggtggtggaggcctttgggggtttcaaaggtttcaggctaatggagaggaagagagagagtcgaaagagttagagagagaaatgtgtttttgaaagggtataccattttgaatcctatgctttgcaaaagttattgattggactctctgttttgtaaaatgacaaaaaggaccatatatttttcaaaatagtaaaaataggatcctgagtttaatttttgacaacttttttttaatacaatcaacttaaagacaatttataatataaataaatacagaacatataaatatttttgtcataacacttttagatcggattacgattaaattttattttgataaaaaaaatcaattcagggtcttatttgt

SEQ ID NO: 154515 - DNA, 892 bp, Cannabis sativa
ttttttttgttagtgtaggttgtttaatactgtattttttagtagtttttttgtttactgagttctttataataatgagtagtttatttttttatgtatatttattcgttatttaaaggttatagtttattgtacactttcttaatgaatggtatatatatttggtattttaggttttttagtgtgtgtttttttttttaatgtgtttttgattaacaatttatgatttagtggttttttttgctttatttttgttggtatactatttagtttctgttgttttcttttttattaagtatatttttaataggcctgtgcttgatctatgtaatactgttgtattacttttcatttttaagttaattatttcagcataaagtttgcttgttagtttcttttaatgatgttgtggtgaatatttgcttgtagatttatctatgattaggtgtttttgatttgattgagcacatatatatgttacttttttttttatttttgtgccttaatgaccattttctttaccactattaaaactatgttggatttaatttaataaagtaactgtttactttattatgaaagtaatactgatgtattactttttatttttaaatttattatttcagaatacagtttacttgttaatttcttttaaaatattttatgtttgtttctaaattttcttacaggtttgggatttttacttgaaaccagaggatagattttgtggaaaaatcatatactggtttgatgtgggtgttatttcagaaatcaaggatagattgactactaagaaacttactatgtttcaagaatcctgttttgggcattttctagatcttgaggagtgcaacatgcaatctcaggttatacatactgctttgtgtaggga

SEQ ID NO: 154516 - DNA, 578 bp, Cannabis sativa
agaatgaagaggaaaatgtggatgatgaagtgcaaaaatggattaagtctgtagagagtgaagaaaaaaagaaggctaaaattaaaaaaccgcagaaaatgaagaggcaagggacaagaacgtcaggcatttgggatcattttaccatagttaaaaaaaaatagtaaaaggagcaaatggtaaggaagaagagatggatagagcacaatgtgattattgtgaagctcgttatgcagctgattccaagaattatgggactagtactctgtgagtcacattgaacacaagtgtaagaagtgtccgtttaacacatatgttgagaagcatacaaagcaaggaatgataactgatcattttaccaagaaaattcatgattatgaagttaactcaagtaagactcgaaccttcaatgtttaatcaagctacggtgagaggattgattggaaagtacttcattattgatgagcttccttttaagcatatcgaaggtaaagggtttcgcttacttgttagtcatttttttccctacatttgagtttccttcaagggttacaattgctcgagatatctaccaattg

SEQ ID NO: 154517 - DNA, 722 bp, Cannabis sativa
ggttgcctcctcggtttcctggcacgtgccttgggcacgtgatggtgtatttaatgaccatcattactgcagttattcactttcacaggcatcaattcgtttcttgtccatttattgatacggcgcattaatgggtgtcagaagggcactcaagcgtttctaccgtcttgatgacgattcaatccaaccattggatctatagaatgcgaatcgatcgctttcccagtcgttcgatggtagctgatcacagctgtttcacatatactttggcctataaaagccaaccttctcacttcattttattactttcagcattacaccaaattttccaagttttctggagagaaaagaaaccctcaaacaccataaatttcttactcattttccttcgtcactgccaatcgtctttttgccagcgatcaacaccaacacccagttcccgaaccttatgtaagttcttcgcatcttgtactctagtttatctgttgtttacatagcatgctttactgttcatctattttttctgggttgaatgttgaatttctgggaatttctatttgagtttctgtgcaacgcgttagattcctccttttcgtttgtgtttgagttacttcttttcattgtattattttttttttttgaggacccatctttttctcacgtaatgacactcaagggtttagagtagacttcgtcttctcgatttttacccctttttcctt

SEQ ID NO: 154518 - DNA, 631 bp, Cannabis sativa
actactttattgtagtactttgcgttgaacaactcctggaacttttcccaagtcatagcagtaacatcacaagtcagggacaccatgtcccaccaaaccagggtaccctcctagaacaggaatgtggcacatgccactctgtcattgccaatgacgcccattaaatttagaattattgtaataaccatcagccactgcttgactttcatcacatcaggacctcccaaaaaaatcggaggtacctacttgcagaacctttcatacagaggttccattcgggtcactgcaacaattcgctctgccagcacatcaggggtagaagccacttgcatttttggagcaggcatcgcaggagcaccctactgcctcaggcatcagatttcttcctcttttttggttgattccggcttgcatttttgcaaacctattttcccactcctggcagcttgcagtggattaacatctccctgaccgcgtgccctgcctcttgggcctctaactcgacatcgtctattcaggggaaactaaactccttgactgctactgaatccgaccattcctcttggcttctcgcatttttcctagcattcattctaataaaacagcctgtaaaaccaagaactagcctggt

SEQ ID NO: 154519 - DNA, 760 bp, Cannabis sativa
  modified_base (309)..(314): a, c, t, g, unknown or other
ctagcatactttgccaatgttttgaaaagaacataacacttatccaaggtgtaagtatacttttatcgctgactatcacatcaatatatatctagtgtactgattaatcaagggacattatcttttgaagcatataatcacaattacgtttcattgtattgacaccactgtaattgtgaataactatatgttctggacttgacagattttgtacacatttaaaccataaatatgaaaactacatgtaaacataaatgacttataatcttctattgataacaaatcagattacattgaaatgagttttannnnnngcataaaatcccaacagttttcatccccttaatctttcaaatacactggtttgatttggttattaaacattgatccttgaggattagagaaatattcaacaatggtgattggaaattagattgatttcttttttgtttatgccttggatttttttgttttcgagatgattatgactctgtttactactcagttgttgttatttttgtgatttttggggactaatttctaggtttttggtaacaaaataaaataaaatatttaacggtaaaaatgacagtagcagatattttcagtgatatttgaagatattattaatggttcagaatctacttaagtgtaaaaaaatatttatgtttatattgattctcataatttaatcagtaattaaactaattattgtaacaccctaactagcctaggggtgttaacgtgattttaaacttgc

SEQ ID NO: 154520 - DNA, 1017 bp, Cannabis sativa
ttgattacgactggcattgggatatatcacttcagggttggagtcaccaatacccaccatattgcccaaactcaccccaaccaactgaaaagcacttctacaatcactttcaagagagattaatcgcttaacgaacatggtgagatccttatgtgataattcaatggttcatgattcggaatgtaataactccaataatgaaagttatgagagttattggtacaatgaagaagggacattagttgaatagaaggaagataatgagcctacaattgaagatcaagatccttttgaagaggaactcattgaatatgaaatcacaagtaagggtatggatagccaattggagagtgagcaacaagaagaagggttgttagatgaaagtgtggatactgtgacattggaggatgaagaagaacatggcatcattgattcgacttcattaatgatattgactaataaaccaccaatggatccatatatatatatattccatcaacaccatattatatcctctacgagctacgaaatgcttcttcccaagctcatcatccaaagtcttatgttgttggtactgactttgattcaaactcatcgtttgccatgcttgaaggcaagtacaacaacaattttcaagttgtcttgcatgacgcttattacgggcgtcaaccacttgttgatgtggccctcagataagttttctttcctttttctttaatgtcacattgaggataatgtgtcactttagtttgggggtgacttaatttttattttttgttttttgtttttaagtattatgtcttttaatttttagtttttagtttttattgttttgagtcaactttctttatatgagtcaatttgaaagtgtgtagatagcatgatttgaaaaatttatttattttttgaaaaatttgtgtgtttggtgacattacattcttgactaatttcaattttttgctttaaaagaacatggaatcatattaggtatttttctagtaattgaattgatttatg

SEQ ID NO: 154521 - DNA, 548 bp, Cannabis sativa
  modified_base (450)..(461): a, c, t, g, unknown or other
aaaaaataataatattattatttaagcttttttaattgttcttttcttctttttatttggcatatttaaaaaaaaaatacatataaataaataatgtttctttatttaatttgataacatattaatataaaactatttaaaataaatacaaaagtaaataatgaataaaataccatattatttaagagtaaggactttatgttttcaaaaaattaaagtttggggactattttgccaaaaaaaaaataaagtttgaggatcaatttgttagaatttatataatttggggactaatttatcaaaaaaaaataaagtttaaagtttaattaagaactaacttgccaaaacatatattatttaaggatttatggtaaaaataaaacctatatatacatattccataaaaaaatttcttacaaaagcaataaaaaaatagggtaaatactattnnnnnnnnnnnnttatacaaaagttaccaattggaccccgtgttttgttaaataacaaaatggaccctgtatttactaaaatagtacaaataggaccct

SEQ ID NO: 154522 - DNA, 585 bp, Cannabis sativa
agctggaggcgaggcatcgggaggtgctgaaggcggaggatgaggccgtcgccagggctaggcgcgagcttcgggaggctaaggaggccatggacgaaatagcgcccaaggtgaagtccctagaagagttccaccaggcggacttgcagtctaaggccaacttagccgtggagttgaaggagctgaaggacttcagagaccaggccttgaagaaggctaaaagagatgagctcctgacccccgtctcctgcaagcactgcgtcaagcgcttcaatgatggcgtttatatggcctggcagtcaaatagccaaagcatcaagtcgacttctatcccaagcctgaggaggcccttgctaaattctgggaaaagaagaagaagcttgatgctatgcttgaagcacgtcggggtcctcgccttcctcctcgtattgactaggccgctgagtccagcccatttcattatgattctctttttatttttcttttacagctatttttcctttcttcaagataattttaattacatagctgctttattttctaaggggagacgattaatatggcctgtccctgggccctttgtat

SEQ ID NO: 154523 - DNA, 607 bp, Cannabis sativa
tcatcttaaacaacgtagtacagccacgtcagtttagtatttgtgtaaataaaatcaattttatgtataaaattaaaaaaaaaattaatcttaaattattctaagataatttatttgttgctgataaattctttttatcaacatttacgtaacatttacaaagaaatgtcaaagagtactagtaattcagcagcctccaatgtgtaatattgttattggtacatttaagtatgaggtcctttataatttatcataatatatatcttataaaatattactaactaataataaggtgtcacttttaggcataggtagatttatgaaaaggcaagaggatcaattgactcttctcaattttttgcccatgcatattttttattttttaattgatgtaatttaagtattttaatttgaattattttttataacaggattcataaacaatagacttcataaaagttttcaaaaaattgtgaatagtatatatatactgttaaatttagattttgaataggattttttactcgggtgaaaaaaatagaagaagcataaaggtaataaattataaattttattttcataactataaatattaaaaaaatttaaa

SEQ ID NO: 154524 - DNA, 570 bp, Cannabis sativa
tatttggcctattacacttagcgaggatttgatggtaactttagattttgcagctgtattagtagtaatggcacgaggtatacatggaagctctgttattaatatagttttggacatctacaataataatgtgtgaaatgaataaaaatatataaacgataagaacataaatataaaaagtacataaagaattacaaatttaactaaatgaacaaggtcgcacgtggtatgaaaatatatagtgcgaccatgtgcgaccctatgcgactagtgagaccgtgtgcgaccttagtggtcgtttatggttgttcagagcaaattcaagttacatagtgtaaattcaaggtcgttcatagtcgttcagagcaaattaaagttctttaaaattggttgaagaacataaaagaccattatggtcgcatagtgtaaattcattatcgtttatggtcactcagatcaaattcgagttctttaaaattggttaaagatcataaaagaccatgatggtctcataatgtaaattcaaggtcgtttatggtcgttcagagcaaattcaagttctttaaaatt

SEQ ID NO: 154525 - DNA, 787 bp, Cannabis sativa
  modified_base (313)..(333): a, c, t, g, unknown or other
  modified_base (749)..(754): a, c, t, g, unknown or other
tccaaaacactgatgaaacagagagttagtcttttgaatcatataatcacaattacattccactatgttgacaatactgtaattgtgaataagtatatgttttggacttaactgattttgttcatttattaaaaaatattaaaccataagcataaaaaattcatgcaaacataaatcacttcaaatttcttagattgataactaattagattgtaatgggttttatttagggcacgaaacccaacaacaaaaggagtcatttaattttgctggaaccaatgtaaggtttttcataccttttatgtgtttattnnnnnnnnnnnnnnnnnnnnntgtttaggatgttaaaaacatacttcttactaaatctaggtcctggtaaaatatattccaacaaaaggttctttaatcaattatctaaaaaaactttaaaaatttaaattttttaaagtggagtgggtttgcaatatatcatgtatctccagatgaattccggttaatcatacacacatatatatgcccctcaagtaattttaagaataaaactttgtaattacttgaaaaatgattcaactttattaataattgaagttcaaaatattacatcattaatagagattacagcatcagtctactggtagtagggtcgcagatgttccacgttccagtagttctttactagcgagctgttaagctgggttaatttgtaaaccccggttcgtactattatgtaacaccctaactaacannnnnntattacgtgatttttaaacatattgtgcagctc

SEQ ID NO: 154526 - DNA, 1188 bp, Cannabis sativa
gccgtcacgaaacatgcagtaagtgttgtactgatcaaaaaagagaacaatatcacacacccggtctactacatcagcaaaagagttattgaggctgaaggtcgttacccattgaaagaaaagctcacctattgcctaatcctagcaactagaaagctaagaccttattttcaggctcatcctgttcgggtatatagtgaccaaccattacgtcaagtattacaaaaatcagacgcctctaggcaatttctcaaatgggcagcggagttaggccagtatgaaatcatctttcagccccaaacagcgattaagggtcaggccttagcagattttgtggttaaatgtgcggcaaaagaagagagcacctcagaaagtaagccagagccagtacatgtacctcaggcgagcactaataaagacaagccaacttggaagctacatgtagacaggtcagctacagatcagctgttcggcacaggaatcgcccttgtcacacctgggggcagcacttgcatggtgcagtcaaatttggatttaaggcatctaacaatgaagctgaatatgaagcccttatcgccggcctaagactttctcgagaattgcaagccaaacacattgagatctgtagtgactcacagttattggtaaagcatgtatctggggagtatgaggcccaggggaaaagatgataacatatctaagaaaaatacacgatctgcttgcacaattcaaaagctatgctctccagcaaattccaagagaagaaaacacaattgttgatgcactagcccgacttgcgagcagtaacataaatgataaagcaaatctgatccccatccaatttcttgaaaaacctagtatcatcgacacggaggagattgaaatgattgatacatcctcaaacttgatgacgagcagcctacctcaacactggggaattcccagataatagaaatgaagctcaaaaattgaggagaaaggctgcacggtacatcattgtagagggagttatgtatagaagaggattctccatgccactaggtgtgttacacaagaagaagctgaacgacttttgtcgaaagtccatgatggattctacatcaaccacgcagctgggcagaatttatccaagaaaattctaaggcaagggtatttttggccgaccatgattgaagactccaaggccta

SEQ ID NO: 154527 - DNA, 578 bp, Cannabis sativa
  modified_base (64)..(67): a, c, t, g, unknown or other
agtagtatttgttgaaacaaacacgttcttatcttaatgaccatgggatggtccacccctaatnnnntagaatagctatcaaacatgcaaaacttagttaatagtttttgcttttcttcatatcatgattaagtcatccatgaatctagaaatggtttacactaagtacacaactatttcatcattctgaaattttcctatagctagggtatatccctagaaggacttaggcaacaacttagttactcatcatagaccatatactttcatcaatatgcaaattgaatttctagggaggcaagtttggatataattcaaaaaattaacgtaatgatctttgaactgcatatctaacaatttctccacccctgtcagtttgcaaaatcattaaccacttaccttaatttttttcaacattgctagaaatacatgaaatttctcaaacatttcgaatttctttgcataaggtaacatctcaagtaatcttctaaagaacttaacgataactcatagccacccctgaaagtacatccatatatacatgatcctactttcaagtggatataggcatattgact

SEQ ID NO: 154528 - DNA, 516 bp, Cannabis sativa
  modified_base (35)..(36): a, c, t, g, unknown or other
agaatataatttacttggtcccaagtgtattcttnnatagaggttctactgtacttatatacttatcttatctcaactaacttattaattaaaaatataagatttgataaatgttagttttaacattttatcttattagatattttttaattaaaattaattttagaaaaaataatatgaaaattttgaaaattggttagtttaggtttgaatagaaattttaaggtttccaaccataaaattttcaaacttagtttattttattttattttttaaaaataaaattcataatatcctaaccataaaatatcttatttttcaaattgtttaatttgtaatatttaatttattaaattataagattaagaatataatattaggtatatctatttttttttttaaattaaagttatagattatattatcttattagaaatttaaataatttaaattttgaataaatttgaaatttaaaaattggttagatatttcaatttaagttagaatttaggatat

SEQ ID NO: 154529 - DNA, 935 bp, Cannabis sativa
  modified_base (309)..(309): a, c, t, g, unknown or other
tgcatagtcatttttttatgatttcaaaatataatcaagctatttccaaaaaaggaaaacaaaatagttaacaacttgtatacaacataaaataaacttaaaaacaacaactcactttttctgctgagatggaagactagcaatctccacaactcttaaaggagcttttgggtcaaaacctaaatcaggagcatcgtacctattcttccaaaatccaaggagatcaaaaaataaagggagtaaaacacaataagccttcattgctgcagaattcattttggcagtcctcaaagaattataaagaaatanaatcccctcattcaaatcaagatgaccaaaaatccaatggctttatttcctaagatttatgatgaataggacatgattggcttcataccaaggcttagaacatggaattcgcaggcctcttatataatgtgctattgggtgagcaacatgtatgtgatacatctttgttttaattgccttggcttcgcagaacttgtggtataacgattgaatggaatcatcgaaaaggcagtcagttgttgcaaaattcagtgtaacaacagaagaatatttcacttttttcctaaggtaatagaagatagtgttcatatgttgaaacaaaacaacaaagacacaaaaaaagaaaaacttaaaaaatattataaaaacttaataacagtaactaaactaaaaaacaatgataaaacaactataaaaagttttaaaagaaaaaaaaaattaccgagtcattgataaacatgtcacagcaagccaaatgataaaatcaggttttatcttcaacataatcaacacctaatgtaaacctaggaaaaattttcttcgcatcatcctcataacaattgtaaggcctaaatcaacaaaaaaaaaaaaactatattgaattcaaataattgccaaaataaaaa

SEQ ID NO: 154530 - DNA, 566 bp, Cannabis sativa
gttacattttttatttttttaggttgtggtttgctggcaataaaagatacttcaagagaacgagttcattggaatgatatggtttggagtcggctaagcaagccgaagcataaatttaatgtggttggctattcttggaagactgtaggtgaaatcgagactttttagattcgaaatttgtaaagatgacatatgcttgttatgtgggaataacatagaaacggttaccaatttattctttgaatgtcatctaagccatcggtgtttcacagcaatgaagatgtggttggggtggacaatatagataagtattctgctggctgatttgtaaagagaatacatcgaggcaaattgagcaaatttcggaaaaatgtgatagctttgacaatgtcgcaactatatacagtatttggtaatagaaatgattatttttggtaggggtgttcataaaaaacgaaaaaccgaaacctaccaaaccgaccagaccgtaaccgaattttcagttccacgtcatcaccgaatttggcggtcggtttcggtttcggtttttttgacacggcggtcgg

SEQ ID NO: 154531 - DNA, 663 bp, Cannabis sativa
  modified_base (177)..(189): a, c, t, g, unknown or other
  modified_base (366)..(366): a, c, t, g, unknown or other
agataaaatagttgggaaaaataaaaaaatccaaacttgtgtggggcccattaagtggccggccatcaagtgttatattaccctattttatcattttttttattcctaataattcaaccctaaccctattgaagatagtataaaggaaaggtcatggtctcattatccaactaatgnnnnnnnnnnnnnaaacctagttttctctctaggttggataagacctcttccttcttctttcccttccatcgtcgaaacactatagcctctcttcacaaacaatttcaagccttcgtgattgagtccatgcccacacatataaactaagtcctcaatcatagtgtgtaagatgttggaattattttaccnggatctagatttactaccatgtatcttttcaacatcctaatataaatttctgaaacaatgtaatttaaacacataaaagttatgagaaactttacaatgggtgcagcggaattaaatgacacctttcgctcagagctctaacccttgtatcctttctgtagcagagtatcacaaagatctgagccccaaaactccttcctcctgtttggattcttcacagccttacatactatggttgaggaccaacttgatgtgtgtggtcactcactctataactaatggctgaataatatttgt

SEQ ID NO: 154532 - DNA, 575 bp, Cannabis sativa
gaattaaagagaagatcagaactgaagggtgacagcaatggtgatggactgtttgttcgaggaaagaatttcaagaaaggaaacaaagaaaacccagggaaaggcaagaactaaggaaaatcagactcaaagttcaaaagaaaatgttttgtctgtaataaaactactcacctcagaaaggattgtccaattctcaagaattacaaccagaaacagtcatcaggagatgtcgatttggtctctgattgtgatagtgaaggatatggaagtgcaggggtattggtagtatctaaagatggctcaaagactggttgggtactcgattctggatgctcctttcacatttgtccagaacagtctcaattcagtgattacaagaaaattaatgggggcactgttagacttggtgataacagatcatgccctataactggtataggtactatcaaattacaacttaaaggtggaggagttgcagaattgaaacatgtaagacatgttcctgagattaaaaggaatttgatttctgtggcaatgctggatcaggaaggctatactgtaagaattgagaatgg

SEQ ID NO: 154533 - DNA, 570 bp, Cannabis sativa
ttcgggtccgggtctgggtcattgtttaattattaataaaagatccaaaagctaaaagttctattaaaaaaagtcattaagatttgtttttgatatactataaaatttgaaactacaaattttattttggaatacagtgctcactttttttaataataggtgaggttagcgtgtgcctaatttgtttcattttatttatttaatttttatttcaagaatattattataaaaatatataatttaaattttatatcttaatactaattataaacgtatattttattactatattagaaatacaagtaactgaataacatacactattatttaaaaaatggacaaaaaaaaattttagatgccaaaatagtaggagtgcatcgtagaagctctctacaatgtatattattattaaatttttaaccagtttttatgtcaaatataataataataataataataataataaacttaaagaatatctatagtatttctctgttagttttttatggtactaaagtaggagtgcattattaatggtatgtgtaatttgtggtataaatacctaagttt

SEQ ID NO: 154534 - DNA, 724 bp, Cannabis sativa
  modified_base (569)..(575): a, c, t, g, unknown or other
acaaccccagcgagttaagcaccaataccacacttatgcacttattactttaaaccctaactcaactattaactccatatagcatttaaagcatggcttcacatagcacataaatactctagatgcttgcatactgcctagaatggaaagcggtaaataaatgatcacataagcagtaaagtatttactctcaacacctactgcaccatgagtcgagcttgtctctgacgatgaatgtacatgtttggccgatttacaggaagtttaaaaacattggcgctctgatactaaactataaagccctaactcttaggcatgctacccaagatgattaagaaaccctaatcccctaatcgggattactaataaaataagcgcgggaaaaattaaactttaaacaaaaacagtatgaaaataaacttgtaataattttaactttacaaaccaaagttacatgtttcaggatcccaaaaatattttacaaaatattacaagtctttacacgagccgacttatgcggtaaaatagagttacaacagttcaacgctggtagaccccaacccgcttgnnnnnnngtggcccgaacatgtacatacaccctcccgctcctacagtcatggcttatcagagatagatttactctttcctgcacagtagagcacccatgagccaagcccagcaagacaatataaaatatcgataatcataattatcacattatata

SEQ ID NO: 154535 - DNA, 895 bp, Cannabis sativa
aatgagcctacagttgaagatcaagatccttttgaagtggtattaactcaaaatttggctacatcagattcttacttgataaataatgaatatcgtggagcgaatgaaatcatggaagagaatgaattcatccatgatcaagaaagcattgaatatgaaatcacaagcaagggtatggatagccaagtggggagtgagcaacaagaagaagggttgataaataaaagtgtaaatactgtgacattggaggataaggaagcacatggcatcattgattagacttcattaatgatattgacaaataaaccaccaatggatccatatagttcagcaacaccatattatatcctctacgagctacgaaaggcttctccccaagctcatcagtcaaagtcttacgttgttggtgcttactttggttcaaactcatcgcttgccaagcttgcaggcaagtacaacaacaattttcaagttgtcttgcatgacgcttattatgggcatcaactgcttattgatgtggcacccaggtaagtttccttttctttttctttaatgtcacattggggacaatgtgtcactttagtttggggggaggggtgacttaatttttattttgagtttttaagttttatgtcttttaatttttaatttttagtttttattgttgtgagtcaatttgcttaatgtgagtcaatttgaaagtaggtagatagcatgatttgaaaaatttatttattttttgaaaaattcgtgtgcttggtgatgttatattcgtgactaatttcaattttacgctttaaaagaacatagaatcatattaggtaattttctagtaaatgaattgatttatgtatgctaattgtgaaatgtagaaaattatttgaaataaattcta

SEQ ID NO: 154536 - DNA, 675 bp, Cannabis sativa
ttttatgttacttttgtgtaacatttatgttaccttcaatcttactgaagaaacaaacgtgttacaataaagtaaaataaattacattttgataaccttaaatttattgtagaaactaattagttatcatataataacctttgaatatgaataacaaagtatattttagtaaccaaaatattttaattagtaaactaacgcaataccaataggttaattgtttaaaaaatttatatttttataattatatattgtagaaatgtaactaatgagtatataattgatatggtaaacaactaaatagttactttgattttgaaaaggtgaaaaaacatatgcttcccatatcttgaaatgatcacattgaaaaataattcgcaatgatattatttttgaggccaaataactaacaatgtggttaaaattttattttaaagttggaaataagagaaaaaaaaaatatattgcttttattttaactttctctatataattatttgatatagttataaaacttactttcaaataaaaaataaaaaacaaaagaaaagaaaggtagttgtcgtttatcaattaaaaaatggcacaataatattaataacggtacaaaaaatattgggtgattctacaatgcacccccttaaaagggatgtactgatgcacccttaacttgtt

SEQ ID NO: 154537 - DNA, 583 bp, Cannabis sativa
aacctaggactcaaacctggatggggtatctggacctgggccacggaacccagacccaaatctaaacacggtactcggacctggatggggcacctagaccttggccccgggtcctggacttagaccgggaccgaggactggaagttggatatgggacctggacccaggacacgaccgttagaattaggattgagaactagggtccgaccccggacctggaccctgaccaagaatttggaccgggacctgggacccgaactggaactagacttggacccaagaccatgaactagatctggacccggagcttgaacctaactcgtagttcgtgttttgatctgggacccatacccggactctccaaccaagaccttgagccggactcagacccagaacctaaccaagacccagacccgtaacccagacttgggtctgagtccgagtcttggtttgagtcttggaactggaatctcactaagacccaaacccagacatgaactgtgacgcagacccgaatcaaaacttggattgggtctcaggttacgaacccaaacccagatacaaacttggacacagacctaga

SEQ ID NO: 154538 - DNA, 595 bp, Cannabis sativa
tacacaaaagagatcactttggtgatattttatttcaattaattcaattaaaatattgggtatcataaataaatctcaaaccaaaatttgaatctaattgttactgaacattatctcaaaataaattgcatgatatatacagatatataaatatgtgtatatatacagatatataaatatgtgtatatatacacatatataaatatgtgtatcgcacgtatagacaaattatatacaagcaaaaattcaattcatgatcacacatcatgtaagacgaattctaatatgaaatcatgtgctatcgaaaagtaaagacctaatatgaatattatataaataacattcatgaatgaattttgtttttgttaaaatcgagaaataaacctgatataacatatgatggcctataatagtatattattaatatatgttaggattgattgttaggagttagttaggatggtagttatttttgttaccacatacctttctgttattttcccacatgttgaatactttctctattgttttccacatgtatataaactgtgtaaagctcagattcatcaataagagatttctttctctcttctct

SEQ ID NO: 154539 - DNA, 585 bp, Cannabis sativa
  modified_base (219)..(224): a, c, t, g, unknown or other
gatctacctatgatgacacagagactaggtcatgaaacaacaatatgcactgaacatgatcaacatggctctcctcagtataactaaagcaggtaagtaataagaatgacaaaagaacatattcctttttattttctaaaaaaaaatcagcagcataacagctgtattttgaataaatccaaaaatcataaccagcataaatatttgtacaaaaatatnnnnnncactcagtgccccagaacagtccaaaaaaatatgcagattaagttttcaatttttcaaacaatttgtaaatcataaaaattggaatatgtccaatgttttacaacacatataaaaatcaagtccaataataaagttgagtccctacctctcccgagtcgttaaacttttttaaaaagacgatcttaagctctaaagtcccgagctccaattgtttagtccaatcttacatattactctcacctaaactatcaaatggttaaataatgatcatcatcgtattctacattcaaaaccgagtccaacgacatataatatgactatatttaaaatttaagtttccaaagcctcacctaagcggtg

SEQ ID NO: 154540 - DNA, 680 bp, Cannabis sativa
tcaagaccgatcagggtcagaggaatgacaataaccaagagttactacctccaccggtagatgggcatctgcaagtcatcattggaggaccgcatgttgctggagattcgggcaaagctcgggagtggtatgcccgaacaacgcagcacgaacaagaagaagttatcctgcccgtggaagaaaggaagcccaaagttccacgagcaggagaaccgaccataaccttcaacgatgaagacgctatcaaaattaaatttccgctcaacgacccgctggtcgtggaagtccagatagtcaacaaaatggtggccagaaccatgatagataatggagcctctaccaatatcttgttcaaaactacttatgagaagatgggactccaactcaagggtgtaaccccatgcctccagcctgtctatggtttctccggtcaaggagttgcatctttaggataaattcgtctacccctcattgttggacaagctccgacgagcatgactatcatggcatagttcctgatattagatgttccttcagcttttaatgtaatgctaggtcggtcggtcttgtatgacttaaaagctgtcacatcaatattccactcatgcttcaagtttccaacaaagaagggggtagggtgtctgagaggaaaccagcagtctgctcgggaatgttataac

SEQ ID NO: 154541 - DNA, 505 bp, Cannabis sativa
cgaggcaggaagaaaaagtacatgtcttagagacagctggtctcaagattttttatgacttttggaaggctaacccccaggaaaatttcgattacctgggcgaggctaaagacatgtgtctcgagtactgtgcttctaaggtggcttatggtgaacccgatgtgactgcttcttccgctggctagaatgttgatgtacctcccgtttagacaacagatcctctagctcctaccggcccagaagatccgaaccgagagcctgggactccagctgtttaaatacttctcttttatccttcttttaataatttcggtcataaggcctatttttaagacatcattaccctccaacgggtctttaaacttggaattatttttcattttacagacaacaggctgactgggcagcttttaatcccagtattacgtgcttttgttatctttaatggatttcattctctttttataatcacgtgcaattgtggctattttatctttaccaaatg

SEQ ID NO: 154542 - DNA, 993 bp, Cannabis sativa
atgaaagatttttattatatattggtccagtcatgcataatcgaattatacacagtacctttactacatgtctatccacatatgtgatctgaatcaaaatcacacacaatagaagtataatgttaaactatacttagcaattctatattaaagattcctattactttaatacactattgatttattttattcatataatcttaattctcttgtatgtccttacaagattataccttatccatatgaataagaaattttcagagatttattaattatactattataattaatgtatcatttatcttataattgatccattaattacttgcttttagggaataaatcctaatattagtaaagtaaacaagtatcaagtgtattggctatacatcggactggaccaatattaacagtagaaaagatactataaaatttagtgttatatcttttctaagtcaatattacttagttgatcatagattatttaatctcaatcttgagatggttaagctctaacttaaatgtattgcacggttctttgacttgttcgttacttgtttacctgcgggaatagtccatacttacatcttaagaactcggtagtgcaattgagtgagagtattaatcatagatatgaacatttatagcttctatatttattagaagtgagacgataattttctaagagcttggcttaacatgataaatgatagagaactcatttcaataattatattagttttctaaaatatcactttcaagtagctatattttaagcataaaatctattgaagggtaaaatggtaattttgtccctactcaatatagaccgtctatagaggatcaatgatcgttttgattgaaacaatcgatagattcatagggtatccatacttggtgtataaagtgttttatgtaatcagaagtgcaattttgaatttatagtggagtcaagaagaattaataagctagaaaatttacttgataaatttc

SEQ ID NO: 154543 - DNA, 1208 bp, Cannabis sativa
aaggcatcgacattagagttttgttctcttggtatttgctcgattttgaaataatcaaactttttcaagttcttctgaactttctctaggtactttgacattttaagcccttagtctgttatttcccgagaacttgatttataatcagttgtgaatcactatggcatatgaggtttttaaccttcaacacttcagctatcttcaaaacagtgatcaaggcttcatactcagcctcggtatttgacgtgttgaattgaaatcttaaggcatagtgaaacttgaagccttctagcgaaattaatatcacctctgtacatgagccatgctcattggatgcaccatccacatataatttccaagtatctacgtcttgttgaacaagcaaattttcctatggagttactccttctatcaagaaatctgccaaggcttggcccttgatggacgtttgtgggtgatacgttatgtcaaactgccccagttcaattgactattttatcaatcttccaaaagcatctggttttgacaaaacttgtctcaggggttgattagttaacaccttaatcagatgtgcctgaaagtaaggtcgtaacttacgagatgcatggattaggcataaggcaagtttttcaagagggggatacctcgatttttcccccagtaacctcttactaacatagtaaacaggttgctggtactttccctcttctcgcactattgttgcactaatcacattttctgggacagctaagtagaggagaaatgtctctccagttattggtttcgccaaaactggaggtgtcgacaataatctttttatgctcttaaaggcctcctcgcactcttctgtccattcaaactttttgttgtctcgcaatacattgaaagatggtagacagttatcagttgactttgaaatgaatctgttaagagctgccattcttcctgttagggcctgaacttccttcggtttagttggtgatgacatatctatcaaagccttaatctttttaggttttcgcttcaatacccctcgcgttgactatgaatcccagaaattttcccgaggaaactccaaaggaatattttttcgggttaagcttcatattctaagattttgatatttcaaagcactccgcgaggtctgttgtatgatctccactctttatcgactttaccaacatatcatcgacgtagacttccatgtt

SEQ ID NO: 154544 - DNA, 913 bp, Cannabis sativa
tgtgtggatctaatgtgtattcttacgatagtaatttgtgttgtaagccacgataaatttattattttattttaattccaatacttttaattattttagtataattgtaagtaaaggtcgatcccacgagaactatatatatttatttaattatttacaatttagtaataagaatttaaaaaggacgagttttgatgattaattagaataaaaatagcaataataaaaaaaaacaaatttaaagtgagactatgatatgagaaactactaaaggttattcggcacctttaacaatcattcctaattccaactttcagtttccaatcaaactattaatcccgcagataaaactgaaacagtaaattattaaagaatggattaggtgtgcatgctcttcagataaataattaacttgtttggctagatatgaatatatatcctaatttttaattaggtgtatagtattattttgattatcgtggcaagaatattttttttttatgaacattagatgtgtagtatttataactagcctgtataacgttattatatttttaataaatttattcattgtaaaaaaaaatcaccaaaattttaaatttcatttgaaattacgagcttagtatagagaaaattgtattgtatacccactttactttacttattttatgttttacctttattttcttgttctttaagatatagtcacttttatagatgatgtctttattatacctcttacagtaatgtaaattatgtgctacacttaaagtaaagggagtgagggtatattatgtgctacacttaagtaaagggggtgagggtatattaggcaatctactcacaaaaatgagtagattttaataaaatataatatatatatttatgtaagaatattttttattaatgaata

SEQ ID NO: 154545 - DNA, 927 bp, Cannabis sativa
taaacaggttgctggtgctttccctcttctcgcactaatgttgcactgattgcatattccgagacaaccaagtagaggtataaagtctctccagttattggtttggccaaaactggaggtgttgataaatgtttctttatgctcctaaaggcttccttgcactcatccgtccattcaaactttttgttgcctcgtaacacattgaagaatggtaagcatttatcagttaattttgcgatgaatctatttagtgctgccattcttcctggcaaggcttgaacttcctttgtctttgtaggcgttggcacctctatcaaagccttaattttttcaagattttcttcaatgccccttgcgttaactatgaatcctagaaacttccccgaggagtctccaaaggaacacttctttaggttgagtttcatgttgtactttttgagtatttcaaagcacttcgcgaggtcttttgtatgattttcacactttaccgactataccaacatatcatcgacatagacttccatgttcctccctatttgttttttgaactttccatttactagtcgctgatatgttgccccaacattcttcaaaccaaaaggcatgactttataacaataaagtcacatcttggttacgaaacttgtatgctcttgatcagggacatgcatcttaatttggttgtatccagaatatgcgtccatgaatgtcattagctcgtgtccagcagttgcatccaccaactggtcgatccatggtagtcgaaagcaatccattggacatgctttgtttaaatctgaaaagtcaatacaagttctccaagtaccatttggctttgggacaagaacagaattcgatatccacgaggggtagaacgcctcgcgtataaaatcgtttgttaataacttgtccacctcttctttaagt

SEQ ID NO: 154546 - DNA, 526 bp, Cannabis sativa
cattttgttaattttttattaaaagtgacatttattaatttaattgttagttttagggtcattttgcatcttggccctggtattattgtgttggactcattttgtctctttgaattataagcacggtgagacacataaaccttttattattaatttattatgaaaatccatccacgaataattgagtgatagaccaataaatctgtgaaatgtcactgttcttaaaatcatatgtactataaatctataatgattaaatacagctttgctaggccatattccatagttgagcatgtgataattatattctctatattttatctaataaatcaggatttgttcagaatttttcaaactattttgcgaataaatatttgagaatttatagagatgtatatattaaaaaatacaatttattgtattaaaaattatgtttataataattaatacaatatattattttatccagatataatgttatttgttatttaatacaatatggctcttataaaacgtactaaacgaa

SEQ ID NO: 154547 - DNA, 780 bp, Cannabis sativa
tttttgagaaaataagaaaagattgttgtaaaatggaaaaaattccaaagtgggggcccacatcctatggccgaccactagggaaggtttttctatttaatttcttcaatattttaatgcctaattaattctaacctaaacctaggtggttgcgtattaatagatagtgatggctcacactaagagatgatgaaatttcttgccttcaggaaaagttgagccatctattctataccctaatttcgaaccactatcttctcttcccctcttcatgttttcataccttgactgatagagtaagtgcccacacacatcaagtggtaactcaatcatagtgtgtaaggctgtgaagaatccagaatcaagagaaggacatttgggctcagatcttggtgatacccttctacagacaggacacaagggttagagatctcaatggaaggagccattaatattccgctgcacccactgtatggtttctgaaactttatatgtgtttacttacattgttttagaaatgtaaaaattacccaaaatatgaagaaaaaaaaattaagagtttacctttttatggcataaataaataaaactaagtggttatgggtttttttttatttatttatttttttttacatttatatgagttttttttatgtcatattttgtaaaaaaaaagcagaaatctcatatttgtaaaacaacaataaattttgccgaaaaagtcaccgacaccagaaaagtcgctggaaaaatcacggccgccagaaaagtcgtcggaaa

SEQ ID NO: 154548 - DNA, 548 bp, Cannabis sativa
tccttcccacttgtgcattatcctttgatttcttcccctttttcaacacttcatcaccagttatataactaccaatttctttcctcctagcatgaataaacaaactcacaacaagatcatctctatatactgctaccaaatcagacatcttagctggaatgtcatcaatttttccacgaatgaaaaattcagcaaatttgatgacaaacactccatagtcactgcaataaaaccaaaaaaaaattaattcaagtaaaaaaaccagtttctatgcaaacaaaacaaaaccagacaaaaaatataaacagaacaaaacataaaactagtttcaattaaaaaaaataaatgatgaaaagaggaagaatcacctattgacctgacttgaaagcccatctatgaacttgaaattcgaaggttctattttcccaacagaatatggagcttgatccaaattaagatccgacctagaagaataaacatcaagatactccaaataaaatggcagcatagtagaataagctttcacatgatccaaagcgcgtttcttg

SEQ ID NO: 154549 - DNA, 568 bp, Cannabis sativa
  modified_base (36)..(45): a, c, t, g, unknown or other
tacttgggtgtaactcaaacaataataataataatnnnnnnnnnnataataataataataattctcatttattcatttacaaggtaacaatatcagatcgtcaggcacatttatttaaatatttttactatgcacagttgttttttgattttttattcattttataagaaagaaaaattatatttaatatatattaaaagataaaaaatttaaatcttttttttttatttttacactttaaaataatttttttttcattataaaattccacacacaaacccctattgcaactaacggagtaatctaaatcgcaaacaaaatttgtatagcaactcacataaaaattatggagaaaacactaaagtaacttggccaaaccgtaaatttgaaaaaaaaaaatcaaaaaatattatatagtgtaattcttcaaaaatttattagtttaattagttatattaatgtactataaaagatagtaaaaatataattttagtatattaatacacttaagtaacattatttgattgacttttttttttttaattgatagtatttattttatgtttaa

SEQ ID NO: 154550 - DNA, 711 bp, Cannabis sativa
tgtgttctgtaaagttcattttcatttttattttttgattttatttaagtcgggtctaggtcctaggtcagatttgggttcggatcgatagccgggttcagtgccagggccgtggggaggagatttggttcgggtcttgtcgtaatccaaaagactgattacgaaaaaaaaaaactatttaaaaaaatattgaaagggattttttttttgtttttaaaattttgatttctaattataaaatttaaaagtaaaaatagttttatagaacatgtttttgaaaaagattttcacttttctacttttaaaaatagaaaactgattcaaaaagtgttaccaaacgtcaccttaattttttaaaataagttttatttttacaataggggattccccgccccgtccccgccccattaggggattctccgccccgttcccgatagagaataaacgggaatgggacggggatggggattaaaatccttaacggggatggggacggggagagcactccccgctaattcccccgccccatgtgcatccctacaggataccgattactgccccttttgtcaccatgacataaaacattgttaagatcacccatcacacactatgatagattagaccgattagccagagtacgtaacagattccaagtagaagcacgcctactcctattcggttccccatacacaccagtgaaacgccattcct

SEQ ID NO: 154551 - DNA, 1138 bp, Cannabis sativa
  modified_base (314)..(323): a, c, t, g, unknown or other
  modified_base (1078)..(1112): a, c, t, g, unknown or other
ttagggcacaaaacctaacacatagtgttttaccatggtttggattaggtttgggatatgaactttgtaattttgggactgtagtaccaaactgagtttgaattgtgttattaggatcgatttagaatttaattaagcttagattaaatgatttgaatgaatgttgtgttaaaaattggagaattgagcttataacacaattttaaggttctaacatggtgatttgtgtaattggatgaattattgtgaatgaatgctatgaacatgctgtattcatgttattgaaagattttgtgaagtttgggaacaattgnnnnnnnnnngagcaagttttgggactttgaagacctgaaatttttgagtttctggtgtagtgaactggaattggagatagtacaaggctgccccaaccggaattccgaatggtcaattttcaagaatcgcctcttttcgtattttagccataacttttcacttaggtgtctattttagacattctatatatcgtttcgaagcttataaagagctctacagtatgagacatagattagagccaaaagatatcttttattttaggttgtttttactataacatttggtagaaaaccctaggttattttatgcgggttttagacaatattttggaatagacccttattgatttacctttgtcgtgacataggacccaaaattgtcgagcatcgttccatttaagttggtccacatacttgactttggacttgaggtaagaaaagtattatgcactgtttatggttaatgattataattgtgatagtctcgattatgatcgagggaaataataggaaacgattatcatcgttgtgactcattatgatcgagggaaataataggaaactattatcatcgctgtgactcgattatgatcgagggaaataataggaaacgattatcatcactgtggctcatttgcagggggagctgtttcatggcaattgagactacaaaagtgtgttgcttttgttaggttttgtgccctaaataaaaccctttacaaactgattagctatcaatgtaagaaatttgaagtgatttatgnnnnnnnnnnnnnnnnnnnnnnnnnnnnnnnnnnntttattacatttacacacaaaatctg

SEQ ID NO: 154552 - DNA, 559 bp, Cannabis sativa
tggaattctgcaagtgggtctctccaccaccactcacaatgtctgtcttaatggtggaaaggtaggtttaataaagccttcttgtggcctacgtcagggagaccctctatcctcctatctctttatttgggttgctgaggttttgtctagacttcttgaagacgctctttctaagggtattattcaaggcgtaagacttagtaggggcggaccaattttatctcacaattttttcgcggacgacctaattctggttggtagagctaatgtgactgaagcgaaaggtgtttagcaatgtcttgagagattctgtgcttggtctggccaacaagtcaataagctcaaaaccacgattttcttcagcaaaaatacgcttcccagtatgagaagaggaattaaggaagctttgggtattggttctcctattggtttcatcaagtacttgggccttcctttgtttagatcaagacagaaggatgctgatttcaatttcatcttggacatgttgggttttgtgccctaaataaaacccatttccatataatcagatttacttatt

SEQ ID NO: 154553 - DNA, 547 bp, Cannabis sativa
  modified_base (479)..(480): a, c, t, g, unknown or other
gggttagttgcaaaaacctacctactttatggggttttgccgcaaataaccctatatataataataaatatatcttgaaatcacatgaaaacttaacatcctaatttatttactaaaattataaatatattagaggaggttttaatagttaaattaaatatgtaaccattatcgttatgtttttttagccattaaattattattgaatgattgtgattaatttaaaaattaaataaaaataaataataattaacttataacttaatagtcacttaataatttatttcttcataaaactttaatgaagattaattatatttttaaattaaattaattataattattaattaatttttcataatttattattaaaaaagaatcttttaacaatttttttgcccttaaaatttatttattataattaattataattatatttattaaaacttttatagcaaaactctttataatttaaaatnntacacatataatttcataattaaaattttattatacctataactttaatttaaaattatacacatat

SEQ ID NO: 154554 - DNA, 575 bp, Cannabis sativa
cggtgttatatccacttcccactgaataattactatgactagtatagtgccaaaaccacgaatcttcatgatcaaattgactcaatggaatggaaaaaatacattctgcatcagggagattaaagtgcttatgtattatggtaaaattccaacatccgggtgacccaataagatctgacactctttccacctcatacattggagctgagctaggaagaaaagaaggtggtcttagtaaccatgggtctctaaatgtccttgtgtctttaccatttcctatgctccgtctaagaccctttaataacaaatctctgccccataaaattccttgccaagttggtgaaggatatgatcccttttctgcctctagaatattagtgagccagaaatatcgtgctttcaaaacttgagccagtattgatgaggggttcattaagatcctccatgcctattttgccaagagagcttgattatattggctaaaacgtctaaagcctaaacctccatcactctttggtttacaaatcttatgccaagctctccaatgaattttatgtttgttgtcaactgatccc

SEQ ID NO: 154555 - DNA, 842 bp, Cannabis sativa
  modified_base (804)..(815): a, c, t, g, unknown or other
caatacacattagagaggtatgtttattatcttttaatgccctaaatataatgatttgattttgggttacttgttgagcattataattgttaatgtttaaatcctttatatgattatatttttataatgctcattgtgaaataatttttaacaacatcgacaatgctgttgaataaagagataccttattccataacaatggtagggctaagtgtgcccaggttattgtagggcctaagcccgagttatgcatgtaatggccatgatatgataaggttatgatatgcttatttcatagtattatggttattctatgagtatgatataagagttataatttaatcactacgtatgatgttatggttttagattagcatggacgcatgtaatattattttccatgtatagaattatttacttatcgttatcagttaaagtatgatgttgaaatacttaatacattaagaatatgttggtattgtatatcattgtattgttgtgaatttaagacatgtatggtgtattgaaatatttatgtgtgttaaagcatttccttactgggcttttagctcaacccccttacttttcccctacaagcaatagacagggaacattgaatataattttgatgagctgggtcagtctggtatgtatactgtgaggggctatagacgagcaaacagtctagaacgccggtggagccttgattttattttcttatatagtaaaatatttttagctcagtgggatgttgtgtaatgaccgctctagtaatgtgcattagtaaaggcaattagcactaannnnnnnnnnnntattattatttgtgaattaatttattt

SEQ ID NO: 154556 - DNA, 971 bp, Cannabis sativa
  modified_base (587)..(589): a, c, t, g, unknown or other
gacctttctggcttgtgtggccgagttgtcaatagttgttttcagttgtatctactgcgtgttttgacttactattctatatagtctttttgtaaaacttttgtaacaggaatctctggaacaaaattttagtgtcgttatgttgtttattactagagttttagtttagtagagtttttaatattattacaaattttaataactaattaatctattattcctaaactagtttacaaaactacacacacgtggcgtccctaaaggttagggcgttacacatacagtaatagaattcaagcttttctaacgaatcaattattagttctcttataatgttaattctagaagtgctaatagttggatccaaatcaataataagctatagattaactgttcacattgaattaatagtacataaggaatcaagagataatttgaagggtaaaacattaattttgaccatctctaattatgaactactaatttgagggtgaacttcttatattgattatatcaatgaactacatgtaagaactctataaatataattttataatatcaaagattgtaattccatatttatagtnnngtaataatagaattaataaactaagttattctattgatgagattgacagaatcaagtgtttattggaattttgaaatataggttcatgattccatagtcacctctatacaatattgtacatgtgaagattttattttatgagtaaatttgagtgagaattaatttctatgagaaataaatgcttaagggcaaaatagtaatttatgaaattattgttttgaattattatgacaattatgaaatgtaaaattaatagtatttagctattttgttttattagatataactatattaattagttaaatataatactattcttaaataatattaaagagagaaatatattattttaaagaaaataatatttattttaatctttgtg

SEQ ID NO: 154557 - DNA, 534 bp, Cannabis sativa
gatttaccatattcatttttaaggagggaaactaaggcatttgaggttcctttggtgcagttacttcttttgtgccttgcctataaataccaatagcattggcacataacttattttcatcacccttctttgttaagtaagcttcagagcgaaaagagaacttcttggcttcaaagttgccgaagtgccttcatacaaattgctagttggattgacgttgcttaacctgaacatttgaaccttgagtaagtttctgatttcctttatgcttatctttgcatagttacatttcgaatgtctcttccactgtgctgtagaaaaatgtttaggaaaccctaggtttagaaacctctgtgattcttctttatcatgtcttcatgcgattttatacccagaacgcttgtttctaaacttcacaacgtctgtccttcgtcttgcttattctaagcttcatgaacttctttgccctaactcaagaaaatttttgactttttgagttctggcttttccttgaacatagtcgttctttaatct

SEQ ID NO: 154558 - DNA, 588 bp, Cannabis sativa
  modified_base (561)..(563): a, c, t, g, unknown or other
tcatttcaaattttaataataaaataagtaatatctgatcttataattaaaataaataaaacaatcaaaaatttcaaaattaaccataaggccaatttgtagaaaactcaaattttcaaatgcaaaggctacttatatctaaaactaattttaattaattaaaaaatttaataaaaatttaattttactctgataattagatttttaattaaaaattcagattctacacaaaattctaccaaaatttgaatttgtttcaatgaaaaatgatttttcaatcaaaagatatgataaaaataaaattgggcacaggggtatgcaatgcatacccctgcgcacgcagatggagggggatggccgaggaaacaggttgcatgcagcctctgttggctgagggagctcggcgtgagcagcccttcagactgggccttgtccaagtaacctcggtcaggcacttgtctgaaaacgcgtgttgtccgagtgcacactcacccccgcacgcgcacacgtgcatcccaaaattagatattttcatccaaatttaaaaaatcataactaatnnntaaaaaatccaaattaggttctgta

SEQ ID NO: 154559 - DNA, 666 bp, Cannabis sativa
  modified_base (434)..(436): a, c, t, g, unknown or other
ttgaagtttttcgtgtttttctgcatatacaaccggaattccggttggttcagggctgttccaaccgaaattccggttggactgtgtcggggaaggctaaattttgttttggccataacttttgactcaggactccgttttggacgttctttatattgttggaaagcttgttttgagctctatatgttaatttgtaaatgtaattctaattatgtgattattgaaagtgaatttttggattaaccctatttgtgaaattctgggaatgtgtgactagaatttccgatgcttgcttaggaacacctgatggtttagaatctccatatttatgggacatcatgtaagacagtaattccacgtagagatatgcgtggtggcgcttatgttgaatattatatttgtgattaattagaaaccgagattagggttattannntaaagtgagcggtttaatggcctagggttattacccttgtaaatgctaaagcttaaatgctatgccctgctatatataattgagattaagaattatacgttcaaggtttaataaggttggaccttgtaataagaaccgagatgaactattctaaggccttattgtaattagacgtgtgagcgtaacacgtgggtctatgccacatgacataaattgttgggttttatgcc

SEQ ID NO: 154560 - DNA, 792 bp, Cannabis sativa
aagtggacccgaacccgtaccctaggacccaaaattgtaaccaaaaccggaagttgaccgggactggaactaggagttggacttggaatcataacagaaattggaccaagatcttgaaccgtaaccggacccggactccaaattagacctagacccgaattgggaactgaacccggatcccaacccaaacctggactcaggagtcgaacccgaacctgaactaagacccaaacattgaaccagactagggacacagaaccacggtcgagacctagaactgcacccctgtctcgatctcgaacccaaactcaaaaatgggacatgggacttgaacaagaaccagtccgagacccgtgacaatgatccagatcttgactcaggattcgggtaacgggcctggaacagagcagtagtcactgtctagatcttggactcagctaggaccagaaccataacgaagaaccaaaatcgaacccagacctagacctggtacccaaaattagaacctgaacaagaatacccgaaccaggaccctagaagaagactaggaccgtgaccaggacccagacccagacctataaccgaacacagacctagcttgagacccaaacttagactggaattcgggccaggacacggtcgtgtacccagaccggaacggagactcagacctggacctgaatctgggacccgatcccaaacacaaacttggacctaaatagggatccagttacgaacttggactcggacctagaaccagactgggatcgaaatgctggacctagatctgga

SEQ ID NO: 154561 - DNA, 735 bp, Cannabis sativa
tgtttggcacaagttttttaaaactatttttaaattttttcttactaaaaaaattaatattttaataccataccataatatgaacctattcggatctgggtctaggatccgagtatgtgagcaaaaatataaaatataatatgttagacaaaaaaattggttctgaaaattgaaaacaagagactgtttggcttcacaacttaaaaattattttctgttttttaaaactgaaaacagtttttaaaaactaatatgagtcgtttggcaaaaatttttaaaaacagttttttaaaaattgagctttaaaaaactagaaaacagaaaacattaaaatgttgttttcaattttcaaaaataattttttttcgtctaaaatattatggggttgttcggtaatgattttaaaattggattttggtttttttaattaaaaaagtgaaaacaaaacttaaaagtgcgttcggtaggaagattttgctttttatttttaaaattaaaaaacaaaacttaataaattttgaaaacaaatttttgttgattttaaaaacagatttctcaacttctctctcgcttattctttcagaagctcaagttctcttccatgggttcagctactccacatgtaatatctccttctctccctttctatatatctttctctctctctccctctctcttagatttttttttttctctttatttcattgccagatttgaaatgtaaaaggagactat

SEQ ID NO: 154562 - DNA, 823 bp, Cannabis sativa
ttgtgagtagatataaggtcctggtaaaataaattccaacaacacatgcaatgtgtatttatcgatacgcatacaatgtgtatttatcgatacaatgtcgatagtttgttgataaaactttaacaaaaagaaatttggtatacatattatcgacatgatgtcgatgttatgtcaatagcttatcgatataatggtaattggaaagtgggaaaaattaattagcattaaatgtctaattgtacacgtgtgtgacacgcaattctcttgttgggaatacttgttgggaatgtaggaaaaattaaataatattaaatgtgtaactgtacaagtgaaatgcatgcaatgtgtatttgtcgagtgattatcaatacaatgtcaatagcttgtcgatagttgaaaaggtaggaaagattaattaccattaactgtctaattgtacacgtgtctgacatgcaatgtgcattgtggagtctatatcgatacaatgtcgatagcttgtcgatagttggaaaggcgggaaagattaattaccattaaatgtctaattgtacacgtgtttgacatgcaatgtgcattgtgaagtctatatcgatagtgtgtcgatatgtattgccactcgaattgtagatgtttttatcgatataatatcgatgggatattgataggatctcgatatttttattttttttgtattttttcctgcacttaccttttttgtttgaaattgcaggattgactgggtttcttgttgtatcgtacgatgatgtttggtgtgttgagggttataattgggtttataaagccgaaggcagtttgacgttga

SEQ ID NO: 154563 - DNA, 762 bp, Cannabis sativa
cacaaacagaaccggagttccccagggcaatacactgggtcgggtaaacccaatatcaagcatcccctgaagctgtaacttaagctccttgagttcttccggagccattctatctggagctttggaaacaggttcggctccaggtgccaaatcaatcactaagtcaatttctcgttgtagcgataatctcggtaactcctcaagaaaaatgtcgagaaaatctttaacagccctgactacctcaggcccaaatgtttcgggtctactggagtcaatcaccactactaaaaatcctacacatccactgtgtagtagatccctagcccttagcacagaaataacttggatccgagacccctgatgctatccaacaaaaaaaaatggatcttcaccttctggctgaaaaatcaccattttccgcttacaatctatactggccgaatacttggacaggaaatccatcccaagtatgatgtcaaattctgttaattccagctctataaggtcagaactcaactccttatctttgatcctaaccggcatagacctaatgcgcctattggagataaccaactccccgctaagcattaggggttccaaaccctctttcaagaaaatcacaaggcctacccaaaagatcaattacccgtgtagccacatatgagtgtgtagctcccgaatcaaatagcacagtataagaggagttgtggacaggaagttgatctgtcaccacagaaggactggctgtagcatcagcttggg

SEQ ID NO: 154564 - DNA, 537 bp, Cannabis sativa
  modified_base (293)..(295): a, c, t, g, unknown or other
gtagtaccaatcaatccatttaacccctatttaactatgtagtcccatacctacatagtctcagaatcatcacacatgaccttccacaggcgatgtgaaattgtaaagcttaactggtgtttccctttacaaatcacgggactactgactgtcacaatcacctcccattacagggtccgacatcctcctcgaccacacttctggctaggtcaaggctttgagaccatttgtaatgttctcgcttcaagccccattaggtccttaaactcatggaataatggctcttatacacnnntacgtcactctggctgcttcctagaatgacgactgaccctacagaccaacacgagtgtttctagcatgctttgtcctcactcgcacacttcttaggaaaacttcccaggggtcacccatccaaaaattaccccaggttaagcacgcttcaccgtgaattctttcgtgatgggctaccaaaaaacaagacgcaccttgttgatatgggtagtaccaatcaatccatttaacccctcttcaact

SEQ ID NO: 154565 - DNA, 512 bp, Cannabis sativa
acactgtaatttcaagtaggattcaatgcatttataaagtaccctctgccaaggatagatgacctatttgatcagctatagggaaagactgccttctccaagatcgatcttcgatctggttatcaccagttgaggattcgggaagaggatattcccaagacagcttttcgaacccggtacggacactatgaatttctagtaatgtccttcaaattaacaaacaccccggcgacatttatggacttgatgaactgagtgttcaaagacttcctggatgattttgttatcgtctttattgatgatattctaatttattcagatacagaaaagacacatgaaagacatctccggatggtgttacaacgcctcagagagcataagttgtatgccaagttcaaaaaatgagaattatggttgcctcaagtaagtttcttggggcatgtggtaaataaagatggtattctagtggatccggtaaatattgaagcggtacgagactggcctcgacctaa

SEQ ID NO: 154566 - DNA, 584 bp, Cannabis sativa
  modified_base (56)..(61): a, c, t, g, unknown or other
ttattaaattgttaccttattaattttttttagttcccatcaatgggtattacccnnnnnnaagtgttccatatatatatatgtgagaaatggtaggagccacacatgcttagcaccctcttatgtgtcatatcgagttttatataatttaatataatatcttttagagaatattgctgactaatcgtatatagggctttagaggcgggttttaaggtctttcagcgtcgattttggcaaaattcattatcgacgcttatttaggcgacgctatagaattgaaaataattgatgttaaagtgtaccttagtgcgtcggttattatcaaataactgacgtcatatatacactatgacgtcagttatataaataaccaacgccatatacactaataaccgacgtcaaatgattaaaaactgacgtcaaatccttcataattaatttatttttcaatttaaaacctagtataaattcaaaattttaatttatttaaattatatatttattaatttataataaatattatttaattaaaattaaatatttatttttttgaaagctaaattaaaaattatttaaattaa

SEQ ID NO: 154567 - DNA, 702 bp, Cannabis sativa
aaactagttacattttctgtatttgtttgtgttaaaaaatttcttaaagttggttatattaaaaaataaaattgttaaaaattgaactgaatgttctatttttactattttgaaaaatataaggtccatttgtcatttaacaaaacaaaaaatcaaattagtaacttttgtaaaacacagagtctaaaataaaatttaccctttacatttttactcaagtatatatttttttacaatcatataaatttaatattttttttaagaaaaatcaaattttttaaaaatatgattttaaaattttaaattataaaaatacttttttctcattaaaaaaataagtgtaaataattcaaaaataacaaaaaattaatctcacaacaacttaaaattaactataaataaattataaaacaatgagaaaattaacttgttgaaacattgtttatgaattattaaaaaaataaaaaggtacattttgaggtctttataagactaatcttacattgcttatttataagtatatataaataagttgtttaatttttattttatagcttaaatgaataatatttagatattacttgtattatggatttttattaaatatttagatatatatggataaattttaattttaagtaagttatggtatttttttattttaatttattatgtgggtttttttttccatttttttaactt

SEQ ID NO: 154568 - DNA, 713 bp, Cannabis sativa
  modified_base (261)..(271): a, c, t, g, unknown or other
tttattttttatatatgttttttttttttttttgagttaacgaatctaatgaatggaatcgtaatttgaggagaattagtttcatcacaactgtagttttattttttatatatatttttctttatttttttaagttaaaaagattgtttaatttttttggtttaattattgggtttatttgttaactggagaatttaacagaatattcttttatttttaagtatattctgttaaaccggtatttcttggtttaacagaatnnnnnnnnnnntaaaagaatattctattaaatttaaccccaaaacaaccatccaccattttttttaactttcctgttaacccgttaacttattataaaaaaatttaaaaaaaattcgattggtcattcgattttattccttctgttggagtcgacgattgaaatcgatttgggttcaacctggattggcttccgtgttggtattgagtttatttgggtctcttcacggcattccgattggtccttcgattttattccttctgttggagtcgacgattgaaaacgatttggattcttaatcgaagctcaacttggaaagtgtttaggtgaggcttattcgaaagagattgattgccctatttgttctgggtaacctggattggcttccctgatggtattgagttcatttgggcctggcaaaaatttaggcattccgattgactcctccttcttt

SEQ ID NO: 154569 - DNA, 1207 bp, Cannabis sativa
  modified_base (1169)..(1181): a, c, t, g, unknown or other
ttaaggttggatggttaagtgcaagtgaaacgatagttgggagggtttagccgcaaattactctaatctaaatggtgaaaatggtaaaaagttgttgtgaaagattgtgaaagacctagagaaatgtaaactgaaaatggtgagaaagaaaataagagaaaaaaaagaaacagaagaactccatttttcttgggagggggttcgagtactgggttgggttggatttcagggtgcttcgacttatggtcggaggaaaagaagtagatgtataattgctaaaaaaattaatgtatttctgtattaaatttgatatgaccgtataaatgaataaaaaactaattataaatgtaaaaatgtaaaaagcccaatattttttcaaagcaaaattaatttttactttaatggttaatattaaatggctatttaataagatgacgtgtcattattttaaatggtgtgtcatgccatctggtgtcctgtgtgcaggataatagcaaggtacctacaaaatgtttaaaagtgtaacggaaggtatttatgctgccaaaattttaacttaggtattaaattgcaactggaagataaacttaggtatttatgccgcaaattactcttttcgaaaataatgaagaaagaagaaaagagagttatctgacattgaaaacttaggttaattctctcttctcatcactttctttatataggcttacttagggctaggttagatgagattgagcttaaaaaagagacttggattgaaatataacactctagggctgaattgcttattgggctttagagttagatttttgccatttttattcatttaaatgaaacaatgtgtttgtttcctattttaccacttatctcttctaattatttaaattacaacttttaaatgatgtgtcatgccatctggtgtccagtgtgcaagattacagcaaggtacctatagaatgtctagaaatgtaacggaaggtatttatgccgccaaaattttaacttaggtattaaattgtatctagaagataaatttaggtatttatgcctcaaattactcttttcaaaaattactaagtttctctctaaaaaatattgttatacaaatatgtttgtgtatcatctcacactattcaaggtgatactcatgttggaaatattttaccagnnnnnnnnnnnnntaccatgtatgtttcattaacatcct

SEQ ID NO: 154570 - DNA, 588 bp, Cannabis sativa
aaaatccttaaatctaacaatcttgatagttcagggggtatttttatgaccttaaaagttcagagggcataatttggtacatgtcaaagttcaagcgacaaaaatcctaattaactttatttatttttaataattaattttttgaaatcatctcaaatctaatttaagtgcaattaaaaaaaaaaatgtttaaaaaaatattgactaaaattgtatggaggagactatatatattttttactattttaataatacaagggatcttttttatattttttttaaagtggagggtccaaattagaacttaccaagaggggacatcccaaaacaaaaaaaaaaatctaaatattaaagataatatgtattttctttcaaaaaaaagaaatataaattataaaagtttttatttaattaattataggtttttttttttggtaaaattaaaaatggtatggtggaaatatgttcaatgggaaaaaaaataaaggtttagagataaattattttttgttaatagtattggtatttaggtaagtttagagcacttacaaataagatataatagacccaacaaaatagttatgggtg

SEQ ID NO: 154571 - DNA, 517 bp, Cannabis sativa
taacatgaatgaaagtttaggggtatgattttatacatataaaagtttgaggagcatgatttgtcaaaattaggagaaaaaattgctaattagccattttaatttaattctattttttagataaaaaaatgtaaatagattagtttcctactaatttctttcctctgtcgattatatatgtttaatattttgttgaaaaaaataaatatattttgttttattaaaagtaaaaattaaaaagaaagtctcctgcactaccctcactcataataacaaatatatatatctcacttaaattttagaggacgcttactgaggtgtacattttatgtgacaaaacattaagatgctataccattagaaagaagaagatgtcattttaaaaatttgcatggatgatatattgtacaatcaatgctattcattattttttaataaaaaattgaaactaaaaagttattgtagctaaaaattaggatatatattaaataataattgtgagatcataattatagta

SEQ ID NO: 154572 - DNA, 611 bp, Cannabis sativa
  modified_base (227)..(228): a, c, t, g, unknown or other
taagatttagttcataaaaataatgataaattttttttatagaatttgttataaataatttaatttttaaaaataattataagtaattaatattatatattttaaattttgcacttaaatataatgttttctttactgtcaacattttgaattgtgatcgggtcgttgattagggttgaaataccctgtagatatatagtcaatgtaagcataaactacaacatttnngtgatatgaacagtgatcgataccaatctaagtcttttcactaggaaagccaataagagcattaccgattagtgtaataattgttaatctaattagaatattctgggtgcaaatttctcttatgcaatttgtcgtaagcgtatttgcacattagtcattttatcaccctaataaatagaagcttaagtagttagaattctaggagaaaagagagatggaaaaattcactgttaactgccaccatggactgtttatgtgtacactcttgtacgtacgcggtatgtttatatctacacacctaatatttttatttcaaaatttattttaaaattataaaaataaaaaataaaatatttaaaaaatattattgttgcccctgattt

SEQ ID NO: 154573 - DNA, 1423 bp, Cannabis sativa
ccctctaccaggacgtctccgtcatcatcgactggctccccagccttgttttactccccgtagtttgggggttcaacctctgcctcttcctccacctcacaggaattgccaggacatacatcgtcctgctccttgatctcctggacctcatcatccccttcatgatccccctccacctggacggtcgaatcctgttcggcgctgggaaaagtggcatgccgagccacttgaggatcaaatgcgtcagctagacgcgtttttttctttgtacgagccatcattctatggttgggtacaatgtttggagaatgtccttcactagaggaaggagtgcttgagcgaagatgaggatgatcctcgtgcaaaagttgaagcaagtcctggtcagcccgatgtccgttctcccaaaactcacctgagttcatctacaaaaagacaacacacaagatgagtgttttgtcggaatattgaatgataaataagcaaatatgccgaccaggagtactcaaaagattcaagaacgagaatgttcaaagagaagttagaactcaagaagtttgaaattttctcgagttagggcaaaaaagttcatggagcttagaataagcaagatgaaagacaaacattacgcagttcaaaaaacaagcattatgactgtaaaatcgcatgaaacaatgacatagaagaatcgcagaagtttcaggacctagggtttcctagatattttctacaacaaagttaaaggtgcattcgaaatgtaaacatgcaaaaataagcataaaggaaattagaaacttactcaaaagtcagatgtctgggttcgagcaacgtcaatccaacaagcaggtctgatgaaggcacttcagcaaacttaaagccaagaacctctcttttcgctctgaactcactcagcgaagatggatggtgaaaatgagtttatgtgctaatgctggttgatatgtataggcaagtcatgaaaagaggtaatcatttcaaaggaacctcagacttctcagtttccctccttaaaagcaaatatgggaaatcaaatataatcaagtgcagccgtcaactgtggagggagaaaatcagattttaaaatattaattgtcagaacatttattagccgaaaactgaagggatgcccagtcaacctcacatcgagtctcgcacggtcgtgcttgaaaagtccccatccaaagctagaagcagctcgaatgaagtctacatgcaacttcggaagtcccgtacagacttgaggggcaaatgttattccaatttttgcactctgatgtagcatcacatgaatggtgacacgtggaatccacttgcagcatctgctcagggagcatagtccgagcaggatgtctcgctagcatgcccagagcaaagcttttagcaatccgcgcagagcaaccaacac

SEQ ID NO: 154574 - DNA, 743 bp, Cannabis sativa
tgcactaaattttatactattaatagtgatgaatttttaatttacaccaaattagtacatagtttttcttttcatcctaaccttttttttttaatttattttaaaatataactattaattatttgttgacaatatgtacacgtatgtcataaattagttattaacagggtagagccaggacttgaatggtagggcggacaaagtttaatttagtatcaaataaattttttatagtacatactaaaaaaacggtttcttatgtcgtaaattatctataataaaatgttaaaataaaacgaaaagcactatattattcaaattttactctatattatccaaattgggaatattactacacttctagttaagacacacattaaatttaaatttagtatatattttataaaacaaaaatttatatgaataaaataattttaacataatctaacacttaagtagaggagctggtaaatctaacttctactttagtaatgaaaatgatcaattagtgagcgattttgagttaaatgtgtaaaaaatacaactataataggtgtactgacttattggtaaaagaaatgaaagaagtaatagaagaagaaaagaaaaaaaaagtaataagcaattgtattattttatttaccttctactcatatatatttaatttaaaaagtcaattcacttcaaaaaataatcaatttctatttgaaaaactgtgtttttgcaaatgtcagttgtatata

SEQ ID NO: 154575 - DNA, 598 bp, Cannabis sativa
accagtagtcggtgtctagatctggggctcagactaggacggaaacccagacgaagaacaaaaacccaacccagacctaaatgtggcacccaaaattagaacctgaacaagaatcgtcgaaccaggaccatagaacaagactaggaccgtcaccagaacccagacccagacatagaaccgcacacagacctagcctcaaacccaaactgagattggaactcgggcccagacagggtcgtgtacccagaccggaactgagacccggaccaggacctaaatctaggacccgatccaaacacagacttggacctagatagggaacccggatacgaacctggactcggaccaataacaagactaggattgaaatgctggacctagatcttgacagagatcctcacccagacccaaacttggaccagcactcaggacctgaaattttacctagacccaaacctacaaccagatcggtgtacacacctggacacaaacccaattacaaactcgaaccctgaccaggatcagaaccaaggacttagacccaaaactgaatccagaatcaaatcgggattggaaccatggactcggacccaaccta

SEQ ID NO: 154576 - DNA, 601 bp, Cannabis sativa
  modified_base (233)..(233): a, c, t, g, unknown or other
  modified_base (335)..(338): a, c, t, g, unknown or other
aaatttgaaagaaaaaaataacttctcttgctgtgttgtgtttgttgtattttagcaacatagtaaccagttaccagtttgaaactattttttaaattagggtaaatactattttggactatatattttataaaaattactaattagactcttaattttgttaaatgacaaaatagactttgtattttttaaattagtataaataggaccttgaactgattttttgtcaaaanaaaatttaataataatccgatctagaggtgttatgacaacactgtttacattttctgtatctgttcatgttaagaactgtcttcaagttgattatattaaannnnaattgtcaaaaattaagctcaggtcctatttttaccattttgaaaaatacagggtccattatgtcatttaacaaaattgggagtccaattagtaacttttacaaaatacagggtctaaaataatatttaccttttaaattattgcaaatcaataggggtgttcgcggtgcgggtggtgcggtttttaaccattttttcaaaccaacccgcacatgtggtttttccaattttccaaaccgcacccgcactgcgatactaaaaaa

SEQ ID NO: 154577 - DNA, 559 bp, Cannabis sativa
ctctttttggattttttgctcacccctaataaacactattattgaatgaaaactaaccaatggttaagaattcattgaaccaacactttagaaaacgaatcgaaggcagccacaagtgcaagaaccgatgccacccccaccgcgaactgtagacgccacccctcctaaataacttagcctcttgggtgcgctccaacacacatacttgctagtggcacttcattttataagcacattatttttttttattattattctcattttaagttttagtgaatattaataacgagcttcaaagtatctgagcctcttgactgagtttcaacgtaaccggtatgtttaaattgaatattaatactgtgattagtaatgtaagaggtaagttgggatttgggcagtggtcaaagatgataaggaggcaaatcaaggtgtttgaagaccaatgagataatatttaaacttaagtatggatatttataaaaaaaaaaaaatgaaattgatttttttgagagtgattgcttgaatgttattttggtcatttagtaaaatcacaattgtt

SEQ ID NO: 154578 - DNA, 599 bp, Cannabis sativa
ggtaaaatatttccaacaataaaatcattctttttgatttcatttcacatttagaagcttacaacatctcatccttttgagattttctttctttcatttcactgtaatagcaccactatcaatatcctctcaacactaatcctttatctccatcattcttttcatactcacatatcacaaccaccaacctcttacgtatttatatatatatatatacacaccaacgttatttatatatatatcaacatcattgccactattattttacattcaagctttttagtgctctaccagatttcgtttttgaatctaaggtatcattctataattttgagtttatagattcaaggttaaggtctcatatacatatatatataccattgtaatatgttctaattaataaatatgaaatttaagtttttcataagataattattggttctcaaaaggatcactttcattgcaatcaaggctaggactccacattcgaggtaaggaaatgaagtagaaaagtataagttttctgtatgtaataacattcataggaagagtgggaatagtaaaagagaagttaactaaggtcttctgcctgactcttt

SEQ ID NO: 154579 - DNA, 685 bp, Cannabis sativa
gagagtgaaggttattcttattttatgagttttcaccattgtttcatacttcgtaaatttatctctcagtagtcactctaggagagagtctaatatagacggaaatttacaaaatacttaacatgagagatcgttacggtgttaaatacttcaatgaataatcatccataagggggacgaagtctagcgtctcgaggttatattgatattatttaaccatgtaggaccaacaatggagatcgattatccttataactaaagctcattatttttgaggagttgtatttttattctaatatttattttaagctatttattttaaatatatatttatttaattaaaatttttaatttagagaaattctaaatttaaatttactttaatatttataaaattatacttagattgatctgaaaataaataaattattttccatcttagtaataattatttcaataaatattatgaaaattattcaatttaagttgatcaaaaattaattaaaaattaattcccaactcaaatttaattttctataaatatatatagcaaaattcgaaaatccaatgtatttaacaataaaaatattttcaaaactgcataaaataaaataaaataaatccttggaaaattattctaatttatgttgatccaaaattaattaataaattaattttcaacata

SEQ ID NO: 154580 - DNA, 972 bp, Cannabis sativa
aatttcaaagttttgtagaggatgacgagaagcctatttaccctaactgtaataggtttactaagttgctgacacttattagattatacaatataaaagccaaacacgggtggagcgataagagttttatagatttactagctttcatagtagagttattaccggaagataatgtggtgccttcgtctttctatgaggcaaagaagacactttcatcgttaggcatgcaatatgaaaaaatacatgcatgtcctaacgattgcatcctataccgtaagatatttgtggatgcaatatcgtgtcccacatgtggtgagtttaggtggcaaaagaaaaataattctaacgaggtaaaagtttgtgtccctgcaatagtgttatagtacttacccccaatacctcgtttggttcggttctttcaaaatatcaatcatgcgaaaaatatgatttggcatgccagcgatagaaaggtagatggtaggatgagacatccaactgactcacccgcttggaaatcaattgatgctaggtggcttgaatttggcaatgaacctaggaatatccgtcttggtctttctgccgacggaatcaatccacataccagcctaagcaataagtatagttgctggccatgaacctaggaatatccgtcttggtcttttgacagtaacggttattaattatgacattttatcaggtacctgaaagaaatactgttggacatgggtgggctgaatcgagtctataaatttctgaatccgggtgcgattgccccatataataataggtatatgtagatgtaaactaaataatttcggtatttttaactcttcataaaatttattcttatgtatatgttaataattttacacatatttgtccgagcaggaagatgtttcactggatgcttgtagtcatccagccaagtacgcagacggtggcgtacttggattcaggcaacgacgacatccc

SEQ ID NO: 154581 - DNA, 612 bp, Cannabis sativa
  modified_base (564)..(568): a, c, t, g, unknown or other
aaaataatttccaacagttatcagttttgaccaatcaggatacatttttttttttgcatgtattcatgttagaaactagtttgaggttggttatattaaaaaaaatgataaaaattgagctcaggtaactattttgtattattttaaaaaatatagggtctgatttgtcattcaataaaatagagaatctgatcgatcattttgcaaaacacaaagtctaaaatggtatttacctttattttttatgaatattatattagatcctgtattttgtaaaaattattaattaaattctctattttgttaaataataatctgtaccttatattttaaaataatagaaaataataccttcaactcaatttttgtcctttttttatatgacaaacttgaagccagtattcatcgccaattgatgtgaacaatgtattcaacttgtttataacacttctagattagtttttttttcttgtttagtcaaaccaggttattattatattttattttaacaataattgagctcaagtattattttgtactattttaaaagggaaatttgatttnnnnngcttacatttggttaaaaaaatttttctaaacaaataataacta

SEQ ID NO: 154582 - DNA, 570 bp, Cannabis sativa
ggggttggcaatgctaatctgcctactgactagcagcaaatgtttcaagaaatgcgaggtatcatacttcgtcaaggggaagagttgtgtcgttaaaggcaaccagctgcccctgttgagcaagtgttaccacctgcacctatgctagtagtgggtaaccaggggttcatgatgccgcattgagattcagtatttgagcgctttgtgaagctgtaacctctaatgtttctgggaggactgatataattaaagctgagcaatggatgagtactatcacccgccttgtggataatatgagggtgacgggaacagagagagtgaacttgccgcttttatgttacaaaatcatgcccgcatctggtgagacatagtggggcagactcgagatgttagtactatgacttggaatgagtttaagagtctgtttgaggaaagtttataacatcgctgtgagaacaactcatatggaggactttgtgaaactgacttaagggaaaatgactgtggccaaatacactcttgagtttgatcggctgtccaagtttgctggtgatctggtgcccacagatt

SEQ ID NO: 154583 - DNA, 517 bp, Cannabis sativa
  modified_base (65)..(71): a, c, t, g, unknown or other
atgtttaaagaaaagtcagaactcaagaagtcaaaaaaaatttgagttagggcaaaaaagttcannnnnnntagaataagcaagatgaaagacgggcgttatgtagttcaaaaacaagcattatggctgtaaacccgcatgaagacatgataaagaagaatcgcagaggtttctaaccctagggtttcgtaaacatttttctacagcacagtagaagttgcattcgatatgtaaacatgcaaagataagcataaagaaaatcaaaaacttactcaagattcaagtgtctgggttcgagcaacgtgtatccaaccagcaattgtacgaaggcactttggcgactttgaagccaagaaattttcttttcgctctgaagtttacttagtaaagaagggtgatgaaatgagtttatgtgctactgctgtggatatttataggcaagtcacgaaaataggtaattgtctcaaagaatccttagacgcctcaacttcccgccttaaaaacgaatatgggaaat

SEQ ID NO: 154584 - DNA, 599 bp, Cannabis sativa
  modified_base (32)..(35): a, c, t, g, unknown or other
attaggatcttaatgaaacatacttgttagtnnnnctagatcctggtaaaatattccaacagtgacatagggcccaagatcattgatcgttctccatataggacggtcaacatacctgaaccgaaactttatgtaagaaaagtatatttgtaccacatggcatgggcttacctgattaggcaatgtgatatatgtgaatgccaggtaatggcatggacttgtcttattaggcaatgcgatatatgtgaatgccaagttaaggcatggacttgccataggcaatgcgatatatgtgaatgtcaggttatagcatgtgcttgcttgattaggcaatgcgatatatgtgaatgacaggttatggcatgggcttacctgattaggcaacgcgatatatttggatgccaggttacggcatatgcttgcctgattaggtaatgtgatacatgaatatcaagttaaagcatcggcttgcctaattaggcaatgtaatgtgatagagatgattacttcttagtctaataaatatggttggttatattatatagctattggaatattactgtttaattatgttatgatattaatgttgggttttatgc

SEQ ID NO: 154585 - DNA, 566 bp, Cannabis sativa
aagtttccaaatgaagatagttaaaaaaaggttagcataagtctcatcttcaataatcatattatgcattattatgcataatttcatattatcattgagtgtttcttgatcccaaaaccgatcgagttggaccatgcacgattgtagaacgtgattgaagcactccaaatattctctccacatcttttcttgtaaactcttcacatgcagcaaaatatttttacttatatctttgaggagctgctataattttgacaaatattgaccaattaagatggatgtatctcattaccaagatagtatcacattgtataattttgaccattaattgaatgattaagagcaactccaaggagcccttaaatttgaagatgcagtgatttatcttctccaaggtagcactattttgagatgatttatgcagtttttgctacagtgtactgcatatatgcagtaacactgtagcaactgcatcttttttattattattattaataatatttaatagctaatttttatttatatatattgtttaatattaaaatatcttatattttattaatata

SEQ ID NO: 154586 - DNA, 644 bp, Cannabis sativa
aagtggacggaagccgaaccactcgcaactattacatcaaagaaagttcaagactttattgtgaagaacatagtctgccgatttagattgccgtagaaaatagtttcggataatggcaagcagtttgacatccaatctttcactgatttttgtgcgaaccatgtcatcatcaaaagcttctccgcagtggcatatcctcaatggaatggttaagttgaagcaatcaataagaccttgaaggatacactaaagaaaagactcgaagatgccaaaggaaactggcgggaagaacttcctgaagttctatggtcatatcgaacaactgagaaaaaggcaaccggacagactccatttgccatggcatatggatatgaagctatgctgcccgtagaactcgagccaccatctcataggagattaacgtacaaccgagataccaatcacgtactcctagccgaatcgcttgatgaaatcgaagagaagcgaaccacaacaaacttaaagttgatagcccataaacaaaaagtagctcggtatttcaataaacaagtgaagtctcggaaatactttgtgggagatatggtcctaagaagggtatttctaaacaccaaagatagtacgacaggtgtacttggacctaactg

SEQ ID NO: 154587 - DNA, 721 bp, Cannabis sativa
ggtcctcgtcactgtcccggtcctattccagggtcttggtcatgttctggttcaagtttcggttttgggtcccaggtttgggtctgggtggaggttctggtctagctttgggtccttgtccgagtctcagatcaagacatcgacaatggatcttgtccaagccccggttctctaatcccgggacaacatctggatcccaatcacgggtcccagtcttgtttcagttcatgtctcaggtcccggactgggttcgggtcttggtataggaccgagactagggtccagttcttggtcccgagtcatgctcaatgttcgggtcggttcgggtcccgtatactgggtcccgagtactggttcgggtttggattcaggttttggacccaatctcaaggtgggtttgtgtctgagtccaggtcgtggtccggttacagttttgggtctgggtccatgtcctagtcctggtcttgttcctaggtcccgatctgcttctagtttcgattctagtttcaagtcacgaggtacgagtttggatcgagtttgggtctgagtctgggttcgggtcctgatttgtgtccggggcgatgtttaggtttgggtttcggtctcgggtagggcgcgtggttgggtccagttccgggtttgggtccgggtccaggtctcgatccctttcaaagatctcagtccggttcaagttcaagtttcagttttggttcccgagtgt

SEQ ID NO: 154588 - DNA, 502 bp, Cannabis sativa
caaataacaactccccctgagtatcacactcgaaaaacaaaaacaacaaaataacatgctaacttttaatccaaataaggtcacaagtaccaaacacaacttcctagagttggtccaaacaaacatttaaaatcaaatataacagttatatgtcaaatattactccccctttttgtttatctaagggccaaagataacaaacaagaaaaaaaatagcaatatgtccaacaaaagcaaagaaagaaaaaacttagtctctgtaaagcttgaccaaggtggccagttgctttgacatgtcgtgctgaacttcctccatggcagcaagacgattgttcaccagctgaacctcattcttgacctcctggatttctgcagcagtagaactcgagcttggagcagcagcaccaccaccaccagctttaggcctcttttgaaaaacgccatcaaaatactccaagggttggaatgttgttccagacagtgaaggctcaagagtttcatg

SEQ ID NO: 154589 - DNA, 777 bp, Cannabis sativa
  modified_base (737)..(741): a, c, t, g, unknown or other
acattttttaaaatacaatgatacttttttttttttaattgacacgatgtgtagtagtagatattgacatattacttatatattatatattatattgtataccacattttgatatcataagatcttattaattctattattaatccaattatttatttaacttttaaaaaatgaattatcattttaattgtcactaactcaaaaagaaaaagagacaaaaaagatttaaagtatgaaattataataacaaattccttgaaaataataataatatagtagtacaaaaagataaatcaagttatcaaaactaagtaaaaaaaaatcataatacaaaaacatattgagaagttgatattattttgcatattccaattaggttaatgttttgttatttttttgttactttatagatatatttttgttgttttattattgttttcattttgtttgttaagttatttttgagttgttttttttattttactgaaatactgtatttttgtaattttaaaactttgacacagtatttttgtaaactttttttttttttttttgaaatatgattcaattcaacaacgaaaaattacaagggaagagtggagtctacattaatagcagaactcacaacagggggaatgcccctatcccaattagcacaagctttagactctaaagctattttggccaacaaatgagccacaaagttagtctctctaactgttggaaatattttaccnnnnnctagatttactaacaaatatgtttcattaacatcct

SEQ ID NO: 154590 - DNA, 579 bp, Cannabis sativa
ttttcctgagtttaattaagctcgatgtaaatagtgtaaattggcacgtacttatcgtgcttattttgttttttcttatccttgactgattccttggattcatcttttctctttgtgctggagcctcccgtattgtcagccttcgtcgagacgatgcttgcttggacagtgctaggtttatttccttagcaagaatttatcaattttatctcttttcttgcttcctcctttcgtacaaacacctgagctctttcattgaactcactgatgttttttatagggtgaccttgtaagtcatcccacagcttgcctcgagctttcgagagatcagtcgtaatccccgcttgaagagcagtaagctgtatactgtcgttgaagtttctaacccttgcagcagctgtactgaaacgacttaactaggccttaagtgtcccacccagttactgctttatgttagtaagggaagacgcttcaggtccctgtctattgctacctagaactatttcttgaagtctttagacagctgttccccagaggtgatcgagtgatgggtgaatttattgaaccagttgctcgctg

SEQ ID NO: 154591 - DNA, 1042 bp, Cannabis sativa
gtgcgtgacgaagcaagttctagcacaagatgtactagatctcgagatcacagtcgttctgcataaggaggggatagccctcaccacagtaatgatcaagaaagtatgagttacactaagagtagccaatctgagagttattcaggcacaacatttacaagttacgatgatcaaagacggctagatcttcgtgagcaattgaataagaaaaaacctgatctatgtctacaactcaatcaaaagtaagaggatccaatccaattgcgaattatttagttggacgataaatttaggagataccaagatggggaatatgggaaactgcctggttataacttggacgaagaactcaagcctttccatccagacattatgagcgttgaattccccagggatctagaaaccctcatgtcttgtcatacgatgggactacagatccagtcgctcccctcaacaactttaatacaataatgcgagtcagtaatgttacaaacaacttacattgtattttatttcccacctcgctgaatgaggcagcgagcagctggttcaataaattcacccatcactcaatcacttcttcggaatagttgtctaaagacttcaagaaatagttctaggcagcaagggacaggcaacctgaagcgtgttcccttacaaacataaagccgcaaccagacgcgacacttaaggcttacctaagtcgtttcagtagaactgctacaagggttagaaacttgaacgacagtatacagcttattactcttcaagcaaggattacaactgatctctcgacagctggaggcaagttgtgggatgacttccagggtcgccatgtaaaaaacatcagtgagttcaatgaaagaactcaagtgtttgtacgaaaacaagaagcaagaaaagagattaaattgataaagactggctcgggaaataaacccagcactgtccaagcaagcaccgtctctacgaaggctgacaacccagaaagctccagcacaaagagaaaagatgactcctaggaatcagccaaagataaaag

SEQ ID NO: 154592 - DNA, 590 bp, Cannabis sativa
  modified_base (415)..(423): a, c, t, g, unknown or other
caacgatcttttatatctattgaactctaggctatattcataactccacaagatctctataacacttaggggtggaagaagctatttacatatgtagtttattttgaacaatagactatactcaatacaccacagtatctctataacacacatattttgaataaacatggatgtaatataatgaacaaattaacaaattattagaacttattcttgatcttgttttttattcctgttgtaatagaaaatgataccaataaagttcttggacatagtatcacaataccttatttgagtgggagaaattttataattctaagcccatctttttttttggatgacacttgagatagattactatgttatgatcatgatatgaactttagaatacagctgagaaagtaaatctaaccannnnnnnnnatagaaataacttatcagaatttgaggataagataggaaattttgctaagtctattcgaatgacttatgcaaaatccctagtcctcatattttttttggtatcttttaatgattacttaatcttaagcaagtatttaacttttatgttaatactagattgctatgtt

SEQ ID NO: 154593 - DNA, 888 bp, Cannabis sativa
aagaagataagttcttctttatttatcacttaggagccgtgcgagatgaaagtctcatgcacggttttgaatgagagaaagaagtgaggaaggaagggacacgtatcaacactactatccatacatacaaactactcatacctaaaacttaattcacttcaatatttttagattaatattattttattttatttcctatattttacaaaaaaataaaaattattgtttgaatcttttattttattatataataaaaaataatttacagcgtaaatatttaagtttaactcatgattgtagatcaatattcaaatttaatttttaacagtaataataccctaaattatattgggaaatttgaatttatatgcatacatttggggtatattaaatttttgaacacacttacaaaaattaaaaaaataagcacactttatattcatacccattatacacttctctcttctcttctcttctaacttcaccatccatactctgtattctcatctatactgatggtggtccgatggtggcccgatgttacccgtttttatttttattttttttatgtttttgtacataaaaaaaaagtagcatcaggtgaccatcggaccaccatcggagcactatcagaccaccataggaccatatctgctaccatttttttttttatgttttgtacataaaaaaagtagcatcaagtgaccatcggaccaccattggactaccatcggaccatatctgctaccaatttttttttaatttttttttatgtttttgtaaataaaaaaaaagtagcatcaggtgaccatcgaatcactatcggaccactatcagaccatcatcaaaccatatctacatttatagatgttaagctccattcattaa

SEQ ID NO: 154594 - DNA, 545 bp, Cannabis sativa
  modified_base (47)..(50): a, c, t, g, unknown or other
tgatctttattagtaagtaaatatgattatattgaaatgggttttannnngggcacaaaacccaacaaaagtatgccatagtagtcgtggactttttcacaaaatggacaaaggtcgagcctatgaagaccataactgctaagaaagcattagactttgttatccaaaatatcgaggcctgcctcataaaatagtcttagataatggaaagtagtttgactgggaagaattcacaaacttctgcaaccaacacagaatcgttaaaagcttctctgtggttgcgaggccgcaaacaaatggacaggcaaaagccatcaataaaatactaaaagtcaccctatagaagaagttgctggcctgcaagaacaactggcctaaagaattgccatgagtattatgggtgtgaagctatgttctcggtgtgaagctatgttctcggtggaaaccttgtttccatcccacaaaagggcgacatatgatctggcaacaaacaaagctttattacaagaagcggtggatcaaatagacgagctctgggatgagtc

SEQ ID NO: 154595 - DNA, 821 bp, Cannabis sativa
  modified_base (472)..(474): a, c, t, g, unknown or other
ctactaaccatctcgggggtaggggtaggtctcgttagaagagctgtcaaaacaaacaacacattagtcaagtacttaaaaaaaaggaagactgctgtaaataataaggaagagaacaatcacttacgaagtttgcgaaatgtggttgtgccaatgggggagagaccagacgtccagaagacgtcgtccttgaaggacaccttatttggcaagtctacgataatttttggctcactagcaagagtgagaagatagaaaaagccccttgcaacgttcttcctcgatggaaaggctttaattgagtaaagatactcaatctctaccggcgtgggacagccccaattcataattttttataagactttcaaactagcaagaatcctgttagaaatgggattcagctggaatggggcaaccccaatgtgatttatataatccttgaagtagtcccgaagagggaggatggcccctnnncaaatatgctcaaggctctaagcacccgtactagttgaaccactagtactggtctcaccgctggttcctgagttactactggcaaagcgtgcagggggtagcaactgaattcaccctctcgtactgacctaacttggcatgattgcccaagtataattccaaaagtcttcagcatgtcgcctgtgtagcctgagatagattgcaccttcgattctattaactcaacctcgaaggtgacgttgggatcttgaggagttttggatgtacgtggtttgggatgcataatctcgacatttaagtcacctagttcaaaagcaattgtgacgttgggtaaaaacaaaggcttt

SEQ ID NO: 154596 - DNA, 565 bp, Cannabis sativa
ttatataaactaacaaaagtaaaaaaagtgtggtagtggcagatttctttctttcttttttttttttaattaaaatgatataaaagtgtgatgtgatttatgttgtcattttagtgacatatttttttttttcattaaaattgatgatcaaagtatgataccctaaatatttaatacaaccgattcctttcactttaatctcacttcctcattattctctcttactattcatcatgttcttcctttttttcactctctactttctcaagttatctcaatttttctccattaacatataatttttttatttttttcttgttcagttctttttcttcatcttcttcttcattttttttatttatgttttgaagttcttagtcacgtttaagagttagtgtggttttttttgttctaattttccaaaactttcttgcaaatatagtgcatctagtattgacgatgtgcagaaaatagttattttttttaattttttttaattttttatttattttagtgttgttttactgttgtttttcatgatttatttatttgacgccgatttcac

SEQ ID NO: 154597 - DNA, 537 bp, Cannabis sativa
tttttgtaagtttcccttaataaatgtcctcattttaaaacttgtagagaaatgactcttttaaactatttattatttatattgtcttttctcacataaaataatccataatttttttttcatttttttttttggaattagaatcaaattatttaaagattatggtatatctatattagttttaataataaaaattatttaaaaattatgtcgatttttttaattttctatgagttgttgtgggttgttgattgttgcccctgatttttcccaaaatacgtgaaccaaccggatgatgacatgtgggtggaaaggatttaacatttgaataaaacatctaagtcttctttagcgcaggattaccttagacatgcctcctggagaaggcatgtaagtctcgtatgctcccggagagcaagattgctacaaagccgctctgggtggtgtcagattctatctgaacagtcatctcgcatttaatgccgcatgggaggaggcgtattgaaactgccatacgtaataaagtctgacggcaca

SEQ ID NO: 154598 - DNA, 1179 bp, Cannabis sativa
  modified_base (450)..(454): a, c, t, g, unknown or other
atacccctgaccataaccctaatccccgtgtcccacacggtactgagtctagaacattcgtacacggtacttttaaccataatatcagcctatactctgtacgctagtcatactctagccgtaccgatgtgatactgtatcagcctatactcaatacgctactcatactctagccgtaccgatgtggtactgtcaaatagtacggtgctatcgaccataatatcagcctatactcggtacgctagttatactctagtcgtaccgatgtgatactatcaaatagcacgaaagcccacatacatatctaatgtaatctaacaggcttactaacatgcacgctaaacatgtaaatacatatgcatactgttatactaatcttacctcgattccaaattcaggtgtaccggtcaacctgagtggaacaactgcttggcgaattacaggctcctnnnnnacatcaatcacaacactgataagcgacatgctaaatcacttcctggggacttaaacttgaaactaaaagtctccctatcgatgaatagcatggcaataacctgaataacacaaaaatgggaaaatctagggttcccaaatttgccccaactggaattccagttttgggaaaaattcctggaagccaaccgaaattccacttcctacaggcctctctgaatcagaatttcggttcagtgcaggaatgactaaaaaatttatttctcaaccaaatcaaccccaattcaatccaaactttccagacctgctatatagaccacaatgaacatattctaagtgataaaacaatcatccatacacagaaacgaatttcaccattaaagctttaagattgagttctaaaactcaatacttgactaacccttcaaacaacctctaattcatgcataaatcaacataataacccatatttaaacctctgaaaacaacatcaagcaactacagcaaccacaacaaacaacacttcaaagcatgcaaaatttcatttcttacaacttaaggaaaatagagaaagctacaagaagcttaccaagaacttgagatcactaagtccttgctaaaactagcttgaaaatcacaaaaaaccccaaaccctagctgctctaggctgaaagagagaaagagagagtttgagagaaaaagcctctctcttgattttccaaattt

SEQ ID NO: 154599 - DNA, 740 bp, Cannabis sativa
  modified_base (37)..(38): a, c, t, g, unknown or other
  modified_base (355)..(357): a, c, t, g, unknown or other
gatgttaatgaaacatactagttagtaaatctagatnntggtaaaatatttccaacactgactgcccttagtcctatcagtgttggacaacccaacagtatgttgtaagccgaaggtaggtcgacaacaaagaagtcttgcataatagtagcagttaaaggtgcctcgcctacagttagtgcgagctcgtttatgcaaaggctagcgatgcgatccccgatgaattcgcaaaggttcaccatacaatgccttaacttggccttttcgagccccattttcttttgagtctccttataaatgatttttaccaagctcccattgtctattattactctcttgatcctcttattggcannntgaatggttatgaccagcggatcgatgggagggtatctcacgttcttcttgtcttcctttgtgaacgtaatggggggttccttggttttcaccttcttggaaggttctggggcaaagaccaactgctagttttttatctcctgcacgtatttcatccaagcgttattgctttcccctgcaatatgcggccctcccaaaataaccaggatgtcctctctttcaacaagaataggttgtaatccctggttatttgggttatcaagctgacgaagctggttgtgtccctggctctgtcttctcacatactgcttaaaatggcctcgagcaataagaccctctatctcatctttcaattggcaacattcgtcagtcgtatgcccaat

SEQ ID NO: 154600 - DNA, 530 bp, Cannabis sativa
ttatttgggttttaattagaataaatagtattttagttaaattttacgtaaaaaggtgttgtatgaattcatgttttacgttaaaaatgtttatttgagtatatgtaatatgtttgtgtgaatgaaaataataaatgattatgtatggtgtgtcatgcaagcaaaatggacttatgtgttacgtatttttacataagtttctgtacgagtttagagattcatacttgaatgtattttgagtgtattgttgtgttaatgaatgtttaggatcttgttcccaacaaggaaattcgttgaggtgctcgaggtagcaagtgtggtcttagcaactgaggtaagaaaagtggacatctgtgcacagggtgtatgttatgcatacaacttgggtttggtttgctatttaatttgattgtgttttgattttcttatattttgtaagcatcgttagcatgagaataatattagggtcttgctgcttgtgtgagcatatcacttgcaggctataactttatcatgggtgagtacaactt

SEQ ID NO: 154601 - DNA, 575 bp, Cannabis sativa
tttttcggtaatttttctgacgacaatgccaattttaacgaattttctggcattggcagcaactccgacgacttttcctacatcggcacctactccagtgacttttttggtaccgacagcaaactcatggaaattcttcaaaattggccttgttgccggaaaaatcaccaagaatttttttgtgatttttccggcaataatgccaatttcttgatgaagaaaccggtttcttagtgattttttttgtgatttttctggcaataacgccaatttcgatgactttttcagcaccgacagcaactccagtgactgtcccgatgccgacaccaactccagcgactatgccaattctgatgacttattttagttaactttattgtttagcatttatatttcgttatgattttttatagtgtcaaatctggtttcataggattgataagtgtgaaactggttttacaggttttaagggttttgtaattaggttgctctattttacgatgttattgtatatattttatttcaagtttctttttattattttatttctaggtttgaaactagttttcacactt

SEQ ID NO: 154602 - DNA, 624 bp, Cannabis sativa
tgatgcttattatgggcgtcaaccacttattgatgtggcacccaggtaagtttcctttcctttttctttaatgtcacattggggacagtgtgtcactttagtttgggggtaaacttaactttttattttgctagctttaacatgttttttttagtttttaattttagtttttattgttttgagtcaatttgcttaatatgagttaatttaaaagtaggtagatagcatgatttaaaaacttcatttatttttttcgaaaaaattcgtgtgcttggtgatgttatactcttgactaatttcaattttgtgctttaaaagaacatagaatcatattaggtaattttctagtaattgaattaggttatgtatgctaattgtgaaatgtggaaagttgtttgaaaaaaattctagaacttgcttgcttgctatttgaggtgaaataataaattatgcatgactaggaaagtgatttaggtatttttttttagatcgattgtgtctttcctagtcatgataaaatcacagggatagcttgtgggaatttgttaggttgtttttagtattatttttaagttaatttttagtgtgtttttaatttagttctactcttgtttggagaaattt

SEQ ID NO: 154603 - DNA, 547 bp, Cannabis sativa
ttataatacaatcaacatgattagaagaggaattcaaaatattaacagatacatccgaagtccacaaaatcaaaagaccccccctaatcctattctaggtactttaaacacatggtcaaaaggaagactacgacgtaagctatccccacggccagcagcagctttagtctccatgatgaagagaaaattcagtttgtgatttttaacaaaaagggagaggtttcggaatgcccgagggctccccaaacctcgggcattcccactcataagactcatttttctgggcagggttgccccgcaacacccgcctgttccaacgaaattgtaggacaagctcgagcacgcttgagaatattcctgagagagtcaccaaccacgacagtttgagggaggaaagcaacccttttagccccagcaactgctttacccttagcttttccaaaggttcttgggaaaacaccctccataacaatgccctcactactactttcactagctgtgaccgtagcatgctgggtagttgtgaaaggaaggtcacaaagaacag

SEQ ID NO: 154604 - DNA, 567 bp, Cannabis sativa
aatagtagatatttattcagataaaaataaataataagtttatgtcgcactcaaaattttaagtacttataccactatttactaaaaaaaactaataaaacaaaaaattaaaaaaatttatgtaaatcattaattatatataaataagtattttacaaaaacatttttgtttttcttgaattgttttcattttttttataactattagggaattacttagtgcgattttcttcaatcttaaattacgtatcagcgatagatagaaaccttaaccttatatgttgaaattataaaactagacaaaatagtaaaagaataataataattgtgagcaatgatgttgatgtttgaactttgaaaccgcataattaaaacccctctttcttacaaatcatagtaaacgaaaattagtaggtcttgtaactttgcggcctataatgtagcaaattaggcttttaacaaccagatgtacctatctatttcgattgactctttaccggagaacattttctgtaatgaccatgaggtctaatatttttcaatatataactacgcttattttcaaaa

SEQ ID NO: 154605 - DNA, 658 bp, Cannabis sativa
tataaataaacttattttgatagaattataaaataacttgtaaatacaccaaataatatcttgaacatcctataagttatatttataaaaaaaaaaaaaaaaatcaaacattaaattaggcaaaattaaatatactaatcaattccataagttattaaaaatatatattttttatttaataattaaaagtaactaaattgtagttttcatatacttaatttataaaacacttttgatatattttaaagttacttgtaaagaaactagatagtatattatatttatattttaaaaaatataaaattaaaaaaaaaaagttaaactaatgttgctaataagttatatcataatttattatactttaatataatttattagttttaactatacatattatatatatataaaagtaatacaaatgtatcttgatcaataatataatataacttaaaaataaaattataattttgaaagtaactaattcctaaataaacaacaatataattttaaaagtgattaattggtaggtaacaaaaaattaaatgagataatattatctcaaagtaaaacttattattaaaaagaaaccaattagtatcgtagtacctaattactttttaataacatctagtaactttttgttagcccaagatatgtt

SEQ ID NO: 154606 - DNA, 822 bp, Cannabis sativa
gattggattggattaaaaaattcaaaatccgcactcgtgcatattggatgttgaaaattcaattcaaataatttattataagtgtacttgctattatacattcaaaaaataaactgttacaattatgttctccgtattgtgaattattcataattttttaaatatttataattattttttaaaattaatattacatgggccactacaaatttgccacgtgtacaagtgtgtacatgtgggcagtccactgtagcacttaattgtgatttttggacagaggggtacaaagtaaaacagaatgggagtgtaggtagtttggcccccaaaaaatcgatttttgtatgtattaaaaaatttaaagctcatgtagtttagccgccaatatctctaagagttattgacggcaaaacccatttctattataaagcaggtgggccaaaatgaaaatttataagaaaaaaattacataacatttattttaagtaaaaattttatacaagttttttttatttatttatatttttacggtattttataaagacacaaaaaaataataaaaaaaatcacatgtaaataatagaaaaacaacaacaaaataatatcaaaacagcataaaaaataatatacaaataagaaaaaattaacaacaaaataataagaatacaacataaaataatatcaaaaaatttactatgttgtgtatttttaagtagtgtcttctattgattaggagcaaaagtcacatgtcattttcttaattttataaattgatatgcatagatttgtatgtttttcttaaggtaagtttatattttatataat

SEQ ID NO: 154607 - DNA, 876 bp, Cannabis sativa
  modified_base (54)..(55): a, c, t, g, unknown or other
  modified_base (812)..(817): a, c, t, g, unknown or other
tctgggtctaggttcgggtccaagtacaagtttgggtctcgagtgcgggtccanntttgggtctgggttaggatctcggtcccagactgggtgttggttcgagtccagttcttatccggatccctatctaggtccaactctgtgtttgggattgggtcacaggtttacatccaggtctgggtctcagtttcggtctgggtacacgaccgtgtccgggcccaagttgcagtttcagtttgggtctgaggctaggtctgtgtgcggttctaggtctcggtccgggtcctggtcacggtcctagtctttgtctatggtgctggttcggcgattcttattcaggttctaatttttggtcccagttctaggtcttggttcgggtttcgttcttcatctaggttttggtcctagtctaagtcccagatctagacactgacactagtctgttccaggccccgttactcgaatccagagtcaagatctggatcactgtcacgggtctctgtctggttctggttcaggtcccaagtcccattttcaagtttgggttcggcattgagactgcggtgcggttctaggtcccaaccctgattctgtgtccctagtctggtttcatgtttgggtcagagttccggttcaagttcgggtcccgagaccaggtttgggtggggatccgggtctggctccaaattcgggtctaggtcttatttggatttcaggtcttggtccggttacggttctggatctatgtccaatttcagttatgattccaagtccagatcctatttcccttcctgggtcttggtctaggttgnnnnnnagtcccaagttccaatcccgatatgagtcttggtcttagtccttggttctgatcctggt

SEQ ID NO: 154608 - DNA, 628 bp, Cannabis sativa
tgtgtttaatttctttgttttagagatattcatatttaggatgttaattcaacacacttgttagtaaatctagatcctggtaaaatattccgaacaatcatatatatacaacactgtatagagaaaagttttatttgatgaatgaatttgagtgagaattaatttctatgggaaacaaaattttaagggcaacgtagtaatttgtgaaattattgttttgaataattatgacaatctttatttgtataatttttagtatttaactatttagttttttggattaaactatattaattgtaaaatataatattattcttaaataatattaaaatagaaaaatatattattttagagaaaattatatttttttaatccttgtgaagtaagagattaatgagaattaatcaattattatttattagaagaataaaataataaatcttatttatggaaaaattgagaagtcacctttaaattttaaaatgtggtctacacgtgtagtccttgtctacacgtataggatgacatataaaggcccatattaattttttttgattattttattgattaaaataattaaaattgaattttttttttttttgagaaaaagctgttattataaatcaaa

SEQ ID NO: 154609 - DNA, 1470 bp, Cannabis sativa
cttctgaactcttggagagaggcgtggccatgagcgaggagtgggtcacaaattgaaaggacaatcagaaaaacgatgctcacaatttgctgcatgaacaacctgacttaagccaaacggtatttcatctgcaaagacatattcaggcgatgacacaagtattgacatctgaacaacatgcacatgtggagaaagagatgagtgacgtttctctaacgcaaccaacgcaaccaacgcaaccaacgcgtccacaactgtctcgcttttatatgcctggagatggatttggttcatcttctcagccaatgggatttaagcatcaacagtcgcagggggctccactttcatttcaacagttgttacaataaccattgcagcagccgttacagcagcctcaaaaacttcctgaacaaatggctcaacaatttcaataatttcagatgtttcagacattcatgcagatgatgtcacagtcaccgccgccaaatatcccactagtaatgatgcagatgatgacacagtcacctcaaacgtctcaagtctcacagtctcggatgccacaagtgatgccaacacaacaaatgtcacagataccgcagactttttagattatgccgacaccacaagggcatcaatatgggcagcatacatcatatatgccgacaccacatgggcaacagactgctcagatgatgacaagtttgcagatgcctccatactacccacagatgtcggatgtttctcaaccccaaattttgaggaatgctaatgatgatgacgacgcaacaataaatttcttttagtatttttatcttagttatatgaactattactttaatgtttatttatggtttatgaatattctctttagcaagtattatctttattgaaggatattgttatatttgacatttgatatgtgatataaaaatatttagtttggtgttatgttttacttttaatttaattattttatatattgtttaattaaaaaaaatatttaataaaaattgattagtgaaaaaattaatatttaagaaaaattatttttttagtttataattttttttataaaataattaaatcaatggcgattttttcgtcattgataatattatcaatgaagaaaagtcgtcattgataggcttacgatttttttttttaaaaaaagaataattctttttgccaacgacaaagtcgttggtaattatttttatcaccgacgaccttgaattttgtcagtaataatacctttcaccaacgaagtattaccaacgatattttactgacgacatgtcgccgttgatattcaatactgacgaaatacccaccttttactaacgaaatttgtcatcattaaaagccataattcttgtagtgaagccaaaaaataataataaatatctatatttaaattattatatttgggcaaataatttaaataaacacatttaatattaactcacttca

SEQ ID NO: 154610 - DNA, 747 bp, Cannabis sativa
attaaaatcagttaatttccataccttctaggcagcggggcatctgaagagagcgtgttctagggtctcatcgtgatagtgacatcggctgcaatggggggagtatagagtctttctgttgaacaggtttcggctagtagggaggatatcataacagacacgccaaaggaaatgtttcaatttaggaggcaaaggaaaggtccaaagatttttccaccaggcatttgaggacttgtgatccgagggggtaggttcattttgatgaagttggctatgggcaaggtggtaacctgaattgaccatgtacgaaccatgaggggtgagggaccaaaagtgtgtatccagagtggagatggtatgaaggggaatagccattatagcttgtgaaatgtctgtaggaaaaagggattggataagggcatgattccattgtttgttaggtgtgataaggtctgccactgtcatatcggcatttgaatgatacctcaaataatgcagtttaccataaccaggaatccaagcatcattgaagatgttgatggtagtagcatcaccaattgacttcctaaggcctgactgaagaagttctttgccccaagtaatactagaccaaacaagggaaggtctatgacccttgccaaagtgaaggaagctagtttgtgggaagtatcgagctttaaggagtgtgtccactagagaataaggatattggagtagccgccaagcttgtttggccaacatcgcctg

SEQ ID NO: 154611 - DNA, 617 bp, Cannabis sativa
  modified_base (573)..(575): a, c, t, g, unknown or other
ttcgggactttgctagggccgaattagagagttagggtaggactagcttgattgcttttttgttaagtgtatgctgctttcacagatgttctaacacaaactattttcttattgcagcagctagacccatggacgaaatcttggccacccttgctggagcccatagccctgatgcttccccacctcctacttcttctcaattggtcactcccgggagggcttcctccagcgccccttcgggcactattgtcttggtggacgaggaggaggtgcttcttgaggaagctgaagaaggtgaagaagagaaagaggttgccctcgtgcgcaagcacaagggcaagatggtggaagaggagccttctaagcgcccttggagggtggacactccggccccgagccatgactccgggattccctccgaggcggaggaatacacagtgcctcatggcatagtgttgactccgattccgggagacgaggagaggcaaaaccttcgggtagccaagtacaactacgccctcgacgagtacactcggggacatgctgaggtggaggccttaaagagggtcttannngaggagcagcaaaacactctcaatgtggaggacttccggaat

SEQ ID NO: 154612 - DNA, 510 bp, Cannabis sativa
gtagagtagagggatgtaatgtatattaaaattattgctttattatttttgatacaaatatatattatttttttaaaagctaattaggatttttgcttaatgtgttgttgtgttttagtcctgatgtgaagatttagcagcaccagcgagaacagatggctatcattagctttctagaaagactttcatctaaatttgactttagaaagttacaagttctttctgggtttgatgtctcatctttaaataatgtcttcagtcacgttcttcacacataaactactccatttgtttcttttaatagcgctttggctagtcataataatcatgcaccattacaaaaggaggtaatttacaagggccagacaattgaacaccaaaattcgaaagtattatgaaattaggccacaccaagtttgagtgctagaagctacaatttaaaaatcagcaaaaacactatgttaatattgcaatcactagtgatagatctaacaaattggtcgttatttt

SEQ ID NO: 154613 - DNA, 542 bp, Cannabis sativa
tcaataacacctattcatgcttttttataattatttttagcaataatcaaagatcaaaacccagggaaaatgacctcaaactcaaaccaagagcaagcttaagattcaacaagaacaaagctacaaacaagccaagattcaagctttcttcccaaaaatcaaatttgatgatcaagagggtttgagtgagagagagagagagagaggtcgggtgagagggatacacaagccagaaaattcctttgttttcctcaaaattccattttgtcaaacatagtaaataaaggtcaaatgaccattttgcccctagggccaattaacacatatattcaccctcacaagggtatttttgtcattaaaagcataattaaatccccaattaaattttagattatcaaatatcaaataaaatgccaattaattcaatccaattgcatttcaggctcaaaccctattcggcccgaaatacccggctgtgactataccgcgccaacctgtcaaaacacacttgaaaagacaacacaggcatactatataataat

SEQ ID NO: 154614 - DNA, 516 bp, Cannabis sativa
  modified_base (345)..(353): a, c, t, g, unknown or other
  modified_base (432)..(454): a, c, t, g, unknown or other
ttatctaaacctatggcttgtggtatgccttgtgatttaattactctagttcaagcgacttacttttgtaagttgctggaacttttgtttggaaatcaacaaaagcttctcgacttttagatgtagattttatttatataataaaaaattttaactgttctagaaagataaagcccaaggaaagaattccttaggatcaacagtaagaggtctcagatatgctttgctatgcattagactagacacattttgtttagtgggagtaatgactaggtatttgattaatccaagaaggaacattggatgacaatcaagtgaatattaagatcaagaagaggaactatnnnnnnnnngataagggtggtattttcatactcttagactttaccaaataaggtttctagactttccttgatgctagaaagtctactnnnnnnnnnnnnnnnnnnnnnnnggtggagcagtgattttggagaagggtaaaaatcgatctagaatctctaactctaccagtga

SEQ ID NO: 154615 - DNA, 533 bp, Cannabis sativa
ttttcacgagtttcattcaactcagtgtatactgaataaatcgaaacatacttgtcgtgctttttctgtttctttttatttttagatgattctttcaaatcatcttttcttttcgtgtttgaaccactaggattgtcttctttagttgagattatactcgctattgccgtacttgtgccgtgtttacttcccaagctagttttcaacaactttgttgacctcgcttttagccaacgaaaatgagtcttaattgtaagcgataagtgatataatatagatataatatgaaaagataaataaagaacacaaagtttttaaagagattcagccccgagcaattcggtaatagcctactcctcttgatttgtattgacttaagaacaaagaatataatgattcttctcttagagctcttacaatgaaatctctgagtatactctcttagataattcttttgaccctttgcccagtgataatatatcactatttatagggctatgagcttaagggaaggtttcccttttgtttacaat

SEQ ID NO: 154616 - DNA, 1136 bp, Cannabis sativa
aacaatactcaatgaactattttattggacaatattgtctcacatggatcaaatataaaaattttgagctatatataaaaacatgagctactctactcattaccaattaattttaaaatgtaacttcatcattctcaacatatatatctatcatatatatatataaaatgaaaaaaaaattgaaatgaattccattgtgaaaaactatattagtattacccttatctattatatctagaaggagaagctgttatatattacaataaataattatgagccttccaatatccaaactaattaaatgtgttcataaatataacacaaaagaatcgaaagtgtagatatatatttggatttttgttatgtgaaattttgtctgcttagaaaagtgggacttgtcacatttatagtcacttttaagaaacagtgactcttcaactaacgctttatattatgtcctcaaccagtaaccatctttatgaggtgtcttactatttggatctttttactcaatcaaatcccaagtaaaaatattcacttttaacatacgttggttcacatgaattttttagtggaggaagaataataggatagagctttttgttgttttgtttccatgttattatcatccaaaaaagaataaatagccttttattgattagctctttattattatgatcctaaatgatgatgaattgatgataatcaacacatgtttaattagcatggaatgtagattcatgatgaaattcaatgtcttcaaattaatttggacttaattttgttgttgttggagagagagagagagttgaataattggtagatctgacataatgatgggattgtggggataacatttaattggaaagtccaaaatgggagaatagatcaattcataacatagtaattgttagctaaaacttcaattcctacatagactacatagcaaggaatataaatcttagtatttcttattctatttgcatattcttcttctactttttatctattataattcatgggttaggtaaaatagattaaaataataataaaggtctgtttggtaacacttttttaatcagttttttgtttttaaaagtagaaaagtgaaaatattttttaaaatcatgttctat

SEQ ID NO: 154617 - DNA, 573 bp, Cannabis sativa
ccgtaaggttgctttgtttaacgtcgttagctcgactgcatgttgtgctcatgtgatgttcacgttgggtcttctaacaaagacacattctttatgtaccgatcaatggaatttaacaccttgaatttgagtgtttcaccatcaaattctattctaagtatccatgctttcgtattcaacttcttactcccagtgagtaagaagggtctcccaaatagagttgatgtaggattgggatcaccctcatcttccatctcaattatgtaggaatcacttggaatgacaagtccataagcctgcagaaaaacttctttaactatccttaaaggataagcattagtttgatcagtcaattgaataaaaacttgagtttttttcttgatggaccaagatttaaagaagcaaaacaataattgctcctaaatctaaaatgcaatgatcaaacctgattttaccaattttgcattgaattgtacttggcttagctccttcttgtaggagaattatgtgcatacatgtagcaggactgattcctttgatgtcagcaacggaccatgcaatggcagttctgtg

SEQ ID NO: 154618 - DNA, 734 bp, Cannabis sativa
tgcaagggccaagcagtatgctcaagagcccttgaatcctgaagatgaagttgaggaagagcaggtgacccactgaagaggaagaagaaactcccggccctgctcaggcctgttggacatgcgattcgcataagggagtccatttcacctgttcggacatcccctcccgtgcttggaaaagggaaagccgttatgtctgaaataagagcaatgtcaagtgatgatggacttctgagtcttgttcgggcagtcaccttgcatattactttgtcttatttttgagcttcttgatttttatgcctcatatctgtttcttctaactatgttgtttcttgttctgtacatacatgtctcggcagatgcttgatgctctgaagaagagaatgggcggaagctctagtgcctctcctccggccaagaggtctaagggcggtgaggggtcctcttataaggaaaagaggcctgttggagaggtcattgatctttccgaggagctaactgctgcaaacccctccacccccaaagctgccaagtccaaggagtctggaccaccgaaggttgggtctgaactggtcaggagtgcatttgccggtgcttccagaggccaagaagggcaaggaggtgctggcccattacatgaaccgactggtttctgaggtcagtgagcaaatggatggtgctgacaatgactcttctttggaatttctggtgggcagagttttgaaggagttcac

SEQ ID NO: 154619 - DNA, 502 bp, Cannabis sativa
  modified_base (41)..(48): a, c, t, g, unknown or other
tataaatattaatataatttattttagattaatttaaatannnnnnnntattaatatattatttgtaacattattattttttattgtgatttttaatattaaaagtatgttcaatgttaatatttttaaactttatattatttttctcaaatttatcaaactttaaatattatttgtataaaaaaaattaataaattgatacataatttcttttaatttataaaattttaaaaatacacataacaaaaataaaaactaaatatacatgcaatgcacgtaataataatttaataaatctatatataaaagtagaatatatttattatttttttttttttttgaaatgcatgtctttattaacttttacagaacaaattcttctttcttgtggacgctcgagacaccacccgaaaattatatatgatcacataattaggtagaaaaattaattcgagtgtcttcaaaattgttgtagtaacacttgtatatacatatctctttt

SEQ ID NO: 154620 - DNA, 647 bp, Cannabis sativa
gcattctcttcttcattgtcatctatttcttcattatcacttccaccatcatcattggaagagtcactccctttgtcctatatgaaaaatataatttaaatcagtagaaaacagcttaaaaaaactgaaaaacgaccattgagaaactaacataccttagcataagaatcgacaaaaacagtagaaaattgtatctgcattgaagccatctgagcaccaaaagaaacaaactgtgcagaaacaaactctttcaactcaaccaaatcggaagaaatcttctgttgggaagtatgcaacaaatcgatcttcacctccaaaccatcaaatttctcagaaaaagcatcaagcttgacagaaatgtcactctgagcagcaaaaggctcttccggaacatgaacactcttgtaagaattgtagtcagtgtcaaacttgaaactgctcaatttcaaagctttgaactcagcagcagtgggtctcatatttgatagttccagctgatcaaaaaacaacaaaatgaaaatttcaattataaagattattaataatgaaaaaacaacataaaaacaactactcaaaaaccaaaaaacaacaagcagatataccttatctttggaaacatcaaaaatagtagtcttcaaaactttgaa

SEQ ID NO: 154621 - DNA, 661 bp, Cannabis sativa
aaagttccaaactcgatttctaacccaaaatcaccttagtttcagtaagaaaacatcggaattagtctcatgactacccaagaacgaacctataaggttagaaccttcatacatattctaattcacgaaacttctatatgaaactaattgtttttaaacttaaaacgaaattaaaccataccttaagctcttttttttttaaggatttgctatcctgctactattggagcttagatcgctaggtttcaagttaaaaatcaaagaaaattgatataaggagagaaagttttgtcaaagagggaggaacgaggattcgttcgttttttactatgatataacttatataatatatatatatatacgtggtgaaagttataattataataataataataataataataatatataataatattaataaaaaaatttattattagtagttatctttttattttttagccactaagaaacttctacatttagggtatttgaccaactccaagtactctaaaatattccggtatttctaaaatcaatttatctcaataattccatcaatatttctaattaaaatcgttgtaatatttttggcctctaatcgggtctctagggttgtcgaaactgaaaatatttttatttcataaataactcatattat

SEQ ID NO: 154622 - DNA, 564 bp, Cannabis sativa
  modified_base (204)..(215): a, c, t, g, unknown or other
  modified_base (338)..(339): a, c, t, g, unknown or other
ttaataaacattataaaatatatttactacatattattgttttttaaaacatatataataattaatttaagttatataatttttctagtattgtatattattatattataacaaaaataaaaaaaatatattaaatcattaaatatatgcaacaatatttgatatatcgtatcactaaaaattaagggtttttttttttttttnnnnnnnnnnnnacttcaaaacagtttttttttgtatttttacgaaattctacataaaaacccatattataactagcactgcaaccactttagaaacctaaaccgtaaatttgaagaaaaaaaaaagttaaaaanntaatatatagggtaattccccaaaagttaatatactacagtaataaaattatataccataaaaaaaattataataatactaaattaatattactctaaaaatgtgtatgtatatcatgttaacaaaattagatgtactactattaaaatatgtatacatactaaaaaatttatatataataaaataaaaatttaatataatcttaaataaataatatactataga

SEQ ID NO: 154623 - DNA, 521 bp, Cannabis sativa
atattctgttaaagttaacgaagaaaatcaaaaaatatacatgactaaattaataaaaataggtaaactaataaaatataaatgactaaattgcctctcgaaaataaggaagttgctaatattttccctttatttttgtgggttgttaaggcctaactcgtggtttaacttgttctccacggatgaaagttgtgcaccaaaacctgccaggccaaaggctgactgaccatgcacatgtagagtgcatgctggccgaccatatgaggtccaaaagttggccggcctatgctggccaggggcggctggttagtcatgtcacccctcctaagtactcagacctctcattggttgaagtactgagtagatggattggtcttcttattggcgagttgtactctcacgtgacattaatgctggcgacgtggacatgccacatcaggtgggtataaatcgggataacaccttttacatgtttaaatttatcacgacagtagaaaatttgtatgtaattgagatttata

SEQ ID NO: 154624 - DNA, 561 bp, Cannabis sativa
cacccattcagtgggatgaagccggtgaacgcatgtatcttagacctgaagctgtctaaagaacgagtgaggctattgaaaagattcgagctcgtatgcttgcttcacaatgtagacaaaaaagctacggagaaccaaagcgtagagatattgaattccagattgggaattttattttccttcgggtatccccaatgaagggaattcagaagttcgggaagatgggaaagttgagtcctaagtttattggcccatttgagattcttgagagagtaggtcaggtagcttatcggctggctttacctcctgctctatctagggttcataatgtgttccacgtcttgatgcttcaaaaaatgtatctgatacaactcatgtattaagttatgaagatatcgagcttcaaacttacctgtcatatgaagaacaaccagcacaaattctggacaggaaggaaaaagtgttgcataacaagactattctgctagttaaagtgttgtggcaaaacagcaaggttgaagaagcgacttgagagttagagtcgcagatgcgggagcagta

SEQ ID NO: 154625 - DNA, 682 bp, Cannabis sativa
atatactaattattatacaaaatataacttaaaaaattataaaaaaaaatactaatctactagaaaaatgcaaacacatattataaaatgtaaaatattaaaaaaagatagctaatatacaaacacttagactaatgtaaatgtgtatttatttaattttttaatttaatttttatttattcttattatataaaatttatgcttaaatatattaataataaaataatatatatatatgaaaaaaaaaatagattttaaataaaaattaaaaaaaaattatgttattacacaaaattcaaaagttaaaaaaaatcataagaagtttgacgtcggttatttaataataatcgtaactacaggtagggctgagtattggtcagtttggtcggttttttttctatatataaatccaaaattcaattttcggtctggattggtgcaatccaaaaaccgaccgaccaatccagaacctatcttaaaaccgaccgttttgaacctcggtttggtcgatttaaaccactcaaaccgaactttttttaaaaaaaaaaataatccaatttattctataaatatattattctatattttacaactacaaacatacaaattaattgtttaaaacttaattatcttgttcttttatctttaatattaataaaaaaatatattatttttatatatt

SEQ ID NO: 154626 - DNA, 810 bp, Cannabis sativa
atgtctacttggtgcttccaggtaaggctttttcaaggattggttatggaatctaaaatttggttgtggcatgtgtctcatatatttgagtgcaatggctgagctaattgcccacaaatactaacaaaaaaccagaactgatgtaaatcagggccccagatgtcaacagggtccccgtactaacttaggcacatgttgactccaaagatgtctaggtgacatcctaagttttccgttctagtttcttgggtcatttttaactaatcacttagacttttgaaggatgaaactgagaacaattttgcgcgatctaagcctctatatggttgcccccagtgtgcaggtgacactttcctatcgtgggatgtagggctccaaggttctttccttgtgccacatgccaaaaatagcttatgcatcatcaacctattttttgctataatgattaaattatttacataggggtcctaaaatttaattttatcttaggtcctacacaccttagggcaaactttgataatatattattaaaatatttatctttgcataatttaaatcgatagatcccacattttcaatttaaataaaagaggagtgatatcgtcaacctcctaatacaatctcttagtcagcctttgtacccaaacacacagaccattttttttttcatatttgtgttttaatacggtgttcgttataactacaacaccatctctgtaaatttttaaaaaaatttaaatagtttacattagcaaaaatatgcttaaagttttttgagtatgtgtggtaaattagaatatgaggaactct

SEQ ID NO: 154627 - DNA, 586 bp, Cannabis sativa
cggaagcccaaacctcctttcatctttggtttgcacatacgatcccaactcatccaatggatatttttatcctttttggatgaagaactccaccagtatttgcacctagcatgctctatttctctgcttgtttcaattggtaacaaaaagacgctcattgcgtagttaggaagagcttgggcaatagttttgagcaagatctctttgccagcctttgataatagttttccatcccaagattgaatcctcttctgcacattttccttcaaaaaccccagaattgctgactttctcctacctattatgtttggaaggcctagataagtaccattttcatcagcctcatgaattcccatatcaccacagatagcatctctagtttggacatcagtattccctctcaaaaagatagatgacttgtcatgatttatctatattaattgttagttttttttttaattagctatctaatgtaactagtttgtgctgtttaattgttatttttttttttctaagaactagtttttatgttttaatttatctaatataattggtttcagcaatttaattgttagttttttttttt

SEQ ID NO: 154628 - DNA, 574 bp, Cannabis sativa
cgagcaaaaattacaaaaattgcatatttcacatattaatcaaacaatacccctagagtttaataaaatctccgaaaattgagaaattaaaactctcatattcatttctaaatattggggtccaaaataattaaattcataaataataataaaataatagaaattagtgctaattgccttttctaatccaaattactaaggcggtcgttacaattatccccccgttaaaaggatttcgttctcgaaatctaactttaatagctctggatatgctgagtcctcatatcagactccaattcccaggtggcttcctccaccttaccgatcctccagagcacttaagcagaacaatagtcttgttccgaatttgaataggttgttgttcataggataagtctaattgcagttcaagggcttcataactcaatagatgagtcgggtctgacacgtatttccttaacatggaaatatgaaatatgtcatgaaaagccgacgatgttggtggtaaggctagccgatacgctacctgcccgaccttctcaagtatctgaaatggcccaatgaacctagggct

SEQ ID NO: 154629 - DNA, 511 bp, Cannabis sativa
  modified_base (48)..(57): a, c, t, g, unknown or other
gtctgcgttcttaggtagtcgcctttgtggacatcgcatgacgagctnnnnnnnnnnagacatgcgagtctatatcagtttatcaaggctgcagggccatcgggatcaactcgcattatagaaactcggtctctatgtttatgcaagaacatggagaggatactcgcacatagttcgatacatgcgagttactctcttgtcccgcataatacgagttataatcatgcgaacagactttggtcatactcactgtatctcgccgaatctatcttgagcgaggtttaaaacttcgaggagtctctcatggacgtctcaactttcatttggaaatctgagtacacgtgtcctctaaacaggagtctggtctcgagtttttaggtgagagaaatctcactataacacttttctagggcatatcgtacgaaagaatggtattatggttgatccaaacaaggttgagtcagtgaagaattggccgaggccaaaatttgtgacggaaattcgaagtttt

SEQ ID NO: 154630 - DNA, 800 bp, Cannabis sativa
tccacaactaaaacttctctccttcccaaattgtcccttgattctcatcctccaatcaaaaaataaaagcttgcaatggacgttgattactcgagagttcgatcacttatacaaaatatggttgcacaactacaagcagagatcacgttttatgagtcagttgttcatcaaaaagtaacatatgactatgaattcacgagtgaatcttgtatttgtaagaaggcaaaaaattacaatcaaatgagaaaggaatatggcattgtgatcgtttcaaatatcaaatctgaaatcaagctttgggagaaggagctgcactacctaacattgaaagaacaagaaatgaatgttgtcctcactggtccaagtgatgaagagttcaaaaagtggttaaattctgtgatgaaggctgttgagtatccacttcaagaagatggttataatgtgaaagtagatggcgaggacaatgaaagaacagttggtaatcagaaactcaaagaagaagcggagcttaatagtaaagaagacgttgagtttccagctcaacaagatagtgatgatgtgaaattggagggcgacgacaaggaaaaagcagttggtactgaaaaactcaaagaaaaagtagatcttcatagtaaggaagacgacaatgaaagatccacagcaaagacaggtgggaatgcatcaaaaatagctgaaactaagtggccagtcaagaggatcagaattcgtgaaaacaattaagtgttgcttatttggttccaatatgttgtcatatttcgtttattacatatgtatgttgc

SEQ ID NO: 154631 - DNA, 950 bp, Cannabis sativa
  modified_base (894)..(895): a, c, t, g, unknown or other
ttaccatattattattatatttattatttaattaaaataaaaaatataaaaagtaaaatttaaattacatatattgttatgacattttttagatcttagtttaaaaaaattaaaaaaaaaacataaattcaaatatattactatttgttatgttcataaataatataataaattattaagatattttttttttttttgtaaatttttgaaaagctatttaacacaacattaccaatattctatatcaattgataacaccttatatggtaccatgacctctggtaccaatgataataataattcacacttatatataaaaattatctgtgtcacgctataattctttaaaaattgtatatctaaacatttacttctattaaccttgtaaaaaaatctagaaataaagaaataaaccaaattttttttcaagttcataatagaaaaagtacaacaaagtgacataaatattacagtataatctaaacaatcacataaaaattaatacttcttgttcttaagatatatttttgttatgaattacaaactcggtattcaacatagttcctaaaaaaatataaatcttaatatttttttttttaaaaaaaaaagagaaaggaagaagaagtaaaaaacgtgacaacaaaaacaattataaaaacaaagcgaaaaattggtgacaaatttagaattataaataaattaaaaaaaaagagagagagagagagaaaattagggagaaaataaatagaagatatatattttatattaattattatttaagaagctactaaaaactaaaaatatgagagaattaaggagggaataaataaggctaattagaaaaattttagagtgatgtcaccgcctcatatttattaaggtggcgtttggtannacttttttaattaattttttgtttttaaaattagaaaagtgaaaatatttttcaa

SEQ ID NO: 154632 - DNA, 731 bp, Cannabis sativa
  modified_base (671)..(672): a, c, t, g, unknown or other
aaatgattttagatataactccaactaatgttccatcatcttctactcaaatagaggatgatctgtctccctcggttgaaccaaagtaagttgatacaaccaagaaactactattaatgttcctgttcaaaagatcacggctcctcgtcgtagtgggagggtttccacaaaactaactcgttatggcttggatggtgaaatcaatatggtcattggtaacggtattgatgatgatccactaagttaaaaacgggaaatggaaagtccgaaacagaaacaatggtcagccagcatggattcagaaatgattccatgaaaagaaagaatgtttgggaatatgtaaatgaacttgatgatcatcatccaattagatgtaaatgggtcttcaagaagaaaagaggtgcgggtggaaatgtcaaaacttttaaagctagacttgtcgcaaagagttataaccaaatagaaggtgtggactatgaggatacttttagtcccatcgccatgctcaaatccatcagaatacttctctccatagctgccactttcgattataaaatttggcaaatggatttcaatacaactttccttaatggaattcttgacgagataatctatatggagcaactggaaggttacaaacttccaatacaagaagataaagtttacaagcnnaataggtccatttgtggacttaagcaggcttctccctcttggaacaaaaggtttgatga

SEQ ID NO: 154633 - DNA, 567 bp, Cannabis sativa
cttactatgtgtcattatgctaatgcagaaaatgtatgtttcaattgtaagaatccaatctacacaagtaaaaaaagatggtgtaataaagtaattgcaaatattaaatttaaataataataattcagaaaattcacacttacatgaaacagttagatcaaaaaagacttggtctatggctttaagagaagacttggtcgaaactaaaatatgagcctgagatgagttagggcccagtaccatgacttaagtgtgtataaacataattgtcacttctccatggactcttatttaaagctatgtaaaataacaaatgaaagaaattttaatatattaataaaccaataaggtttgctattaatatattaatatatttattcagaatcagcacttcatcgaccgagagtggaattttcagcaacgatgaaataataaattacaataacgaattaaacaacgaagaagaaactgagactttgatctcatcttctagaagcttcttcaccacaactgattattcctcttcaaaattattcaatacacagttgaaaaccatacgcgagacca

SEQ ID NO: 154634 - DNA, 569 bp, Cannabis sativa
atttctgggttggatgtcgagcttttaggaatgaattcgcttgagtttactgtatgatgcgttaaattcctcttctttgcgtttagattgctccttgttattatgtttctgtttgaggaatttatccctatcttacgtaataacgtctttagggcttagagtagatcttgctttttcggatttgcccttttttctcttttctcttctttttttttcttttttccagtgcaatgtcactgcctttgggatttttgcaaccgattcttgccaaggaaagcctcttgggattttcttatttggaaagtgtccggagggggcctctttccagcggttagggggacccccattcccttttttaaaattagggtttggtttggggtctaactgctggattttctggattttttcagaaccaaaatgtctgcttccgcatccagttctaaatcttccaggaaaggagaggttcaactggccaccctggaggaggtcatgtagggccccgtggcccaggagaactacaagtcccgtgctaacagatgggaggcggacaagctccactccacactgac

SEQ ID NO: 154635 - DNA, 779 bp, Cannabis sativa
ttgatgataaattttttattttatctcatattttgctacgttttgaactaattgatatattagtgctgagtcattatatatacgtgctatatgatttgtcagattgagagttatcctctctttaaaggttagtataagtatattctaacatgatcaaacttatcaaataaagagttctaagaagtggaactttgctgtagaataccaagttgatgctcgtaattgcttctgtaatttaacttcttcaaactctcaggtttggtttactgagtcattatatagacttattttgttgtatacttaagtcatgctttcatgtatatatgattttatttggtgaaatttattattatgtatttaagttttatgctttgatgggtatatatatgtatgttctcggtttgtgattgaatctttgtgaatctttttgggtctttttttcttatttatatactcttatagttgtatatgtgagtctcaacatctctctctctctctgttttctttttcttttttgcaggcatgttttaactctgttttggtaggtttggcttacaaaattctctcacacttgtaaaggtcagttttttgaattgtaaaacatatttacagtaattgattctctcgttttattccaattattgctaaatatttcaaattttgactttaaggggttcaaaaaagcattcttgaactcaatcttatcttttgttttgactcatatagtttaaacaaatgaatatattgcactaaaataatcaactctatgttttaagaat

SEQ ID NO: 154636 - DNA, 975 bp, Cannabis sativa
cttgaccatcaattaaaaaaacataaactaatttattaaaaaagtagtgtttctcgtttttaaatttaatagctataggaagttgtcttttttctttgcctaagcccaccagcatttgctggtcataggtacggtttggtcgggtttgtgttttgttattgcgattcaatttttgcttataatgtgattagtgtgtttgtatgacatgattttaaatattttagtcttatctgtgtgacgtgattttgttttgttttgttgttagttcttttttgttcttcgatagccatcaaatcgatgttagcggttcgaaggagttgttagtagtgcagttacgtaccttgcacaataattaagtgctcaagctacgaggttaaatgaacctgttgcaacaatttctactgttgtgtcttctcagctgtaagatgttgcgtaatttttttaatctgattttattttcagtttttttgtcaaaagatataagaattaagtggctgattaattatttgacctatttttttttaattctaattatgatcgtgtctctaattaaaaaaatatcacgattggattgcagattattattttagcacatatctattaataaaattggatgatgtttttttttaaaaaaaatccataaccatcaaatgtatgctcttactactatataaatggtcacataaacatattaaactataatttactcataaatattttatttgttgtcacatgaaattaatttattttatacccttacatatttttattttattttcataaatttatcccacataatttttatttatagaattatttcatatactatttttttaatcttttttttttttcaaatttaagatttgggttggtatactacaaaaaatagctacttatagtgacaactttttagtcacaacataaattttttgtgtctaaatgtgacttttagtcacatcaaaaagttacttgtga

SEQ ID NO: 154637 - DNA, 653 bp, Cannabis sativa
tttattaaaacttgggttgattggatagttttttactgtgttaggccatattgttagtgatcaatagttggtgagtttagcatctatgtgtgtaagtctggttgcagcagaagtgtagatttttctagttagctgaagcctttgacgagcaggcccagtccaactagggtgttgggtgtgcaaccaaagtcccacattggctagaaataagaagaatcatgagtatataaggatggacactatcttcattggtataatgcttttaaagaaagtgcccaagaagaaaacctaaggacttaggcccaaaaagaacattgccctaataaaattcatgttgtaaccacaaaaccttgcatcttagaccatctctaatggttacactaatttagtgtaaaatcttttatttttagtgcaataactttagtgattcactccaaatatattttacttaaaagatctttcattttatattatttatattaataactcaaaatagttaatttatgctataattataatttaataaaataaaatattattaaatcaattaaatattacacttttaacttattgaaggatttaaattttatagttgatttattgtacacaattattttcaaaatgagcaaataaaaattatgcaaaaaaaaaaa

SEQ ID NO: 154638 - DNA, 723 bp, Cannabis sativa
  modified_base (26)..(28): a, c, t, g, unknown or other
  modified_base (623)..(630): a, c, t, g, unknown or other
gtgtttatcgacgacatccttgtgtnnnctcaatcagaagaggagcatgagtgacatctcttgattgttttacaacggcttcgagaacataagttgtacgccaaattcaagaagtgcgaattttagctatctcatgtgtccttctttgggcacatttttagcaaagataggatcaaggtggatcaaggaaagataaaatccgccagggattggccgagactgaaaacgattataacagttagaagtttcttgggtttggctggttattacaatcggttcgtagaaaggttctctaaaatttcaacacccttatccgagcttactaaaaagaatcagcgttttttgtggacggataagtgtgaagcaagtttttaggagctgaaacatagattaatcacagctctagtgttagccctaccttctgataaagagaagttcattatttattgtgatgcatctagacagggtatggggtgtgtattgttgcaggctgatcgggttattgcctatgcctctcgttagttgaaagaatatgagcagcgatacccaactcgtgacctagaacttgttgcagtactttttgcattgaagatttggcggcattatctctacggagagagatnnnnnnnnatactaaccataagagcctcaaatatttctttactcaaaatgacttgaatataagacagaggcgttggttagagttggttaaggattagatcg

SEQ ID NO: 154639 - DNA, 610 bp, Cannabis sativa
agcccaccataacatttaatgatgaagatgttgtcaagatcagatttctggagaatgacccgttggtcgtggaagtccaatgccaacaagatggtggcccgaaccatgatagacaatggagcctcctccaacatcttattcaagacaacgtatgaaaagatggggctccagctaaaagatttaaccccctgtctccagcccgtgtatggtttctctggccaaggagtcgcacctatatggcaaatttgcctacccctcactattgggcaagctccgagaagcataactataatggcacaatttttggtattggacattctattagcctttaacgtcatgctaggccgaccaactttgtatgacttaaaggctgttacgtcgatatttcattcatgccttaagtttccaacaaagaatggggtaggatgtctaagaggaagccagcaagttgctcgggaatgttataaccttgccataagcaaggctaaaaaggaagtgtcctcttgtaagagttccgacaaggggaaaacatttctaaatagggaacttcccaaggcagggatgaagatgtgtatcctcgacttggggacctaagcaacaatgttggacc

SEQ ID NO: 154640 - DNA, 572 bp, Cannabis sativa
  modified_base (324)..(327): a, c, t, g, unknown or other
  modified_base (375)..(375): a, c, t, g, unknown or other
tactactaagacgtgaatataaagtttggtttcgggtaaaaattggttgaaatggccccctaattcaaaaatttaaagtactcttcttttcagtagaaattttaacaagatttacccttactcttacattagttagttttcttttaaattctcacactacacatctccaaaaatcatgaaatttcatggggaccaggccaagaccgatgtgcatcacttttctcttggacacattaagagaaaaattagttttcatgcactaacgatcattttaatcgaaatagtgaaatctcacaatcctgatagtggtacccctttgtgaannnngcccgaaccaatctcggaatatttcttgccactagtcacaatgaattngtactactaagacatgattatgaagtttggttttgactaaaaattggtggaaatggccccctaattcaaaaatttataatattcttcatttcaggggaaattttaacaagattctcaccctacacactcgttagttttctgtcaaaatctcaccctacacatctccaaaaatcgtgaaatttgacggggaccaagcc

SEQ ID NO: 154641 - DNA, 562 bp, Cannabis sativa
atccccatccaccttgaaccttcatctgtcctcaatttttcgtattttgtttagctcttgcctataatttaacgtatatttaatgttagcaaatttagaaaaaaaatatgaagtcatagaaattaaatattacaactttcaattaatacctgttattttgtgtctttccagcatgcgataacctctgcccacacctccagtgtcaacatatctggacgttatctcttggttgcatcttcctccccatatttttgaatattctccttccatgcattcttcgtatctgctctccagacacgtaatccttttgacattgatttggtcacgtaatccgcgaacataggattattagttggcaactcaaacttggtctgaaaaaaaaaacaataaagtcatatatattgtatttcttgtataatgattttctttgatccattataaaaaaattagaatgttaccgctattttatcccatatagtgtgtgttgacttcgcttttagccaacgacaatgagtcttttgataagtgataaatgatatgtcgtaataagaatacgtaataa

SEQ ID NO: 154642 - DNA, 713 bp, Cannabis sativa
  modified_base (667)..(677): a, c, t, g, unknown or other
tctgacaattaatatttcgaaatcaaattttctctcaccacggttcacggctacacttgattacttttgatttcccatattcacttcaagggggatccgaggcgtttgaggttcttttgaaatgattaccccttttcgtagttttcctataaataccagtgagcatttgtacaaaaactcattttcaccaaccctccttgctaagtaagttcagagcgaaaagagaggtgtttggcttcaagtttgctgaagtgccttcatcaaaactgctcgtttgtctttgcataagctgaatccagacatctgatccttgagtaagttctcgattccctttatgcttactttgcacagtttcttgaatgcacctttgactttgttgtagaagatatgtaggaaaccctatgtttagaaactcagcgattttcctttgtcatggttcatgcgatttcaccgtccgtaatgctatctatttgaactgtccaatgactgtctttcatcttgcttattctaggcttcatgaaattttttgccctaactcgagaaaatttcaaacttcctgagttttgacttttcgctgaatattcttattctttaatctgttgagtactcctggtaggcatattttcttgttttaatgtttgatatcccgaccaaacactcatcttgnnnnnnnnnnnttgtagatgaacccaggtgagttttggggaagcgaa

SEQ ID NO: 154643 - DNA, 586 bp, Cannabis sativa
  modified_base (228)..(235): a, c, t, g, unknown or other
  modified_base (431)..(434): a, c, t, g, unknown or other
  modified_base (546)..(550): a, c, t, g, unknown or other
tctacacgcaactttagaagtcccgtacagacttggggggcaaatgttatcccaatttttgtactctgatgtggcatcgcctgatggtgacacgtggaatcaacattgattatctgctccgagagtacagtctgaactggatgtctcatatgcatgcctgaagcaaagcgatcaataatccgtggagagcaatgaacacttagtgaattcagctttcgcatcgtgagnnnnnnnngaaatccctataacttgaggatcacattgcagagatatggcaagctgtccaaatcccacgatcagtgcattctgcatttatcatgcaatctttctgcttatatccattgtaacgagaagggaaacacttcctctccaagttcgtagccctataaatagtgatgcatgttcactgggcaaaaggtcgagagattttnnnngagagatattatctaagaattcaaattcagagatattgttgtaagagctataagaagaagaacctttctccttgttttaaagtcaaaacaaataacgaggattaggctattnnnnnactgctcggggctgaacctctatataattcttgtgt

SEQ ID NO: 154644 - DNA, 549 bp, Cannabis sativa
agttggagcagatttggtcaattgaggctctggctcgagttcagtgtcctcactatctgaggaaactcccatgccctctggaatttccttctcagaatggagagaaacagatttgtcagaggagacttccgttggatcttcttcttctgaactcgaagaaaccgaaggtggattggttttaagcttcttcttggctggaggcactggcttatcacgacttcgagatgatcgaagttccttctcgacagaagcttgatgggcacgagttcgagtagaaggaccagatggggtagatgcaggaactgatgcagcaggaggaggaactgcagcaggtggtggagattccttcgaagatgaagacgatgaagaccaagtcctgtaaggacgcacagatttttgagccacttgcttaggaagacgttttcgcttctcgggctgagattcacactggggaagtgatgaatctccttattttgcagcagtaggaggcacggttgaaggagcaggaggagcattggagggggttgcatcggtttccaccatcttttt

SEQ ID NO: 154645 - DNA, 747 bp, Cannabis sativa
accgtatcttttactcgatcataatcaagtcacaacgataataatcggttcatatcattaccctcgattataatcgagtctcaacgattataatcgtttcctatcatttccttcgatcataatcgagtcacaacgataataatcgtttcttattatttccctcgatcataatcgagtcacaaccaatacataacgttaacctcgattaagattaaatcacaacaacatataccgaaattccaatctcaatcgatactgtaaccatcataatattaaccttatacagtacttaatgcttttcttacctcagtccagaagtttagcgtgcatcccgcctaaatggaatcaaaggttgacaatcccggatcatatgtcacgacaacaacactcaataaatactttaatcaaaatctctggaataaacttaattcctaaaaccggacaatccttatcttcaatagttctaggttaggatttacaacttctaaacattctaaattaaacactgaaaaccaccccgagccctaaaaccagcctggagaaaaaaattgaaaactctcccctgatggcaatcggtcgactggtactgatacaccagaaccaacggtcgcccggttctcgcagggcagcagcctagagttttctccccaaactcgagccaaatcagaaccacacctgcccaacacctccagatcaatccaatatcaccaacacaacataattcaaccatcaattcacaacaattta

SEQ ID NO: 154646 - DNA, 575 bp, Cannabis sativa
  modified_base (506)..(509): a, c, t, g, unknown or other
tgaaatgggttttatttaaggcacaaaacccaacaaaaatgttagaagaactaattgacaagttggctagtgaggatacttacaaagatgttagttcttgttgtactcgccagacttgtatgcacctttattgttttcttgtaacattgtgcgagccttcttagtttggtccgaacatgcttgttgcaggatctttactgtcaaggaatattcttcaaggagtatttctcttgcgaagtatttcttttctcgatctgtttattgacgggccttgtaaatctttataggcagtcatgctgctctaagttagctaggtctcttcttctttcccttttgtcaagggatcctgctagcaagatgttgcataacccttgatcactgtagaccagaagtataagagcagactagtggtggatcggactggccagggaaaaactaggtggccagccacattagagcatcgcttttccatttggaggaggctattgttggattttgtgccctannnnaaactcatttcaatatagtcagatttactaattaataaagatcagaaatcacattttatgttgcat

SEQ ID NO: 154647 - DNA, 631 bp, Cannabis sativa
tcggctgggctgtagaagaaggagaagaaaaagctttgctagggtttgttcttgctgctcaaagaaaatagaagaaggagaagagaagaaggaggccggctgctgtgtttgaagagaagagagaagtgttttgtgtgctagggttttctagaaaaaagaaaagaaagcatttatatgaaaataaatgcaatagggtttgaaaggataaaatcagattcaaaaatggcatattcggtttcttgggaaagcatattcctttgagatccgcatcactgtaaaaagacgaaactgcccttgttttttgaacgttggtgttggtgtaggggctgttgggaacgccagctatctcctacactattaatcagaatagtgaaatttgttaataaagtaaaggctaattagaatttttacccttggattttgacatgtaacaaatcatgcccttgaattattgaaattgttggatttaatgattttttttccgattttagtaaaaatgtgtaatatggatgaaagttcagagggcataatttagtacatgtcaaagtttaagggacatgatttagtagatatcaaagtttttgaaacatgatttactacataaacaatcactgaaatagtaaaattgaat

SEQ ID NO: 154648 - DNA, 776 bp, Cannabis sativa
gtatatacttaattaaaagattaagttaaaattattgagatcattgtcatgatcaaaatagaagatataaacttgtgataatcaagcttataagagagagtgaaatagagaagaaaaaaaaaattagtacaaaaagtgaaatatatgatggaaataaaatataaagacgaaatataatgaaattaaattgaatctaaatactatgcaatataaagatagttttagtaagatttttttaaagcaaggaaaaagttaccttataactttaaaacaaaataacaattgaagcacatgtcattgaatagccatttgtcgatctgaaaaatatagaacataaaaaattagaaaaaaacaacaaaaaatcttcaaaaatgaataattgttagtgccaagtaaatatataaaaatagaacatcaaaaattagaagaaaaagaaatataataaaaactttaaaactatgaatggacacaaaacttaggtatgtcacgctatatatataagagttatgtaaagaatacaaataatttttttaatggaagaataaaaataattttaatggttaataattgtaagagttacacaaagaatacaaatagttttttggttataaatttttgctaaaatttattcattataatgaataagtgtgtacatattttcattgaaattaatacatattgtgttttacttaaaaaagttaatattttctattattattactaacaattgtaaaagatcaattaaatgagagaaaatgagaatagagagattagga

SEQ ID NO: 154649 - DNA, 906 bp, Cannabis sativa
  modified_base (626)..(641): a, c, t, g, unknown or other
tctctaggcgcttgttcggttttggtaacaaactttccctttttcccattaccttgtccattgttgttgttagactgtttaccgctcgagcttgaattgcttgggtactaagggagctagacggatgttccaccagagggagctttcggatggccagacttaagctcaacttctgctcgctgaatggcctcttcaagcttgatgaagcgatctgcacgatcaaggaagtcactcatggaatatactggtctgtcccttttgatatccttccaagttctccgagaacttcaatgccctctagtatcacggtcaatttcccttcttcagtcaaccatacaaccttcgttgcctccatcatgaatctgttgatataagcttggagaggttctcctggcctttgcttcacttcgaccaggtcttccaaatgcaacgggagttggcaagaagaagagaattgtgcatgaaattctaaggagaaagcctttcaagagttgaatcttccaggtgtcaacttgaaatactattgttgggcgggttctgagatggtgacaagaaaaactctgtaacatacatctcctcatactccttgtaggtccattttcatttcaaaatacttaacatgtgannnnnnnnnnnnnnnnccagtatacatcttccaggttggcatcatgaacttgtgaggcaactctaggacattgatctctggggagaaaggggttccacgtgctcggtccaactcgaggtcattgttcgtctgacccgccagaccttggaacatattttttagttcatccaactgtgcctgcacagatggatttacttcttcggtctcttggccgaccagagtcacgtcagaatctctttgagcgggattttgaacacgagccctaggcgtagtggctggtg

SEQ ID NO: 154650 - DNA, 569 bp, Cannabis sativa
  modified_base (163)..(165): a, c, t, g, unknown or other
caataaccgagccacaaaccttgaaagggggatgtgcgcttggtcgggtgctcatgcccagcaaggggcattgttgccgctgcacccatacttcaagaatgtggcggacttcttccgcctttgcctgactcagttcacccccaagggcattaagtatttgtcnnncctcttcgtcctttatgcctcctagaaatggtatatgccttctcctcacgaggttagctggttctttgatttgaagtccacccctaagcaaggaaggtcggggtacttctatttctctcaaccagacttcaagtggttgacaagcaccgaggataaggccatcaacaaaattgggcgttttgttgatgagtacttcatgttggatggcgcgggcatcacccatactcggttccagcaaattccaacatatcactaccctcccctaactcttactcttagggatagagctcaatagcttgctcagctccaagggaagaccggaatatcatccagttgacctccgaggataactttttgtagtacgggctctatccgaaggatttcatgttggaaattattttacc

SEQ ID NO: 154651 - DNA, 579 bp, Cannabis sativa
attcattagctatatcagataatcatccataaaacccagacaaggtttcagattcagacattttaagatcatcaaatttggtctgaagcataataaactagaacgcttaacatcagatgttccttaaaactgagtttgaagggtctgccaagcttcttagtagattcacaagaagatataagcttaatatagccttcacctactccattaaatatagcatgtaaagctttgctattataagcagacaatttatcatcttcaatagaccattcaagttcagattataatttagaattaccttcagaatctactacaataggaggagaccatcctgaaagaaccatcctccatgctttttcatcttgagacttgataaaggctctcattctaatcattcaataaggatagttagaatcattgaggagtggttagcgaacaataaaacttccttctgcaaaggtaaacatattgtacaaatacaagaaaacgttaaaaggatcacactaagagtttagtgtcccgctctgataataattgaaaaactgagtttttacaaatgccaataattataacagaaaa

SEQ ID NO: 154652 - DNA, 519 bp, Cannabis sativa
aaatgatgatgtaagcgtgtagagatttttgtgtaataaattgtgtaaattgaatttttgatgtaaaaatttcttatttaaatttaattacttaatttatttatctttaattttatattttattcatatataattttatattttaaaaaagggcgtttttcaatattacacaaagcaattttatttataaaagtaccttttaaaaaattatttatacaaatactgaattgtcactttagcctaaacaccaaaatttaaaataattatcgaaaatagaaaaatcacatttaagaaattttcgcttttcgaaagttttaaaaaaaataatcatttaattgcttttgatgtgaataaaatatcaattgattactttaagaattttatcttaagctaattaggatttttgccccctaaattttgacatgtattggtacatgccccctgaacttttaaagtcgttaaaaatgccccctgaactatagagattgttggatttaaggacttttttctaattttagt

SEQ ID NO: 154653 - DNA, 824 bp, Cannabis sativa
  modified_base (231)..(233): a, c, t, g, unknown or other
tcgtcagaattagcattgtcgccggaaaaatcacaatgccaattccaacgactattctggagtttgatgtcggtgccggaaaagtcaccggagtagttggtggtgtcggaaaaatcactggagttattgccgatgtcaaaaaagttgtcagaattggcatgtcgccaacaaaatcactagaaaaatcactaagaaagtggtttcttcatcaagaaaccggtttcttcaccnnnaaagtggtttcttcatcaaggaattagtttcgttacacaataataataaagattatgaaaacaaaacaaaaatgatatgcattgaaaaaaactgaaatcagtttcatcaatcaaccaaatagagaaaaaaaatacaaaaaaatactcataaatataaacaaaacaacgcacaatgtacaacaataatctaaaacaaaatataagtgtgaaaattgtagtttcaaacctagaaacaaaataataaaaaaaaacttaaaataaaaaatatacaataacatcataaaatagagcaaccttattatagaatccttaaaacttgtaaaactagttttgaacttatgaaccctgtgaaatcagattcgacactatgaaaaatcatagcgaaatataaatgctaaacaataaagttaactgaaacaagttatcaaaatttgcatagtcgctgaagttgctgtcgacaccgggaaagtcactagagttgctactgacactaaaaaagtcatcggaattgccattatcgctggaaaaatcacaaaaaaaattaccaagaaactagtttcttcatcaagaaattagtttcttgatgaagaa

SEQ ID NO: 154654 - DNA, 706 bp, Cannabis sativa
atgcatgtgttgtctttttcaggtgtgttctgacaagttggcacggtatagtcacaaccaggtattttgggctgaacggggttcgggccccgaaatgtaatttggattgttatatatggcattttaattattgatgtataatctgaaattaattgggtttgaattatgcatgaaatgtcattttttgcccttgtatgcttaagtgaaggttatatggccctaggggcaaaatagtcatttaacccttattttatatttgataaaagaatgaaattatgagaaaaagaagtggattttctggctgcttattccccttaccctctcactctctcaaaccctcttgaatttcaaatttgactttggtgaaagctagcttgatttaaagcttgattgttgggacattgtgtgaaagcttggagcttgtttgtgcaaggaattgaggtagtcttctactgatttttatttgagttctttctgatttctagttgttgtaaaagcatgaaaaagtgagttgttcttgagattttcatgttaagaaaattgatgtttaatcttgatggatttgagtatgaattgcttaatattgttgtggtcttcattgtttggctctagatggaatgattagggtgttttcttattagaattcaggtctttatttgatatttgttgctggaaataaatgggggtttcatgagttgaagctcaa

SEQ ID NO: 154655 - DNA, 662 bp, Cannabis sativa
aggcttactaaaccgtgagtcaagcttatcactgatgatgattgtaaatgtcgtgacgatctttggaagacaacctggcagctctaatacaaaattgtaatatcctactaacttagtcgtgttagcgtggttttatattaattgtgtagaatgttgctaatcaacgagtttattgaaaattgtgaataattaaaactttgcttaaatacctataactactagataaatggtatatttatatgaacaggatccctagtataaaatatttacaacagttacaaagtatgtaatacaaaagttgttgcctagtgactagacaaaatacaaccagttgtcccaaagatcgtatgctccaagtctaatcgccccgactgtacaatcttcatccgctcgtcctcactgttgctcaatcttagccttgtccttacctacactttcaaacaatatttgtgagtcgacagactcagtaagaaaagtataattataacataaatataaactagattataattaggtgcccatacatccaatcataaccctaaccccacgtctcatgcaatattgagtctagaatattcgtacgacagtactattgaccataatatcagcatatactcgatactcttgtcgtaatgatgtgatagcatcaatcagtactcaag

SEQ ID NO: 154656 - DNA, 658 bp, Cannabis sativa
atcagatatgtatatatatgttgaatcaattagtttttttttttttttttgcctgttcatgaaaagatttttttttttacttaaaaaaaaaataaaacaaaagtaaatccatctaacatacactaggcataattatattagtttattttttgtcttcattgtttctttatatatatataacaaatatgaaataaaataatttaaagaatgatacaatatgaaaaagaaaaactactaaaattttttgaaaaaaaaaagaattagtattttttacttttgataacataaaatattacatatttattataaacagaaattaaaagaaagatacatagtatacatattatttagtaaaaaaattgagaaattaataaaatagttaaaaaaaataaactagtaaattagataacacattttaattattaatgaaaagtaaaaagggtatgattgtaactatacttaaacatactttagaaagttacacatgtcactcaattaggaagagaatgtaaaagagagtgcaaaaaagagtttccctaacactgttctattatttaatatatacaatatatcttaatttttaactacaataactttttagcttcaattttttattaaaaaaataatgaatagcattgatgctactgttggaaattat

SEQ ID NO: 154657 - DNA, 664 bp, Cannabis sativa
aacaatctcaatagtttaaggggatttttaactactaaaaagattcatgggacatgatttggtacatgtcaaaattcttgggccaaaaatcataattaatcattttaaaataataaaatttgaataaataaatatttaatatttaagaatattaaatgattaattatgaacttggaggaaataaaagaataaataagcaaaatatacgagaattaaattatgtatatttgtccaatgataatatggtagtctccagaatatgaaactacatcatctggagagtctcgtcacagtacttagcatgaatagtcgaataataaataacatctataagggtggtagattatgctgcaagagggaaattgttggaatttatgtactaaaatttaatgaataatatacttcaataaaacaccctccccatcaaacccaccacttcgagctattctcttcgcatctttagcggaggaaaatacttggaacaaaaccagttggactcaaaatctttttagaacatctccaatattttattttatctctcttccacattatgtttgacactcttacttctagaaatactctaatgtataagactctttaaaaatactataattatgatctcagtcattattatttaatatatatcttaatttttagctacaat

SEQ ID NO: 154658 - DNA, 875 bp, Cannabis sativa
taccaaaaccggtggatgggcatttacaattcattattggaggcccgcacatagctggagattcaggcaaagcccgggaaaggttgcccgaaccttacaacacaagaaaaaagaagtggttctggtcattgaagaaagaaagccaaaggtgccacgggtaggggaaccaaccataacgttcaatgaggaagatgttgtcaagattaatttcccgcacaacgatccgttggtcgtggaagtacagatagccaacaaaatggtggcccgaaccatgatagataatggagcctctgcaaatatcttgttcaaaacaccatatgaaaaaatggggctccaactcaaagatttaaccccctgtcttcagcccgtatatggtttctccagccagagtgttgcacctctagggaaaattcgcctacccctcattgttgggcaagctccgaagaccataactgtaatggcacaatttttgatattggatgttccatcaacctttaatgtcatgttaggccgaccagccttatatgacctaaaggctgttacgtcgatatttcattcatgctttaagtttccaacgaagaatggggtcaggtgcctgagaggaaatcaacaagttgcacgggaatgttacaaccttgccttaaccaaggctaaaaaggaagtatcctctagtcagagtttggacaaaggaaaagacattgccaaatagggaactgcccaaggcggggatgaagatgtggatccctgacttggggaaccaaatacaaatgttgggccagtagaagaactagaagaaatcgaaatcgagccgaatgttctgaccaggaaactcaaaattggaaaaagtttgctgctcgaagtaaaatcagcattga

SEQ ID NO: 154659 - DNA, 512 bp, Cannabis sativa
tcaatttttcactcaaagaaattatgtcactaacaaataccttttttggttattgttttatttatgcaatatttttgttgataatggtgcctcaacagagcagccaaactaaatagctctcaaaatggtgtttccaaaggaggtggagagagcttcccatggcagcaatacaaaaatgacagcttggatttatgcaatttggtcaatgtgttcaagtaaattatgctggtatttcttttccctttctcttgcaatttcaatatgctaatatatctatgaacttggaaccaatgtatgatctacatttttactttaatgtgaagaattttgtacacgtgatcagatggtaaaatctaacatccactatataactagatcggatctggataggcctaaaagcattggatatggtccaatgaacgctccttaatgtcttaccacacgttttgtaattatcgaaagttatcatagactatcaaatttaaataagatcgacggtaatcaagatcatt

SEQ ID NO: 154660 - DNA, 927 bp, Cannabis sativa
  modified_base (887)..(893): a, c, t, g, unknown or other
accttggcgctctgataccaaattgtaacgccttaactaattaggcacgctaccgaaaatacttaagaaaacctaatcccttaaacaagattactaacaaaattagcgcggaaattaaactttattaataaacggaatgaaaataacttgtaataatttaaactttataatttaaaagttacaaaagttaggatcccaaaaatatttacaaaatactattacaagtccttttcctttggccgacctaagcggcaaaacagagtctcaaaaacacatcactggtagaccccaacccgcttggtctagtgtagcccggacatgtacattcttcgtccagctcctacaatcatggctgatcagaaaacagctttaccctttcctacacagtagagcacccgtgagccaaacccagcaagacagtataaaataatgataaacatatatatatatatcacactatataaccagtaatgccattcacatatgcttgtgtgacatagacctgcatgttacgctaacacgcctatttgtgtctacgtagcgtagacctacgtgttgcgctctcacgtctaattacaataaggccttagaacggttcctcttggttctaattaccgagtccaacctggttatgtcttgaatgcataaccctaaatcttacatattcatatactcatatataaatatcatggcatagctttcatacaacatatatcactagggtaataccctaggcaattaaaccgctcatgttagggtaataaccctaatcctggttactgattactcacataagcaccactgtgcataaatctacatgctaaatactgtcttacttgatgtctcgcaataacagagattccgaatccccgggtgctcctgaccannnnnnngtaatcctagtcacaatactgggattttacacaa

SEQ ID NO: 154661 - DNA, 597 bp, Cannabis sativa
aatggattgataatgaattcaatctctgtgtaatcaaaggacacttgctttgtatataaaggagtgatccaacatgtaatggacaagagagaaaatccttgcaacagtggactaagcagaccatgatctgactgaaccactatattcccttgtgttcttaatatttccagtttacttccagtatttttgtgttcttagttcgaatactcgccactctaggttgagtactcgcatattttctgctcatattattattatataatttattttagtattgtctaaattccttcaacaatatttggcaccatttatgggaacgaaatgctttgttgactttgaaggaaaatcactatggatggaaatcagacgacaagagataacaacaatggatcaataaatattataacaatgattgttccactcctaagtaatggaacggcccctgtcgacatcatcaacggaggagtgggacgaacaaacattactcctcttaatctattccctgaaaccgccgctcacgctggagaaacatctacactggctgccatagtggggcagttcctgcctattacacctaccgtgggatttgaagggatt

SEQ ID NO: 154662 - DNA, 1051 bp, Cannabis sativa
  modified_base (910)..(919): a, c, t, g, unknown or other
atatcctggagttgccccacaagtttaagatgccaacctggaagatgtatactggtaaggaagatctattatcataccttaagtatttcgagatacaaatggatctgcaaggagtacgaggagatgtatgctgcagaagttttcctgccaccctctcagaagccgcccagcaatggtatttcaagttggcgcccggaaagttcaactcatgaaaggctttctcctcggagttccatgcaaaattttcctcctctcgccaacttccgttgcacctacgagatctggtcgaagtaaatcagcgaccaggtgagcccctccgagcctacatcagcagattcacgacggaggcgaccaagatttcacgggtaaccgaggacggaaagttatccacgatattagggggcattgaagtcctcggtgaactttggaaggacataagaaagaacggtccagtagactcgatgagtgattttcttgaccgtgatgaaggctttatcaaacttgaagaggctattcagcgagcggaaggtgagcaaaaacctagcaagtaaaaagcaccttccactgggacatccgtccagctttcccattacccaagcaattcaagctcaaatggtaaatgttccagcaacaataataggcaagggaattggaaaaagggaaagttcaccaacaaaaccgagcaagctcctcgggagaatcctgtaaagtatactgcatttgccatactgacggaggacatagagtgtttacatggccactcagtcactagccccgtacaagaaacatgcacccatgaaaaaagatgttagcaagagagacatgaccaaattttgtcaatttcatggagattacggccacgacaccaatgaatgcaacaatctgaagcgggagattgaatttctgatannnnnnnnnnacccgcacgtacagaagtatgtcaaggccgatcagcactagaggggtgataacaaccaagacttgttacctccaccagtagatgggcatctacaagtcattattggaggtccgcacatagctggagattcag

SEQ ID NO: 154663 - DNA, 544 bp, Cannabis sativa
  modified_base (177)..(179): a, c, t, g, unknown or other
ttaaatatttaaaattctttctttcaaaaattaagttcacttaaacaaatcagatttaatttttttcatatttaccaatcatattcatattctttacatactaaattgctataaaatacaacgtatacaacgtatcttaaaatacaacgtattaattgttgttgttgtttttttttnnntttaaaaaaaattacaatttaaatttaagctcatgacacatatctcttttatcttatatataatatgaacataatttttctttttgtaatattgaaatttaaatttaaactcattgcacatatttaaaaaaatattattatatttttcttttataaataacactttaattaatttttttaattaaaaataatgtttattgaataatatcaagaaaaaaataataattatccaaaaaaatacaaatataacaaataagggcattgcagataatatatatatatatatatatatgggtgcactcttaatagctattacccatgaataggtaaaaatagaaaattttgagtttttatgcttaattttt

SEQ ID NO: 154664 - DNA, 917 bp, Cannabis sativa
  modified_base (869)..(878): a, c, t, g, unknown or other
gcaactcgcagaccaaggggaaggagacaacccagagatatacccagaactctcaagggatgcaacctgaggaaaccgaggaaaatctggggatacaacatgggacatgtggaacatcggaaggaaatcgccaacactctcttcaggttcatcagaaaggaactcacacaaacccttatagggagaacaaggtgaatcaaaccttaagaggaagagcgaggtccgatggcagtcacaacagaggtgacctgtgagagtaactgaacttgaagaagcctaatcttcgtcaacgactcggtccaaaacataaggattcactccatttgcgaatggacgagttggagaataagttcagaaagcatcaagtcaagaaacccaaaaggaaactggggtatgattccgttggagaatttgaatcggaagcctcaggatcaaagagaaaagacgattccaaaaggctacccatggataagaaacaacaactatatccctctttatgctgaatataccgagcttaatgaaactcgagaaaatatctacctcgcacatgtacaggaaatcgtttttagcgagccgaaacctatgaaacatgcgaggcatataagggacccaaactaaatggtgtgaatatcataaggatattggtcataccgcggaagaatgttgtcagctgaaagatgagatagaaggtctcatagcgcgaggacactttcaacgatatgtaaaggggcaggacgatgtccatgatcagctcgatctacccaataactcgagcgaccagggatcataaccctgctctataggaggaagggacacctcagttattttgagagggagcgagtcacaaaattcttgatctacttattggnnnnnnnnnnatatagacccatggtcctcgcactagttgagataatatt

SEQ ID NO: 154665 - DNA, 590 bp, Cannabis sativa
attatattgaaatgagttttatttagggcataaaacccaccattgtctccattcttcccaaacacaagttaaattcagtcatttctttagaagcagaagtggaagcagaagcagcagcaggttcaacagtaacaccaagggaagcaaggttgtaagtcgactttcaagctttggtcttcgactttctggtagatttcatcggagcagatgacgaaccaggaacttcggtcactgataaaggcggcgcaggtgggctgattggagatgcagaggtcgagccacgagaggccttcttggacggttgggcattcttagttttggccatttctctttgaaaccctagaacacaaacgctcttacactttaaaaaatattagacctttgagagaaaaaaaaattgaaagagaagagagagtggtgatcgtgggtgagtgcgtggttgagcataaataacaattcaattttaattacccaataagtaaaaataatgaaaagggaaagtaacttacttaccttaatcaccacgtggggagagaaagagggaaaccaaaaatgttttttttttaaaaaaaaaatggtcaaagtttccg

SEQ ID NO: 154666 - DNA, 1134 bp, Cannabis sativa
  modified_base (403)..(409): a, c, t, g, unknown or other
ctctcatctcatccaactattgacttcaaccaaatcaaacatagttttcattctctgacaactactagtagatgagagacaccttctttagaattttgaaatctccttcatcgttcttcaaccaatttgcccatagtgatagagtgccatgtccatacatagcaagtcaagtactcaatcatagtgcagaagacggtggtaaccaacctgtaggagagaaggagatccaggttcagaacttgataatgctctgggacataaaggaatcaagggctggtgatctaaatagaaggagtcatattattcttctgtaatcaatgtaaggtgttctaaactctatgtgtttaatttcatcgtattagagatattcatatttaggatgttaatgaaacatacatggtannnnnnntagattctggtaaaataatctcaacaactggtattaaagccatggtaatgatttactttcatgaaatatggatttacaatgatgaatatattaattgtgttgatttagatgtgttcatgttggtttgtgtgttacttgatgattgaatgtgaattacgaaatgtttccatgaaaataatatattttttgttctgaaaataatttctttggattccttgtgaaaaattatgcaatattggttttaacggaactcgattccaataaaaatgagagagatatggtggtttgaagttttgggtccattgagtgcatcaatgttgagcaccatgcgtgcataacactcggacaaggtgatctgcgcgcacatgtgctaggacagatgttgtctgaaggcttggtcatgcagcatttcagacaagatgcacgctcgtgtgcaccttgcaattgccatatttttccgcacatcccaccctaccacacacctattctgcgcgtgtagatggctgtatgcagccccctcgtgggcagtaggtgcatcgtgcaccaaatttttaaatttttggggattttttcatgattttcgaatttttccaatttcaaaccttaaagatcctaacaaaaatattaattttgacatttaaacctaaatatcaatattttaaattaataatatttaattttttaatagattattattaatttttgatattctgaggtttaaattt

SEQ ID NO: 154667 - DNA, 1611 bp, Cannabis sativa
ggctgtcaagcctttagccacaacaatcaatggtggtggtcgaccccctttttcattaatacccaaaaatcatatatatattttgaatatatagtatatatattatgtatatataatataatgtatatagtatatacactataaattatctattaattatttaatgtaaataattaagattgttttaggatatttatttgaatttagattttaaataaatatcatgattattatttcaattctaaattcaaataataactatcttaattattaactaataaataataaaatagttttattatttttttaataattatactaaaatatcaaagtgtatatggatatttatttattaaaatttatatttaaattaaataaatataattgattttagatttaaaatttaaattcaaacttaaaatcaaattaagacaaaaattatcttaacccaaaataaataataaatgttattattttaagactgctgaaacccatttattaagaaattaggataccaattccctccctttttatcctcatgagcacacacattattcatgttgcccattacgcaccaaggtaagcttaagttagcagccaaggagcgcaaaagattccaagttgtcatacgaagccctctatttggttccccatacagccccgtaaacctccattccgccataccctcaattgaaactcttacatcaatataattaagtcagaatcccaggaccgaaacctcctcttcaaccttctgaagtaacgcaatacctccacttcttccttgcacatccaccaccatcattccttcaaaccctaaggaaacccgaaccctctcaagctgagcccgattactgagagtttcacataggaaaattaaactgggttgcttttggatcacaagatccttaaggaattgaacagcccatggattcccaagcccatgacaattccatgataagatttttataatgggcagtgggcttggataccaacacccaccaagcatgtgttatatgaaccctcctcaacttggttcatatccacctcatcccccacttcattcggcctatctattaagcccaactccattctccttctttttaaatcaaccaccaataaacaatcctcttcattttgagtatttatttcatgatttaaatcagtcaacatatccctctccacgtttatagggatatttctagtaatcattgatctttctaactgtccacatttatctccttgttgacccatgttttcctccataatcatagggatttttatgccgccacctgtagccgattcttcccttgcctttgaacgatgaaccaatccgacagccatggtagcatcattaccagtatcatcttccatagccaccatgaattacttcagccacttagctccaattgtatgattcttacgtactggcttgaccctcatccattccccatatggtttaacaatccttccatctgggacatcaaagcgtcgagggcataatttatccgaatggcccattataaaaagaatgtaggaggtgttcatacttgaagttcacccaaaattggataccctctgtgtttcgcaacttcatacgcctcttaagtg

SEQ ID NO: 154668 - DNA, 527 bp, Cannabis sativa
tctctctctccctctctctcttctatctcatcaccatcttgtttcaaatgcccatttctcttcttaatgatctgaacaacttgctccatcttctcctgtggcacgctctgcaacccaactccaattctgtgcttctctttcatgttcatctccctcttgttaggatcatttgccttcgacttcggctgcttcaaaggcttgactggaggtgccttcataagggaaggtgtacagactgatgattgaacgaaaggaggcgggataggaggaggaggagtcgggtttgacgagctcgctggagcgggaacccgttcgggttcttgtttcttctctgcttagaacaatgactcttcacgtttaggcttctcgggctccatatgataccaagaactcgcctgtaattcatcttcgtaaggtcgttcaggtccaggcccttcttccaattactctttcagaggctgatacaactcctcaaacctagccagaagctgttcagccatggcgtaaatgtcgtgccctttgggatt

SEQ ID NO: 154669 - DNA, 1039 bp, Cannabis sativa
  modified_base (55)..(58): a, c, t, g, unknown or other
  modified_base (207)..(210): a, c, t, g, unknown or other
ttaaaaacaaaattttaaaaacacaaattttacttttgttttttgtttttaaaannnnaaaacaaaagtgttaccaaacacccccatagaaaatagaaaattatgtaatgcacctccttagaagggatgcactgatacatctttaactgttttagtatcgaaaaagtttaacacgctgaaaattgcgtgactattttattttatacnnnngtaaaatagactgtttgaacattactttctctattgtaaattaatctgaattttttaaaattttataggatatcttaaataactataacgtacatgaatatgaaaaatttagactaaaaaatttgtgtgatgccgtacatcccttttaagggagtgcattgtaaaatcattataaaaaagaattatttaattttgttgatacttttaaataattatctaacttatattttaaaaataaattaaattttgatatttaaaactgttttttaaaaaataattaattgattgatttaacgttgttggttttaaccgttaaactaataatttctgttcgatagccacatttaatataaaactagaagaaaattacgtgcaaggcacgtatacatagttttatgttaggtactttctaatttaattgaaaatgatacaataaataatcatataatttaatttattatcatagtctaaatatattttttttaataaaatcattaattcaagaaaaaataatttaaattattgtatggagttatcttttgtgtattttcaatagacattaaaaggtaaaaattaaataatcaatttcaaattcttaaaagaaaagcttagatagattagagcaaaaaggaagagccattagattctcttttaaaagactacctataaagttatcaaattaaataaaattagttaaatttttttaaataaatatgatcacattaatattattaattaagaaaattacccataataaaatatgaatatcattaatattaataattttttttttttttgaataaagataaacttcattaactcaagagca

SEQ ID NO: 154670 - DNA, 560 bp, Cannabis sativa
  modified_base (26)..(31): a, c, t, g, unknown or other
tagccacattttatatagaatatatnnnnnnatatatatatatatatgaatttgagtactttatgtaaaaatcacttaatagtgagttatacacatttaatgggttctatataatttgtacaaaatatggtttttgtaacaattatttatggaaaaaaaaaattaaaagaaattaaaaataggaatttttacataaaatgccatttttttccgtttttaaacatttatacggttccatagtttcatttttcaattttaccattttgtttaaacttttatatggtttctttaaaactttttacatcatatacggttttgattacatcatccaactgcctacacgtttccctccaaactttcaattttcaatcacttctcttgtcaattatcacactctaacccacttcctcgttaatatcaatatttttttaatttcccattcttcatcattttcattttgctcttcttcttcattctgttcatcgagttcctcctttttttttctctgttttgttttctgattgttgtttatgcattttttctttgtttttgagtaatgg

SEQ ID NO: 154671 - DNA, 564 bp, Cannabis sativa
  modified_base (132)..(137): a, c, t, g, unknown or other
gttcgggtatgagtcctagtctcggttcgggtttgggtttaggtcttggtcctggtcctagtactacttcggttctagttccatttgcgatgctgagtttgcgtttgtgtcttgatttcagtctaggtccannnnnngcttcgggtgtgggttcgcgtcttgggtcttggtctaggttgggtgcgagtcccaagttccaatcccaatctaagtctggattcagttctggttctaagtccttggttctaatcttggtcttggttcgagtttgggtccatgtctaggtcaagctttttgtctgggtcaggatctcggtccaaatctaggtccagcatttccatcccattgtgggtcttggtccgagtccatgttcgtactggatccctatctaggtccaagtttgtgtttgggatcgggtccaagatttaggtccaagtctgagatttaggtccaagtccggtctaagttcatgtctggttgcacgaccgtgtccggtaacgagttcaaatctaggtttgtgttcggttctaggtctgggtgcgggtcctggtcatggtcctagtc

SEQ ID NO: 154672 - DNA, 521 bp, Cannabis sativa
  modified_base (386)..(397): a, c, t, g, unknown or other
aactatcacattaaattatgaaacatttatattatttttttattgtcttacatattaaagtagtaatacaattgattataaagttataagattttattttttttttaataaaacatcaattagatattaaattttacatcaaaattttacaattatgcattggagcacaaagctaaaattttgtataaatttaccataaaactactttttatgctaaatatagcacaatttttacatctcccattagaaatggtctaagtctatactacacatacatgtgccaaaaattaaaacaaaggctaattaggatgtttaccccctaaactttaacatgtaccaaatcatgccttctgaacttttctggccgttaaaaattctccctgaannnnnnnnnnnnttagatttaaggacttttatttaatttcattcaattctactattccagtaattgtttatgtattaaaccatgctcaccagactttgatatctatcaaataatgctcctcaaattttgacatata

SEQ ID NO: 154673 - DNA, 511 bp, Cannabis sativa
ttatagcttaatagctactatttaaaatggattaatataattagtaagggaatagtaatgtaaaatattactttatttgttttaagggtagaagtttgaaatgtgattatcttagtatatataattactcttgaaaaaggtaatcttgatgcctggaattaaattattctcttctattatattagtttgaatagcatttttaaattaataaataaatttaaataccattgatattatgatttattataaacaaaatattacgatatatatttagtttgtgagattattggtttttttaattgagctatttttattatgttataagcaataagatataaatatatatatatatatgtgcattgtacgtaaattttacgcaaatggtgtatataaataacatagtgataaaatatatagaaatattcattttaactaataaaaaatacaataaaatttaatatttactaattaataatatatttctttaaaaattagctagtttatttttatg

SEQ ID NO: 154674 - DNA, 863 bp, Cannabis sativa
  modified_base (61)..(67): a, c, t, g, unknown or other
  modified_base (782)..(782): a, c, t, g, unknown or other
ttggcttgtagactcagttaattagttttaattaactaattagaattctaaattagactannnnnnntttatgaattttcactaaggaaatggcttaattgagaagaaatgagattttttaatttatttgttaattaagagacttgtaaggtctaactaataaataagttatatcgaaattttatttgataataaattataattattgaataaatagatttggcatttaaaggtttaaagttaaaaatatagcttttgtgaaagaaaagataagttgttaaaaataaaatggcaaaattgtaactagtggggtccatattgcatggccgaccacttaatgtatttttagccattttttttaatctttttttagattccatataatttaaacctaaccctagatgaatactatataaggaataagatgggtctcatgctcatgtaactctaataacctaattttcactctttatcaaacaactgaaatttgagggcctccttttatagaattcgaaattcatctccctttctctctattcatcaattttgaaatccctatagtgatacaataacttgcccactcatatcaagtcagtactcaatcatagtgtggaagattgtgaagaattccaacacttgaaggagatccaagttcgaatcttgttattactctacgacagaaagaaacaagagttagagatctgaacgaaaagatgttggaatatattttatcaggatctagatttactaacaagtacgtttttaacatcctaaacatgaanttctaaaacgatataaaataaacagataaaaggtatcagaaaccttacattggttgcaccggaattaaatgactccttccg

SEQ ID NO: 154675 - DNA, 504 bp, Cannabis sativa
  modified_base (57)..(58): a, c, t, g, unknown or other
aggggtcggccaagagagaaacacaaccataatttccttttcatttatccaaaaatnnaatcttttatcatatgtaatttaaatgtcaaaagaccaaatggccccctagggccaaataaagcctaagcataaaccaagggcaaaaatgtcctctcacacccattaaaactcaaataattttttcagattctacatcaataaatacaatgccaacaattcaattccaattacattacgggcccaaatccagttcggcccgaaatacccgattgtgactataccgcgccaacctctcagaacacacctaaaaaatacaacacaagcatactatataataatatagtccctaaagcacataattaaattaatttcgggtcataattactaaaatgcccttggcttcaccaacggcgtcttaacatagtataaatcaaataaattctcatatattgaactatataataatataattcctcacttattcataattatctaattagggtt

SEQ ID NO: 154676 - DNA, 644 bp, Cannabis sativa
tattagggtaatattattttagataatgtatttcgtaaaagttatagattggacttctattatgttaaatgacaaaatagatcctgtattttttaaaatggtattaaataagacccttaatataaccaacttgaagacaatttctaatacgaacaactgcaaaaaatttaactagttttgtcataatatctctaggtcggattattattaagttttattttgacaaaaattattttagggtccaatttatataccattttagaacatatagaatctattttgtcatttaataaaacagaaagctcaatttgtaacttttataaaacataaaatgatatttatattattatgtgaataaataaatgttttgaatttaaagcaaaaataataaattaatgagatcatgaatctgataattaatcaaatgaaaattattatatatatataaactacaaatatgaacatttataattgcatttcaatgctatatgagaatatatatatatatttatatatatatataacatagaataaattttgagagaatatattgtaagaatattatttatttaaggaaatctatttctatataaagaaataaatttctatttaaagaaataaataaataattgattttctgataa

SEQ ID NO: 154677 - DNA, 525 bp, Cannabis sativa
cctgaagcaatgtggagaatatacagatttactgttaatgagatgtccccaacagtatatagcttgcatttacatctcaagaatcagcatacggttacattctgaggaaattctgacttgtcaaatattgctaattcggaacattacaaaaaatctatgttaacagaattctttcaattaagtagagtagacgaaaatgcaaggatgttactgtacagacaaattcctgaatactatgtttggaacaatcaaaacacaaagtggactccacgaaaaaaaaaggcagtagtcgggtgtattgttacagcaaacccattagaaggcgaaagatattttttgcggatactgctaattaacataaaagggtcgttatcgttcgaagatatcaggacagtggcgtacggacgccaacatgtcgtgatgcagcaacaatgcatggtgttatcccaatattggaactctgacgtggcatcacaagaatggtgacacgtggcatcaacttagagcacctggtcggatgaacat

SEQ ID NO: 154678 - DNA, 831 bp, Cannabis sativa
  modified_base (148)..(157): a, c, t, g, unknown or other
gtgcaactctatgtacacctcatcactgtttccctaatatgctaatctgatggctatataaaatttgcctaacatatatctaatatattattctgacagcaactaatatatacgctaaacatgtataagcatatgcatgacattatannnnnnnnnncttgattccgaattcaggtgtgctggccaacctgagtggaacaactgctcagcgaattacaggctcctaattcacatcaatcataacattggtgagtgacacgctaaatcactttccggggacttaaacttgaaactaaaagtttctctatcgataaataacatggaaataccctaaacaacgcacaaatgggaaaaactagggttcccaaaattaccccaaccggtagaccggttccccaaccgaaattttctgggaaaaaattcctgggagccaaccggaattccggttcttacaggctcctctgaactggaattccggttcagtataggaaagaccaaaattttcatatctcaaccaaatcatccccaatccaaaccaaactttccaaacctgctatttatacccaatgaacatatctaaagcaataaaacatcacaacatactcagaaacaaaatccaccattaaagctccaagcttgagctctaaaactcaaagcttggctaacccaacaatcaaccactactacatgcttaaattaacattaaacaacataactaacttctagaaaacaacatcaaaccctaacagcagctacaacaacataaatcacaaaatcatgcaaatccatcttcttaaaattcaagagaactcaagaggataaagtcaaaag

SEQ ID NO: 154679 - DNA, 1056 bp, Cannabis sativa
ccaaagagggagtcttggccctcaagatcgagaggaccgaaaaagcgtttccgtgcaccaagagcacgggggaagcggaaaaaagggacagaaatgtcctcccgttgatctgaggaatcaaattaacggaaaccaaggtgacctccgagatcaccttgaccaaaagaaatatggacccacggtctccacgggaatgttaaacgaaggaatcatggcagaactttccatacttcgaaaagacatcgcccgagtctcccggagacagaaaggcaacgactccaactcggactgtgaggaccgggagccatgtgccaagcacatcctggaagcagagctccctaagaactttaagatgcccaaaatggcagcttataccgggaactctgatccaactgatcacttgtcacgtttcaaccgggtcatgacggtcatgagagtcagcaacgacgctaattgtctgtgctttccccttactctaagcggatccgcggaggagtggttcaagaaatgggagccaggatccgtaggctgctagaataagttacaaaccaacttccggagacagtttgtcgctgcaagaaaagtcaatctagaggtcagcgccgtgactaacatcaagcagctgcctacagagacgctaaagaattacataaagaggttctgggaggaagcctcaaaaacaaaaaaggttgatgacggacaacagcttgccctcctccaagcaggcatccttacagggactccattctagaacgaactacaacaggaaggagctgcaagccttcaggacttccagaagagagtccaaaaatacattaacctcgaagaggcccaaatagtggcctatggaggatattatcccaccgggatagcgggatacgtgcccagggctcagccctcgggcactgtgcaagtagcagctccaccgatgagcggcatatagttctctgccactcctggatatagccaaggccagaccatggcccctgcatcgtcccactttgagaatccctcaggcataaatggacaagccccctcgcattccgctccgacagc

SEQ ID NO: 154680 - DNA, 832 bp, Cannabis sativa
gtgcggctcgctcggacaaaactccttcagacaaaggcgttttccgaagcttgcccctgtcacgcctaattttctcggtcacagaggctgcacgcagcctcgttcctcggccagaaaacaccttccgtgcgcgcaggggaatgcaatgcatacccctgtgcctcaaacttgttttcttcataacttttattgcaaaaaacgttttccattaaaacaaaagccaatttttggtagaattttgtgtagaatctaaatttttaattaaaaatctaattgtcagaataaaatcaaaattaattaatttttaattaattaaaattcgttttagatattagtaggctttgaattttgaaaatttgatttctgacaaaaatagccttgtggttaattttgaaattttagattatgttatttattttaattataacatcagatattaaattttttttattaaattatgaatgatcttattttggtattaaaatattatctttttaaataatcttgttcaaatttcaaaatttgctaaccatattatattttttttttcaaatttgttatttttgaaatatattttaaaattataagataaggaatatgttagtttcaacattttatcttattagatatttttttttattaaaattctattttggcaaaaataacatgaagatttgaaaagttgatgagtttaggtttgaatataaattttagggtttcaaaccataattttgttttttttttaaacttatttttttttatttttaataaaattagaaatattctaagcatattaaaatatcttatttttcaaatagtttattttgtaata

SEQ ID NO: 154681 - DNA, 820 bp, Cannabis sativa
  modified_base (781)..(781): a, c, t, g, unknown or other
tcgtatggcgcaaggccgacaaatacaagaaaattaataaagtaatcttgaaggggaagcatggccccgaccatcaagtgcgtctggctccaagctttgaagcccccataattgtggttgggcgtctctgcgtcccggggcggccggtggtaggtcccggaggtcccaggcttgatacctgtcaccaccacgatgtgttccaactggtgggggcaagtcagggtggagtgaagcttggccgcttcccaacccttagcatgggacttgtacccttcttgggccactggacccttcataacttcctccagggtagccagacgcttcccttctttctgtgaagatttggaactggatgcagacatcttagttctgaagaagattgaaaattccagcagtcacgccccaaaccaaaccctaagtcaaaaaagggaatgggggtcctctaatcgctggaaagaggccccctctggacatttgtcaaaaagaaagccttagaaggtttttccttgacaaaagttgggtgcaagaatgccacagatggtgacattgcgaataaacaaagaaaaggaaaaaagggtaaaaatcgagaagacaaagccctctctgaacccttgaaggtcatcacgtgaagaaaagatgggtccttgacaaaaaaaaatacgtagactagaaataactcgaacaccagaaaagaggaatctaacgtgttacacagaaactcaagatagaaattccaaaaaactcaaacatcaaacccagaaaaagcagatgaacagtaaancatgcgatgtacacaaacaataaactaaagtacaagatg

SEQ ID NO: 154682 - DNA, 561 bp, Cannabis sativa
atatgtgtaactttcactggcagaaaatgtgaactgattttgtaaatctatccactatgacccataccgaatcatacattcatgaagttctaggcaaaacagttagaaaatccattgcaatgtcctcccacttctactcaggaaagactaaaggctgcaataaccctgccggcctttgatgttcagctttgatttgctggcaggttaagctcttggacatgtagtccaccacatctcttttcatcccataccaccagaagtaaggttttaaatcgtgatacattttggtggttctcggatgcagtgaataaggtgtggtgtgagattcatcaagaatctctttcttaagctcatcaatactaggaacacacactccaactttatataacaacattccattatttgagactgaaaagtctttaggccgaccaaccaatacctcatctcgaatcttgactaactcgggatcttctagtgttgcctttctgattctttctaacagatcagattgaagtgtcaagctgtgcgattccacaccgcctggggaaggtcaagtgggat

SEQ ID NO: 154683 - DNA, 585 bp, Cannabis sativa
gattctcagttgatgatatccagatctcaagtcaatcttagagaataccgtcttgcatttaaattgatcaaacaaatcgtcaattctaggcaaaggatattttttttttaatagttaacttgttcacctcccgatagtcgatacacattcgaagagttccatctttcttctttacaaatagaaccggatctccctaaggagacacacttggtcgggtgaatcctaaatccagcattccctaaagttgtatcttcaattcttttagttctccaggtaccattcggtaaggtgcttttgaaacagattctaccccaggtattaagtcaataataaaatctatctcccgctgaggtggtaaccctggtaattcctcaggaaacacgtccaggaattccttaacaaccttaacctcctcaggtcgaagtaacacaagtttacgagagtcaattacaactgctaggaaccccacccatccactacgtagtaaatccctagctttcaatgccgagattcttggaacacgagaaccttgaactgaaccaacaaaaacaaatggttagatcggaagagcggttcagcaggaat

SEQ ID NO: 154684 - DNA, 547 bp, Cannabis sativa
  modified_base (285)..(285): a, c, t, g, unknown or other
  modified_base (406)..(408): a, c, t, g, unknown or other
  modified_base (477)..(502): a, c, t, g, unknown or other
caccaacgaccatattgatttcaccatccaagtcataacgagctggtttagaaaccctcccattacgagaggagccgtgattttttgagcaggaatattagtggtagatttctcggttgtatcaacttgcaaagattcaatcgagggagtaggattattctttacttgagaagaagacgatggaacattatttggagttaaatctgaaagcatttcctccaatactacttttgttttgcggcttgaaattcttaatatagtcatcttcaaagaaagtggcgtttntggaaacgaacaccttatcatccttgcgactataaaatatttcacctctagtctccttacaatttccaacaaatatgcaaacttcagttcacttttctagtttgccatctttctttcttannncatgagcagggcacccctagattccgtaatgacgtaaactgggtatacgaccatttcataattctaaannnnnnnnnnnnnnnnnnnnnnnnnnaacaacatttaaaatgtcagtttccatctgaatagcatatcccca

SEQ ID NO: 154685 - DNA, 522 bp, Cannabis sativa
  modified_base (38)..(44): a, c, t, g, unknown or other
attaatttaaaagatgatatttaagttcaaatatattnnnnnnnaatattttattttaaatttggggtttgaaaattggaaaaatccaaattcgagaaaaatcccacagaaatcgcaatttgtggtgcggctggcagctaggctgcaaatggcccaagacgcactcgcatgggaggagccagccgaggaatctcggcgtctgcagggagcgtctgggcggatgtgtagcatctcctcgggtggactcgtctttagacaaggttttgtctgagaggcacgcgcgcgtgggcgtgtcttgtccgagcgcctggtgctcacgagcacccactcgacattattgaaccccgatttttccaaaatttattactctttcaatttttatcgcaatcgagttccgtaaaaaataaaattgcctaatttttcacgagaaatccaaataaaatattttaagaaacagaaaaaatatttttcatcgaaaaattttgtacaacacatacattcatcaaataagcacataaacaa

SEQ ID NO: 154686 - DNA, 575 bp, Cannabis sativa
tgatgtgatttgattaataaatttcggtagttatcctacatattgtttttattttgggtttgaattatttggtttcagaatttcttttattttttttaaaaatggttttgcttcagttcataactgaagcaaaaaacaattagcgttgttgcactagttttttgcttcggttatgaaccgaagcaaaaactcttttttttttgcttcggttcataatcgaagtaaaaaaacatttggcgtcggttctaaactgaagcaaaaaatatgactattttcgtctgtggttattacgtcggttaccctaaccgacacaaatactttatgtgtcactgtaaaaccgaagcaaaatgtcatttttgtagtagtgatccctttaacttttcacacttagctccatatgctgaattttttcctttgtgcaggccggtctgaagttggcctacacttactcctaggctaagtctgttgcttccaagagtgcggctctgtccgacactttgaaggcggagacagacttggccaaaaaggaagttgttcgcagacgagaagatctccgtgctgacaaaggatctcga

SEQ ID NO: 154687 - DNA, 656 bp, Cannabis sativa
tttgggtttggttactggtacgggtcttggttcttgtctaggtcctgggtaacgagtcctgggttccgggttcttggtcgcaggtcctggcgaaattctgggtctcgatgcgggtatcgatatcggtctaggtctaggtccgtgtttggtttcacgtctagatcttgttttgggaccaggtccaattcctgttccagggtcttgattccggttcttgtgctgattttgggtctcaggtccaagtcttggtttgggtcctggtctagaaattgttccaagttgaggtcttggtacaattccatgatctagacaccgactacgtgttggtccaagccccgggtcgtgggtcaagatgtcgatcccaatcttggttctcgatctcatttcaatttggatcttgggttacagtccgggttcgtgtccaggttcaggtctggaccgtgagtgggtcgggtcttgggtcctagtcccagtattgggtctcgattctacttctaattatgagtttgggtcctcaatctatgtcagggtcctggatccaggtctaagtctccaaaccctgtttgggtcctaggtctgagtatgggtccaagtccgtgtctgggtttgggtacgtgtcccgagtcccgatctgagttttgattcgggtccgcatc

SEQ ID NO: 154688 - DNA, 573 bp, Cannabis sativa
tgttatattgtataatgcttgttctgtataaataaaggattcaagagcctgtaacttcttacagctcatttcatcaatctcaattgtatcaaatgattttaaagcggtcgacctttcatcttcaacaagtccttgaagtccacagccttggtcagttttattctgcatatagcaaataatcaataaagtttatcatataatatatgtgcttgaattcttaaaatttaacaaaaattaattaccttccacaacggacaaccataaaataattcgccgttatttttattttttcttactacacattcagcccgcattgacattttctcttcttcacaacgattgaatcactatttttctttacatcgattgaaccactactctcttccatcataacttaagctacaaaattaattttaattaatttataatagttacaccaaaaaacaaatatagaatgtaatcttattattttgaataacactttccaaatatatgatattattattatctaacttaataacttgcatgctattagtatatatagttatgcattagagaaaaatccataaaata

SEQ ID NO: 154689 - DNA, 513 bp, Cannabis sativa
  modified_base (270)..(270): a, c, t, g, unknown or other
tcggtctaatgaaccctttgtctaagagctcctgtagttgtattttaagctcttttaactcattaggtgccattctatatggagccttttaaattggattggtccctggggctaattcgatgatgaactccacctctctgtctggaggtagtcccagtatatcttctggaaagacctctggaaattcacaaattatgtgcacattctcctcatttagttatgtctctattggtcgatccactacgctgaccaagaatgcaagacaccccnccttcattagctaactagcttttaaggaagatattaatggagtcctcagcttgtcgcctttgaaaaaccgatccccagcctttgtttcaaaaacgagcagtttctttcggcaattgattgtcgcaccgtgactagatagccaatccatacgaagtataacatcatattccttcatttccagctctattagattgcacaagagttctttgctttcgattgtgataggtacatctcacattcttc

SEQ ID NO: 154690 - DNA, 863 bp, Cannabis sativa
tttaatgattatgttgatatagcgttgtttacaagttgcttatatgttgtttatatgttattttctaaatgcatctattttttatattgttgttttgttgatgcagttgaatgcaataaacttaatttctagtgatgatgaatttcgtagttgatcagaataagcttcatgttcatttatattcctttggtagaatgaaataaatcacacacattgaaagtgtacaagaaaatgttccaaactcttcctagaagattgaagctactgtgcatggattaataattgagaagctagtgtatttggttttgactgtatgcgctgaagagcaatatcatttaagaaattttactttgaatatttttttaaatttttatctagtgaccttcatatgtattttgtacgggatattgaacattttatatatattaatttattaatatttttagtacattaagaattaaattattatatttttaatttctacatcaagtattggtataattatatatatttttttaaaaaggcaatagttgttagtggcttttttaaattgttaacaaccatttagtaacgatataaaaacataaaaataattgtatatataatttaagaaatctacagattttgaccactgaaactcaacgtacaaacaacgccaaagtaacatgctcaaaaaataacaaaattaaacaacatgtttacaactttaaaataacaataaaataacaaataatgttattactatcaatttacaatctcttcctatcaattttctacttgattcaaaattaacataatttgtgttctcttattattttccatgtcttaatgtaagagacaatataagtttttattttaacatg

SEQ ID NO: 154691 - DNA, 502 bp, Cannabis sativa
  modified_base (473)..(474): a, c, t, g, unknown or other
gggatactatcctacagggatagcaggatatgcacccgaagctcatctaccgggtactttgccaacaatagctccacccatgagcggcatacagttttctactactcccggatatagtcaaggccaggccttggcccccgcatcttcccattttgtaaatccctgggggataaatggacaagcctcctcgcactccgctccgaccgcaagtttagcctgtccttctcagggctcgtagagcaaaaggtcctccaaaggcagcaacctgacggaggataagtggcagaaaagggggtatactccccaatatacccaatatacggagttaacggactcccaagaacgtgtatattttgctactaggcagaatacacactagcgaagaccgcctcccctatacaaagacagctcccggaaggaccccaataagagatgcgagtaccacaatgacattgggcacagcaccaatgaanncaaaaatctcaaagacgagatcaaaaac

SEQ ID NO: 154692 - DNA, 554 bp, Cannabis sativa
aaaaaaaaaaaaaaaaactcatgccacaagtatcatttttcacctaaagatgaaataacataaaatcattcaaagctgaaaggataatagagaaaaggaaaacgatatataggaatatgtctatatgagaccatgtatatgctacttatatttgaaagctccttttttttttcaaaatttatatatatatatagatgagtaatttgcggtataaatacttaagtttaactttcagttgcgaataaatacttaagtttaattttttagcggtaataatagctaatgtataattttgaacttctgtaggtatttggttaagtaaattgttacgtggcaatctctgattggtccaaatcattaaatttttattatttaaaaaattttgttcaaaaataccaataaaaaaatgacacgtggatttaatgacttaatatttaacggttaggtacctatagagttttagaaatataactgaagtattatttccgccaaaaattaaacttagatatttatttgcaactggaaattaaatttaagtatttatgtcacaaatt

SEQ ID NO: 154693 - DNA, 903 bp, Cannabis sativa
  modified_base (93)..(100): a, c, t, g, unknown or other
tcctattcccattcccattccctatcccattcccatttctatacacattcccattcccatactaattcctattcacattcccattcccattcnnnnnnnntggcccattcccattcccattctctggcccattcccattcccattcccattccaattctcattcccatccccattcccattcccattcccattagcattgccattcccattccccgacccattcccattcccattccctttcccattcctatttacattcgcattcacattcccattcacattcatattccattcccattcctattcccattcccattcccatttccattccccagcccattcccattcccattacgattcccattcccattccccgacccattcccatttccattctcgttcccattcccattcttattcccattcccattcccatttccatttccattccccagcccattcccattcccattgcgattcccattcccattccccgacccattcccatttccattctcgttcccattcccattccttggcccattcccaatcctattcctattctcaatccccattcccattcctcgatcaatgcccattcccattccaatttttattcctattcctattcccattccccagcccattcccataacgattcccctaaccctaaaaccccaaatgccaaaactgcaaaaccccaaactcgaaaccctaaattccaaatcccaaaaccctaaaccgtaaaaccttaaaacccaaaacatcaaaccctaaatcccaaaccctaatcataaaaacagcaaacctgaaaaccccaaacacaaaaacaccataccccaaatcccaaaccctaaaccctaacccaaaaactcgaaaccctaaaacccaaacaccaaacc

SEQ ID NO: 154694 - DNA, 533 bp, Cannabis sativa
aagggccatgcttgttcttcgggactacttcaaggtctacataaatcacattggagtttccccattccagctgactcccatctcctaccggattcttactagtttgaaagtcctataaaaaaattctgaactaggggtgtcccatactagtggagattgagtatatttactcagttaaggtcgttctgtcaaggaagaacaccgcagggggcttctactacctcggtactcattccagcaagcctaaaattattgtggacttgccaaataaagtatccttcaagaacaacttcttctggacatcttgtctttcccccatcggcacaatcacttttcgcaaacttcgtaagtgattgtttcttcttggtcatttatatcaatcattgtgtttcaagtttctgatcaatgttttgttttttcttaaagctctcttgacgaggcctactcctacccccgagatggtcagtcggcacaagcacttgataactcttccctacggtcttcgatcatgcgactgttgggttttatgccct

SEQ ID NO: 154695 - DNA, 1506 bp, Cannabis sativa
  modified_base (499)..(501): a, c, t, g, unknown or other
ccaagaaatctagaggcggtgaggtagccccatccagggaataggcaccggtcgaggaggttattgatctttctaaggagctaactttcgcggacccttctactccgaaagctgctaagtccaaggattctcgagtaggaagctcggacaggcctaaacagtcaaagggtggattcgagctggccaagagcggatctgagcagatgtgggctcctaccccacctttgtcattgcatccagaaaccaagagaggcaaggagatgctctctcactacatgaaccagttggttcctgaggtgagtgagcagctggccggcgttgacaacaaatcttccctagagctgctgatgggaggagtcctgagggaatttacaaaggtgagtctttcttgacagtttcctttaatctttctttacttggctcaaactctatccccgagctaagtctgctgcctccaagaacgctgccatgtcgaacaccatgagggcggaagtggacnnngccaggaaggatgctgatgacgccagggtggaactcggagctgtccgaatggagctgggtgaagtcaacaagaagctttttactgccgaggggaaagtaaccgagttgactaaggacctcaaggcttctgaccaacttaaagctaccatcgccaccttgtcagtagaagtgaatagtcttcaagaggaaaggggagttcttcggactgtcttccatcagctagaagcaaagaagaagtctaaggaggatgagtttacagctgagatcgagaagtacaaatcggaggttgaatagcagagagcggatgtgacgaggctggaagagaaagtagatgccctagagacagcgggtctcgagattttttatgacttctggaaagctaatcccgaggcaaattttgattacttgggtgattccaaagacatgtttctcgagtactacgcttctcaggtggcttatggtgaacccgaggcgatcacttctacttctagccagaacgttggcgtgccccccgctcagacaatagatcctctagctcctaccggcccagaagacccgaacaaagagcctgggactccagctgtctaaatacttctctttttatctttctttttatatatctatccggccataaggccttttttaagacatcatgactggccaagcggtctttaaacttggaaatacttttcattttacagacaacaggctgactggacagcttttaatcccggtattacatgctttagttatctttaatgaatttgattctctgtttataatcatcatgcaattgtgtttgttttatctttaccaaatgctttttacaggtataggtaccccccaagtgaccgagcagacttatgactcttggccacttgtttctttttgcaagtatgctttttcttctgttaagggttttgggttcgaccaaactttttgtacgcactggatggtaaattaacaacatgctattaatttcgactcaatttgaattttgaaata

SEQ ID NO: 154696 - DNA, 506 bp, Cannabis sativa
caaatggatgtgactactgctttcttaaatggagagttagaagaagacatatatatggagcagcctaaagggtacattaagaaaggagaagaacacttagtgtgtaagctagagaagtctctctatgggcttaagcaatcaccaatgcaatggaataaaaggtttgatactttcatgacaaaacagggttacttaagaagctactatgatcactgtttgtactataaaggggcagatgtttatacaaccatatatctacttctatatgtagatgatatgctaatcataagcaaggaaatggcaaaggtagaaaacttaaagaacttactaaaggcagaatttgaaatgaaggacctaggagaggccactaagatacttgggataaatattaaaagggataggcagaaaggaaaaccggttctaaatcaggaagactacatacacaagctcattaagagattttctatggaagatgccaagataacaaagcaaactataacctatca

SEQ ID NO: 154697 - DNA, 813 bp, Cannabis sativa
ctggtcatagagactcctatcgccaacaagattgtggctagaatactgatcgacaatgggagttctgtgaatttattatttaaagaagccttcatgacaatcggcttcatggaccgggatctttcgccaagaggttcccaactcacgagattcaatggaacaacacttatcccaatgggaaaagtgaggttgccagtcaacttgtgtcgagacacaccccaaagcacttttaaataatgcacattcatggtggtagactgcccgactgcttacaatgcaatcctcggctgaccggccctagtggactttggcgcagttacatcaatccagcacttgtgtctaaaattccctactcaggaagctggagtagggaccgtgaggggtaaccaatgagatgtcatgcaatgttataatattgccgcccacctactaatattgatggtctgtgaagttattgagccgggaacagcggaagaagatgagttggatccccatgtgggatccgaaaaaatcgtagaacctatggaggacgtcgaggaagtatcagtatgtgatcttgaccctgccaaggtcctccggctaggaaaaagcctagagccggaggaaaaagaaaaaataattagagcactaagggtagccacagatgtttttgcgtggtgccaaggagacatgaccggcataagtccccatgtcataacccacgtcctcaacgttaacccgaacatgccaccggttcaccagaagcgacatccccttgacctagtgaaggcagaagccctggagaaagaggtggacaaactactaactagtggc

SEQ ID NO: 154698 - DNA, 589 bp, Cannabis sativa
gtctttttgcctattgagttttgtcttttagtggggatttaatataaagttttaaatctgatttttagtggttataagctgattttatacttaaattaaaatcattttatttcatttgaatgaaaagaattagaaaattaccaaaattacatttcactctcaaccctccctctctctctcgaactcacctagaaccagctagggttggtgtgttctttgcaaatcaagctaagttcagcaagattttagtgtttcccaagccaaggtaagcctcttgtaacttgatttttagtttcttgaattgtaagaaagtgaaagttgaatgttttggggttttgtttgctgtagttgctgttagtgtttattattgttttcaatggataaattattcttagatatgttgatttaggcttgtgttggtggctggtttagtggttgagcaggctttgagttttagaactcaagcttggctcaacaatggcatttcttctttctgagtttgggtattggttttgttgcttttaaattgatctttaggatgcttagaacaggtctggaaggtttcatgtggattggggttgttttggtt

SEQ ID NO: 154699 - DNA, 766 bp, Cannabis sativa
  modified_base (489)..(491): a, c, t, g, unknown or other
cttcaattgtgttttaaaatctgatgttttattttttccaaaatcaaaagtatttgaaaggagacctcccaatcttattttgacagatagtattattgtgctattgtaatacccatagattaagaatcggattaacaaaccctaactagttaaatgtatatttattatggaattatattattatataatttattatatgtgaattaaattggaaaatgacatgataagaccccgttggtgagccaagggcatttttgtaattttgacccgagaggagtaaaactataaattgaatttaattgcatgcttatggactatattactatatagtatacttgctgtgtcctttttaaggtgttttctgacaagtcagtgcggtatggtcacaatcgggtatttcgagccgaaccgggttcgaggccgaaatacatttttgggatttcatattagcattttatggttgagtgaataacttgaaatttatttgannngtatgtgatgaaaatgacattttttcccttgatttatgtatatgtcatatataggccctaggggcattttagtcttttgacccattagttaattatcatcaaaaagggaattttgacaaaatgagaaattcattttctagattgtttagccctagccgaacctcctttgctcttcctagttcatcattttcaatttttgctttaatcttgaaatcttgcttggattggagttaattgttggtgatggaagcttgtgggtgatggtaagcttcaaa

SEQ ID NO: 154700 - DNA, 590 bp, Cannabis sativa
atattataattaaataatatataaatattaaggaaattaacaaaattttaaaatttgaccatacataaaaaataaaataatcaatttttaaatttaaatatcaaaatattaaaaattaatagtaatctattaaaattaaatattattaatttgcaaatatgatatttaagtttaaatatattaaaaataatattttattttgatattaggtgtttaaaaattggaaaaatcaaaatttgtggaaaaaaaatcacaaaaaatgcactttttgtggaagaccacttggctgcccacacagcctcctacgcgcgcaagtggaggattgcagggtgccatgtctgtggattctcggcgccagtagggttccacataggcggatgcatgatgcatcatgtctgaaggcgagggacgcacgcgacttcaaacaggggactgtccctgtcacacgcgtggatgcccaccttgtccgagtgcctggtgcatgcgatgcaacccactcgacacccattcaacccaaaacttcaaaaattcataacttttttaatttttatcagaatcgagttccttagaaacaaaaattacttaatttt

SEQ ID NO: 154701 - DNA, 567 bp, Cannabis sativa
  modified_base (489)..(492): a, c, t, g, unknown or other
aggagaattgtgcatggaactccaaggagaaagccttccatgagttgaactttccgggcgccaacttgaaataccattgttgggcggcttctgagagggtgtgaaaaactttgcaacatacttataatatatggaaatacttatcagtattgttattacctggaatgtcaccacaggtgtatagattatgcacccgagacggactagtaggggtacccgcgagctagctgggctcggggctactggtgagggcgagaaccttccaccaccaccaaactaagaagagttatatgttgcagtgcaagagactattcgacagcagggtgagcaaatcagagaattgagagagcagcgagctcatcctgctctaaaccctaatcctgatccttcgacacctctggtagtgccaccggatgcagggaaccgttgtatgagtggttccagaagcagaacccatcaatgtttgagggtggtgctgatccactcaannnngagcaatggatgagtatgataacatccatttttgattttatgcgggttgaagataatgatcaggtcaggtgtgct

SEQ ID NO: 154702 - DNA, 735 bp, Cannabis sativa
  modified_base (402)..(404): a, c, t, g, unknown or other
  modified_base (523)..(532): a, c, t, g, unknown or other
aattacttaaaattttaagtttgtaagttacataaatttaatgtttatttttagtagcataagtacttagtatttgtaaaattgtatttttttttaattttattagttattatcttaaacaggatacaaaaatatgtagtatcagttacttctaaatattcttttaataaactcaaaatatataatctgtattgaggaaaatgaagaaaaattacagttttataaatattaagtatttatgtcgctaaaaataaatattaaatttataccgcttacaaaatacttttataccattatttacatactttattatgtacgtaactacctatataaatatataattaattgaataatacgttaattaagacaattaatcataaattagaatatatatatatatannnatctttatatattaaaagtgcatatttaacggcatttcttggtttaacagaatataaaagaatattctgttaaatttaacgattaggttttatctcccgttaataaataaacccaatannnnnnnnnnaaaaattaaataatcttttaaatattaataatctatttttaaattaaaaaaattatcttaaccacatatctctctaaattctaataaacctatatagggagaatattaataatttttttatttattttttaaaaaaaatctttatttttttgattccgatgcataatgtgatgttattcgtcattactcttttttttaaccta

SEQ ID NO: 154703 - DNA, 842 bp, Cannabis sativa
gaacaattccatatcataaaaacaatgtatcccaagcaccaatttacaataattcatccatttactcaaaattgcatactcaaatgaaatcaaacttaataatctttacttaaaccaattcaaatcaatcagccactatttctaaccaattcaagcttaaacaaattttaaatcaaacccaataacgcattctaaactcaatttacacttcagccccgaaatcacacaaaccctaaccaaaaactcagcttaaaccttataaaaatcaaaggaaagaagtgaggaacttacctcaagtatgaacaactcctatccttggttggttcagcttacacatgattgaattggaaggaaaaccctagtttttctgctgggtttttatggccttcgagaaagagaagagagagagcaatatatgtgtataatttttcttagttttaggtttttatcctcaattcctaattataaattaaaactaataaatctaatacaaacaaaattcctacttcagcctagataacaaatataagacaacaacaaaaaaaacccaaaagaatattttgccccttttcacacctttaaacttaaaataaaattctaggggtaatttggtaattttaatacttccaaaataattcatctcatattgtcgtgacattactgacctccccgtcaagttccacagttgctaggcccgaaaatattttatttgaaaaatggtatccacaatacccacgtatgccaatataatctccgtaattaataagttacgctttatttaatcatttaataaattcacactaattactctaagtaagatcataatcttactccattaccaa

SEQ ID NO: 154704 - DNA, 666 bp, Cannabis sativa
tggtgggtttatcagaagagactgtccacaatccaagaaagaagaaccaaagaagaacaataatcaaaacctagggcgtttattcactatgactcaggctgacgctgatgctagtccatcaatggtaacaggttagttggttataaatggttgttcttattcagtattatttgattcaggagctactcattcttatgtatcaagtagagtaatagagggttttcataaactgtttgatgtttatgctttgggtttggaaccttgttaccatctggagacctaattgtatctacacagtggattaggtcgttgtctttttggattgactgttatgaattaaccgccaatctaagtgagctacaattatgtgattttgacataatcttgggaatggatttcttgtccaagtatggggcgacgattgattgtaagcaaaagatggtagtgtttgaacctgatagtgccaatccagcagtgtttgtgggtaaggtacaaggatcatggccgactagagggtggggcagccgaggcctaggccccaggccccaggccctgaaaaatttaaattaatattatatatataaaaataaaaatataatatatgtatatatataaattttggttcaacaattttcataaaaaagcttacagcacaattggtaagag

SEQ ID NO: 154705 - DNA, 564 bp, Cannabis sativa
tttgggcccccgaaaagtgtgggccctaggcacgggcctagcccgcctatgcctaggtccgaccctgcctgtgaagtttagagtgatttggataagtttttgtagtgtttcggtgagtgcaaaatttgagattttcgtatttcatagtttttagaaattcataggagattagaaatcgtatttttaccataacgtttaacgcaagtgtctgttttggatgttctatataccatttcgaagcttgcaatgagctctacaatatggtgtatgttctacagccaaaatataagttttattttagtgtatttataccacagagtttagtagaaaatcctagattgtcttacgtgagtgttaagtggtgttttgggataaacacttattgatttattattgttatgacatagggcccgagattatcgatcgttctccaagtaggtcggccaacatacctaatccagaacttaaggtaagaaaaatataatgtaccacatggcatgacaggttctgaaattatcgattgtctgattaggcaatgataatgtatgttggaaattattttac

SEQ ID NO: 154706 - DNA, 835 bp, Cannabis sativa
tttggcacccactgtttttgctttttggttccctttgactgtggaacacttgggaaaacaagtctttcgaatgttgacactcgtggggtgaatgtgcttgcttcaagtttatcaaatactgacatccgcggggagggtgtaggaacatcgtcgctgccaaacattttttgttcctcctctgttaactcgtctagttcaaaagaagcttttaaacaatcactattttgatggattgtgactcattttcgctaaaatgaaactttttcttctccattttgaaggtttttggagttacagatgtggaggactttttattgagagtaacaaccattttatttttcttgccatctttaccaaaggaaattaaaatttgcattttacccttgggtagtgactgatcgattttccttagtggtaaaataaagcttgtcattagggctatcatcgaatcttcgattggtgttaaagctttttgccctactcctcgtcgacttttagggatctacttgaaggttcgtttttggttagataccttcaagttctcctctttaggctgaggagatttcacaagggatagttgcctaatttttagagagttttgtacggttgagctttcatgacgtttgctctcctcaggtctccctttcagaatggtgacattagctggctgtaaaatcttgcatcagcataattcacttgttccccgtaaaagggatttgggtctgcattgacactttttattttaccttccttgcaaaacataaagcattggtgaagtgttgaaggaatgactccatattcatgaagccacagtcgccctaacaacacattgtag

SEQ ID NO: 154707 - DNA, 510 bp, Cannabis sativa
taacaaagtaaaatcatcatcatattatatatatataagcagaaaaagaagaaatagaaaaaaaaaattaaaacaatttataggaaatagtattataaaatataataggtaatcgaatttttttttaaaaaaattaaaacaatatatatagatttagggttatatgtattttaaaaattggagaatatttaaatttaaagttagatatttaaagttttttttaaaaaaaatatataaagaaaataaaaaatttgttatttatattaataaacctaataaaaaaataaaaaagtgagagaattaaggaaataagagaaaaatagctgtacaacaataaataaataaaataataaataaataattaaagaaaaccaaattgtagatgtacaaaccggttgtacgaggatatgtatattatttagggtagtttatttatttattttattatatataaataaaaagtgaaccatgaatttctcataaacgattttatttttaataataaatcat

SEQ ID NO: 154708 - DNA, 535 bp, Cannabis sativa
aataatatataaatattaaagaaattaaaagattttaaatctaacaataatttcataaataaaataatcaatttttaaatttaaacctcaaaatataaaaaaaaataataataataatctattaaaaaataaatattaatctaaaaatgatatttaagtttaaatatattaaaaaatatatatttattttaatttagggtttgaaaattgcaaaaaatcaaaatttggggaaaaatctcacaaaaatcgcatttgtgggtgtggctgcaaggaggctgcacgtgcagcccagacaggctgcaagcagccgagacgcgcgcgcgaatgaagcaaactccagggccctgcgccgagaaatctcgacgattgcgggatttccgtgggcgagctgcagcctggaagggtgtttgaacgaggggtgagacgcggcttcagacagggaattaaactttcgaacatataatcatgattatattccactgtgtttacagtactataatcatgaacaactacatatgttctggactcaattgaa

SEQ ID NO: 154709 - DNA, 579 bp, Cannabis sativa
gcattttgaacttgtgggcagtggcaggagattgatctctggtgagaagggagttctgcgagcacggtcaaacttaagatcattgttatgctgtcaggccctgccctgaaacatattcttcaactcgtcaagctgggcctgtacggttgggctgacttgattggcattttggtcggcttggattacgtcagcgtctttctaagcggggatctgagcatgggctctgggctgcacgatcattgcagtattctgctcatctattccactttttctgtttagatcgtcccttaggtcatgggtcgttcccagcctatcgaacacataagagcttggttgccttagcgattggtttgcttggtttacaggtggaataactccattattctgattggatccgtcaggtatggctcctcctgatgaattcctggacaaggtctgcccgcctacctcttggcacatgagtggaactcgtgaccgggaattggacggctgacaattggttgtctgtgaggcattcatcgtcgggtcatcctccgtttcacccagcagaatgacgttcggcgtttgctggcctacagt

SEQ ID NO: 154710 - DNA, 609 bp, Cannabis sativa
gaatgagaatgaagttgtatgcaaacaagtcataatgagggaaatccatcgaatattaaaacccatcttgcccattaccgcagccaagtaagaccattccacccgatcaaatgctttactcaagtctagttttaaagcagcatatccctttgtgcctcgctttcgattcttcaaactatgaaccatctcaaaggccaccaaaacattatcagtaattagtctgtttggaaggaaagcactctgagtctctgaaataacatgtggaagaacatgttttaaacgcaaagccaaaaccttggagatcagtttatacacaacattacaaagacttataggctgaaagtccttcattgtttttggcttcttgatctttggtatgagagtaataagagttttattcaatgcagcagggttgcctccacaatttaaaacatttagaacaactcgcgtgaccaaaggaccaactgtgtcccagttatggtggtaaaacattgctgaaaaaccatcaataccaggacttttatccgcccccatagagtttaatgcagtagtaacatctttaggagtaaactcatgaagaagaaagtcattgtgttcctcagtaattgt

SEQ ID NO: 154711 - DNA, 629 bp, Cannabis sativa
gctggtggagagatgagtgatggtggaaccgtgaaatgatgaaggaggtggagtcgatggttgggcaggctggggcgagtttggatggaggttagtggtgcgggttaggtcgtagtggtggtcgaatggtgggcgcgactgggttgttgaaaattgcgcagagaggagttcgacttggttgatggtgaaggggacggctgaaggttgatgatgatgatgagtgtgaatggggtagggttgggagctattgggctgatattgagaaagtgggctagtcaataacatcatggagcccagttgactcaaaccaaaagagaaaacccaataattaatctttatatgctgtatttggcatttttgaatggaagagtcaactaaagtacataaatccaaatgattgggctgagtaaaaagagttgtgcccaatgattgcatcattaacatagttgtcacatgttcctcttgattcagaccatgtacttttttcttctctttttttttttttttcaaaaccccaatcctttgatcaaccaaacccaaaactccttttgctaagcctttgctatagcaactgaacagcatcctgccaccccacttaatgcttttgcccaattcaaaacttcttcact

SEQ ID NO: 154712 - DNA, 579 bp, Cannabis sativa
actcttggccttctcctccgaacacttcagtttaatatagtatctcttcgatttcttagcagtccaattcttcacaatctttgaaagtccaaacaataattttgtgttttcaggtagaatgtaccgtttgacagctatttattaggcctcgttgggtgtatcggtggctgagtcggtggagccaaatgatctcttgaaactttcttctttcctttcatctacattaatcaattaattacaatttcaaaatataataatattgacagcctaagatgcaattttaaggttcttgtaagaaattattagcatccaagagtttagagaacataaagccacaaatcataataaagttgttttctcatggccacgaactcttcaccaataatgcattcccatcccactaaaaactatcattagcttctttaaaaagaaagtatcagcaaataactatttgagttcaacctactcattattcaaaaaattatacttgaaaaggaaaaaaataaaatacctttgctaaatcatctggatgtatgttgattaggttctttggccaagctacaaaattgttcacagcta

SEQ ID NO: 154713 - DNA, 828 bp, Cannabis sativa
  modified_base (237)..(246): a, c, t, g, unknown or other
  modified_base (342)..(342): a, c, t, g, unknown or other
tttttattgctttatcatatatttgtattataaatcatttatcacttataaaatagactcgttgtcgttggctaaaagcgatgtcaacaataatgttctattaattatgaaaaaaattaataaaaattatttaaaaacatgataaaaatattaaactaattaaaaaatattatgtttacttaaaaaaatctaaattattcctaaaaaatatttttaaattttattttatttataaannnnnnnnnnaaaaaataaaactaaaattattgaaaatccacaaataatttaaacaaactaagatctttgaagaaaaaatcaagcttatttatatttataaactcntatcttaaaaaataaaaaaataataattaaaaatggaaaaaaaagataaaattatttttttaaaaaatttagaaattaaattaaaaagatagtattttaaacaaatctagatttttggagaaaaaaaaaaactcaagcttgtttgcgtaaaatttagtttttgcaaatattgaatttttaatcaagcttatttatatatctaaatggatttttttatataaaatataatttttttaatctcttaattagtttaattttttttttttgaaatttcttaattattttaaatgatttttttaagatctaaattaattttttaagatttattaaaaaaatattgaatctttcttatttttatttgagagagtaagattttatagtggtcaaaatttaggagacaaaattgctaatttacaaatacacgtcagtatttaaacaaaataatgggacagaacctaacagaatgactaaatttctataaatgta

SEQ ID NO: 154714 - DNA, 630 bp, Cannabis sativa
  modified_base (571)..(579): a, c, t, g, unknown or other
aaaattaatttaattttttaaaaggaaatatttttgttagtgggggctatagcccccacattaacacaagtgggtctgtccctgtcagtaatacatgtgttacgtacttaatactatttatagggttcgttaagtacgtcgtaccgtattgtattgtattgtgttgtattatattagtattagtgttatttaatataatacaatgtttagtattgacttgtattaattgatcgtgtaaagttataatatattttcaatacactcgaccccaacaccaactacgggtctgggttcgggtctcgggtccgggtttgggtcggggtcggggttcaggtttgggtcggggtcccgggtcagggaccgagtttgggtcggagtccgggccccggatctagatcccgggtcccatgtctgggtcaaggtccgagtctaagttcgggtctaggtccgagtttgggttcgggtccgggtctgggtcctgggtctgggttcgggtcggagattggtgtttactctaaatcctttataaatttataatacaagctaatacggaccatttgttatgtattannnnnnnnnacatacattgtattaaaaattttgattgtataatattatttattatttaat

SEQ ID NO: 154715 - DNA, 685 bp, Cannabis sativa
  modified_base (161)..(161): a, c, t, g, unknown or other
atctcttcgagtgcttgaagtcgaaaattaaatcatatgaaactcgtagaaaaaatgtcagtgacagagagggcatacaaatttttgaacaactctggtgatggtttttcgacggagaagctaaattttttttcagagtttcaaaaatggcaaggatagtncaaaggaggttccttttttcattacattccctcaggttaatctccgttagatcaaaaagatgattaatccaacgggtaaaatttaaaagaggagtacaaaagatggttattaatggttgatgtccctcgaaaacacaaaaccactaaaatctgaggacatgcatttttcaaaagggattatgacaaatataccctttgtaatcattaaaaagcactttctattaaaaataacgttttaaggggcaattgttatacccaaaatttggctaacacttcaaaggatgacacgtgtcaaactgggaagaatacgaatcaacaaatgctatgacaattatatttgaaaatggaattgttaatgcagattttcattaacaaaatttgagcgtcacaatgataattcaacacaaaaacaataaaagctatcgaaaaataaaatatgaacaccgagtttttttacgtagttttgtagttaaaattctgcatagtccacgagtcaatcgtattcagacttttgagtatttttt

SEQ ID NO: 154716 - DNA, 591 bp, Cannabis sativa
gagcctattttcgtaatagatttggcacagaattataagaaatttgagaaaattaatagaaacaaaaacaacaccaggtttttatttatgtgattttacaatcaattaattaactctgtctgcatgcatatagtccacaagtctatcttatttagatatttctgggtacagaattagtgttttacaatcagtaagcttcttttttctcaaaggtttttcgtcgcctctttctgtataatctgcccctatttatagtaatataggtaggcaattaattacatttaaattcgaatcccataacaatatttcccaaaattgtaggctttaattacgttctatttaaatacgtgtagatatcattagacaatcacacagctgtgatttaaaccatctttaaggcggtcaacactgacatggataggggctcccttccaaaggtacctcggtggtggtatctcgccttgtacatgaatagcttggtttatgcataagccttccagcaatcgcatgagcaccagtgtactgagcaaacttaagaactgctttttgaaaggacttgcagactggaaaatcatgtcctccaagttctcg

SEQ ID NO: 154717 - DNA, 700 bp, Cannabis sativa
ccacttgatatctcctgaacttatcctccaactcatttattcgaaattggatgggatcctcttgctttggaccaagctgttggaaaatatcaggtttcttttgattcaagtgctctcgcaaatctgattgggagtaattgctgatagacctcatcttactcatagatcgcttcctactcatagacttcgtcctactcatggacttcgtctttgagtgattcgcgaatttactggttcccatactttcttgatcattagctcgttgagtactttatcctcttctagttgatcgactgtgggtccttgactgcctcaaggttacacttgcttcttcatgctctgttctttccccctgagtgtggtttgtcgtatttccctcattagggtctgtacgagtcctcactctatggattcgggaataatgctggtgatttctcgtaggtgatgtacgttcttcaggttgagtcccaagatcctcctcattgtcatgagaaatttctcgttcatcagtttccggttacctctcatcctcgttttggtgagagggttctggctaatcattctaattttcagggggtatctcattttacctgggttgtgttgggaatattttaacaggatctagatttattaacaagtatgttgattaacatcctaaatattaattttctaaaataatgaaataaacacataacggttt

SEQ ID NO: 154718 - DNA, 748 bp, Cannabis sativa
tcttacctgatgtcccacaatagtagagattccaaatctccgggtgctcctgaccaggtgccggtaatcctagtcacaataccgagattttacacagcaatggttaacccctgatttcacattcataaaatattcacatggcatataaaattcagataatcacatagagctcggaaggagctttccaatgctataaagaacgttccaaacggagtctcgagtcaaaagttatggaaaaaacaaaactcataaaaattaataaactgccattaccatggtcgcgacaagacctatgatagtcgcgaccattgggtttaaaaacccagaaaactctcagctacaaaaattatgcccaaaacatattcaaacccaaaccaaaacttagaaccatcacataggctttcaatcattaaaaaaagagtctaaaacaccattttatgcattaaacattaataaaaactctgaaaattcaaattgcacaaaatcaaaatcatgctcaacacacaactcttcaagctcaaagacttgagctttaaatccttcaaccccaaacattttccagcagcataacacccaataaaacatgaattctacccacttaaattccttgaaatcactaccaaaacccaacaaaaacaatccaacaacaaagccaagcaatcacactcaaactctattaagattaacactcatgcaaccaagaacatcaacatacaacataagttcaactacaattaatttcatgctt

SEQ ID NO: 154719 - DNA, 977 bp, Cannabis sativa
tctatgggattagaggtacctttgtattttagggatttggataattggaatcccttgggaagctgagcttgtcgcacttccgtagtaaaaggagaggtccgatgcatcttgtatatgggctttctctgctgctcgagtattttcaaagcttacaaaagcatgctttgatcaatactcccagctatgggagctgggactactacaactgcaggggttgtggctactgcggcgaggtttgctgggacattaaccccggtagtcgttgttggtgcgttaggcgggtttgtgcgagtgtatacaccttgattgcccatttggggataacggggcgtttcctcgtcacgaggggcgtgggagcgtgctctgaaaatagcgttaaggtgatcacacagatcacccctatgaacctgatatcgtccccctactgcgtctccacagaaccggacctcgtatacctgctaggtgtgcgaccatgcgaggacgaggaggcagattctatgtcgttgtctcgtgaaggcctgctgcgagggttgcgtcgttcggggtcttcatgtatctgcatctcctggttgggatacctcatagattggtctcttgaggttggctgattcaggtccaaaccttcgaggttggtccttcgttccctgcaaacacggttattacgacgcctagaattcgttacctgagggttttctatgcgagtagtgggggctcgagggggcgtcgggccctgttctgtccatccacctcggcctgcagggcgagtaattggtcatggatcgcagtatactggtcagtggtgagctggatgattccctgagatactactgccggagtgatgggtggaaagttccccgttgttgacgctggcgtggatgtttctcggacttgggggccagcagtttcagggaatagattgagaggtctgacattacctctccctactctgccattaatgacatccacaggtggcattc

SEQ ID NO: 154720 - DNA, 767 bp, Cannabis sativa
aaaatcgtttgtcttatttacaaacacttctcttcttcttcttctccaatctcaaatgcctcaactgtgactcacttgaattctgtagaaatgtgtatgtgattctgagatgtatcaaaagctaaagatataatgatgtcatttccaagtgaatcccaactccatttggtcatttcgttgtttaatggattgcaaatgtagattgttaggtcttgagtagggaagcaactcctacaacaaatgagaccctgacacgatgacaaaaccacaacatcctcacggagaaaatcaaatattatctgtttgaattgaaagccttcttcgtcaatagaaatgtacgtcacaattttgatatctttgttgagccacaggaacttttcttggaagatgaattctgaaatagagagttttgtcctttgtaattgagaatggataaaagattgatcagatatcacgttgttccaagttttagatacacatttcaattgaaacaatgtctttgtaggtaataggtatagcacttcgatgaatacatcattattcaagcaccatatctttctcatttcctgaaacacaaaataagatttcatcattaattaaatgtataacatgtgtcactatactaaacaagtaaaagaccataattgaaactctttaacaataaaatttgctatacaccatacaatcaactattgccataccacaaaaactactatgcaccattcttaataatataaattacgttgcaatataacttgctatgcagt

SEQ ID NO: 154721 - DNA, 769 bp, Cannabis sativa
aaagttcaagggacataatttagtatatgtcaaagttcaggaggcaaaaatcctaattagtcttttatatatatatatataggagaaatctaatgtactctcttttatctttacctcatagcatagggaagttaaatgcaccattaacaataaagaaaaaatattgtatatttgatattggtgcactcttttacagctgattatttcttaaaaaaaaaaaaaactgctttatcaaatacagcggcatgatgttgggtttgaggttgagctttttaaaaatttcataagttaattgtaagttattagtgactataaattatttataagttttaaaaaattatataaatatataatatatttattttttatgaattaagcgtttatatattataatgcataatttgagactcgaactcaagacctccaacacacacgcattctcctatgcccacttgagctagcctcaagtgatttaaatatataatatttcaataacaataatatatatcatgaaaaattaagataataattattaaagatctaaaaacacaaaaatataccaatactaagtgtcgaattacatattttaaattagaaatgcatttttttaaaaaaataataatatttttacctataaatttatgacactactaaataatgtctcccatgataacggagtgttgttgtgttcatttaatccaatccgcactattttgctcatagattcgtactaagtgtgaatttcatattttgggtccaatctaatttg

SEQ ID NO: 154722 - DNA, 546 bp, Cannabis sativa
  modified_base (499)..(518): a, c, t, g, unknown or other
cctaatggtggctactattagtaagacttacaaaagtatgaaacaatggtggaggctcatgaaataggattgaccttcactctcgcctaaacaggacaacgtcagattttcatttctatcgaataaaatgttgctagaatgtttgtcattttagatgagttgattactctattcaatggatgatatctttgactctcgcctgaatgggacactgtatcagtttgttgaaaaccttggaaaatattaaatatgtttcatttttgtatttttataaacatattagatatacttgttattttctgaacatgtgtatgaatttatagaaccaaataatttatatctgtttattgatatttgtagtgtcaaaatggacaacccataccccgaccctctcctagtaaatgcctttggaaacaaactctatagtgtgaaaatgctttctggaaagagtaataattcacacttgttgatgatgaatctgaagttccagaaagcaaannnnnnnnnnnnnnnnnnnnctagagaacaatgggttcaattcattct

SEQ ID NO: 154723 - DNA, 508 bp, Cannabis sativa
gctcaagttatgggcttagccatgtatggcagaggtatttggaaatgtacataattttttttttttgatgtgaaggaaatatacataaattactatttgtattttttttttttatattttttacgttcaaaagttttttctctatatatttttaatgttataaaaacaatacaaaaataaacaaaacaaaaaatacatgaaaataataataaaaaaataacatccaaataacataaaaaaaataatatacaaataacaaaatttaacatcaaaataaaaaaagtataccataaaaatctatcataaagtagacaattataccttaaaatcagatttagaaaattgtacaaacaaacatgacaatagtagccttttatcaccattatgagtctataaataccccaataatgtaaaacaaagaggagatcggtcgaaaaagagcattgctattaggcaccagtggtgcctagcacctttgcgacatgtcgcgttgcgattggctagcgat

SEQ ID NO: 154724 - DNA, 520 bp, Cannabis sativa
tgttgtggtggtgctgggctatcactagccttctctactgtttgtgttggggttggcactggttgaactttaatctccttatctacatcaagtggttgcgtcaattcaggcccatcatatttcttaccgctcctcaaggtaattgccttgcagttttctttgggattgacttcagttgtgctaggcaaatttccttgaggacgggttacctgagttgctagttggcccatttgagtttgcaagtctttaatggaagatctagtttcagtcatgaattgtagcaataaatatgtttgcaaactagaatttccaccagaggcttgttgctgagtgtactgttggttctgtgtctgattccgatttcgttgctgatagaacccactgttccttcggttacctccttggttgaacccagagttattgttgttgttctgcgagtaatttccaatggcttttgcttcatccattggcaaatcatcccatctgcctgacactctgaaaagtgatggttgcctccaca

SEQ ID NO: 154725 - DNA, 580 bp, Cannabis sativa
gttagttagggtgttacataaacggtccaacaataacaataggcaaggcaatgggaaaaagggaaagttcgttggaaaaactgaacagactcccaggcagaatcctgccaagtttactgctttctctgtcgtgatagaagatttagaaactctttacatggctactcaatcattagctctgtacaagtagcccgcacccatgaaaaaagacataagcaagagagacatgaccaagttttgccgttttcatggggattatggccatgacaccagcgaatgcaacaatctaaagcgggaaattgaatttttgataataaagaataatccgcatgtggaaaaatatgtctaggtcaatcaaaatcaaaggggcgatattaaccaagatttactaccaccaccagtagatggatatttgcaagtcattattggaggtccgcacatagctagagattcggtcaaagcctgggaaaggtatgccagaacagtacatcatgagcaagaagaagtagtataggccgtcgaagaaaggaaaccaaaaataccacgggcaggggagcccaccataacatttagtgatgaa

SEQ ID NO: 154726 - DNA, 648 bp, Cannabis sativa
ttcaaatattcaccattattaattttatttttttaactgatgcaatccaaacattttttttacactctacaattgtattaatcacaaaacaattacaactcaactatacaatccaattaattacaagagatatataaagcctccaccaaatttattaattaccatttcaatccaaattttactccaacaataaatacgaaatttatctaataataaaagtttgagtgcttatactgtccactcccaataataaatgttatacattataatattaatttttcttatatatgatggtgtgtgcctgagaattgctaaaaggtaccattgatgcctagtgccttactcggtgtcatactattatttgtataattaagtattgagtctcatataacttaaaaaaatagattttaaggtgtcatacctctcgagacacccttgatctatttgggccgaggtgatcatcttcctatattttggctgaagtgatcaccttggcataacactccccttactcatgttagttttctcacctcccctgtttgtctttacagatgtatttttgtgactattggagcgatgacaaccatataaacgaagaaatctagctctcatttttccttggcgttggccttgagtaacacttctttt

SEQ ID NO: 154727 - DNA, 602 bp, Cannabis sativa
ggttcgggtcctattggctgaacctttcaacagtcgccgtcgccgactggtgaatggacacgggacgccgaactgagccgagaagagcggtggaaggaggatttagcgggtcgtgatcgttgatttctcaatcacttccattcttactgtcgaggtcattgactttgaataagaagtatagagtatgtggccttcgtgaggcctttgttctgttcgattttgtggacgaaagcattgaagacctcaagcttttgttgaatcgttgtgtgattgctccattgtatatgaaaacagaagaagggaggagattcattgatattgcttttgcttttgggctaagtaggcagatgttaaaggaatttctggccatgatacggtctcaaaataaaaatcttttatcaaaaaattataattgttttatgaaaaaggatataaatataaaaggaatttttttaaaaatatactaaaatacaaaataattacaaaaataacttaacaaatctcaattataataataccttaccaagtcattaaaaaataccttaattctaaaataatatgcctgaaataaaactaatcccgaatatatatatatatatata

SEQ ID NO: 154728 - DNA, 591 bp, Cannabis sativa
atagctaggtgattatattttggtgaacaattcttaaaactgacgttgacatgaattaaattacaattatcatttcaagtgtcaactatgaagaaaactaaatctttctcatttcttatagtatatgtattcataccatagataaatttattattttgtatatattaagatgtttacaaggtccctctagctcactccttatatcccgacactacaagaatgattagttttacaggcgctttacaattgatgcgcctgcaaaagattagcaataaaggcgccataaattgaaaaagcgttcataaaagtagtcatacttttgtgggggctttcaactggtctttaaaagtttcaaaaacagacacttttaaagcgtctataaacgtgtaaactcttttacggacgggctttttgataaaaatgaaattagcctagtccagttattcttttattctattttcatcttaattcaattttgattacaatggagataaccctagccttcgacgttgttgtcgctgccgccgcaatgccgctactctctgtcgacgtcgccgttgttgttggttctagttcttcgccgttgtggag

SEQ ID NO: 154729 - DNA, 567 bp, Cannabis sativa
  modified_base (69)..(72): a, c, t, g, unknown or other
gtatcactttataagggacaaagtgacacaaggtgagatacaagtggaaaaagttcctactgaggagannnnagcagatatgggaactaaggtggtaactcacaacaagttcaaccattgtatgaacctgttggcagttgacaatggatggtaaatggaaacttaatcaatcaatgaccctcaaagacaacaacaaataaatacagcaaaggcaaatacatttttagacagttagtatggaaatttaggtggaaattgttggataaatctccatactaattgtcacatggaaaatacattaaacaagttacaaggaaaaataaagtaagattttttacaagcctcaacagaccatttcaactctcggagtttcataggcttacatcttttagctctttactatacaagaaataaataacaacttctcaagattccaacaaactttcagcaacacaagggaaaatcaataacagttttctgaccgttttctcagctcaaaagacaacacgtcacagtcaacaacaacactataaataaaggggtcaacctgcccatttcgtgtggcat

SEQ ID NO: 154730 - DNA, 617 bp, Cannabis sativa
  modified_base (28)..(28): a, c, t, g, unknown or other
  modified_base (577)..(592): a, c, t, g, unknown or other
aaacctcagtcaacattttggtgctttnattgagagctgaaggaagcgtcttcaaatagacaacaaccttataagctaaaacaacaatgatggaaactcgcaatacacgttagccccgtcctcctcaagatgctcaaaaccctgaagatgaggaagtggcttcaagagtcaacgtggattctgaggaacacgaggaggccaatgatgacgagtacgaggaaaactttgacgagtacaacgcctacgatgaaggcagttacacagagctactactcttaaggcaaaaggctgctcatcatgaagttgagatcgcagcctaaaaagaacaaaacaaaaagatgcaagaggtgatggtcaccatgtagaaagccatggagacagcagggatccatatgcaccctaaagccatccttgcaggactcgaagaaacaccggaagagtcctcaccaagcactcagaagcataagtccagggaacctagccccatacggtatccctctgaaggaaaccaacggaaaaaccctacttctatcccgggaaaaaagaaaaagatgcaggatccgcgaaaggtccgctnnnnnnnnnnnnnnnngaaaggtccgcagaggggcaaactc

SEQ ID NO: 154731 - DNA, 701 bp, Cannabis sativa
  modified_base (288)..(289): a, c, t, g, unknown or other
tagcattacccgtaatggtttatacctgaagaaattgggaggagaacttctcccattcttttctcctaattttatgtctttcccttagagtattccaaccattaaaaaaagtaaacaaatgaaaaggagtcattaccatacctatcactcccaatcctgattagtaaacatgccatgaaatgtgcatgggtcggggaatgggaatggggattgaaaacgggaatgtgttggggaatgggaatgggaatcagaatagaaataggaaatggaatgggaatgggaatgggnntgggaatgggaataggaatgggaaagcgaatgcgaatgcgaatgtgaatgtgaatgggaatgggaatgggaatgtgaattggctagggaatgggaatgggaatgaaaatggccagggaatgggaatgggccggggaatggggatgggtatgggaatggggatggggataggaatgggaatgggccagggaatgggtatgggaatgggaattataatttgaattgggatgggaatgggaaatggaatgggaatataaatgggaattggccttggaatgggaatgggaatgggaatgcgatgggaatgggaatggcaataggaatggggatggggatgggaatgggaaagggaaagaaaataggaatgggaattggaatgggaatgggagtgggaatgggtcggggaatgggaa

SEQ ID NO: 154732 - DNA, 503 bp, Cannabis sativa
ttcttcaatttagttaatgtgattattagtttttcttccctatattgtgtgatttgttcttatttgttttaattacatattttagactgaccatcttgaatgtgacttatgttcctaatatgaaatttgagaagtgaatattaggaatgctctaataggaaaaacataagttttgatgtaaaacgagagtatttacatagcttatgtgatttttagattctgaatttaatgcaagttatatgttaatttacttcagagatgtaagtagataatgtatgatttaggaccttaatgatttgagaagagttagggttaatttgatagtttgtcatcaccaaaagggagataattaataattattattaacaattgagaaactgaactaacataattcatattcctagatattcatccataattaattacactttttattattattttcctgctttttaatttttagttatttaattattcaaccttattattgattctaccaaata

SEQ ID NO: 154733 - DNA, 677 bp, Cannabis sativa
gtcggatttcgataataaggtaaaaatctaaactttaatagtatatatttatgtattttatattttattgaatgtgtattgtatgtatacatatttttgtaattgtatagatatatattgtatgtatatgtatatgtattgtattgtatatgtatgtatgtatacaaatattataattatattgtatcttttttatgtattgaagtgtatatattgaatattttaaacaaatagttttgttaaatattgtgaatgagattatgagaatgacataggagagtattaaaataaaaagtttaaaaattaatttctaaaaattagtttagaaattaattctattttttatcattttttttttatttttaattttttcatgtgtttttattttttagttgctaataaatagtaagttacaactacttaacaagttactaatttttattcctattaatgtattcttattactcattagtaactagttagtaatatattaactagttagtaactaattactcattaattatataactaataagtagttaaataaataattcttaattttgtagtattttttacattttaggttattgtaataaggtccatttacagggatctgacttatttggtgttgatcggtttctagctagctctcaaggtacacatttactaacttttat

SEQ ID NO: 154734 - DNA, 892 bp, Cannabis sativa
atggttcaattgtcaatagttcaaataaataatttgtaacatgtaaattttataatcttcttcaatctatgtataaacctagtaacatgataggatccatccaaatcagtgtgtgcacgtgcctatatgtttgctttgggccgatatgcatatagggagcccatctaattttcataattaaaatgaactagattgctaaaataaaattaacacttttggtatattttatttaggttcacttagtattgggcttattcaatgaataacaattgtttaattaaggttaaattcctctccttttgggaattgtgtgagagttagggggccatagtagtaggtacgacatactgaagtcagccctccatcacatgaataacccaaattatgaaggctcatttgccttatttgaataactgtaataagttaattacactagtttaacctaataaaattgattagcaactgttatacccgaaattcgactacacttcagaggttgacacgtatccaatagaagaaatacgaaacaattctaaatgaaataacgataccattaaatgcatattaaataactcatttattaattaaaggttaaatagataatattcaaaactcatttggctttatagtcagtagtgagacaagaataaataactattaatctgagattaacgagagatatggatgcctcggaatatactgacaaaaaaggaacattcaaccatctgagcaaagtgagtgtatcaacataaaatgcctcacattttaaacagcgagaagatcacctcgcattataaatatagcaagcagaaaccttcccaacacttagcgtattttcttatcaagatggacatggaagataactcaaatcagagaagatgtaaccttccac

SEQ ID NO: 154735 - DNA, 832 bp, Cannabis sativa
  modified_base (27)..(28): a, c, t, g, unknown or other
actaatcagattgtaaagagttttatnnagggcataaaacccaacaacccttgtatgaaaggttccataagcagacacctccggttttcgtaggaggccctgatgttatgaaagccgagcaatggctagctgtgatcaccaggatcttgaattttatgggcatcactggaaatgatagagtggtttgtgccacttttcaatttcaagaagaagctttagtttggtgggacatggtgtccgtgattcatgacgttaccacaatgacctaggagaagttccaggaactgtttaatgccaagtactataatgaggttgtcagaagtgccaagagaaaagaattcactcatttgactcagaaagaaaatatgagtgttactgaatatacaacgcagtcttaccgttttgcaagatttgcctcgggaatagtgccaaccaatttcagtaagaaagagaagtatctagatgggttaaatgtgaagatcagacatgacttgatgattactactgacgacagaaccacctatgctgaaatggtggataaggcactgcgagctaagggggcggtgggatgcatagttgagtctcgtgagactccaattgtcagcgggactcctacccttcctacatcaggctttagtaggggaggtagtggctcggccactgaacagaaaagaaaggcacctactgcatctagtggttcaggtcagaacaagaggttcctagggaactagggtcgaggcaatcgacaaggtagctctgagactcgatacagttatccatagtgccttagttgtaaaaggcaccatctaggggagtgtaaagggcaggggtg

SEQ ID NO: 154736 - DNA, 648 bp, Cannabis sativa
accaaatcatggagtatcagatgtgttgaatcgcatagctcttggaccaacttttgacgtatggaagcattaagcttacattgtcaatggtaaatggtttcatacaaaatctagagacgatgctcgaatagttcagaatagtggtgtatgtatagttgcggagtccttacattttgctacttcaaaggataataatccagtttcaggtaccatgacatattatgtaagtggtgaatgaaatatgggagctggattatacattgttccgaatttccctctttaaatgtggatgggtaaatgttaatgttggaattaggactgataagcttggatttactttggttgatttgaataagaaaggaagcactgatgatcctttcatcatggccacccaagcagtacatgtattttgtataccacatcttgctaatggtaaatcgtttgtagtgttgtcgacaccagaaagaaagttcgtagagaatgaaaatgattatgaaaatgatgatttaatgcagaaatgcttcattgttggacaacgagtccatgaacaagtcgatgatgttgaacatgatgatgtcttggacgatagtgaattcatgagaaatgatattgaggaaggaattcgggttgactgtgattcgatccaaa

SEQ ID NO: 154737 - DNA, 538 bp, Cannabis sativa
  modified_base (57)..(61): a, c, t, g, unknown or other
  modified_base (476)..(477): a, c, t, g, unknown or other
cgccattcaatttcatagtagaaattagagtgacattataagcagatgatttataannnnntcatccaatgatatactatttaagaaaattctaaatgaagaagctaagaggaaaaaaaaataaaggataatttcgaataaaataagaatccaacaatgtttcggtaggcaagagtaaaagtcattcttattttatgatctattcattgtttcatatcgtaaaaactagtctaagttgtcatctttggatgtacaactagaagttgcatttacaaatacttatctgtcaagatctaacactattatgtttgtctaacggatgacaatcctttgggatttatcccattaaaacaacaagctaagttagaccaacaataaagattcaaaattatactacaattactaacagaaattaacatagtttaatataaattcacacacactcaccaattattaagcatttagcaagtaacaannacatgtgaaaatacaaaacaatcatatcttaaataatttccaaagtttccaacaaactgat

SEQ ID NO: 154738 - DNA, 962 bp, Cannabis sativa
actgtgcccccaagctctactccaaccaatgactccgactacctattgttggaaaagagattggagaaggtcgaagcgcaacaacttgcgattctggctgcacagatcgagatgaaggctgagttcaagagaattcagaaggagatgaagaatcttatcatggatcaaattgcgaccgtgataagtttgttacagaagcagccttcagagccgacacaatcatcgccgacacatccatcagacccaacagagccattacagacgctacatccatcaccgcccagaaatgattttgatgaggatgatgtgtatccggaagattgggaacccaatgtagatgtggctccttgtactcctacaaacgccattgtgattgctgttggtgatacagaatctcaggatgtgcaagagctaaacgggccacctcctggtgtggagttcaccagggttaggagaaaaaggaagccggttttcttgaaggactacacagagaggaagaaggaacaacgacctgggccagttgaagtggacactgtgaaaccggcagacccgcggcttaaaatttttccagaagtggatcacgtacgtgagggacaacggtcgtcctagggaggttcacactggcccagccaatcgatcctggttcgtcaagttgatggtgcagggagagtggctcgacgatgctgtaagtgattttaactgaataaatttattgtaggtttttaatttttgtgcgagttaatgcgatttcatgcgattttcattctaattttatttacgaagtttctgtgcgattactgtgcgatttgtatgcgatttttgaacatattttattcacgaattgtctgtgagatttgtgtgcgatttctatgcgattttatgcgattaaatttgatgttttttaatttatgttatgcgattgcctgcgattattgtgcacatttatgcgatatctgtctaac

SEQ ID NO: 154739 - DNA, 801 bp, Cannabis sativa
atcaagggtcaaagggtcaagcttcaagctttagctgttagctgacttcttgatagaaggtataactcaagaagaaatcccacctgatccaacgaacagggttcaggtgcaggggtgatattattattgtctgaaggctttaagtttcgctatgctctgagattccaatttgacgcttcaaataacgaggctgagtatgaagccttgattgccagcttaaagatagcagaggccttgaaagtcaaaaatctcatttgtcatagtgattcgcagctgatcgtgaaccaggtcctcggggaatacaaggccaaaggcttgaaaatggcgaagtatttagagaaagttcagaagaacttggaaatgttcgattactttaaaatcaaacaaattctgagagaacaaaactccaacgtcgataccttagcaaaattggcctcgcagaaagaccttgataaattaaatctggttccggtagaactgctaagtgagccaagtatatgtgaaactgaagacatcgagatgatagatagctctccaacatggatgacgcctattatcaactatctactcgacgggtagcttccaaatgacaaaaacgaggcacgaaaacttttgtatacagtacctcgctacacaatgatcgaaggcaaactatatagaagagggtattcaatgcctctacttcggtgtgttctttccgtagaagcaaacgaaatcattagaaaattcatgaaggtttttgtggggatcatgcgggttggcaaagtctatctaaaaaaatcattaaacaaggatattact

SEQ ID NO: 154740 - DNA, 709 bp, Cannabis sativa
gctcagttgggtgaaggggaggtgggtagagggggggtgtctgctggtgtggttatggagtcggactcgctgttgctggtggaagctgtgcaatagaagaagcggttgttgtctccggtgggacttttaatcacggactgtgttgctcttatacaatcctctcatttgtttcatatttcaattaattttgttaaacggtttaggaaccagacggctaactttttaactcgttcttctggttctattcctggctgtgtttctcgcgggggttatgtccctgctggtttggaagctactttggtagctgatttgatttaataaaagttaattttttggttaaaaaaataaaatagagggtccaattggtaacttttacaaaagggctgagatgcaaaatggccctaaatgtagaaactaagttagtaaatgtcatctttttaaaaaaaattaagaaaattgtcaaatataaaaaattagctaataaaaattataaaaatacatttatcacatattttttcttttataaaaatatatcataataaaattaagttatataatttttttagtattgcatattattatcttgtaaaaaaaaaaaaataaatatattagatcattagatatgtacagcagtatttgataaatcatattactgaaaattaatataccgtagtaataaaattatataccacaaagaaattataacaat

SEQ ID NO: 154741 - DNA, 549 bp, Cannabis sativa
gagagaacctgctatagcatgccacaaaaaattcaagactttgggaggtatcttcaaatgccaaaacttacgccaaaaaccagaattgcttggccgtggcccgactggtttttggttctacggaaggtgataagcactgttcaaagtaaagttcccattgtgatctgctgtccaagaccaacagtcgagtctagcagtagaactatgtgggatgtcaagaattacatctgcttcttggggagaaaacagatcacggactacttcagtatcccaacataacatgtttggtttaaatatggagcttacagtatgagtattaagaccaggatgaggagataagacatatttattacttgttgatggtagccaaggagaacccagaattttagtattagtaccatcaccaataacccaagtagccccaagccgaaccaagtccttagcaccccagatactacgccacacaaagcttggattatgtccaagatcggatgaaatgaaatcagaattagggaaatactttgctttgtagactctaccagcaagaga

SEQ ID NO: 154742 - DNA, 648 bp, Cannabis sativa
acaagttgtggtgatattgtggaggttctcgttcaagcgcaataaaatagtctataataatgttattttgtcttctactctcactgttcagtaagctcgtgattttttggggacgtttcacaataggtagggattgaagactgttacctatcttactaggggtgttcatcaaaccgtctgcactgcaccacactgtatacaaaatacaatttgaaatcttttgcgctgttgttgcggtttgtatttttgtcaaaccgcgtggtgcagtgcagtttacagttttgaatttaataattgtggttcaaaccacaccgcactatatattataaaactaccaatttttaaaatatgatttttattcttttttttatataagaacaaacatataatatatatgtatattactttattttttagagacaattcaatataataacttgataattattatacatgttatgatgtaaaaaaatttaataagatttttttgttttgtattgttaaagctttattagtttgatttttaaatttttattataatgtttgataatgatgatagtgtaaacagtaaaccgctcaaaccacaccacaccacaacacatttttggggtgcatgatttcattctctgagtgtggccccgtggacta

SEQ ID NO: 154743 - DNA, 696 bp, Cannabis sativa
ttagggtagagacatggtcggtcttgaggtgaggcgagccaggcgtgcgccttaggctcccacattctcagggctccaaaattgtaaaaaagaaaattaccaatatacaaataaaacattaaataataacaagggatattaacagtaaaactacttgaattttatgttttttatcatttaaccacaaaattgattttttgacagtgaaacctatcaaattcaaattctatttgctctttacacttccgtccaaaactctcagttaagtgttacggtggactgcctacgtgtacacaagagtacacgtagtaaaattttagtagtccatttaattttaattttaaatataataaaaattattttaaaatttcaaaaaaaattatttagaaaaataaaataattttttttttcttttttccttttctttttcttcttttcttttctttatatttcgtttgaaatacactaattctttctcaccccgcaaccaccaccatcacaccaccttcgtgaacaccaccaccatcacatcacctccattaacaccaccaccatcacaattattatcacagtcaccactaccatgagaacatctccaatggtagcatccttaaaagatgctagaaatctccacatcattcaaaaatataatattttattttatctctctttcacattatttttggcactcttact

SEQ ID NO: 154744 - DNA, 569 bp, Cannabis sativa
ttggtggttcccggatgcagtgaataaggtgtggtatgagcttcataaagtacttctttcttaagctcatcaacgctaggaacaaaatctcgagctttgtataacaacattccactgtttgagactaaaaagtccttaggccgatcagccattacttcatctcaaaccttaactagctcaggatcttctagttgagcttttctgattctttctaatagatcagattgaagtgtcaaattgtgcaatttcccaactacaaactcaatccctgcactaaccatctcagaggctagttgaggggctatcagaaccgtggtgcaaatttgcccgggacccttcctactcaaagcatcggccacaacattggccttccccggatgatacaaaatctcacaatcataatcttttaccaattccagccatcttctttggctcatattcaaatccttctgggtgaaaaagtactcgagactcttacggtcagtataaatctcacatttctcaccgtaaagataatgccgccatatctttagagcaaaaaccacagcagcaagctctaggtcatgagt

SEQ ID NO: 154745 - DNA, 579 bp, Cannabis sativa
  modified_base (54)..(57): a, c, t, g, unknown or other
gcataatgacttagcaaatattgtaaattgcttgatccacgtgtccttgtctgnnnngtccacgtacattgggcaaaatcaggggcaacaggaactattacaataggtattgggtaaaatatctattaatagggataataatttataacctttgatttaatctaatgactaaaattaactcttgaaaactacactataattaatatatatatttatttataaaatcttgaatatttaattatagatttaagtaacaaaactctaaacctaactccaaaccctaatttttttttttactttttatttcacatctactaaaaatttaattttaattatatatattttttaattttaaatttacaaaaaaaatatattttaattaaatttattttaaagcaataattatacttatagaaaattataacatgttcaacttataataatcaatataagcatttttaaaactatcaaaacgtcatgagttcaattctttagaagtaatattttttttttcctttttttatttatatttaatttaagattttaattaatttaataatttcaaaattttatcatatt

SEQ ID NO: 154746 - DNA, 527 bp, Cannabis sativa
tcttacttatcgtttgctttatcgggcaacgatagtgacatacgcagctcatggataacgagtggtgaggattggaaacagtcattagcattatgagtattactcctgaaactgctgataagtttcttacttatcgttttctttatcgagcaacaatagtgacatacgtagctcgtggttaacgagtggtaagggtactttatgaagtactgggattgtgtggttacgctgttgtgaaatgaattaagcgtgttattatgtgatgagctgtaattgaatatatattgttatagtgtgactgaatgaatgttatattgcttatgaaattagtcactttccttacagagcctcaatgactcacgggaagtaagagtaagtgttcataggaatgtaagattggagtggtttatgaagcactgagaatgtatggttatgtattgattaaatattcaattagtataatgatgaagatgttgactaagatgttgtggttttcttattgcgtaacatataggtaattgtataaa

SEQ ID NO: 154747 - DNA, 540 bp, Cannabis sativa
ttgaagacctcttttgaatagggtcttgagttgttgatcccttgatgaatattttgctcttaatatgcttgttgaatgcatattgttgctttagtttggtaaaaataccaatttgtcttaaaaatttattttctcttttaattttgctacaaattcaacaaatcattagtaacaaataataatcaaatatttgttaatcatcaaaataaggagacctaaaagtttgagttaacaaataagaccaaactatcaggacataaaaacattactttggacaacttggatacacaccaaactatctgtttctaacacgacattgtcccagggatgtgttgcaatccaactcaaagcttctttgatgcctatgatctcagcaatttcgggttggacacacccaacctttcccttcttgaaagcttctaccatggtagcatgatgatctcgagctacacagcccactccaaactgcccctcttgttcaaataaagccccatcaacattaactttaatcttgtttaacataggtgcaatccaacgctc

SEQ ID NO: 154748 - DNA, 517 bp, Cannabis sativa
tttaacatagtattatataaaaatatgatatatataaaatacaatacaatacgaccaaatacgacgttccaaacgaggcctataagtatagttatatatatatatatccttacatatattatatattttatatacattggattaaaatatttagatatatattattcaggggtaatcgcagtgtgagtagtgcggtttttgactatttttttaaactaatccgcacatgcgatttttctaatttctcaaaccgtacccgcactgcgaaactgaaaaattgcagaaactgcaccgcaaaaaatagtgcgatgcggtttctgcgatttggactatcattaaataattaaactatcacaaatacaataaatcttaaacaattacacttgttaaaaaaaacttcatgtttcaacaatacaataattagtaggctttgggctaggacttcacatatggatctaaataaatataaaaattagtagtttcataatatgcggtgcggtgcggtttaaactgcata

SEQ ID NO: 154749 - DNA, 533 bp, Cannabis sativa
taagatcctagtaaaataaattccaacaatactcacttttatggatgatgtccctattagatcctttaagttatgtaaattatataaagtagagtgagagggtatttaagcaatccactcaaaaaagtgggaatatgttaataaaaaaacaatatgagggtattttgattaatagatataaaaaagagatatgtttcaacttatccccacgggctcaatgactactgcggacccaacgacttctccatcaaccatggctttaccatcgacaatgctgtgaaaggaataaattgtatgcttaatgtttgttatctgtgagtagatgttagatttagggtcgaaaatggccagatctgagttttggacaaaaaattggtttttttgttaggcctgatggttgtccgatagtggtctgatgcttcctgttgttaaaatgagtaaagacgaaggtctgatggtggtccggtggtagcccgatgatatggtccgatggtggtccaatagtattttgatggtcacctgatgctactttt

SEQ ID NO: 154750 - DNA, 1000 bp, Cannabis sativa
ccatactttctcaatcattagctccttgagtactttctcctcttcgagttgatcaactatgggttctggatcgcctcgaagttacacttgcttcttcatgctttgttccttcctcccaagagtgatttgtcgtatttcccccattagggtatgtacgagtcctcgctctatttgtttgggaagaacattggtgatttctagcaggtgatctctgttctccaagttgagtcccaagatcctcctcattttcatgaggtatttctcgttcatcaatttccggttgtctcccatctggctgttcatcttgattttcagggggtgtctcatttttcctaggttgttcttcccgggccttttcctatctcctggttcatgagccgcgaggttttcctcgtggtcttctcactctaggttcaggttaattttgggtattcatcccttgtgctgccctggccaaggctgcctcacgctctaactcagcattttgacgttgcgcctcatccagatggcgtctcaggcagtgactttttgtttcataagttatttctcccaaaaatttggcacctccacgattgagctcttcatccctcgtcctgagattttgaccgttcccacactgagttctcctcgagcgtgttgtccgcgtactaggagcaatgtcgggtcaagttctctgagaatgtgtggtccgtgcactagggccacccttgggttgaaccctcctggaacaaatggtccttctggactgtgggttggtaggtcttttggagcccatgggctctttcctagaatgatgattggttttctcatgtggggtgttaacattttctggattttcagccatgaaggaggttgtttttttatttttttgaaagaagggaggttttttttttagctttttcatagaggctctcaatgaaagcaccaaactgttaacgtagattttcgttaaccaaatttgagccttacgataataatttcaaacagaaaaaataaaagc

SEQ ID NO: 154751 - DNA, 704 bp, Cannabis sativa
  modified_base (62)..(69): a, c, t, g, unknown or other
  modified_base (186)..(194): a, c, t, g, unknown or other
taagtgagtaaataaacgtaatttgttaattatggaaatttatatagcatgtgtgaatgtannnnnnnntatatgtggaataaaaatatttttcaggttcggggaccctgaagacaataagtggatataaaaacgtaatttgttaattacggagatttatttaaaatatgtggatataatatgagnnnnnnnnnaaataaaaatattttcatgttcggcgaccctagagactcgattggaggcaaaaaaatatcacaacagttttagttaaaactattgatgggattattaggataagttgattttagaaatatcggggtattttaaggtactcgaagttggccaaataccttagaaattgagatttcttagtggctaagaaataataagataactattaataatgaaatttttattgatattatattattattataaatatattaatataatattacttatatatatataagttaatgtattaacttaagtttatttatatatattaagttatcagtgaaactaaacgaacgaacgaaaccctcgttctctcctttcgacaaaaccttctcttcttatatctattttcttcgattttcaacccgaaacctagtgatctaagctccggtagtaactggatagcaaatctttgaaaagggaaagcttaaggtatggtttaatttcgttttaagtttaaaaacaat

SEQ ID NO: 154752 - DNA, 813 bp, Cannabis sativa
atgggtccttttcaaaatagctttcttttttccaagctcataatatgtacttttacactttttaaacaaagaccacaaccaaaataaataaatagatgaaagttgaacatttgtacactacacatgagcttagtggtgtcagatcgatcaattcaatcaaagttgatccatctaattataactgattgttaaatattaaatatttaattctgatcaaattaaattagatgttatttttaaatttctaattagatcagatcggatattgaatggagtatccaaaaatcttatacatttaacattcaatcgaactaattagtatttttatttaaattttaatgaggttttagattttatattgttttataagataagtaaaatatatatataaaaattaaaattaaaattaaaattttacttttttttttagattgaatagatcaaatctaatccaatacatactgaacttaaaatattaaatggatctgtttcaatctaaaaaatcctaagtctaaaatatttgacaaatattaggatatttttaacctattatttatgttatttttagagataaaatttcatataaaattattaaaaaacttaaagattaaaaaaaatactttgaatttaaaattaataaaaacaaaatttttaaacagataaaacaacattaattaataaaataaagattaaaaactaaatcaaaatttgaaaagtaaatgaaactaacctaaatgactaaaccctattgctaacccagattcaccagcccatccctctttttcttcgtttttcttcttttctttttctaca

SEQ ID NO: 154753 - DNA, 1304 bp, Cannabis sativa
aaaattagtaattagcctatataaaatatcttttagattcacaaaatatatacaaatatatatatattttacgtttttatacataaaaaaattatattgtgataatcttagaacacgaattaaccaaaacacatcactaacatgtagtctatagttaccttactacttctacgaacaagcctaatgtgagaatcaatcactattattaactttgctactcacacaatgataccactactatcttagtttttttaaagcactatattacacacacacacatacatatatgtatctttttttttttgtgtatgcactaggttgaataatattatcctgtttgtaacatgaatattaaagtttaaaatattcattttaacctaatgaacccaacccaacccaccccctatattattgtactaagtagggttgggttgtacaataaaaaaaaattgaatgctttatagcttattcaaaccgcaatcattgagtcaatgggttggcctattaaaatacctctaacccacccaacccagcccatctgcacccctagttagaaacctaggttattaggttggatgagaatgagagccatcttattccttatataggatttctcctagggttagatttaaattatatggaaatacaaaaaataaaaattggctaaaaatactcttaagtggtcggccatacaatgggccccactagttagaatgttgccattttattcaataatttatcttttctttcactaatgtcatattttttaatttcaattatttaaatgtcaaaattatttatttaataattaaaattaattataaaataaaattgtcatttaattattaattagacttaataaagtcgcttaactaataaataaaccctaaaatcacttttcttcacagttaagctcttgattagtgaaagttcataaataagatatagtctaattttagaattataattgtactcttaattatatataacgctctatatattccaatatataaatacgctatgaattatccatcgttctaatccaaatagtcaaagatcctctatagataatttacatcgtgttgacctcgcttttggctaaattgtaagcgacaagtagtataattgtgtgtgatataataaagtaagtaaagacacggcaattttatagaggtttagccccgagcagttcggtaatagccccgagcagattgcatattaaatactgaatacactaatcaagggattcggacagcttgccatatctctatgatctgatcccaaaataactcacgatgcgaaag

SEQ ID NO: 154754 - DNA, 989 bp, Cannabis sativa
ataacaattaaatgagtacaattatattttgaagcacattgttagaaaatattgattacttaccacatctttccttacgttcaccattccactccaaccacttcaatgtctggattggatttttgctgaacgttccctttgcaccatactcaattcttacaatgccaaaaaaaaaaacgttagctaccagtatttgtatttaaaagtttatctaagtacaaatataattagtacctaaaacttaggagttagtcaactttgaacaaatttcaaccaatctgtaaggtcaattttaagatgctttttagggacgtatgccaatcgttccaaatcattttcttttaatgcgggcatgataaaatcttttgtcattctgttcttgaagtctttcattaacttcccagcaaggatcagacaatcatggttgaaatcatctcgcactacaaaacccgtctagttttaagaaaaacaaacatgattagagttaacatctaaattaagcaagcacagatcaaaattctcactattaatcgcttacctgtatatctttccaaatcttaattttttagtgtagggttgacttgcttccaattttcatagtaattctatcgtctaacagcatttaactcctaaagtcgatactagcttggcatagtttttgccataataccctcctttatcattgacttagagaggaagtctttttccttggtccatcagcttagatacttcaatcatctgagtagctcctcgttgagatatcgccctaggacactctgctgttgggtctaaatctgagtctgaacttgagttagccatatctacaccattgacaaacaaaatataaagttagctataacagtttaactacttacataataaaaaagtatcacaagtaatatatatataacaaatattaactacataaacacgcattatcataagtaagcaatcacaagtaagtgttggaagttattttaccaggaact

SEQ ID NO: 154755 - DNA, 748 bp, Cannabis sativa
tattttgatgtctaattaattttcatattaaagtagagttattatatgcttttctattggaaaatttactaactttttcaattttctttcaattatactgtgacacgctaaatataacttttttactgttttttttttaattcggcagtatactgccttggttcaatttgtatatataaaaagtttacaagaattgattgatgacagctctcatgtcactttcatgtcagattttttatttatttttatttaaatttaaaatttaatttcaactcacattttttacttaagtttgaaagtgggcacaatccacccaggtgatccccattctcaagaatttatatatgtagtttatttctctctctaactctttttgtgggttggtatctcttttatatatgtacgtattctcttttacatgtgtttagtttattaatgacttatatcacttttctgataattatttttttacttaagtttgaaagtgggcacaacccacccacgtgatccccattcccaagaatttatatatgtattttatttctctctctatctctttttgtgggttaaaatttatagaaatttttttgagattggtgtttaagataaagaccatcaacaaagactttacataaaacacttctccccactcttcactaattcaaaaacttacatagctcactcatttcattcatttttttacttgggttttgagagagaaaagcaaaaagaacaatacagaggaaga

SEQ ID NO: 154756 - DNA, 677 bp, Cannabis sativa
  modified_base (34)..(37): a, c, t, g, unknown or other
gtaaaattgtaaaaaaaaacattctttgaacgtnnnnatataaatattttacaaaaaatagtgccttatataattattcttataactaattgaagccgattttgagcccagccattaatatataacatatgaacaaaatatatgcacaaccgataaagatatcaacgatggccaaaatacaaaaccaaaacaatataaaataacttaatatcatataaataaatacatacgtatatatttaaatcaaaccaacatatcttcattttaaataattcatagcacatctttaaaaaaaacgaagatcaaaccctaatttttaaagtccccaaatttcataaaccatcaaatcttcaattaattcaacaaaggtggctctgatactattaagagttagtcccacactgctaatgtgtggaaataaattgtgatatataagataaaagggctactcctcccatcgccaattggttttgggatggaacctcattcatcttatccccaaaattctaacatggtatcagagccacttgtgatccgttgtgagccaaaattgccacagatacttccgctgtctccactttaacctccatttgggacctttcggccaatgtgtgccaatttccagtgttgggtctttgacctgtttcaaaatccacaaatttcccgacatgtacacc

SEQ ID NO: 154757 - DNA, 673 bp, Cannabis sativa
  modified_base (498)..(506): a, c, t, g, unknown or other
aattgaactcttagtaattgtagaattatatttactaagttttattacagtttccattgatataatcaagtccactatgtgttggttcgtaattagttttggtcaaattactttccttatcctttggtaccattaattcactagtggaagtattattagatcccatctaaatttgtgcacaacttaacaattctagaattaacacttaaagggaaccaacattcgatccgctaagaaagttaagattccataattgtaaatcatgttcccaactatccacactattagatttccaaaataaaatttgtaagaatcatcttctctgagaaattttaatgagtaaatcaaagaaactattaacatgaacaagagttcatgattactcaatatttaggctgatctactgttgattatcgttatgaaatgaattatgtctttatgataaacaacatgttaataaagatagcttcattcatatcagtccttgtcatatataannnnnnnnntatacaacaccttcactttgatgttatactacatccataatccaaaccgagattacttgcaccgaagaatgggcatcagtgaagcaaccattgattaaagattccctaactttaatatgactattttattcatagctaagtggtcttagttatctgtacaactacaa

SEQ ID NO: 154758 - DNA, 663 bp, Cannabis sativa
agtagtcaattatatttgtatatgtgaaatttgaaaatgtacactatatatatatataaatatacatatatgatatgcttgacaacgttgaaagcacaataaattgaatttatcattacaagtaactatttagttacaacataaattttttgtgactaataaatataactttaattagtcataaaaaacaattatttgtgactaaaatgtaatatttaaatacaaattgttactaatttagttttatttattgtgactaaaaacacatttagtcacaccaaattataatttttgtgactaatacttttatttacaaattttttagtcacaacataaaaatattaatttataattagtcataaatttttacttttagtcacaagttttattgtgactaaaagtaaaaatatttgtagtgtgtatatattagtacaatttaggtataaaactaattattcattaagaaaaagttaaaactcgataaagtattttatatggccatctccaatggtaaatttaaatttagtgttaaattaataccaaaaaattactattttcaacgctaaatttttttcaatttaaatcacaacactaaaaattacaccaaattttacattatttattattttattaatatattaagaatattttaatactaaatat

SEQ ID NO: 154759 - DNA, 602 bp, Cannabis sativa
ctctctctctctctctcaccctcacgtgatccctctcttcccttctctccttcatgtggcgctagagacgggagcggcggtgatggtgatgtggtcgtagtggctctaggaacaagaaaaaggaaagggatgttcttggggttcgaacggtgagggtgttgcggtggtggttcaggcgaagagaaatgaaaagaggagaaaggcgagatgatgagcaataggggcttcgtaggaggtggagatgaggctctcgaaggttgaggctgccgcacaagaaggttcttgaatccgaaagaatttatgttttttaatttaattatttaatttgttttaaataaaaccttttgtaatatatttatttgttgtaatttatatgttacattctatatttattttctataatatgtattcattgtaatgtatatcatgtagtatgtaatttgttatgtgttgacctcgcttttggccaacaacaatgaatcttaattgtaagcaattaatgatataatataattgtaatataatgaaataaataaagacacagagtttttaaagaagttcggccctgagcagttcgataataacctactccccttgatttg

SEQ ID NO: 154760 - DNA, 510 bp, Cannabis sativa
ggaaagagtgttagcaagatgtgaggaaaccaacttggtgcttaattgggagaaatgccacttcatggttcaagagggtattgtgttgggtcacaaagtgtctagcaaggggatagaagttgacaagggaattctagaagtgcttgagaagttaccagcccctactacggtgaaaggcataagaagcttccttggacacgcgggtttctataggcgcttcattaaagacttttctaaggtgtctaaacccttgtgtagcttgctggaacataataggtcatttgagtttaccgctgaatgtaatgaagcatttttgaagttaaagacagctcttgtgacggcccccgtgattgttgcacccgattggtcattgccctttgaactcatgtgtgatgcaagtgattttaccattggaggtgttcttgggcagcggaagaataagatctttcactccatttgttacgcaagcaaaactctttttgatgcccaaattaactacaccactactga

SEQ ID NO: 154761 - DNA, 559 bp, Cannabis sativa
gtgtttgttatgtttctagagatcgttggcatattggtaaatttgatgctaaaagggatgttggtgtttttattggatattccttaaacagtagagtgtatcctgtttacaacatgagaactcaaaatgttttggaatcagctaatgtggttgttgataaattaaagctttttcagaattttccatagaagccgagatagatagctttatggattgtaatgaccgcatttttaatttagattagtaaaggcaattagcactaattattggtaattttataattacttatgaatttaattatttgtgggcaccatttttttagaaatgggaattagagttataatttttcaattctggagattttattaaactctaggtgtattatttaaattatatgtgaaatatgttatttttacaatttttgctcggcgacaacagaaaatgtgatggatggctagtttgattacatggataagtttagaaccttatttcttagtaggaaatatattgaagaaaattaaatatcgaggttgcgcggggttatggattttgaccattt

SEQ ID NO: 154762 - DNA, 596 bp, Cannabis sativa
  modified_base (72)..(75): a, c, t, g, unknown or other
caagaaacttctaacttctgtcattgttttcggtcttggccaatccctgacggattctatctttcctggatnnnncttgatcccatctttgctaacaatttgccctagaaaggagacctgagataaccaaaattcacacttcttgaacttggcataaagcttgtgttctcgaagccactacataaccatttgaagatgtaactcatgctcctcttccgattaagaatatacaaggatgccgtcgataaacacaataacaaaaatatcgaggaaatctttgaataccctattcatcagatccatgaaagctgccggagcattggttaatccaaacgacataaccgaaattcataatgtccatacctagtacggaaagccgtttgtggaattttcttcttctcggattctcaactaatgataacctgatcggagatcaatctttgagaagagcgtcttcctctgaagttgatcaaaaagatcatcgattctaggtgacacacaataccggagctccctagggtgacacacaaggctgagataaccctatgtcaagcgacccctggagttgaatttttaattctttaagctcagctgga

SEQ ID NO: 154763 - DNA, 709 bp, Cannabis sativa
ttcataattaaacataaacaactgataatttccaaattaactaagcgggctttacagctcatgtgaatgttgacccactttggcccgttgatcaaaagctactatatagtttccaaaattagttagtaggaaccattggaaacaagtattcgagggacgtcttcacttgtgtacatggcgtggcttggctctagaagctatttactaaaagggaatggctttctgatgatgtaagtttcttaactttctattgtgccccttgccaccacactttctacaagttagttttaccacaaccctttctccattacaaatagtttggtttgacttaattcttccaacattttgcttttttggttgccctactggttgcttctcaacaggcactccaactgtcatgttctttatgtcatcaggcaatttccaatcattctcatcacaaactagcataattgtgccttcatatgtactcctctaatattctattgtgtaatatagtgagcatagtgcgtacatgatttagaacaagccccaagtgcaagcctgttcttgcaagtccactacagctccagtcttaactaatcctccagggtggacattaaccgtgtaaagaccacatgtgtctattgggaatattttaccaggatctggatttactaacaagtatgttgaattaactttctaaatatgaattctataaaataatgaa

SEQ ID NO: 154764 - DNA, 562 bp, Cannabis sativa
actgatgcccgttattcgatgcaagtaatctcgattcagataattgatgtagcatgacatttaagtgaaggtgatgtatataataaagattatatatgactaggacctatacgaataaagttgtcttaatcaaacttgccgtttaatataaagatctaatttatatcatgatgatcaatagcaaataaacttaaattgtaagtaattttgaactcatgttcatattattaatttctttgatttacttgtgattgattgtataaccccatcttttcatcgaactaaactatataagtaaccttattgtgttattaaaaaaaaaacgttattgtggtgccaaattataacttgtcctaacaataattattagaactataaacttttttgttaaaaacaatgatataatagcgaagcatattattttcattccaacaatattgtaattggaatgaaaatagaaaatatgtatatacattactaaaatagaaaattatctcatatacaattttttttttctttaaatttacggtttgggttactccggtaatttttatgtgggtta

SEQ ID NO: 154765 - DNA, 506 bp, Cannabis sativa
ggtaaaataaatatccaacagtaaattatatattcacttctgggaatatgcaaactaaattaagtagtaaatgtatatatacatatcttgtaacaacactaaaattatttatttcaagaaataataaaatatgtatatatattaatttacttttggcattactaatatatgtaaaatctatatttttaaaatataatttcatgtctattcattctcttcagggaatgatatttaaatattctaaatatacaataaatttgcgatatactaaaatatgtgtatcattcccattctattcaataatcatatataattttactttgattataagtgtatcggtactacaggtacgcgaccactattattcaattccacacatgatatatagatttttcatgaactttgattatgtgtggtattttaaattatggatgtttctaatttcttctagaaatatttgaatagtaaataatgtcattgattatttaaaattattacattcactt

SEQ ID NO: 154766 - DNA, 805 bp, Cannabis sativa
gtgtatacccgaacaggatgagcttgaaaatagggccttagctttcttgttgctagaatcaggcagtaagtgagtttctctatcaatgggcatcaaccttcgacctcaatgattcttttactaatgtaatagaccggatgttttatgttgttttcctgatcagtacggcacttacagcatgctccgtgacagccgagtatatcccaagttcttctctgttcagaggtttcgatagtacaggaggttttgcgagttgtgtttttagctcttgaaaagctttttcaaattcctcagtccactcaaattgcttgtttcctcacaggatgttgaagaacagaacacacttgtctgttgattttgaaacaaatctgctaagtgcggcaatccagccagtcaaactttgaacttccttagttcttgttggcaatttcatatccaggagggcttgaatcttctctgaattgggttcaattcctcgggcgttgacaataaagcctagaaacttacctgagctaactgcaaaggagaactttaagggattgagtttcatgttatatttcctgaggactttgaagcattcgtccaggtcatatatgttccccccagccttcctggatttgacgagcatgtcatccacgtaaacttccatgtgtcatcaaatctggtctttaaacatcttatttatcaatcgttggtatgtggctccagcgtttttaagatcaaacgacatgactttatagctatacatacccatatctgttcgaaaacttgtatgttcttagtctggttgatgcattttgatttg

SEQ ID NO: 154767 - DNA, 876 bp, Cannabis sativa
  modified_base (232)..(247): a, c, t, g, unknown or other
agagtaaccaccatctcgaataggttatgagttgttgtagatataaggattctaatatacacccttatcatctaacatataggtcactttcagatatttttcttaattgtctcctaatgttccttgttcgattacatcttagatggttgccactcaatagtagcagttcggttaaattcgtacataggagtacatttaacctcttactattggttctcatggacatcttgtnnnnnnnnnnnnnnnnagtctgaaactgtaagttccttctagactaggtcatcaacatagcattttagtgttaacattaatgtaaaatacttgcttaagataaagtaatcattagagataccataaaatatttcatgaagattaggtatttcgcccaagtcattcgaatagactttgcaaattttcctatcttatcctcaaaattctgataagttatttctatccatatgaatggttagatttactatctcagtgatattctaaagttcctatcatgaccataacatagtaagctatcactagtgtcatccaaataaagatgggcttagaatttttaaaattctcccactcaaataaggtactgtgatactatgttcaagaactttattggtatcaatttctattacaatagtaacatattaattggaacaaaaataggatcaagaataagttctaataatttgctaatttgtttattatattatatccatgtctaatcaaaatatgtgtgtcttagagttactgtggcgtattgagtataatctagagttcaaactgaactacatatgtcaatagcttcatccacccctaagtgttatagagatcttgtggagttatgaatataatctagagttcaatagatat

SEQ ID NO: 154768 - DNA, 623 bp, Cannabis sativa
aattaattatgtattctaatttgtaaattataacttagagttataatacgagtacatgcaatttttattttgtatattgatactcttttaaatttgaaatcactaatattataatagtgctagatatatattattgttttccttttcattttttaattaattaataaattttattatatttgatgaatactttatttttcattattttaattaattgatgatctcattctttcttagttttgaatttaattattttttattttttatttactaataaattagaactattttacaaatgagaaattatttaatattttttcacaattatatattgtgtttattgagctaattaaagaaaataattaaattatttttattataatgttctactaattaaataattatttttaaattatttttgtcgtctctggatgcaattaggagacaagaggatgtacgcagtgatttctcccattttaaatatagtgtatgagttttctctgatttttgctcttgcagctgtacggctggggctatggcaagaacaagatccaagaatcatggaaaacctagatctgctatgaaaatttcaaagaagagaggcaagaaggcgattgatgaag

SEQ ID NO: 154769 - DNA, 610 bp, Cannabis sativa
cttattaaataataaccgaagacataggccccccttatgtcttcagtattttagaacatatgtcatcgcctcaaataactttggtagcgaattaattttaataaaaaccgaagataaactgacctaaaaactgaagagaaaggcccttcttctagttgtgtatggtcgatagtaccgtactacttgacagtatcacatcagtatggctagagcatgactagcgtaccgagtaaaagctgatattatggtaattagtactatcgtacaaatgttctagactcagcactgtgttggacacggggttagggttatgattgggggtatatgggcgtctgatcataatccgggttattgctatgttattgtttatatttttcttactgagtccgttgactcacagttgctatttccatatgtaggtaagggcaaggctaaagctgagcaaccatgagagcgagcagatggagattgtacatgtcgggacatacatgtcgggacagttaggcctagagcgtacgatctttgggacatcaggacttgttttgtatagtcgctatgcgacagacttttatatatgtacagtgaaacttttataaacacttttgtaaac

SEQ ID NO: 154770 - DNA, 572 bp, Cannabis sativa
attatctttttgttcttaactcaaaagaaaaatttagttaatttaaacattttgattacgttttttgataaagtaaacaaaataaatcaatattattctatttataaataattttactaaataatatattacaattattgatttcgattttttttcatttattgtgttacgtttttccattaaattattttgattctaaatactatgtaagaaacgtgcctttagatgtatgaatacaattccttctaataaaagaagaatgtacaagaaatatttctaaccacaaaatataagggtgagcacctataaataccatgtcaaatgttccaaaatgaaaacaacactcaaataccaaatttttataggggattttttttttttttattttatatacattatagtacttaattgtattatatgtgcaaaaaaaaaaaaatatttacaatttattatacattttattaactataaaaaatatattcttattttttatgtacaaactacatatggtaaaaataaataataaacatacatattttatttaaaaatttgtatttaaattttaataaaca

SEQ ID NO: 154771 - DNA, 760 bp, Cannabis sativa
cctaataaggcaagtcaatgccctaacctagaatccatataactctatcattgtctaataagacaatcgacaagtaggaaacctaacaataatttttgtttatagtcatgacttttgatacctaaccctttggtatcaaaatatcattgcctaataagacaacatttttatcattgtctaataagataatattttcatcattgtttaacgttgttgaaggaattttaacaacactaaaataaaatataataatattataaaggggagtttatgcgagtactcaacataaaatgacaagtattcaagttaaggacacaaaatacttaataaaaactataacacaagagagtatagtggttcaatcagatcacggtctgcttagtccactattgcaatgatttttgtctctttcaagttcacgttggatcactcttttatatacaaagcaagtgttcgttcatttacacagagattgaattcattatcaatccgtttgtacattaaattacaataattaaactaaaaaatgtaaagataataaatgaagaacagtttccagcttaattcactaaatacaacaacgtatgcgacttctattgtgtgagttggctgttcacattcttgcataagctcgcaggcttaagatgcattcgagactagtcgagccttggatgtctacgtcctattcgagtcgcttatatggacatcttgtaataagctgataaactaagacatgcgagtctgtaccggtttatcaagg

SEQ ID NO: 154772 - DNA, 590 bp, Cannabis sativa
atatatgtatataaacttacttggatcggactgagctacagtggcggtaccggagaaatcacaagaaccaggagccattcctttacgttgataatagctattaaaagcataagaagcgtgagcttggatcgtattaggaagaaaacacagtccatcggcttgtagcggaatgcaatcggctccagacccacaagcgtagtctagagccgtttgcagagccggaatgccggcgtcactcctagccacgcaccaggtcgaagccgagctgactgtgttaatactaaggagtaataaggagagaatgagaggtgatgatgatgatgatgccattgaagaagaaaaagaagagatttgtaaagagaaagaaaaagaaaaagagagagaaatgtgtaaatggagagagtgttttgttttgagatgaaaaaaaaaagtaaaagatgagagagaagaattcagagcttttgctttttgctttgaattcttttatgagtattgctaagagcatctccaaggagctcatcaaatatggtgtcacactatcaccaaatttgatgttaaaaactatcttcactccaaccacaacaccaaaa

SEQ ID NO: 154773 - DNA, 647 bp, Cannabis sativa
  modified_base (621)..(622): a, c, t, g, unknown or other
tataatctgcccctatttatagtaacttaggttagcagttaattacattcaaattcgaattccacaacaatattttcccaaaattatgggccttaattacgctccacgtaagtgaatgcagttattatttgaatatcacacaactatgatataaacagcttttaaaggatcaacgttgatgtggagtaagacacgctactaagtgtatctcgccggggcatctcgcttagtacatgaataacttggtttattcataagtcttccagcaatggtatgagcatcagtgtactgagtaaatttaagaactgctctttgaccataagaccttgcaagctggacaatcatgtcttgggggttctcaatagcaacaataaccccggcagcgagctgaagtttaccaggagtatgccttcttatagcgagatggatgtctcgctattcgttatccatgtccttcaagctattacacttagttagtataatgtatattatacgttaagtgttctgacagccaattcgtcttgtcagcgcctctctacacctaacgaggtaggtgcctcgctatgtattatagatgtcattcctgcgattatgtcctctgacgcgaaatggtttctcgtnnatacgtgaatcaatagtttgtacat

SEQ ID NO: 154774 - DNA, 530 bp, Cannabis sativa
ttaaattttttcaaattttatgttctttttttttcttttctttaacttatatgtatgttcgtggtcctgtacatgctatttacactgaataaataaatgatcgaaatacgtaaaatttacatctgttacataatttagtgaaatggtttcctaagaaaaaaattttgtttagtaaaaaaaaaaaacttacattaacataaaatgtaatagcaatagtaaaaatgtacagatattgtatattcaattaaaaataaaatagaagaatgtcaacatataatctatgacattttttttcaggagccttacttagtaaattgaagactagaacaatatataaaaagtttatagttaatttcatgtatttttttagagaagatttatttcatgtaatcatcatattatattattattgatgataatattagtggaatttaaaaatattggtaaatttttaaacttttctatagtaaaattacatttttatgtgataagaatttgagatttttttttttattaattttgacaaataa

SEQ ID NO: 154775 - DNA, 507 bp, Cannabis sativa
cccaggcgtgacaagggcaattcctgcaccagatagctgatctgtagctgacccatctacgtgtagtttccaagttggattatcttcactgttacttgaccgaggtgtttgtaccggctaagggttgctttgtggtactctttcttctttgcttgtgcattctaccacaaagtctgctaaggccttgcctttgatttccatttggggttggaaagtaatctcgtattgacccaactccaccgcctacttgagtagccatctagaggcatctagtttttgcaatatttggcataatggttggtcagtatacaccccaacaggatgagcttgaaaatagggccttaactttctcgttgctggaataaggcaataagcgagtttccctattaatgggtatcgaccttcggtctcaatgagtcttttactgatgtaatagaccgggtgttatatgttgttctcttctctgaatagcacgacactcatagcatgctctgtgatagctaagta

SEQ ID NO: 154776 - DNA, 618 bp, Cannabis sativa
ggaaaaaatttgggataatatttttcccataaatccatgttcgaacatctggttggatagggactttctagctctcgtcttttttgtagtagtctctgttgagcagccttgtctaaccaagtgttgaccttttgcatgccatgcttttagatctttgatctcctctctctatacatgtctcttcttctcttctttgtaccttccattgataagtttcaagctttttaagcttttggaaactttttaattataatgttaggctgtaattttttttggtatgttaatccacatgacagttttagaatgtataacgtgtgacctcctgattgaaaagattcaattatagccttcgttgtgattcttgactctttgagtcataaagaacaagaggcacatatttgagtttaaataataatacaaatttggattcaaaaataaccttagccggccttagagatcttgcttgagacctagccagtcctaggagttaatcatgggagttggctagttctatgatttcaccctataaaactagctggtttatacctaggtttagtgaccttggccagttcttggctgagtcatgggaccctagctgatccttttaaggcttgggaa

SEQ ID NO: 154777 - DNA, 705 bp, Cannabis sativa
taagggcaaggctaaggctgagcagccgtgagagcgagtagatggagattgtacatgttggggcggttaggtctggattgtatgatctttgggacatcaatgctattgttgtataatcgcttggcgacagacttttgtatatgtacagttaaacttttgtaaatatttttgtaaacgggatcccgggatttaatatgtatgttactttatgtttttaattaaataagcaaaattttaaataatcacgattttcgataaccttgttgattagcaacgagctgcacagtacgttaaaaaaatcacgttaacatgcctaaaatagttagggttttacatatgcccctcaagtaattttaaagattgaaactttgtaattacttgactaatgattcaaatttattaataattgaagttcaaaatattacatcagaaatagaagttacagaagcactctactggtagtagggtcgcaaatgttccaaattctaagggttctttgttagcgagccattaagccgagctaatttgtaagccccagttcctactactacttcgattacataaggaccctcctagtttgggttaaatactcttgcagatgtgtccctcattttgtaaatactcgccttagcaccaagtctccaacattgaagagcctcttcttcattttcttgttgaagtatcttgtcactcggtgttggtatg

SEQ ID NO: 154778 - DNA, 931 bp, Cannabis sativa
cttcgattctgattatgatgcctcaaatatgtcagtggtatgtctagttgatgttctaattcaagttttaacccttttgcactaagacgatctagaataccaataccctagttggatatgtcaacatgggcgtcgggtgaaaccctaggtgcctaggttggcttccgggttacaagttcgtgtaatttcagttatggtacaaaatactgaaatatagtgagttggattcaagttattgaagtttgaacttccatcccaaagattctgaaagccaacctgggtgtagggctagggtcccctcccaggtcgactgctatgactcgggtctactcaacttcttgacattattctttattgccacgtgtcaaataatgatgttcacatcactagaaaaagtttccaagttaacaactattgatatatatatatatatatgatttttttttatgagaaattaattttatgtactataaattatatagaggtggtagaaaaggcaaaatttaagtctatttttattttacttttgaggagtgctaattacaactttctattactacctcttagttaacctccatgctcaattataggaataatattaaaattataatgaacaccgatataaaaagaaattaaaaaaaataattttaatatatattttctcgcataaaaattaattaaaatattataataaaaagttaacacagtagtccatgtaattttttaccaacagattaactccaatcattagtccaactacaaacaactggaaactgctttctagactcttcctctctctcttcctcaacatggagaagaaccagcgttcacaccgttacccagtccgtttccacactgtgaaaccattgataagccccagatctagtgaccatggtggcttcgactcctcttccaacgacacctgtggcag

SEQ ID NO: 154779 - DNA, 744 bp, Cannabis sativa
  modified_base (42)..(54): a, c, t, g, unknown or other
  modified_base (670)..(695): a, c, t, g, unknown or other
ttttgtcatttaacaaaacacatggtccaattggtaactttnnnnnnnnnnnnngtccaaaatggtatttaccctatcttatatgaatgagggagaaaataaaaaaaaaatatattttaagatgatatatacacttttggcaactataaggtggcgtttaattagaggtaatgaaatggaatggaatggaaaagaatcaatctttatttcattcatttatttggttgtatattaaagtattggaatgtcattccaatgaaatgacctttctaccattttggtagaataactattctattttgaaatggaaagaaagatcattccaatgcatgatgagaaaaaatttaataatttttttatcaatatttttatacattttaaattttattccattgcattcatattcctattctcattgtcattcttactcctatatttttattcttcctaactaaacgccacctaagtgttagctctattggagatgctttaattaggggtgttcatcaaacctcctggaccttactatatcgcaaaaaaaaaaaaaaaatacggtttcaaattttttgcggtgcggttatggtttgaattatttctaaactgcacggtgcggtttgcggttttgaagtattaatattcggtccaaaccgcaccgcaccgcacattatannnnnnnnnnnnnnnnnnnnnnnnnnggtccaatatgtgaatgttcaacccaaatccactaattattgtattgtt

SEQ ID NO: 154780 - DNA, 501 bp, Cannabis sativa
aagaggctctaagtctggttctcatggtgtgttaagggacattgccccctctgtggcaatgactttgttctagttttgtttccttcaataaaaagacttatatagcaaaaaaaaaaaaaaaaaaaaaacttcaaaccgagtagaagtcattgcatattagttttttgttcttttcttgatgttcttgattcaattctttgatgatacccctcgactaagctctgataccatttgatgtgatcaatgcttgatcatgtacctcatacacaaaataacacaagcaattgatcaagaacaatgcaaaattcggattgaacaaaccagaagcaatttaagaaagtaaaccaataattaaataaaaccagatatgaaccaatgatcaagaaaaaaaaaattagtcaagaaaataaagagagagaatcaaacacaaccaattacgaggttcgaacaagtgatgatgaatcacttgcctactccttggccagaacagccccaatggct

SEQ ID NO: 154781 - DNA, 912 bp, Cannabis sativa
taagcgggctttacaatactctacgatagaaatgatcaagggttagaacgctaaacaaaacgagacataatctgctgtgctacacctatgtaagtattctatacttaaatgatgttattgattgtaaagaccgcttagtttaaatttggaaattaacagataattagggttaattatgaaaattatttattgatatttaaataattatttatgataatttattggaatttagaatgcattttatatgtcatatatagaaatttcatatttttgcatgttcagtgccccgcaacatggaacgcggtgtatggctcggtagaatcacatcttagtattttagtatagcgggatgatagttagacatttggaatatcgggaatagacgggattttagagtttcttaaaatacccctaagtacccttttatgatttttagtatgggaggggcgaaatggtctttttacctattagagcttttgtcttatatgggtttaattaagttcattaaatcagatttttagttaagttttatgctgaatattaagagataaatcatttccttctctcattttattaaaaaaaatcaaaaacattatttttaaagaaaaggttctctttctcttgccctctctctttcgaaaccctcttggccaggtagggttgggagttttcattgtgattcaagtgattttctactattgtttgtaatctccaagtcaaggtaagtttttttatcaacttcccttttagtttcttgatttttaaggaaatggatcatgcatgttttgtgatttttgggttgttgttcttactgctggtgttgagttatgttttcagtagttaaattatgtttatatagagtgatttgagcaggttttgataggtagtttgttggatgagcaagctttgagt

SEQ ID NO: 154782 - DNA, 699 bp, Cannabis sativa
acctgccctatcttccatagtactatattgctcggctatatcataaaatgactcgtggaaattaatcttgacgtggaatctagggtaccaactgtcaaacttatgagcaatgcggtccacgagaatggaattccaagtatgaaaattaagatgagagtcttggaaggtaactaatgtattacgctcagccctaagtacagtaggtgtaacaccctaactaaattaggcatgttagcgtgatttttaacttactgtgcagctcgttgctaatcaactaggttatcgaaaaatcgtaattaattaaaatttgcttatttaattataaacttaaaataatacatttataaaatcccgggatcctgtttacaaaatacatttacaaaattttactactcatatacaaaatatttgtcgcctagcgaccaaacaacgaaagccctaatgtcccaaagatcgtacgctccaggcctaactgccccgacatgtaaaatcttcacgtgctcgctctcacggctcctcagctttagccttgcgtttaccaacacatgaaaatagcactgtgagtcaatagattcagtaagaaaagcataaacaataacataataataacctagattatgatcggacgcccataccccagtcataatcctatccccgtgacctgcacggtgctgagtctagaacgttcgtacgatagta

SEQ ID NO: 154783 - DNA, 509 bp, Cannabis sativa
aatatcttcaagctccaagagaactacatctccatgcagctcaccgcatattgcaatacttaaaaggttcacctggtcaaggcctcttttctcatgcttcaaccactgaaccaatccatcttcaagcatttgccgatgctgactggggtgcatgcttagacactcgacgttcaatatcgggctattgtgttttcttaggcaaatctctcatctcatggacatgtaagaaacaacacactgtctctcgctcttcggctgaagcagagtatagagccatggctcaagctgcttgtgaactaacatggcttcattccattcttcacgaatttcgcattcaaaaccgacttccatccactttgttttgtgacaataatgcaaccatcgacatttcagagaaccctatttaccacgagcgcaccaaacacgtggaaatcgattgtcatctcattcgcgagaagatcaacaatggcaccatcaaaatgaatcacattgcttctaaatccaacctg

SEQ ID NO: 154784 - DNA, 631 bp, Cannabis sativa
aatatgggctaacacagcaaagaactatccaatcaacctaagttttaacaaaaccaataaaagttgatgtaagcctaaataaaaagtctaacacacttaacatatgcctaaaaaattcatatagtgtgatagattttttagttgatcatatttatataaaacaagatcgattttttagttgatcatatttatataaaacaagatccattattttttttttaaaaaaaaaaatagcatcacagcacagattataatattttagtgcatatttatatatactgtctgaatactccatatattgatatatgttttttgtttgacaattgatataggaattaatgaatatgatgtaagtttttggttgaaacagaagatcagaatgaatatgatgtacgttttagtattaccacacacaaactaattatagttttaaatttaaaactctaatttgggaataataaatacgtgtgtatacaaatatatgattatgtacgaattggttggagaaattaatagtgagtgaaaacccttttgtcctgttcatactcttgaatgttgaaaattttgaaatacataaaaaaaaagtgcttatgaaataactatatactatccttttcaaaaaaaaaaaaaa

SEQ ID NO: 154785 - DNA, 565 bp, Cannabis sativa
tgctcggtctagctcacattgtttctttgtccagtcatgcagtcatgctgtatgctgtgaaacatatttttcagttcgtctagctctgcctgcacggctgggttaacctgctcgtatttgctggatcagtcagacctctacgagtctgcaccatcgtttttgcggttgaattaaaagcaattcttgatttttctctcaatgaaagcaccaaaatattgacctcacttttagccaacaacaacgagtctgatttagtaagcgataaatgatttatggcaatcgatatataataaagcaatatgaagacacgaaaattttatagaggttcgccccgagcagttcgataatagtctaatcctcgttatttgtatttacttaagaacaaggagaaagattccttttcttatagctcttacaacaatatctctgaatatgtattcttagataatttctttagggtatagtcacgactgaactatttgcgacctttgcccagtgaacatgcatcactatttatagggctatatgcttggagaggaagtctttcccctctcgttacaataga

SEQ ID NO: 154786 - DNA, 525 bp, Cannabis sativa
aacaagagtacaacataaaaaaatgtatttaaataaaattaaaaaaaatcgtaaaaatatttaaaatccgtgaaaccgtatttttataatttttttgttattctcatgtatttgtgaaataatccctatatatattttatgaatactcattaataattattcatttttcacaccaattcttctttcatataatgtcacacatcctttttatataattcaatattacaatttctttcttaccaaataattaatggattcacaaaattcctaatatttttcacaaaccaactaccaaaatccaaatttattgtattctcaatcaatccaaaattttaaaattctccacatactaacccttacaatctaaatttttaatattctcacaaaattttcttaattctcaaaattttctcattccctcactaaattgaatttcatataaatgctacacaatacaacaccaattattttattagttatttttaaattgggtaaataccattttggaccttatattttacaaaa

SEQ ID NO: 154787 - DNA, 839 bp, Cannabis sativa
caaaacagatggtccaattgataatttttgcaaaacacatgatccaaaatgatatttgtcctataaaaataactctataatgtagaatataaaatgactctataatttttgctatttttttataaaaaaaatgctactatttttcattatgttatgaaattaatttacagttaacaaatttaaactataaaatattattaaaataattaaatattaaaaaaacatgattaaagcaaattagttccctattttaatcttttagctattttagctaaaatttaaataaaaatagagagtattttttttgagccaaaaaattaacttttattaaaccaaatcagttaccaagatagcttccaaaccaacagggacgaaaccctcacgggaaacacagccaggaatagaactagaagaacaagctaaaatattagtcgcctggttcccgaaccgtttaacaaaattaattgaaatatgaaaaacaaaagagaggattgaataaaaacaacacaatattaaaagccccaccggagacaacaaacgcttcttttgttgcacggcttgcaccagcagcaacgagtacgactccataaccacaccaacaggcacagccccctcaacccgcctttctttcacccaactgagtgcctccttcaacgccatagcttcagccaaaaacgggtcgggttgaccataagttttaaccgccagcgcatcaataaataaaccgttatgatcctgagcaattcgccccaaaccgagactattgtcatccttaaagacagcagcatcacaattaaccttaatctcaccaaaataaggtttagcccattgctcacacc

SEQ ID NO: 154788 - DNA, 796 bp, Cannabis sativa
ggggcggtatggttagacattgggaatgtcgggattagtcaggaatttagagtgttcccaaaataccctttagtgattttaaatatttttagtatgggaggggcaaaatggtcatttttccccataagcctttgtcctttagtggacttagtatttggtgattatttgatttatgttatttttatatggttggagtaagtaattaaaaatcattttgtcactcattttacaaaattggaaaaaataagaaaagaagcaaaacttcctctcaagctctctctctctttcggccccttttgagcagcaaggatttgatatttttctttgtgaattcaagcaaattttgagggaatccaagctctaggtatagctcttgcaccctctttttagtttcatgtaatttaaggaagaaaatggttgcatgcttgatgatttttatgatggtagctgttgtgtatgattgttgttattttctgaagtttagatatgtttatttgagtggattcaagctggttttgttgttagctagttggttttaaccttgtgtaaagctttgaactcaaaactttggattttaatggtaaaatggtgtttttgctactgtggttattgtttgtgtttcggtttgttttctggatgctagatatgttgttttaggttgaatttagttggttgtgatggatggttgtgctgttagccaagctttgagctttgaagctcaaacttggagctcacatggtggtttttgtttctgtgcatgctgggttgtttggttgcttttgaaatgttatttggg

SEQ ID NO: 154789 - DNA, 864 bp, Cannabis sativa
  modified_base (33)..(73): a, c, t, g, unknown or other
tttatttaatcattttagaaagttcatatttannnnnnnnnnnnnnnnnnnnnnnnnnnnnnnnnnnnnnnnngtaaaataatttccaacaatctcgaccttgagagggatcaaaaaccgaacctatactcgaactaggactgagacctaagactgggacttggatggggaacttggacccgagacccaggctttggaactggcactgagacccaagacctgaccttggacccagaccgtgaactaggaccaagaccaggacctaggatagtgtaactagactaggtttcgattttgattcagtgtctgggtttgggtttgggttcgggtcttgtttggggtctgtgtcctggtccgagtttgggttcggctctgggtccaagtctagatcccagtttgggtctaggtttaggttaggttcgagtgcaggtccaggtctcgggtagggtcagggtctcggtctggatctaggtcccgagttttgatctcggtctaggtccaggggctaggtctgagtttggttctaggtctgggtctaggtccttgtcatggtcttagtctttttcgaggatcatcgtctggcggttcttgttcaggttccaattttgggtcacgggtctaggtcagggtccaggtttgggtcgtggactgggttcgagtcctggtctaagtcccagatctaggtccctgtcacgtgtcccgatcttgttcttgttcaggtcttggttcccaagtgcaagttttgtttcgggaccgcgattggggtgcggttctaggtcccgacccaagttttgtgtcccgagtttggttcaatgtttgggtcagagttcgggtccaggtttgggtcctgagtccaggtctggg

SEQ ID NO: 154790 - DNA, 555 bp, Cannabis sativa
caggaggatttttggagtgaatttgaggaggtattagctgaacccaagtggtgttaatcaaaggtaaccctagagctctaatccttgtgtaatttggagctttgatttttgtttaagtgtgtaattttaaagtatagtggttgttagggtttgaatgaattgtagtttgatttctatgttcattttgagttgactttgagttctagttgctagtttgagggtttggtgtggtggatgcacaagtttaagtttgaaaactcaagcttggttcatccatggcatattttgattctgggtgtatttcagaattctattgctttgattatgttgtttgatgttattatcgttgctttggaaggtttgggcatattttgagcaagattcaaattgtttgggggaaacctagtgcaaacttgttaaccgatttaaggtcttgtaaaaccggttaaccggaagaggggcaggtttcctaaattgttcgattcgtcaactcgtgttagttttagagccttggttgggtgattccttgatacttagggtattttagttttagtt

SEQ ID NO: 154791 - DNA, 519 bp, Cannabis sativa
tatatttactgaattttactacagtgtccattgatatacaattctagtgatatgtcttccttacgtcggttcgtaattagttttggttaaattaccattttattcttctaattacttttttgtcctttagtaccattaatttactagtgaaagtataatttaaatctcatttaaatttgcgctcaactttccaattttagaattaacatataaaaggaaccaacattcaatccgtcaggaaagtcaggatttcgtaattatagatcatgtttcagccatccacattattagattctcgaaacagaagttgtaagaattatcttctctaaaaaactttaacgagtaaattaaagaaactaataacatgaacaggagttcatgattattcaagatataggtcgatctgctattgaccatcgttatgatatgaaataagtctttatagtaaatagtaagtttgatacagataattttatacatatcggtccttgtcatatataatctctattatatacatca

SEQ ID NO: 154792 - DNA, 593 bp, Cannabis sativa
gggtctttgtcctagtcctggtcctagtccttgtgcgattctagttccagttgcgattctgagttcgagtttgggttagagtttgggtcgtggttcgagttctgtttggcgtttgagtgctggtccgagtttgggttcaggtccggatcgggctacggctgtgggttagggtcctaggtcttggtccaagttcgggtctgagtccccggttttgatctcgatctaagtcagggtttagttccgggtctaggtcctgggttccgatcccggtctgggttcgaatataggtcttggtgcaggtctaggtttgggtctcattttgggtttgggtctaagttcgagtcccgggttcgggtttgattttgtgttcaggtctaggttcgagttcgatcctagtatggattcatgtcgaggttcttgtcatgattttggcccagggcaggtttttgttctaggtctgggtctgactttgaattcctgggtccaagccaagtcctggctcgggttcgaatctcggatttagatctaggtttgggtttcgaggcctgggtccctggtctatgtcccccatctgtgtctggttcctaggtctt

SEQ ID NO: 154793 - DNA, 546 bp, Cannabis sativa
  modified_base (102)..(105): a, c, t, g, unknown or other
ttcatatactgtgttatttgattcgggagctactcatgcatatgtatcgagtagagtgatcataaattttcataagccatgtgatatttatgcttcagggtnnnnaaccctgttaccctcgggagaccaaatagtatccacaaggtgcattcggtctttgtctttttggattgatggttgtgagttgaccgccaatctaattgagttgcaattatctgactttgacatagttcttggaatggatttcctgtctaagtatggagctacgatcgcttgtaagcggaagatggtagtgtttgagcccgaaagtagtaatcctgcagtattcgtggggaaggttcaaggggcacgcataccgagagtatcactgttgaaagctaaagacctgatgggtagtggttgtctagggttcatagttactatagtggacaccaaccaacctacgacatcagggcctgaggatacgagattggtatgcgagttccttgatgtctttccagaagatttgccgggattgccacctgttcgggaaattgaatttgttat

SEQ ID NO: 154794 - DNA, 519 bp, Cannabis sativa
tgatagtccaaaccgcataaaccacaaaaaccgcactgcaccgcactattttttacggtgcggtttttgcgggtttttagtttcgcggtgcgggtgcggtttggggatttggaaaaaccgcacatgcgggttggtttgaaaacatggtcaaaaaccgcaccacctgcaccgcgaacaaccctatcgaccaattgagttggcataaaataattattaaaaattacccaaaatatgggaaaaattttaagagtttattttttttatggcattaataaataaagctaagtggttatgggtttttttgtttttttacatttatatggatttttttatgccatatttttgtaaaaaaaaaaaagtagaaatcccatatttgtaaaacaacaataagttttgccagaaaagtcgtcggcaccagaaaagtcgcgggaaaagtcaccgaaaaaatcacggccgccggaaaagtcaccagaaagtcaacggaaaagtcaatgccgccggaaaagtcaacgtcgctgg

SEQ ID NO: 154795 - DNA, 811 bp, Cannabis sativa
  modified_base (705)..(722): a, c, t, g, unknown or other
caaaaaagttcaaagacatgattcggtacatgtcaaagttcaggagaaaaaattactaattaatcttatttttattatctccagcaaattttctttttttctttttttttttttttaattatgatgataaaattttattatattattgtttatatagagatagtatacactgttcatatttcaccgtacgacactatattttatggtatgaattttacaattttgaagtcttccagtgcaattacagtttaagaaattttaaaaatcacgtgagtggtttggtatgaaaatatagccaaaattcataatgtttgcaccacaaacaccccttataatgatacattctcttcatatttttgacatttaattaatttttaataaaaatatatattgtagtcatttaaaatattatgcaatattttaagaaatttagtataatttaatatgctaaaataaaattgtaatatatcgaataactataatttatactcttatatataaaaattaaaattaaaactatgaatgttgaaaatattaaggggtgcatttcttttttctttttttttttttttgggtagaagcactctaaaaataaataataggctaattagcaatttttctcctcgaattttgacatgtaccaaatcataccctttaaacttttttggccattaaaaatttcccctgaattattaagattgttannnnnnnnnnnnnnnnnntaattttagtaaaaaaattctgacatggatgaaagtttagggtgtatgatttagtacgtatcaaagtttgaggggcatgatttggtaga

SEQ ID NO: 154796 - DNA, 607 bp, Cannabis sativa
tcatattggagtatgcacccctaccattttagattttatttccttcttgaaattattaccaccaaattttgacaccaaatatatctaaattttcatatgcacatagcaaaatataaatttaaaatattaaattcaaaaccacatctatataatcaataatttctcaataaatttgataaactaaaatctcaccccccacattttaccataaagtgaaaataccatatcactttaaaataaaacccctttactttattttgttctctacacattatcttttaaaataatatgcactcaaaattatcattaatcttttagagatcacatgataatctctcaaaataccacttacaaattaatagaattattttatccattatttgtcctttattaacaaaattatacttaaaaatttgttaatagataacacaacattttcataagataataaaattacttcttcaattttatggttatctcctcactaagattagtccaaagtgaacaaaattacttctcatcaattttgtttcaccactttactttttaagattcaaaattgcttctccaattttataatcttttatctcattatttgaatccacaa

SEQ ID NO: 154797 - DNA, 1152 bp, Cannabis sativa
  modified_base (1105)..(1109): a, c, t, g, unknown or other
tgcatgttgtccttcctatctccattatgagatttgttgaagccttgctgcaccttgtactttttgcaaaaattttgcaattgtccagaccttccacaaaagtaacactttcgaatttccttctctctggacttcgatcttgattgagagtggtggtgtttactcttcaaatatcctttcttgggtgatcttcctttttccaaatacacttcctctttcttggattccttctccaattataattcaaaatctttcgacttgaatgcgaacatcctcaaatgcaattatgtctgtaccatacttaatgataaccttgatttcttgatatgcaattgggagcgatctcaaaaaatgatgtcatggctttcttcattagccttgtcattgatattagccaatcctacaataatcttattaaactgtcagtattatcatctaaagaaagggaagaaataattctaaaaccgcagaacatttctagaaaattaatcttactagcaattgatgactttaagtataattcttccaacttgttccatactccttaatttttctatcttctctgcgatgagttttcttcgaacactatttgacagatatatgatgatcgtgtaatacaccatctcccctatttccactttttcttctagtttatttttagccaataacttttcatctccaagaactttggagaccttctgatggactaggatccctttcaaactttctctccatagcgtaaagtccatagttccatcgaacttctctaattcgaaattgccattgatgacattaactatttcttcaagaattacagcggaaagaatcttgattctccattcttgatcgattacctagctctaatttgtggaaaaattaagactaaagtgcaaaatcaaaacaactaaaattttaatcaccaaacagttagcactgacaagattaacgaaacgcaaatagtaatcggagaatacagggattgacaaagttatctaaaatcaaaaactattaaagtagtaagacaataaaatcaacactaggatatatactggttcaagtccaatagattgatgtgatctatgactctactctagttctggaacannnnnaaatattctttattgattgagcaagaatgtaacaccctaacta

SEQ ID NO: 154798 - DNA, 618 bp, Cannabis sativa
acaggaagactgttggtctccccttaaacatcctaccacatgccttgttgggaactttaggcacaagtggtagatagatgttatcgccttcagttcgtatagggttggccgacctatcatcacattggaggctatggcatgtcaattactacaaattgtgccatcaacactcttattgtgtgcaatgcctggccgaagaagccatacattacttgggtgcaaggtattagatttgttagttggagccccatcttttcataagttgatttgaaaaggatgttggaggaggctccgttatccaccatgcataatctagcaaccatcatgttcccgatctgtgcaataatgactagagggtcattgtgtgggaagctgacctgggcagcatctccctttttaaaggagatggcaggttctccaagcttgagttgcttgaagcctctttcttcgacggctaagatgtcgcttctaggcttgtgttagagatttctggcattgcttttctcgcctgtaatatggcgtctgccaattatgaccactaagtgacctgacattggtggtggcataaggtctccattctgggcagcttatgcctgagcttggtcgttctgcacataa

SEQ ID NO: 154799 - DNA, 747 bp, Cannabis sativa
agaaaaaatttcaataaaactttaacaaaatcgtatattatataaaaacaataattattatttagttattataaactatatatctctataaaaaaaaaattattaattttatatctacaaaaatataatgagacctattttataataaatcctcacaaatagggcattttaaaaatttcccaccttaagaaaatcttatatatttaaatataattgtttcttagggatttggtacgagatgttcaaaataatttgattataaggaatattatgaaggagaatatgattgtagggaaatgtgtaaactgtgtttggctgtgtagggtaatatgtaatcatattcctgttaattaacttacactgtttggttgagtacaggaatcttatatattatttttaaaaataaaaataaaaatattttttattatatctatttaatattaattatatataaaaataaaataattattcattaaagaaatatatttattaattagtatatattaaattttattgtattttttattaattaaaattaacatttttatatattttatctctatgttatttatttttgttcgctatgtcatttatgtatactattctcataaaatttatgtatagtgaatatatatatgttattgtaaataatataaaaataattcagttaaaaaaatttgatttcacagactaaatctatgtcgtaatattttatttataataaatgataatattattagtatttaa

SEQ ID NO: 154800 - DNA, 699 bp, Cannabis sativa
ttggtttatgagaaattattgagtaattttttttaaaaaaaggttttctattaaaaaataacatttttttagctgttaaatccctaatttatttttatctataatttcctttttccaaataaaatttggattttctctacatataagttattgacgatcgatacttattttataatttatgtatatatatatatattgtgttttttaataaataaaatccagctcggtagaatttttatcaccaacaatatttgagtattttactacttttttttttaataactttttttttaacaatcaacattaattaaaaataatccgagtttaatacattataaaaaaaatatcatttattcaaggggttttttcatatatagctatatttaggtcagaatatttacttttttattatcatgacaaaataaacaaaattaggaaaattaaagcttttttttcaatctaagagttgggactatgatattatcaatgatctgtttgatgaaagggataagaaccttgtgttgtctatacaactgagtgcgaatgctacggctgataagtggtattggagtgaagaaactaatggcctatacactatgaagagtgcataccgactgctacagcaggattctggtgtgcatgttgctgttgaagatcagaatttggaaatttctccgaaagtgcagcattttctgtggc

SEQ ID NO: 154801 - DNA, 621 bp, Cannabis sativa
  modified_base (114)..(124): a, c, t, g, unknown or other
aaaaatatgaggactagaagagataaaattggactgctctctaggtcctatttataagacatagtgttatcctagtttttgcactctaacgtggcatcacatgatggtgacacnnnnnnnnnnntttgagtatctgctcggagggtatagtctgaataggatgcctcataggcatgtttgaagcaaagcgatcaacaatccgcgcagagtgatcaacactttggtgctttcattgagagctagaattaagaattgctcttcattcaaaatctaaccataagtaccatggtggtgcaggctcgtaggggcctgtttgatccagccaatccacagacggtggatcctgcattgcataacccaggaaacgcaagggttctgccagctgttaatcctgaacagccagcaaacgtgggtcacggtgtaacgacttctatagatgaaatcgcgcctggtgtgcaagatactgggaataacagtttagcacccaaccagggcattcataacacagtcgtttcgcctgttaccaacactcaaacgacctttggagatgatactgagttacaaaacctccgtgctactcttgggctcgtgtaaggtcatgcaaataccctacatcatgat

SEQ ID NO: 154802 - DNA, 610 bp, Cannabis sativa
aagcatgcgagtgaggacaaagtacgctggaaacactcgtgttagtttgtagggtcagtcttcagtccaggaagcagccagagtgatgaactcgtatataatagctataatttcgtgggtgcaagggcccaatggaagcttgaagtggggacgtcataaatggtatcagagccttgacctagctaaaaatgtgatcgacgaggatgtcggatcccataaggggggtgattgtgacagtcagtagtcctgtgatccgtaaggggaaataacaggtaagttgtgcaatcccacatcgcttggggaaaggtcaagtgtggtgattttgaggctgtgtaggtatgggactaggattgatgatttgttcgatcaacttaagggaaaaacaattttctccaagattgatctccgcttgagctatcatcagtggagaatctgagaggaggatattccaaagactacctttcgtactagttatgatcattatgaattttcggttatgtcttttggactaaccaatggtctcgcagctttcatggatctaatgaatagagtattcaagaattttctcgatatttgttgtgatattttgcacacacaagtgcacgtatcg

SEQ ID NO: 154803 - DNA, 501 bp, Cannabis sativa
aatgctgaaatgaagttccgtagccatattgccttacaagtagcctcataacacgccatatactctgcctccattgttgagagtgtctgtttaacacttttctacgaaacagctcctccagccatcataaaaatgtagcctgatatagatttcttatcatccacgcatcctgcataatcggcgtcactaaacccaactatatcaagagtgtcagctcgccgataggtcaacatatgattcttggtaccctgaagataccgcatgaccttcttagctgctttccaatggctaactccaagatcactcaagtatctacccaacacgccaacaacaaaagcaatatcaggacatgtgcatacttgagcgtacatcacgctacccacaactgacgcataagaaaccactttcatttcatctctctctttgtcattttgtggacattggccctttgagaatttatcacctttcactattggcgcctttccaggtgaacaagtatgc

SEQ ID NO: 154804 - DNA, 538 bp, Cannabis sativa
cttccccagttcaatcgcttatttcatcaatcctccaggagcacctggttttcataaaacatgttttgatgttcaaggtcaatccctaacatactcccacaattgtttcaatatccagggtcaatccctaacatatttgttgtgtttcttatccttggacagccttttcaaattgtcttttctctttgatcctgaggcttccgaatcaagttttccaatagtaccatgccccagttgtcttctgggtttcgtgacttgatgccctctgaacttattctccaactcgttcattcgcaaatggaatgaatccttttgctttgaaacgagtcattaacgaaggtcaggcttcttcaagttcagatgctctcatagatcactcttgtcgtgactgtggtcggaccttgcccttcctctcaaggtttgattcacctttttctccctataatgtatttttttaaaaaaaatactattagcagaaaaaatattaggaataattacatagaaaatataaattgacattttatttacaaaaatacct

SEQ ID NO: 154805 - DNA, 529 bp, Cannabis sativa
  modified_base (27)..(57): a, c, t, g, unknown or other
tgtttaattttcatcgttttagaagtnnnnnnnnnnnnnnnnnnnnnnnnnnnnnnntgagtagatctaagttcctagtaaaataacttccaacaagaagaacaaaccagaaagtttcagagaagctataaagtgcaagaatgctaagaagtggaattgtgctatggatgaagagacaagctctttgagtaaagagaagacttgggtgtttgttccaaaacccaagggaaagagtgttgggaaacatatgtggccctttaaacagaaagaaaaatgcactaagataaataaagagttggaggatatgagtcagatcctcaactctaatgggattggttcaaagatgtatttcatgttgagtaccataccagatacaacatatactattgttgatgttagcaagtatatggtattgactcggaagatacattcgttgattataatatggattttaaggtacttaaagaagacaacatgtgttatacttgcgtttagaaagtcacaaaaccaaatggaagggttttgtgac

SEQ ID NO: 154806 - DNA, 640 bp, Cannabis sativa
  modified_base (34)..(38): a, c, t, g, unknown or other
gttttttattacaaaaatactgtagagatgtgannnnnatgtgcaaaaggagagagtgagatacacatatggacaatataagcgagtaaggctcacacgcaagtgggacgcaagtggggggcaaagtcattggctgacgcacacataactgtagcgtcagaaatgcgacagtgactctgtcgctgccacgtggtagttttgacgaagtgagcttgagcgtgttggactgctttttctcaatacaaagttatgcaaaaataactatatagcaacacaaaaacgacttgacaacaaccaaacttaaaaaaaaattattaaacattaaaatattattttaacacaattaaaatttataaataacacagcaacaccgttaaaaaaacaactaaatgaacatataaaaaaaatagaaattctttgcaataaatataaaaaaattatgaaacacataaacaaaaaaaatatacaaattacacaaaaaaataatattttaagaaaacttaaattgattaataaaaaaatacactcaaatagacagtaatcacaagcatatctctgttatattaaatgtggctatatcatgaaaattgttggtttaacaatttatttttatttttccattaaagttaacggttaaaat

SEQ ID NO: 154807 - DNA, 552 bp, Cannabis sativa
ttggatcagatccgctctgccccgcctaatatttttctggatcgaatctgatccgacctgcttcaatttatttaaaaaaaacttaattcaagattcggatcccttgggacctaaacttggacccagacccggactgggacccagacccagacccgaactcgggacccagacccggaccctaaccctgaccctgaccctgacccgaatccggacccagactcggacctggaccctgacgcgggacccagactcgaaacccaagacccgattctggacccgtggacctgacctagacccagatcgggacccagaccaagacctggacctggacccaggaccatggaccctagaccctgaactcgggacccgggacctgggaccctggaccctagacccggacctcgacacggacacggacgcggacccgggaccgggacctagacccggactcggacccggacgcagatcgggaccaggacccgaatacccgaaatctggattcggacccagacccgaatctttacacaatctattaatacatgtcaataccaa

SEQ ID NO: 154808 - DNA, 601 bp, Cannabis sativa
  modified_base (397)..(400): a, c, t, g, unknown or other
tggccaccgataatagagccacaaagtttgggcctggggtgcgagggattggtgttgtccagggggagcaaaagagtggattggacctgggttggaagggcctgctccttgatccgtgagcaaagtgtttcccaaattctgatgtgagcctagaaatagcccaacagcatcaggataatttattgggttgttgtggaatgagaaatcttgttgcaggacttgtccccgagggtgattgactgggatcaaattggttgtggatgggttgagtgtaggagcattggggagggacactatggatgtggagttaaggagaaacggattggggagaagtccaaaagggccatggttttgacgggttgttcctcgcaagacattttcatagggaaggggtggnnnntgggtagactcatcagaggctctcatatactcagtacaggaagggtaagagtgtcctagacgaccacagtagtagcagtgatcaggtatgtcctcatatttcaactctaaccaagttggggaagctaggcctggaaacataataggaatgccacggggtaaaggtttggtaacatcaaacataatgcgaattcggagatat

SEQ ID NO: 154809 - DNA, 637 bp, Cannabis sativa
tatgatagtaatatatatatatatttatgatatatatattgacgcggtttttcatcaactgatctaagaagattgtaaaaatatacaggactgcgatgaattaattttgactaacaaaatcgcaataaataaattagacaacagaaatttatagtagttcacctccatgtcacgatggtaatggggctatgtctatttttatttttattgattggatccgacacactaaagttatgttctcaagagtatgtgcataaaaatacaactaatggtttctaggtaaaatcttaatcgagacttatgaacacaagactcacgggagactcaacattcataaatctaatccaaattggtgattgtaagattcttgggaataataaactaataaagtataaaaaaagaaatgtgcatcaatggcgtttgaggtcttggtgtcgactgagtatggtggactcaataaagaagatgaaagaataagtatggtgtccttggccaccgtcaagtaggtcttaagagaaggttcagaggaatgtaaaaaaagaaggtcaaaaagagggtccctatttcagcttcttacttctccttatataggttgtagggtttgttagtgatcccccacatgtcggggtgtctcact

SEQ ID NO: 154810 - DNA, 629 bp, Cannabis sativa
aactatattaaaattgattacttaagtacttttgccactaatttgtttagatacatagttttatcataattattttttaaattaatttactttattaattctttttataaaaaaaagataattcttattaatcaaatcgagccaattacccacaaaggggttccccttcaaaataaaaacttacaactcttttatattttttaagaacaattttatttatgataaacaacttcctgtacaagagctctgtttaatgctattatatatacaagttgtattcatacacattttttctatacataaattttagtttcgtcaaatgccataaattgcacatgctaacatattcttatttttatgacacattttaatatatatttttttatttttaaaattagatatgtattttttttattaaacatattttttttttcaataacaaaaaaaattaaaataataagagtaatttgcgacataaatacctaaatttatctctctgttgcaaaaaatatttaattttaatttttggcggtgatattacttaatttataattctaaaacttctgtaggtacccggatgttaagtaaattgccacgtgacaattcctgattgatccaagtcattaaat

SEQ ID NO: 154811 - DNA, 787 bp, Cannabis sativa
atattttattttataaaatatatttattctttataattatttattattgttaattttttataaaattatatgaaaaataataaataaaaattattttgaacacttatcatatgagataataataaataactgccacaactgctctttgtctttatttataaacggttatgttgactatacttctttttctcgtaatatgaacgtttctcttatgatgcttcattctaaagataacttttttgggtctaactgtaatatggaaaatacttctcttgtccttatgtgatgttgaaagaggcaaatgcgaggcactataatagtgtggtaataagatgaattataatggatgtattttccttagtttttcaacatactcacgagtatatggattaatgagctacaagctcttaaaaaattcattatctaccatttccaacatactgtcgttctgttgtgtactctgtgtatctcgagatagaccttttatgttgattttttttcatctcactggtctcacaaagtggcagttgcggctcgcccttatctttagaaggatgagttcaaatatttatactaattgtattattttaggcgagtttattgaactcatttattgctccataacacaagctagtttattttctagccttttaatacgtggcatcaccttattatttgctcgaagtatgggtataacaatcaccccctaaaaagtaatttttagaattaaaaagaactttttgattaacatagggtatgctcgcatttttccttttaaaagaaaatg

SEQ ID NO: 154812 - DNA, 1432 bp, Cannabis sativa
taacaggaagaatggcagcattgagcagatttatttcaaaatcaaccgataagtgtctaccattctttaatgttttacgaggcaataagaagtttgaatggacagaaaaataggagaaagctattaaacaacaaaaagataactataaagcaatgaaaaataacaaaataatgacctaattataataagaaaaagaatatcaacttttcaatatgtttttgtattacagatttttttttacttagttttgataacttaatttatctttttgtactactacattatttttttcaagaaatttattgttataacttcgtactttcaactttttttctctttttcttttggagttagtggcagttaaaatgataatttattttttaaaagttcaataaataattacattaataataaaaaaataaaatcttatgattttaaaatgggggtatataatataatgagtaatatataatttatatttcaatatctactactgcacattgtgtcaattaaaaataaaaatcttattattgtattttaataaaatgtgtcaaaaaaaaattaaatgtatgtttctaagcgacaaagcaatacacatataaccaaaaaaaattgtcaggaagaaactaaaaatatacaccataaaaaaattaacatgaataaaaaaaataactaaaacataactattgaacaaaaaatattctgaaaactacttaaaaataactaaaaaataacataaaataataaaataaatacacacatatacaataaaaaactgtgtagagtaaattagaaatacaccataaaaaatacacataaaaattgtacaaaaaaaaaaaataaacaaaaaacaaaaaaataactataaaatacctaaacaacaacataaagataactataaaataacaaaaagataactataaatcaatagaaaaataataagacatcaacctagttaaaaatatgcaaatcattcataaattaactctgaataaactacaaaatatctaaaaaaaaatactacttttattaatcgtgtaaaagagagaaagatataggaaaagtcctcttaattttttttctaagatagagaaagaatgttaaaagaaataaattaagatttatttttataaaatgtgattaattaaagaaaaataatatgaaatagtttgagtgtgaatagttgaaaaaatattaaagagggaaaaaatataataagtgtttatatttttttaaaaaaaataataaaataaaattttatgagggaaaaagtgttaaaaaaatataaatatatatatatatatataaaatttagtgtaaaaaaagatagaaagagagagagaattggaaaaaaaaaacaagataaataaaaagagaatagaaagaagaaaaaaaggttggcttacataagaaaaagaaagaaaaaaagaga

SEQ ID NO: 154813 - DNA, 768 bp, Cannabis sativa
tagtatacactggcatgtacttatagtgcttcttctgtttctttttatcctttgacagttccttagtaccgtcctttctcttcaaaccagaagcccctgagttgaaacattgctgggtttgcttcccgaacttgttttcaaaaattcatttcctttcgagcttcttccttccaaacgaatacctgagccctttcattgaactcagtgttgcttcttactagacgaacttgtaagtcatccacaactcgcccctgtggtaaatggattagtagagatccccgcctgaagggctgtaagttgtgttctgtcatccaaattcctaaccctagctgcagctgtgctaaaatgacttaagtatgccttaagtgtctcactgggctgctgctttatattggttagcgaggccgcttcgggtcgtctatccctagcaacctgaaactatttcttgaaatccctggacaactgctcccaggaagttaatgaatgatgactagacttgttaaagcagctgctcgctgctccaacaagcgaggtgcggaacaaaatacagcgtaaattgttcatcacattactcacccgcattactgttttaaagttattcaaatgtgagactgaattagtggttccgtcatatgacgagacatgcaggtttttaaatcctgaaggaaaaggagtattcgttatatctggatgatacggctcaagctcctcatctgagtcatatccagattgtctccctagttcctccacttgatatctcctgaactt

SEQ ID NO: 154814 - DNA, 627 bp, Cannabis sativa
  modified_base (427)..(434): a, c, t, g, unknown or other
tgatgttagcgcattacatccaataagcacagttgttttcgctaacaacccaatggagaaccgactaccacgatacttgcaaagatattatagcttcgcacacaagtatgtggtgggaaatattattccgatccaatcatcaaggacggtaaaatttatagatcatggagggattgaagcaattatgaagttagatcacggaatgtaaaacaggtattttacaaagcttttggttgttacaaactactagtacctactataaagatgtgcctagcaggttgttggttaaaattagttgaaggtggttattcctgttgtaccttctttataatgagagtcatatattactcttattctacatggagaaccgattacaatgtaaggaaggtatacacataacttaccacctacaactaattctaactannnnnnnntatattcgtgcttaagaacagttattaggtagtaacaacttagaacactagcaacatgaactcctctaaaaatagtttaatattaatacagctcgatgttgaaaagtatgcatatttgtttacatatagagcgttctatataattgagagtgaaattctaaatctatagtggtgcaaggagaaattaataagt

SEQ ID NO: 154815 - DNA, 604 bp, Cannabis sativa
  modified_base (418)..(419): a, c, t, g, unknown or other
aattaataaagatcagaaactgcattttatattgcatggttcacatgatgtatttcatgattgtttaatgtataaattctgttatccgaatttttgcaccctgatgtggcatcacacgatggtgacacgtggaatcaactcctggtatctgctcggaagatatagtccgaacaggatacctcatatgcgtgctcgaggtagagaaatcagtaattcgcgcagagtgacaaacacttagcgaattcagctttcgcattgtgagttatcaaggaaatcactataacttggggatcagattacagagatatggcaagctgtccaaatcccatgatcagtgtattttgtatttattatgcaatttttctgcttatatccattgtaatgagaagggaaatacttcctctccaagctcatagcnntataaatagtgatgcatattcactcggcaaaggatcgaaagattttgcttgagagatattgtctaagaatttatattcagagatattgtcgtaaaagttataagaaaaggagcctttcttcttgttcttaagtcaatacaaataacgaggattaggctattactgaactgctcggggctgaacct

SEQ ID NO: 154816 - DNA, 1322 bp, Cannabis sativa
  modified_base (461)..(469): a, c, t, g, unknown or other
  modified_base (680)..(680): a, c, t, g, unknown or other
atcgtgcaactgtgtttgttttatttttacgaaatgctttgtacaggtataggtgccccccaagtgaccgagcagacttatgactcttgatcagttataattttttgcaagtatgcccttttgtctattcggggtttcgggtttgaccaaaccttttgtacgcactggatggtaaattaacatcatgctaataactttgactcaatttgaattttcaaataaacatctttattcattcattgttcgaaaatgtgttggttaccgtagtaacttacatcaaagctattaatttgatctagtctgatcattatcttaacatgaagtaaaacaaattgcagaaatcaaaaatcgtactttagatggtggtcatccgacctgagtactttgtaattttatctaaacctttgggcgtggtccgcctagaaggccatttacttaagagtaaatgttctttttgtttnnnnnnnnntatggtcatccgacctggtacttctattgttagtattttcttaaatgttctccattccaataacttggtaccagaatgagttgcatcttttcatcatacttacccaatttgtatactcctgattcgagaacttcgactacctaatatggtccttcccagttaggtccaagtactactgcctttggtgtttagaaatactcttcttaggacnatatctcccacaaagaatttttgaaccttcacttgtttgttgaaataccgagctactttttgctgatgggccatcagttttaagtttggtgtggttcgcttctcttcgatttcatcaagtgattcagcaaggagtacgtgatttacttctttcctgtatgtgggatggtggctcgagttttacaggtagcattgcttcatatccatatgccatggaaaatggagtctgtccggttgccgttttctcagttgttcggtacgaccatagaacttcaggaagctcctctggccagttacccttagcatcctcaagtcttttctttagtgtgtccttcagtgtcttgttaactgcttcaacttgaccatttgcttggggatgcgttactggggagaaacttttgatgataccatggttcgcatagaaatcagtaaaggacttgctgtcaaactgtttgccattgtctgaaattattttgtatggcaatccgaatcggcacattatgttcttcacaacaaagtcttgaacttttttgtatgtaatggtggctagtggcttggctttcgtccacatagtgaaaaaatcgaccacaaccactgcatactgcactccacctttgcccttgggtaattgtctgatcaggtc

SEQ ID NO: 154817 - DNA, 760 bp, Cannabis sativa
  modified_base (73)..(75): a, c, t, g, unknown or other
  modified_base (132)..(152): a, c, t, g, unknown or other
caacttagtatgttagtatattggcacggtttattagacattgggaatgtcgggattggtcgggaatttagannntcccaaaatacccctttagtgctctttaagtttttttagtgtgaaggggcaaaatgnnnnnnnnnnnnnnnnnnnnntttgtcctttagtggacttaataagtgaaaaaaaaattaaatgttatttgatttttgatggctgaataaagagtttagtttgcatttattctcatttggttcaaagaaaggaatttagaaaaaattggaaaaattgcttttctctctagtctctctctctctctctcttttcagcctccttgtgcggcaaggatctttggctttttcttggtgattctagcttaattcatccaatctaagtgttcttcaagtgttggtaaggtttcgacacctttccctcttgtaatttgttgaaaatgataaaaaagatgagtgttgcatgttggtttgttgtgatacttgctgctgtgattttgttgttgtttatagaggttcaatcttgttattttgagtagattagagctagtttgatgcatgttatttgctttgattcaaacttggaagtttttagctcaaaattatagttttcaaagaaaaatgatgaagtgtgttgctgtagttattgctgctatttaaatgtgttttctggagttttattatgttgaaataggttgagctatgcatgatttagtggctgtttggaggggttagtcaaattttgagttttg

SEQ ID NO: 154818 - DNA, 781 bp, Cannabis sativa
catgagaagaatgacaaagtaggagataataatatatgcatatgcaatatatcgtttgggacaactctttaaacaaaagaacaaatcatcaacaaaaaaaaaaatcatatgacggagctatgaaacaaataaaggtacacaccatacgtaaatgtgattaatatttcataatatgcctaatatgctttatttatttatatatatatatatgtatataattaaacagagtctaattatgaattaaacaaatacaataagtttccaaaaactataacataatacatatatatatgtatatatgtgcgaaaaaaaatcaatgtgtatatatagtatgtatatatatatatatatatgtgtcaaaactatttaggatgttaaaaaaaacagagatcataacaaatcaatattaaaaacttatggtccatcaaaataaaattcaatttaataaataaacaaatgatcccttaacaatagaaaatatgatcaattaaaatagtttaatcagagaattttatttcagttaagcttgtttaaaagataaaattaaaaaaaaaaaattaccatgacaatatataatgtttaaagataaaaaaaaaactctcaaaaaaaaaaatcacaatgggtatttattttacagaaaaaataattatgaattaatagtgatatatagggtcataccaacacactataagaaaattttcacaaatgacaatgtatttattttacaagacaaaataattacaaattaaatatatatatatatatatatgtatgttgtgac

SEQ ID NO: 154819 - DNA, 504 bp, Cannabis sativa
aaaatcaccattgatgagtcaagcatgagttcaaaaactcaaagcttgctcatccataaactagctatcaaaacctgctgaatttaccttatataaccttaatataacatcagaaaacaaacccaaacacaaacaacaaccacagtagctaaatcatcatttcaccattaaaacaaaagttttgagttcaaactccaaacttacttaaaaccatctaacaaccacaaaaacctgcttaaatcttcattttaacacataactaagctttagaaatcaacaacaaacataaacaacagccacagccacaaaatcattaagcatgcaaaaatatatatttcttaaacttcaagaaaacaaagaggaggttgttcaaagattacctcaactggaattacactaagaatttttcaaaacttgctgaattgaagaacaaaatcaaaccctagcagcccctaggattttcgagagagagaaagagatcttgagagaggaaaaatgtgattt

SEQ ID NO: 154820 - DNA, 603 bp, Cannabis sativa
  modified_base (217)..(223): a, c, t, g, unknown or other
ttgtattgtaatacaattagtattattgtgaattcattgatattgagattaagatatggttattattgttatgtaatgaaaagattgattggttaagcaatgatagtgtggtgatattataaaagtgatattcaggctcacctgattaggtgaggcgatacccctggcaacgtatagatacgagcgtcagtgacatatgagtaccgagcgtaggtannnnnnnacctgattaggtgatgcgatactcctggcaacatactaggcgtaggtatggacgtcagtgacatatgagtaccgagcataggtacaggctcacttgatgaggtgatgtgatactcttggcaacgtgtagatacgggaatcagtgatatgaaaattactaggttatggcatagaatgaaaccgttgtagagtttcctcctagtgacatgtagatacagcgccaatgatatgaaaattgccaggttatggcatagaatgaaatcgttgtagagtttcttccttgcgacgagtgtatacaggatgagtgatatgaaaattgccaagttattgttaaaatatattttactaggatctagtgttactaccatgtatgttgtttaa

SEQ ID NO: 154821 - DNA, 517 bp, Cannabis sativa
tcctagactattaggtgatcaataataaccctaagatgacgatagattcactactacaaaaagtataattcccgttagtttttaagtttcatttaaagaatttacgtcggttaaaaaaaccgacgtatataccatagtcgcaaatagtttttgattagctttgtttttgaaacgacgcaaaaaacaattatctacatttacaaaccgatgcaaaatatgcacttttttattttatcttctgcgtcggtttagaaatgacgcaaaattgtttatggcattttaaaactgtcacaaaaaacttattacgtcgtttcaaaaatgccatatcgattgccaaaataattttttttacctattgtgtcgcttataaaatgaagcacaaatgtaggtgagaaaaaattgaaaattttcatgcaattttccccatctgtattatcaaattttagaataattctatataatagtaaatacataatacaaaaaaagttaaaataacatttttaaaacttatataaaa

SEQ ID NO: 154822 - DNA, 978 bp, Cannabis sativa
  modified_base (39)..(61): a, c, t, g, unknown or other
  modified_base (546)..(549): a, c, t, g, unknown or other
  modified_base (766)..(768): a, c, t, g, unknown or other
caatgagtggagtagcccattttcttatatatggctcannnnnnnnnnnnnnnnnnnnnnngggacaatgtccacaatattccccgtcaagatggtggctatgtttatgctcaccaatcttgaaccgtatcacagtggacatggtcactatctgtataggtgcggatcagatatgatcacttgcccgcaagggatatggctctaacaccatgttgagaatcattgcgttccatctcaaatccaattggtaatgagtgcagtagcccatgttcttatatatggctcacttctctaccatttattctatgtgggacaatgtccacaatagacctagatccagaaccgtaagcgaactaggacctggactccaaatcaaacgtagacccgaattgggagccggacctagatcccaaccaaaacctagactcgggacccgaacctgaacctgaactcagacccaaacatggaaacagactagggacctagaactgcaccctagtctcgatcccgaacccaaactcataaatgggacctgggacttgaacnnnnaccagaccgagacccgtgacattgatccagatcttgactcgggattcggataacggggactggaacagaccagtagtcggtgtctagatatgggactcagactaggaccagaacccagacgtagaaccaaacccgaacccagacttagacatgggacccaaaattagaacctggacaagaatcgccgaactaggaacctagaacaagactaggaccnnnaccaggacccagacccagacctataaccgaacacagacctaacctcagacccaaactcagacaggaactcgtgcatggacacagtcgtgtcccagactggaattgagattcggacctggacctaattgtgggacccgatcccaaacacagacttggacctagatagtgatctggatacgaaactggactcgaacttagacccagactggg

SEQ ID NO: 154823 - DNA, 946 bp, Cannabis sativa
ccttttatacacgaagtccagtgacaagaaagccaaagattgagaaatctaacagttggaagttgtgcaaaatatgaagagatgattcataatgactatcaaaactatacaaccgccaaaattaaaggatgcgttttttctaagaaaagatcttgacaaaaatgccctctataactattaaaaatctctttttactaaaaaagaactttttaaggggcaattgttatacctaaaattcaactggaggacacgtgtcaagataaatggaatgcgaaatagtacaatagctttttatggaataactccttaattacgtaagagttagagtatatttataacccgctgactgtaaagtcttaggcagagaataaatgtacaaattgacactaagtgtattagagagaaaccatacattgctaaatgcaaatagcgaggcaccggagaaagtgacacataccaactttaaaagtgcttagcttgcaataaagagtaaaagtcagatcgactcaaagaataagtatgcgagatgaccatctcgctatgggaggacttcctatagcttcatccaactaacaggagcgaggctcacgaccctggcgagtcaggagatttctttataaataaccgcgatcgacacaaaacatacatcgttgacctcgaaaggaagaatggcccagctccctattgggatcactataatcaagtttctgtcgagacatctccaaattcaacaattaaagaagtgtttaatacatattaattttgacccaataaaagcgggaaaatcacaaatatatgattttcaaatcataaactgcatttacatttcgtgatatgtaatcaaatcccatgattttagggataattgccgtaaacatattctggtcaattttgtaattaactgcctactatgtaattataaatagtggcaaacaagctcaaaaaa

SEQ ID NO: 154824 - DNA, 855 bp, Cannabis sativa
  modified_base (826)..(829): a, c, t, g, unknown or other
ccccttcatgatcctcctccatctagagggctggatcgtattcagcgctgggcaaagcagcatgccgagccacttgagggtcagacgcgtcagctagacgcgtagttttctttatacgagccatcattctatggttgggtacagggtttgaagaatgtccttcgctagaggaaggtggactagaacaaagacgaggattaccctcgtgtagaagttgaagtaggtcctggtcaatccgatgtccgttttcccaagactcacctgaattcatctaaaaaagacaacgcacaagatgagtggttggtcggaatatcaaacgataaacaagcaaatatgccaactaggagtacccaacaaattaaagaatgattatgtttaaataaaagtcagaactcaagaagtcaaaaattttctcgagttagggcaataaacttcacgaagcttagaataagcaagatgaaagatagatgttacgcagttcagaaacaagtgttatgactgtaaaatcgcacgaagacatgataaagaagaatcgcagaggtttctgggcctagggtttcctatacatttttctacagcatagtagaggatgcatttgatatataaatatgcaaagataagcataaaggaagcaagatacttactcgagggttagatgtctgggtgcgagcaacgtcaatccaacaagtagtttttatgcaggcgctttggaaacttagtcctaagtcatcgaaagattacaaccacattctttatgaatctatggcacttgatcttgttcatagtggttttgacaagatccattctctgcaaagagtcaatatgnnnntatccactgaaagtaagttcatctca

SEQ ID NO: 154825 - DNA, 681 bp, Cannabis sativa
ttattttttctacaagtccatcataatattataaagttatgataaacttcaggggcaaatgttatctctcaaaaagtccaaaataagtgtggatggatttttattctagatatggaggtccaacaaggaggagctcattagccaaaggaggaccacattggccaaagaggagctcattagccaaagaggagcccattagccaaaaaggagcccattagcgaaagaggagcacattagccaaagaggagctcattagacagagaggagctcattagccaaagaggagcccattagccaaagaggagcccattagccaaagaggagcgcattaggcaaagaggggctcataagccaaagaggtgctcattagccaaagaggagctcattaaccaaggaggagcacattggccaaagaagagttcattggccaatgaggagctcattggcaaaggaggagcacattggcgaaggaggagctcattggccaaagaggagcactttggccaaggaggagcattttgggcgcactaagctcccaactccgttaggtgctaagacgcaaagagctcctcatctggcaaattatctcaaggacctgatgggcacgaaccgacccaattagctcccctcaggtacccatgaccatccgggtccgctaaatacgagggacgcgtgctgtta

SEQ ID NO: 154826 - DNA, 527 bp, Cannabis sativa
gccttttcttttgtatgatattttctccccccttttttatcttgcttgccactatttataatcacatagtaggcagtttattataaagttcactataatctttacaacgtttttctcctgaaatcatggagtttgattacacatcacgtagtataaatgcagttattatttaaaaatcacacagctgtgattttcctgcttttacagggtcaaaaaattatgtgtttaaacacgtctttaattgtagcgttctgtgatgtctcgacaggaacttggttccaataaccttaatagcgagctggagcttttctcccttatctttttgaggtcgatgatatacatcttgttgcctctttgtttgaagacttaatgattcattctgattggtttgtctcgtcgagattataggtctcactgaaagatgtctgaagttaacttgtggaagctataagaatgcgccttcctatagtgagataggtacctcgcttattaggtcttgagtctacccgactgttatacttagtttg

SEQ ID NO: 154827 - DNA, 581 bp, Cannabis sativa
taaaccccagtaggaaatatcaagtaatgattcagcagaaagctcaaaatttgcagatatggaagagagagagagagagagaggagccggacctggtcgacggaggtttgagaaggtctgggtcggagtccacttccatggatgttaaagtagactcggacagtagtgactggtcaatgaagcttttaaaaacttggcgggaaatagcttcacagagagagagagagagagtgttcgcgatcgctatggccttttagagtagaagttgaaaactgtcttctctttctcctccggaaccacagtaacgtaagctccattaatattaaaattatttaaggattttttttattttttaactctaaaatagtttattttttcaattttttttttatagaaatttacataacaatccatatagcaattaacgaagaaatctgaattgcaaccaaaatttatatagcaattcatgggaggaacccaaactatcaattttttttaaaaaatatatatattaggaaaattctataatgcaccccttaaaatagatatattgatgcacctctatctgttttagcatccga

SEQ ID NO: 154828 - DNA, 962 bp, Cannabis sativa
atcaggacttggacccagacccaaccctggactcggaccagcactcagacctcgacccagacccggacccaaacccaaacctagaaacagaatcgaaatcagaactggtagtaggacccaaacccaaacatggacccagacaagaacataggacccagatctcggaacccagacccagatcggaacctgagactcagacccagacctggatctggacttcaacccgtgactagaacccagatttggacttggacaaggatcggaaacccaaaaccaaactcagactaggacttataccccgaccgggtcctagactcggaccgagacctaggacccagacctggatggaggacctggaccagagactcgggcttcggaactagcattgagacccaggacttcaccccgaaacatgaccttgaactgggacccggacgagggcctgggaccagaaggggaactagactaggacccaagactgggatcctaatctggacccagggcttggacctcgcccgtagtctatgtttggattcgggatccatacccgaactcaaacacagacccggactcaaacccaaacctggacctgtaccccatgacttgaaactggaagtggaaccgaaagcgaactgggacatgggaataagaccaggggactaggacctagactcagacctggacagggacttggacccaaatcaaaactcggattatgactcaagacacgaacaaaaaccagacatgaacttggacccagacccagacgcaggacctgaaccgagatcggagactcagactcaaacctagattgggaacccaaacccgaaattagaaccagaatcgggaccccggtctccactaatacaaaaattacaattcttgtcgatttttaagtgtcatttaaagaatttgcgtcggtttaaaaaatcgatgtatataccgtagtcgcaaatagtttt

SEQ ID NO: 154829 - DNA, 655 bp, Cannabis sativa
ccttttatagaaaatgaaagtttagctccaattttctcctcaagaaatctgatctaacaaaatgagaaactcacacaagatcaaaatataatagctggttaggtaagaaagaaatgagtaaccaaacttaccatttttaccttattttccataaataggaaagctagacaactttccttctaaaattaaattgattaatataaaagttaaatacacaaaatataaaaaccaatttaaatgctccagccaaaattaattataaataataaaagatttttgtcaattaaatatgtcaaaaatggaattaacaatctctcctttggcactttgattgacaaaacattttatttggagaaaacatacatcaagtgttagaaataaaaacaaaagagtataaaaaatactccccctacatgaaagcactctaacacagaaaataatataactttttaagcgaaaaagtttacaaaccacaaacattacaacttttttaaatggaaaagttcacaaaccacaaacaaaacaactttttaaacgcaaaagtgcacaaacgacaaacaaagcaattttttaaacggaaaagtgcacaaaccacaaacaaaacaactccccctaaaacaagagtccagagttgtaacaaacaatccaaaaaaaa

SEQ ID NO: 154830 - DNA, 984 bp, Cannabis sativa
cataaccaagaaacacacaaagagcagagcatgacgacaactttgtacgctctatgaaacacaaaacaagtagaaccaaagactcttaaagaaaaatagtcaggaatacaatcatatagtttctcaaaaggagacaaacctgaaatgatagaagacagaatcatattattaagtgaactacagttagaactgcctcctcccaaaattgctaggaataaaagatgacaacaaaagagaatgagcagtttcaacaatgtgcctaggttttctttcagccacactattttgttcaggtgtatcagtacaagaagtttgatacacaatgtcatctaaggcaagtgaattaataaatttatttgaagtatactcatcaccttgatcacatctaaaacatttaatactagcaccatgttgagttttaacataagcttaacaatgatcattaatactataaaagtcataacaatgtttcataacaaaactcaaaaaaaatgagtgtgatcatcaataaaagaaacatagtattgagaacccccttttgtaacaataggagagggtacccacacatcagagtgtattaaatcaaagggtgcaacaaaacaagttgtacttttattgaaaggtaaagcagaaaatttaagtttacatcaactacaatcagaaatatcatgaggttgcaaatttcctaaggttcctttagaagctaaaaattttaaacgagactctgaaacatgaccaaggcgagattgccacaaataaaaattagaagatgaaggagacaaatgaaaagaagacaaatcaacactaggagttgcatatactggtaatctcagttcatccaaaacatataatccctcgcctacgaccggtcccaatcagcttctgagactatggatctgcacatgacatgaagtagaagaaaaagatactgaataactagaatcacacaattgaccaacaaatacaagattcaatgaaagatta

SEQ ID NO: 154831 - DNA, 733 bp, Cannabis sativa
ttttgagtttgggtcaattactagagaaaggttatgatattcacttaaaagaaaataaccttttcttaagagatgataaaagtaatttgattgccaaagttcccatgacaaagagtagaatgtttctcttgaacattcaacatgatgtttcgaagtgtttaaaggcctgcttcaatgagtcatcatggctttggcatctacgctttggacatcttaattttggcgggcttaaactcttagagaagaaggagatggtgagaggcctttcatgtatcaaccaaccagatcaactttgtgaaggatgttttcttggaaagcaatcccgaagaagttttccaaaggagtcattatcaagagccacaaagccgcttgagctcgtacacactgaagtctgtggcccaattaaaccaaattcatttggtaagagtaaatatttcctcctctttattgatgatttttcaaaaaaagtatggacttatttcttgaaggagaaatcagaagtgttcgagaacttcaagaaattcaaagctctagttgaaaaggaaagtggtcttcctattaaggccatgagatttgaccgaggaggagagttcacatcaaatgagtttaacaaatactgtgagtatcaaggagttcgttgtccattaacagtgccaagatccccccaacaaaatggagtggcagaaaggaagaatcgaaccatactcaacatggcttgcaacatgctaaaaag

SEQ ID NO: 154832 - DNA, 671 bp, Cannabis sativa
ttattacgacatatcgtttattgcttatcaaaaagactcattgtcgttggctgaaagcgaagtcaacattttggtgctttcattgagagaatgatcgcaaatcgcacttttcaacattcaacacgatggtacaaactcgtagaggcctgtctgacccagcaaattcacagacgctggatccgacattgcaggaactagggagttcaagagttccacctgctgtcaatccatgaactgcgcctggtgtgcaagagactgggaataatagttccacacatagctagggcattcataacacgactattccgcctgcaaccaacacccagacgaccatcagagatgcaaccaaattgcaaaatctccgtgctgcgctcagactcatgcagagtcatagcaacactctgcatcatgatcaggatgaactgcgtgctgtagtgaatctcgcgtttgatgaacagaggcgtatgttcgctgaatggagagacaaagagatggaggcattaagagctcaccatgcagagatcgaagatcgtagtcggtaagctaccgtgctgatatgaaaagcctaccagactgtaagtcagcaaacaccgaacgtcattcccctgggagaaacggaggatgacccgacgatgaatacctcccaaacaaccaatggtcagccgtccaat

SEQ ID NO: 154833 - DNA, 728 bp, Cannabis sativa
  modified_base (693)..(700): a, c, t, g, unknown or other
gttccctagtatatatataaaagagtgtttgagagagtttgatgtggcaactccaatgagtttctttcctaatttttaattttttcaatttttctttcatttcaatagttaaaaatttgattatcccatttaactattaattaataactaattaaagattaaaaaatgattgatgaatatttatacatttttcctatatttttttaactaattaaaaaaactctttcacttcccatagttcattaatttccaccaaatatattttaggcttctattttgtaactcctaattatctcaatatttaaagatgaagaaaattattcattccttctaaaaaaactcccaaattttataaatctatttcactaaagtattttcctaggtttcattttctacaagaagtcaatgtgcaagacaaaaattatgatttctctatataagcaagacaataagacaatgaaagtaaggtatttttatttgttcttatttcttaatttgtacgttcattttttcctattattgatgattaatatcatgatattttattccttttttattttttttttgttttatgttggttgtattgcatatggtgtttcttagctttcttatcaatatattcttaaggttttaatttttatatttttatatttttatatttgggtgactatttaatggttacatttttattgnnnnnnnntggttacatttttctttgacctgtaata

SEQ ID NO: 154834 - DNA, 557 bp, Cannabis sativa
tagggtaagaggcaagttcaatggttctaggggtctacgacaaggagatcccctatcaccgtttctttttacattgatagctgatgttcttggaagaatggtggacaaggcaatagagacagaatctttgacggggttccagataggtaaagacgatattcggcttagtcatctacaatttgcggatgacactcttttctttgtaaaagatgaggtttctctccagaagctggttaaggttgttaaagcattctgtggaatctcgggactaaaagtaaacttgaataaaagtcagctgctaggcatctgtatgaatgaggaagcagtggcccaaagtgcgattcttattgggtgtgaggtgggtaggtggcctatgacctatttgggaatgccgcttggtggttctccaaggaagagatctttttgggagcctgttctggataaatgtgctaaaaggatggatggatggaaatgctctttcctctctagaggaggtaggctgactctcattcagtctgtcctctcctcacttccaatttactatctgtctttattca

SEQ ID NO: 154835 - DNA, 618 bp, Cannabis sativa
  modified_base (187)..(202): a, c, t, g, unknown or other
aaaaaaaaaaaaaaaaattcctagatcgcaatacatccacacattcctaagctaactaattcaacttaaaattccttgagaaattaacaacttttcttgtccttacccaaaaattaattgtgagttgattcaccttacgttaatttactttataatttgagataaagcaaaataataataataatannnnnnnnnnnnnnnntaataataataatatattttaaaataaaaataatttaaacaaacaaaatcaacacactcttaaataataatattggctgaggtcttgacttatttacgtgtctacaacattaaaataaaacttgttatattgtataaattgaataatgcacagtgaaatgaatgaaaaaaaggagatcctcacacaaacacatggatgttatgtatgtatatatatatatatgagtactgttatactcgaaattcggctactatctcaatggaggacacgtgtcaagataaagggaatatggactgatgaaatcacttttaatgctataactcattaattgcataagtagcagagcatactggcaactcgctgactataaggtcttatacgaggaaaagatatgcaaactgttgtttggtatatta

SEQ ID NO: 154836 - DNA, 513 bp, Cannabis sativa
tttgactcgggactccgtttggaacgttctttataccgttggaaagctcgttccgagatctatgtgattacctgtaatttgaatgccaattttatattgttgtgggagtggatttagggattaaccctatttgtgtaaatcccggaattgtgactaggattaccggcacctggtcaagagcacccagggatttggaatctctgctattgtgggacaacaggtaagacagcggttagcacgtaaagtatgcgcggtggcacatatgttgaaaatgatatatgtgagtaaatggtaaaagggattagggctattaccctaacatgagcgtttaatagccttgggttattaccctagtgatatgagttgtatatatgctatgccatgctatgtgtatggatatactgagattttaggattatgtgttcagggcattatcaggttggactcggtaactagaaccaagaggaaccattctaaggccttattgtacttagacgtgtgagagcaacacgt

SEQ ID NO: 154837 - DNA, 547 bp, Cannabis sativa
tcaagtcgtatatggtttatgtatatatagcaaaaaaatttatctcatttttgactcaagcacagatgcaattgtgcccacacctcgtaaatatacatatatatattctttatcactaactctaaacgtttaacaattgacagagacaaagtatatataataaatatgtctatactataactatatatatgtgcgaatgaggcttgataaaaaaaaacaaaaaaaaaatatatatagagcccatgtgcatggtcagtgaaacagggtttcatatatacccatagtcagtaaaggaaaaaaaatatatatatatatgcactcttatgtatatgtaaaaaaaaaaaaaaaaaaaaaacttactgtagtgaagaaaatagtcactattatgtgtatatatgttatgttgtatgatatataaagataaatgggtgtagataatacattgtcggttgtataattcaatttaaaataggaattgaattataaaataaatatcttagatactatctttaatttaaatttaaatttaagatagtatatgataaaa

SEQ ID NO: 154838 - DNA, 980 bp, Cannabis sativa
tggaagatgaaagcggcacatatcaatcgtgaaagtccttagcatacaatgaacaaactaagtgtaaaatttgaatcagctcaagaacaagtaagcaaggtgaccatctctttatgggaagactgcttataacttcaccccgttagcgtcagcgaggcttacaatcctggcgagccaaaagatagcatttaaatgagcctcgaagaattttttgaggataagtagcgcgatcgacaccagatatacatcgtcgacctcggaaggaagaatggccccagctcgctattgggatcactataaccaagttgctgtcgagacatctccagatataacaattaaagacgtgtttaatacacgattgtcttgacccaataaaagcgggaaaatcacagctatacgattttcaaatcataaactgcatttacactacgtgatatgtaatcaaatctcatgattttaggaataattattgtaaacatattacagtcaaatgtgtaatttactgaccactgtgtaattataaatagtggcagacaagatcaaaaaaggggacaaaaaatctcatacaagagaggccctaaaaaaataaaatcagaaatctgaataagattgactcgtggactatgcaaaattttaactgcaaaaccacgtaaaaaatcctgtgttaatatataatttttctatagcttttattttttcggtgtgaaatcattaccgtgaggctcaaatttagttaacgaaaatctgcattaacagttagttgttttgtgtatttattttcatggtgttttgttttattttattacttaaaaatattgttgctttaattatttgaaacttttagttgcattacattataatgatggtatatttaaagtgtattaaacttaaataaaaggtaatatttaatttttacgtatttttcttcatatttttatgttaatattaaaatttaggtgtgtaattggatatcaaattaa

SEQ ID NO: 154839 - DNA, 532 bp, Cannabis sativa
  modified_base (219)..(234): a, c, t, g, unknown or other
tctcttgatatgtgaaaagagttaagaagggtttgaggcatcagggggcatgatttggtacatgtcaaagtttagggggaaaaaatctcaattagcctttgatatatcatatatccgtgttatagagagcatgaataaggtcacaacatttcaggattttgttaataacaacaataaaaaaatcctattaacatataaacccaataattaaaccaaaannnnnnnnnnnnnnnntttaaattaaaaaaaaaatcatctttgccacatatctctctaacaaaccgtatatcccaaaattttgatatttatgcgattttttttgatgaattactcttttaaaaaataaatatgtttatataaatttaaatttaaactatgtataaaataatacctttttttttctaaaaacataaagctacaaactaatttcattgacaattatcaatataaaatgtaaactctatattaaaaaataccttttttttcctagaaacataaaactacagactaatttcattaacaatcatcaata

SEQ ID NO: 154840 - DNA, 824 bp, Cannabis sativa
aatatttttttgaataaaaaattataatacttaaattcaataatttctaaatatatatttgtagatagaaatatcctaagtcaagaaatgaggactatggaagaagcatgttaaagactaaaaagaataatgttatttattacacaatatctaaaaaaatatgtgttacaagaactaacaaagagattaaataaataaatgttacaatacatacatacattatatatgctatatatatgtataaaaatgtagaagaagaaatattacatattatataatatatatagtataaaatatatgaagaagaagaacatgaaaggaaacactcattcacaaccttgagtgtaaattagtagggattaccatgatttgaacaaggtacaacacctttgtttgaaaacgtatttctcctatctctaagtactaagggaactctcataaatttttttagagaattattaagcattgtattttttagcaagtgcttattgatagaaaattagtgtacacaaatgagcaccttagacctccttatatggtatttaggattcacatttgatatcacacctccacattcgacatgttgcctcgttggctttgatatcacacctaacgttttgaaacattttctcaaaaaattctccaggcaaaatgttgcctggagtaatactctcaaaccatattgtaacgctccgatttctcaagacgtcacactcgctagtccgttcaaaactatttacaataaaaataataaattaatttattaaaaataacaaaagcatgcgatctctttattttaaattcatttataaattttaaacatt

SEQ ID NO: 154841 - DNA, 622 bp, Cannabis sativa
gcctagggcagtgaaatgtatgtttttgggatatcctgaaggtgtcaagggatacaaactttggtgtcttgaatcaggattcaagaagtgcatcatcagtagaaatgccactttcagagaagaagaaatggtcatgaaaccattaccaaatccaacactgcagacagaaaagtcatacaacagagttaatcttgaggtggattagtcacattgcacagacaaagattcaaatgcagatgagaaccaagctcaagagcatgatgatcaatcccatgaaacacaaggagatcttgatgactatctcttggccagagacagggaaagaagagacatcagacctccttcaaggcttggctatgcagatttttctgcatttgcactagctgctgccagtgaacttgaaaattctgaacccactacttacaaggaggcattgaaatgcagaaatagggatcactggttgagagcaatcaatgaagagaaagtgtcattgatcaggaacaaaatatggtctgttgtgaacagaccacaagggcagagattgattgatagcaagtggttgtttagacagaaagagggaattaatgaagattcagtaagattcaaggcaaggcttgtggca

SEQ ID NO: 154842 - DNA, 651 bp, Cannabis sativa
tcaaaactacaaagcttttgtaatatcaatttctcttctttgtttttttatgctgctgttgtaaaaagggacttattattaaaaaattaaattgtaaggtccaaccaatgttaaacattaaaaaaaaaatggtatttttaaaaattaaattgtatttcgacccatatattaaaaattcgggctcagtccaatagggcccgaacccgatcacaccaacccgaacataaccgacccgaacccaactatacccgcacatccgaacatcgggttcggttgtacatttccaatacccgaaacccgaatacccgaacccgaaaccccaaaaactcgaaaacccgacccgtgtgcacccctattactgataaggttagagtgatatctaaaactaacatgtgtttcataattctattctttaaaatatatcattaaaattctattttatttattttacttccaacttttatattatatcatatatcaacttttttatttttttttttatgtcattttaatattatatttttaatatattttattcattttacgtaaataatttaaaaaataatattaaaatttatttaacccaatgaataattatctctacatttaattaaacactatttattgagctaaaaaatatgtaaaatagct

SEQ ID NO: 154843 - DNA, 997 bp, Cannabis sativa
  modified_base (734)..(748): a, c, t, g, unknown or other
aaatgtgtttgatattacaagcaaaatcactttagaattatgataatacaatggaaacctagagtgataagcaagcacactcaagatgaataaccacaaaattttgctcaaagtgtgtgaataatatttgttggattttaaacttggaagctcattcatctcacttagataggttaggtattagacataaatgctcaaccaacttaattttttgagtgaaaatcgagtttatatagtgttggggtgaaaaatagccgttggacacaaaaaatgagactcccacttggcaaactgattcaccggttacaaactgggtaatcggtttatggagaaccggttaaccgctttgaaaccggttaacctaaatccagatagtgggaaaaagcctaatttttcgcactaaaacagccataactctctactcgattatccaatttcaaaaattccgattttgttctcttagttaaatgaaatgtgattcagatatccagtcaaaaaatttttttgtactatctggtgagaaaacttgttgcacaagttagtgaatgggccaaaatttgaatttataaaaccttgtgtgctatgaaaatcactttaacaagactaaagtaaatttataccatttgattttgagtagtctttatagagatgagcctcctagattgatttgcatgtttttgatcccatattgactttgactttgacttttgggttgacttttgattttgggcttnnnnnnnnnnnnnnngaatagggtcttgagttgttgattagagatggaaattgggagggtaatgtacggggaatgcaatccccgcccccatccccactacctatttacccccatccccgtctaataaccaacggattcgggatagggaaatacccatcggttatgaggaacccatcgggtatccattaaggtaaaatgaaaaagaaataatttaaaataattgaaaaaaataaattaaaccaatattctcacaaatatttatta

SEQ ID NO: 154844 - DNA, 597 bp, Cannabis sativa
tgaagtgctttcatcaaaactgctggtttggcttgaagtaacctaacccagacgtttgattccttgagtaagttctcgatttcctttatggttactttgcacattttctctctgaatgtacttttgattttgttgtagaaaatatgtaggaaaccgtaaatttagaaactctgcaattttcctttgttacggttcatgcgatttcatcgttcgtaatgcttgctttttgaactgcataatgcctgtctttcatcttgcttattgtaagcttcatgaaatttttttgccctatttctcgaaaaagtccaaacttccttagttttgacctttcgttgaatattcttattctttaatctgttgagtactcctcgttggcatatttgcccattttaacgttcgatatctcgaccaaacactcatcttgtgtgttgtcctttatagatgaaccccggtgagttttggggaagcaaacaccaaatcaaccaggatctgcttcaactcttgcacgaggatcatccttgtcttcgctctagtccaactttttcgagtgacatgcattcttccataagtcttttgtccagccataggatgatggct

SEQ ID NO: 154845 - DNA, 510 bp, Cannabis sativa
tattttttatttgttttagatttgctcattctaattttgatgtaattatattcaaacgtctttccctttgtataagggacactacttttgtaactaaagcaaataaaaaaatatctaatcataaaatagaaaattaaaaaagtaaagagagtcagtgtagggtcattttgaccaaaaatgacaatagaggagtttggagttcattagcaatataaaatacattcaactcgttcgggaataattatatcaaaacttgcaaagtatataactaaaatataatagaaaattaaccaaactaataaaaactaaacatgatgattgagaaatggtaaatattgcattaagaattaataatacacttacctaaaaactaaacatggtgattgagctatataaagaatttagatgaacaataaatacacatataaaattatggaagactttttttttttttttgaaaacctgaactttactacaaaagaacaaaagtacaaaaggttcaagctaaaa

SEQ ID NO: 154846 - DNA, 805 bp, Cannabis sativa
  modified_base (759)..(762): a, c, t, g, unknown or other
acaggctgcccaggctgcccaagattaggaaaataggtttgtagaaatgcaagccaggattaatgaacaagatgaagagatttgacgccttagacaacagggtgctcctgcaatcccagctccagcagtgcaagtacctcctgcctttattgtgtaggcaggaccagtcgctgcaatgaaccgaatagaacaattgtatgaaaggttccgcaagcaggcacctccatttttcctgggaggtcctgatgttatgaaagtcgagcagtggctaacagtgattaccaaaattcttaactttatgggtgtcaccgacaatgatagagtggcatgtgccacattccagttctaagaagacgctctagtgtggtgggacatggtgtccctgactcatgacgttactacaatgacctgggaaaagttctaagaattgtttaatgcaaaatattacatcgaagcagttagaagcgcaaaaaggaaagaattcactcagttgactcagaagacaaatatgagtgttattgaatacacgactcaatttgaccgcttagcaagattggtcacacgaattgtgccaaccgattttagcaagaaagagaaatacctggacgggttgaactcaaagataagacatgacttaatgatcactaccaatgacaaaaccacctatgctgatatggtgggtaaggcactttgagctgagggggcagcgaagtgcaccctagagtctcgagggactcaggttgttggtggggctcctannnntcctacatcaggctttagtaggggaggtagtggctcaaccact

SEQ ID NO: 154847 - DNA, 721 bp, Cannabis sativa
gtaaaataatttccaacagcgtgtcactcattagttttgcaaataatgtgatttaggggcctgtaaaccgtcgagcatccgttccactcaagttggttggcatacttgaattcaaaaacgaggtaagattagtataatgatatgcatatgtgcttacatgtttagcgtacatgttagttaagcctattagattacattataatagcggtatcagtatatttagtattatattggatattaataaatgtattaatgtatgctggcttaagtactatttgacagtatcacattggtacgactagagtatgactagctgtttaacacccaaaatgtgacttccactagcggtagttgtagtatagatcaggcggtcgatttcacagggaggtgattatggacaaaagcgttagtagaaaaataaacacaaaaggttaataaagagtgacaatagtaatcaatgagtttgaggatttcttttcttttttttttttttgtgttttggtaataaatattaaaagaaagcaaataaatgtgtaatcactagtaaaagagagaaatgcttcaaaaatcatccatatgcttatttagctatttcgtacatttgatttacaaagttgacacaaaaaatataacattaaagttcattatatttttgagtatacaagttcttgaaaataaaagaaataatttaatcttatgtagaacctagaaatgacattat

SEQ ID NO: 154848 - DNA, 710 bp, Cannabis sativa
  modified_base (638)..(641): a, c, t, g, unknown or other
catctcttctttgcaaaataaaagtgtacctcatttggcttctcagatttgatcttgtacatgaataactgatggatcaatggtcccaaaaagtttagcgattttctctcgaagaattattttaaaggggattctttcaccttatcccataattgaaattgtcaaattttgccttaatcctcagatagtaataactttttccatgccaagtgacacggacagtgtaatactttgagactagaattataaggcctggtggtcttgaatcctagagaaatgacacaggaaaatacaagtttggaattctgcagcaaaatatctcacaaatatcatgcctatatcggaccagtatcgaacacacaaacatcaaaataaattgaaagcacaatcattatcggtcccactattagtcccactatcgtcctctattggacctacatgtttataaaaaatgctattatactatcagacaagaatcgtcccatattagacccacaatcatacatagagcaatacaatccaaaagtacaaatgtgggacacacaattgggcccatcatcagacccactaccatcctacgtcggacagagacacattttattaaaaaaacataaaactaggggtgtacatcaaaccgnnnnaaccgcccgcaccgcaccacaccgcaaaaaaaatgcggtttgaaattcttcgcggtgcggttgcggttt

SEQ ID NO: 154849 - DNA, 652 bp, Cannabis sativa
  modified_base (380)..(382): a, c, t, g, unknown or other
tagtgaaaattcacaaattagacacagtctaactttagaattataattgatttatcacaaatcaattattgagtcttacaagaagtatagtctcaactgagaaagagatgagcatgatgggagaactcaactttttccttggacttcaaatcaagcaacaaaaggatggcatattcataagtcaaactaagtacatcaaagatcgtcttcaaaagtttgacttagcaaatgcaaagtctatgaatacccccatgatcatatctataaagatggacaaagatgaaagtggtaagaatgtggacatcaccaagtatcgaggtatgattggctctttattatatttaaccactggtaaaccggatattttgtttagtgttggnnnttgtgctaggtaccaatcttgtcccaaagaatcccacttgagtgccattaagagaatatttagatacttggtaggcacaatgaatataggactttggtaccctaataactcaaactttgaaatagcaagctacttggatgccgactttgccagttgtaagacggataaaaaagtactagtggaacatgtcactttctaggaaattccttagtgtcatggtttagcaagaaacaaaactcggtagccctatcaacaaccgaagccgaatat

SEQ ID NO: 154850 - DNA, 505 bp, Cannabis sativa
gatttcccaatcgaacaaatggtcccaggtctgtcaacaataacagaccattgtgtcaagtttgcatgcggtttgggcacactgctgtgacttgtcactataggttcgttcgatcgatcgtaattgggtcactcctaagtcttctactgctcatcctcaagtcaaccttacagaacagtcacttgactatgatcctcagatctttgttgctcaaacagtgcctgattttggagatgatgttggctggtttgtggactcaggtgctaccaatcatatagctcaatctttagacaatcttgagtcagcttctccttatcttggtccagaaactgttgcagttgctaatggtaagagattacttatttctaacattggtactgctactcttccctcacaatctcaatctttgcatttagattctgttttacaaattccttctataaccaagaatttagtaagtgtatcaaaactcactaatgacaatgatgttttcttggaatttcat

SEQ ID NO: 154851 - DNA, 592 bp, Cannabis sativa
catcattgctcgctctttgcttctcaatcacggccctagtattcttcctctccatcctcacctctcgctatgatgagaaagatttcgccatggacttgcctcgaaagcttctctttggtttgacatcactctttgcttccatagcatccatgttggtttcattttgcgacggacatatctttattcttacacacaaattaaggtatgttgcgtttcctttgtacgcggctttgtgtttcccaattacttatttcgcttttgctcagctttctctctactttgatctcatttgggctatcttcaaaaaggttcctcaacgtagtaacaaggcttttctacactaaaactataagttggagaggtgttttgttgtgtgctaaagttggaattttgttgcaaattgtttgttatgagaattatgaatgatcaattttgtttctttgggggttataaacttttgttttggttttgtgcaataataataaatgtttttatatcaatgtcattaatgttaagagtattgttggtgcctagcaccttctcgacatgtcgtgttgcgattggctaacgatacttcttaaaatctattata

SEQ ID NO: 154852 - DNA, 584 bp, Cannabis sativa
cagaacctcaaagaagccaaatacaactgatattttgtctcaaaatggccgtttgagatcgtcttctccaaacacggtacaccgccaaatatggagccaaaactgtgattttttgtttcaaagctctttactctgcttcttcacgttaaaattgataattggggtcccataaacttaaatgcaacctcctttgatttccgaaacaacttaaacacgttggaatctgagttcgttttaagaacgatactttgaacgtaaacaatggtgtctgtcgaaaggtgcaattttcgaccttctaatcgcatctaaaactcctcttggatgaaataaaactcaaagaataatctagagcagccaaaaaactctcgaactcaacaaacttgaaatctcactattctctctctttcggtatcgctcgatagcaccgcctcctcccttaaatttatttctctgttctaaaccctaaaaatatcttataagcatcctatatatatcctcaactctaatcttaaccctaaaacaaaaaatatatatgtacatatatatatataacaaactaacataaattataataataataataa

SEQ ID NO: 154853 - DNA, 572 bp, Cannabis sativa
  modified_base (230)..(231): a, c, t, g, unknown or other
tgccaattatgacgaatttcccaggagtttgctgtcagtaccgaaaaagtcaccggagtagataatgccaattccaatgacttttttcagcgctggcagcaactccagtgactttccttgtgccggcaacaactccgacaactatgccaattcagatgacttgttttagttaactttattgtttagcatttatattttgttatgatttttcatagtgtcgaatctggttnnacagggttcataagttcgaaactggttttacaagttttaagggttctctaatgaggttgctctattttatgatgttattgtatattttttattattttgtttctaggtttgaaactggttttcacacttatattttgttttagactattattgtctgtgtgttgttttgtttatatttatgagtatttttttctccatttggttgattgatgaaactcatttaaattattttcattgtatatcattcttgttttgttttcataatccttattattgttgtgtgacgaaactagttccttgatgaagaaactacttttttagtgattttttcggtgattttg

SEQ ID NO: 154854 - DNA, 548 bp, Cannabis sativa
gttgtcaaaatattttttaattaatgtgcatttttattgagcatttaaactgtttttattacattacttttgtgcatttaattactattttcttctaattaaggaaagattccctctcagctaatctctttttggtttatgaaatttcttgtaagagaaggaattctcttatggaaagttgtttaactttggaaaacttgactttcattttttctaatggatgattttggttttgcctttatcaaaacaaatcaaataaactttatttggtaggtttgaagtccaaattcgtgatctaggttcaatctggaaagtttcctttctggccctgatctgctgctgcaaaacccgattctgatgctgcaaatcaagatttttttaagaaagttttgtacagctgggaaatcatttttgtggctgtctctaggtttgctatgttctatacagccaaacgattttatctcttctagtctcatatttttatatttttctttgtgagaagagtgtttcatttgtaaaaacttagtgttcaactaggttttggtttt

SEQ ID NO: 154855 - DNA, 588 bp, Cannabis sativa
taatttattgtttataaattataaataattaaaaaaaaaacaaaaaatagtttgtttgcattatacaaaagcttatttaaatgtcattttatcttttgttttttttttttgaaagtcagtcactttgaatctgtttcttcgattattatatttgaaattctatttttaataacaaacaattttattaatgcaaaactgttataaaactatttgaatagaattgaaatttgttctatcaaaaaccgaacctgatagataagaaatatactacagaaaataaaattgtagaaactaaaatgacacataatattttatacgtggtatcaacaatctttgcagattgctactagtccacgagaccaaatttcattattcaaattttaataaagtaattgacttacacaaaatgtagatttcctctaatgattttaccgcaagcttgatgtactcctatttgctgaatgaatctccttaagacaccgagatttagacacagtcattcgctgacccaattcttttgttcatttatttcttttattaattaaatattcattttccatattagattttaaaaaataaataaataaa

SEQ ID NO: 154856 - DNA, 1147 bp, Cannabis sativa
agcaatgtcccaatctagttcacagattcatcgtccagaagatttagaaattgagtttcctactaaaatttccatcccttacaaacccaaaatttcaaaacccacatccaaattagaggtaaacaatgaaagaattaaggaacacttagtgaaaatccatcatgaagacaatgctagtcaccacagatgcttcttgtaagaaatcactgaaggcaaacgccatttcttgtgagatgctgcatggcctaaacctcccagtgtttcctctattcctttggctaaacctttatttttacccaaagtcacaattgcttttgaacttggttacttggactttgaaataatgtctcccaagtcacgtaaatcaaagactcctcaggaccctaacgtcaccttcgaggcagagttaatagagttgaaagtgcgaactatctcaagctacgtaggcgattcactgatgacctgtggaatcgagtatgggtgagactgtcgggtaaggtccgtacgagccggtgaatttagttattacccacatgtgcgtcttacaggcgagacctctgagggggccagtggcgagactagtacaagttgcttggctggtataggcatttggagccttgagcacatcaggcaggggaaataatccccctttgtgattatttcaaggactttgtaaacaacctcgggcttgccgcatttcaactaaatcctgtctcctacagaatccttgcaaggttgagggttctgtacaaaatcctgaattgggagtgcaccactccctatgaaatagagtatctttattctgttaaagtcgttcaagcgaggaagaatgtcgtaggaggcgtcctttccaagaaaggattttggcggaaatgccctccataattattaaaaagctctttttactaaaaaagaacattttgaggggcaattgttatacccgaaatttggctggaggacaagtgtcaaggaaaagggaatgtgaatcggtgcaatatcatttatggaataactcattaattgcgtgagtatcagagtatatttgtaactcgttgactgtaagatcttaggcgaggaatcaatatacgaactggtgtttagtgtattaacaagacaccatatgttgctaaaggagaatagcgaggca

SEQ ID NO: 154857 - DNA, 511 bp, Cannabis sativa
tttatggaggaaaagacaaaaaaggaatggaaaaatttagcttttgctgaagaaaaaagtgcatggttgaaagcttaatggaagtgggccaaagagggtgatgctaactcgagatattttcatgacaagttgaatgcgagaaaggcaagaaacacaatttcatgaattgaaagggaggatggattatttatcgatgaagaagaagatgtggttgaagagatttttttaagagattatacacttctgagaagacagaaggagaagtattgaaggaattgagtagtaaaaaattttggatttcttggagggacaactagaaaggccttttgaagaagataaagttaaaattacggtctttagttgtgaaggtagtaaggctctaggtcctgatggttttagtattccagtctcacaaactagctgggaagtaattaaagaggatttgatggatgtcttcaaatcttttgaggaagatggaacgattcaccataaccattgatgcaacaacttg

SEQ ID NO: 154858 - DNA, 654 bp, Cannabis sativa
ttttttaaaaaaaaaaagaagtaatttaagagttatcattctttaaattatgtgatatttgggttttttttaaaaaaaaaaaagtaattgaaagaaaaatgtgagttatcatatttaaataaaatagctagtaaagaaaaaaaaataatttcaaaaaaaaaaaaagtaattttagagatattttttaaattacgtgatatttgcgatttaaaaaaaatctttaaaaaaatgatgtacaacatatataactaataaattgaaaaaaaaaattaaaaaaagtggtgatagatttagagttattatttttttaaaaaaaataaaaaattaagaaaaaaataaatagatatatatatttataaagctagtaaaaaatttaaaaaaaaaataagagaattaaggaaagaacaaataatattaattaaagagattttatatatagatatatagatatagataagtgtatacgattaaatatttataaatataattaaatattaaaaatactgagagaataaatgagaggagaaaataataattgctacgattttatagcgtaatgtcaccgtttcatatagatatataaacatattgataattaataataataataatgtagaattttaaagtgtcatgtcaccgtcacatatagatata

SEQ ID NO: 154859 - DNA, 560 bp, Cannabis sativa
gtgtgggttcgtgggtgtgagttggtgtgattggactgagttggtggtttggggctaagttcgtgtggtttggggaggaggtcattgggctgccctttagacacgacaatttaaaatcgtcgagtataacagtatatatatatatattttttttttttaattttgcgtttttaacaaaatccgtctcctatttttatcgctactgttctaaatttttgggaatactcatttttcctgacggttttaaacaattgcttaatttttttagcaacagtccgtaaaattttgaaccgtccccacactactacaaaaagagactttttatcccggtttttaagggcattttatcccggttttcactaaaataaaaatcgagatgtatgccagtgggataaaaagtcatataaaaatcgggatcaaagacctctttttttcccagtttttatgtaaaaaccaagattaaatgtcaaaaataaaataaaaaaaaaataaacccaaaaaaattatatcagttccataaaattaaataagaaatggatatacataatcgatatacactc

SEQ ID NO: 154860 - DNA, 730 bp, Cannabis sativa
  modified_base (90)..(90): a, c, t, g, unknown or other
  modified_base (261)..(262): a, c, t, g, unknown or other
aaatagattttatttagggtacaaaacccaacagtaaatacatatgcatactgttatactaatcttaccttgtttccgaattcaggtgtnccggtcaacctgagtggaacaaccactcggtggattacaggcccctaaatcatatcaatcataacataggtaagtgacacgctaaatcactttctagggacttaaacttgaaactaaaagtttccctatcgataataacatggcaataccctaaacatcacaaaaatgggnnaaactagggttcccaaaattgcccgaatcggtagattggttcccaaccagaattccggttctgtggggtatcctaaagaccaaccggaattccggttctgcggggtttcctggtgaccaaccggaatttcggttcctacaggtccccctaaaccggaattccggtttagtgcaggatactttcaaaatttcataactctctcaaatcaaccccaaatcacaccaaaccttccaaacctgttttatagaccacatagaacatctctaaagcaataaaacacctcaacatgcacataatcaaaatctaccatgggagagcaaagtttgagctcttaagctcaaaccttgaacaaatctcataaacagccaccaaaccagctctaaacattatttctgaccataaattaacttcagaaacaacatcaaacaatagcagcaactacaacaaccaaaatccacaaaacatgca

SEQ ID NO: 154861 - DNA, 523 bp, Cannabis sativa
  modified_base (37)..(45): a, c, t, g, unknown or other
aaaatatgagttagggttattaccctaagattttatnnnnnnnnntaaatattgaatacatgcgggtatgttaagcgttatgtgtataaaacataattgggtaagacctggtatatatcaccaggataaaccacataaagaacgtaatgtatggattacgtatatatatgagtagggttatgcgagaaaggcataaccaggttaggctcggtaactagaactgaggtaaagcctactaaggccttgttgtatatagacgtgtgagagcaacacgtaggtctacgccaggtagacctaaataggcatgtgagcgtaacatacaggtctctggcaaatagacaaatagtgcagtggcaccattacttatgtgttatacatattgagattaagggttatgcgatgaaggcataatcaagttgaactcggtaaccagattcgagatgaactatcctaaggccttattgtatttagacgtgtgagagcaacacgtaggtctacgccacgtagtcataaatagacgtgt

SEQ ID NO: 154862 - DNA, 570 bp, Cannabis sativa
taactagggagggtcaaatcttatcttgctcaatacttaaaagaaaaaacttcacaagttttctttcttcaacttttaattgaaaaaaaaaaaaaattgatatcattttaaattttagtttgtaaaagtttccgattgaaatttttattttgttaaatcataaattaaattttgtatttttaaaatagtattatgaattgattttttatcaaaataaaatttaataataactcgatctaaaagttatgacacaactagctatgttttctgtatctattagtgttagaaattatcttcaaatttgatatattaaaaacaaaaattattaaaaattaaacttaaggtactattgtataattttaaaaaaatacatggtctattttatcatttaaatcgataatttttgtaaaacacgaaatttaaaataatattaaaaaaaaaaagataaatcatacatgatcgattagccattttctcctatcccattagaactacacttttggcgtacaagtttaaatttgaaagtctaaaatgtattcttcaaaaaaaaaaaaaaaaaaaaagtcgaaa

SEQ ID NO: 154863 - DNA, 661 bp, Cannabis sativa
gtaatgggctgatccattagctggggcctttgagttgggagttgagtaacttcccaaacctcactgtgctttacggcccctgcgtaacacttcagctccttccgggtagttccttcgatgtgacgtcctcctgagatcatggctactcttccgttgggtcttggtggcaggccaggaatttgctgggcatctccgaggggagcaattggggccaaggctccggctacaccccctggtactccttggggcaaggcccttgctacctgagccgggtagaggtgaggcaaccggttcttaatccattcgtagaggtgtcccaatcggatcaagtttttgatctcgtccttgagatttttgcattcattggtgctatgtccaatgtctttgtggtactcgcatcttttattggggtccctcttggagctgtctttgtatacgggagatagtctccggtagtgcgtgttttgcctggtagcaaaatacacatgctcttgggagttcgttaactccgtgtactgggtatattggggagtgtacccccttttctgtcgcttatcctccgaccggttgctacctttagaggacctcttgctcctagagctttgagaagggcctgctaagcttgcggttggagcggagtgcgatggggcttgcccaatta

SEQ ID NO: 154864 - DNA, 718 bp, Cannabis sativa
  modified_base (535)..(536): a, c, t, g, unknown or other
tcctcctacctctagttatggtaggggtggtagtggctcgaccactgattagaaaagaagggcacaaacagcatctggtggctcaagtcaaaacaagaggttccaagggaaccaaggtcaaggcaaccgttagggtggtttcgaaacccaatacacttacccagaatgccccagttgtaaaaagaatcatctgggagagtgtaaagggcaagggtgcttccagtgtggtttgtcagggcactataaaagagattgtccacagcttaagaaagaagaacagaagattgcaacaaaacctgctccagctagggtgtttcctctaactcaggcagatgcagatgctagccccttagttgtaacaagtcaactctcagtcaacaactcttacttctttctgttatttgactctagggccactcactcttatgtggcagccagaatttttagtaagttggatagacaacatgatagttatgataaagggtttggaaccctacttcctggcagagaattagtcatctccaaaaggtggatnnggtctatgccgatcagaattgagtattaggtctaggtctatgccaaaaggtgggttaagcagatttcgatgttatacttgggatggatttcttatccaagtactcagctagtattgattgtaaacgcaagatggtgatcttccaacctgagggtgagaaaccgtttgtatttgtgggatcag

SEQ ID NO: 154865 - DNA, 508 bp, Cannabis sativa
agagagtttttgatgaagaagaaagtgatagattttgataaaaaaaaaaaaaaaaaaaaaactcctcaaagatgaagatgaataaagagagagaataatgaaaaataatattaaatagtgtaggcgatatacttataatcaaaactaaattaaaaaagagaacaaaaatgatgtcacagatgtgacaataccaagtaaaatcaaacttttaaaataatttaaaattaaaaaaaaaaaaaaaagaacaagaagatgaagattaatagaggagagagatgaatagtttaagaataaagctgataatgaaaaaaaaaatataagataaaagaaatgaaaaactgaaaaatgtgaggtaacatgtgtattgtgatgaagaaaaaaattgaaaaccgtgccaagtgacaagacaatgtaaaacaatttttttaaaaaaatcagtataatataatataatttttcatcatcaattttaattaaagaaaaatttttaaaaaaaaaagaaaagaaa

SEQ ID NO: 154866 - DNA, 734 bp, Cannabis sativa
agaatatattaaatcttaatataaattaaaagaaaatgtcatgctgccaaaattctaatgcgatcaatttttaccatatagtaaatactttctaaaaaaaagcactaccattgcaatatgatcaaaattggttgtaaaattctcgtgaagtccaaacctgaaaagtgatatataattttgattaaacttatatatattttctatatatattatagtccaaaatttgtaagggtttcaaaccaatcggactgagaatggaaccaataatataagtatgcttatataataatcattcatatatatattgtgtatacatcatcatattgtatgatgaagagactataaggctcaaggtcattgattacatatatgtagcatacctttataggtaataggtatatgcaatgggtattgaagtgagagaaagttttgttgtcaaataaacccatacatagacccatacgtgcatgtcaaaataagttatataatatgtgtccagattgttgtgccgaaattgattaaaaggatgtgaatgagaaggacttaggccatctccaatggtaaaactcaaatttggtgttaaattaacaccaaaaagctactattttagcaccaaatttttttccaattccaaccacaacactaaaaattacactaaattttacattatgtattattttattattttatcaatataataaaaatattttaatactaaatatttattaaatcca

SEQ ID NO: 154867 - DNA, 543 bp, Cannabis sativa
  modified_base (473)..(477): a, c, t, g, unknown or other
  modified_base (503)..(513): a, c, t, g, unknown or other
gagagagagagagagagagctatacactgtgtaaaaccagaaattaaattgggagagagaggaaaaagattacctagaattgttgtaattggaatctccattggtagatataaaatcattgatcttcaaaatagtggatgaacgagctgatctaaggcgagctcgaagaggaagttgttggatcaactccaaaagtagaaataagacaaccttctcaaaggtcctcatagtcgaaaactatggaggtctgaccggtatagtcaatctcatgacacctaaaagaaccagactgaggacccttaataaaatagagagaagagaccacctttcgtagatagagatcgacctagggatcgacgaaggcagctcagagcatcacacagaggctcgaaggaaaatcttttacgatttcaagctcgcatcttgcacggagagaaaaagggctcactacaaaaatcttacttttagtcacnnnnnaacttgtgactaaaagtgaaaaaatnnnnnnnnnnnataaattattattcctatgttgtggctaaa

SEQ ID NO: 154868 - DNA, 520 bp, Cannabis sativa
  modified_base (179)..(179): a, c, t, g, unknown or other
gagagagagagagagaataagtgtggattttgaaaaaaaataaataagagaaactcatgaaaaagaagaataagaagaagaagatgatgaacatggagagaaaagaaaaggaaatatgagaacaaaaaattttgggtctcatctttatcatcattaagtaaaaaaataataaaaaaaantaaataaaaaaaaaaaaacttatcacaaggtaacaacatcaatcaaatcaaacttcttttatcattattaattttaagtaaaacaaataaaaataaataaataatattaaaaaaaaaaaaacagttacaaaaagtgacaacttatttcactatcaaaaatttatacaacaatataaactcaaacaatatatacagtaaaaataaaaatattaccgcctagtagtattaatgtaataaaatgggaaaattcaatatatgatgcaaatttcccaacttatatgcgtgtacataaagattttttaatacatcttttcaatttgaattattattagagatttttt

SEQ ID NO: 154869 - DNA, 525 bp, Cannabis sativa
ctatattgtggaacatatagagcactatatagagcactctatataattaagagcactctatataattaagagcactctatataattaagagtggagtgcaattccaaatctatagtggtgcaaggagaaattaataagatagagaatttacttaagtgttgtttggtagcacttttattttctaattttttaattacaaaatgaatgtaaaatttttgttttaatttttttttttgaaaaataaaaatgccttttgtaatcacttttagttttcaattttaaaaacagaaaataaatttgtgttctataaagttcatttctatttttattttttgattttatttaagtcgggtctaggtttagggtcggagtcgggtttgggtcagaggtcgggttcagcgccagggccgtggggggaggatttgggttcgggtctcgtcggagtctaaaatatagtttaagaaaaaaagttgtttaaaaaaatattaaaagtgactttttttttaaaaaaaaaaatttaattct

SEQ ID NO: 154870 - DNA, 626 bp, Cannabis sativa
tacgagccatcctcccttaagaatgttgagaaactggcatttgtgaccatttcttttctagcgtcgttgagaagtgggactattctacctaaacgttcgaaggagcaatgagcagatgcttgaacatcgcctaccccttcattgttctcaactcctgactcagcagatactgtctcctttaactttttctgtttccctctaacaccaaccttcgaaggggaagcctcaacttcatatgaagcccaattctcaatcactttgtcacttagcagcttaaattactctttaaaactaccaagcacctgcaaaattaagactctcgattaagtaaagaacgctaaatgatgaatatcaaaaataaaagattcataacacactccaagtccctcacatctgtttttgatttatctgcatgtgcaacagcataagcttcgaaattggtttggctgcatcaattaaataaaggaacggaattaaaaatgttgtttccaaaaccaaaaaatattagcaaaaaaacactgggacaaataacttacaaatattttgcccaagcttccttcgaatctttttatttatctcagcagcatcctttttctctgcagcaacacccctcttccgtttataca

SEQ ID NO: 154871 - DNA, 660 bp, Cannabis sativa
tatcaaattgttaagtaatttagtaaaaataaggtattttttacagtatacacctttaaaattagtatatcgacgcacccttttttatttttaacatttgaatagttttaatctcattttttttaaatagttatattgtagttacataagatattttgtaaattttttaaaaattaaaaataatttacaatataaaaattagagttcaaattgtcaatttcacaaacctatagaaaaataaaagagacacacatgcaatacaagatactgtttgaactttatttccagtgcattaagttattttgatttttttaaaaaatttaccgtgtatcttagataattacaacttacactgtcatataaaaaagttaatattaaaactatctagttgtcaaaaacacaaaaggagtgtatcaatacacctattcttatgaagtgtaacatataatttcctaaatgaggttatttttggttaattataatttttttccctgtgacatgcaccaaattatgccaccaaacttttcaagacgttttaaattcctaccgaacggatgagattgttggattcaaggacttctgcaattttgtttaattttactaacacaacaattatttatgtactaaattgtaccctttaaattttaatatttatctaat

SEQ ID NO: 154872 - DNA, 500 bp, Cannabis sativa
  modified_base (29)..(32): a, c, t, g, unknown or other
tcaacaaatcattagtaacaaataataannnnatatttgttaatcatcaaaacaaggagatctaaaagtttgagttaataatctctcccttttttattatcaaatatttgattattttgaaaagggaaaggaaaaatttaaacaatgtatattgggtttgctctcccttaatgtgtgcaagaaaataaattttgaccttgcatgtttttgtaaattcctcctcaattttatacttaagattaaaagattgtataccaaaaaaaagtgaggttgtgccaaaaataatcatagattttctctcctttttgattcatcaaaaagggtggcaaggaattcacaaaatagagagaaacaaaagcaacactactcatgcattaaaaataataaaactataacatccaacaaaacaacattcaacaaactaaaaaaacataaagaaaataccatccaacacaaagtcaagaggcatgaagcctttgcacacaaaaaaaaaaaaaaaa

SEQ ID NO: 154873 - DNA, 933 bp, Cannabis sativa
  modified_base (754)..(754): a, c, t, g, unknown or other
cacgctggaaacacttgtgttagtctgtagggtcagtcattagtccataaagcaaccagaatgacgtactcgtgtagaagacccattattccgtgggtgtaagggcccaatggaggcttcaagcggggacattacagaatcaagcaaagtacactgcatttaccatcttgactgaggatatagaatcagcaaaagagacatgacaaagttttgtcaatttcacggagactacggccacggcaccaacgaatgttacaatctaaagcgggaaattgaattcctgataaggaaaaacaaaccgcatttacagaagtatgtcaaggccgatcaaaattagaggaatgacaataaccaagacttgctacctccacaggtagacagacatctgcaagtcatcattggaggcccgcacatagctggagattcgggcaaagctcaggagaggtatgccgaaacagcacagcacgagcaagaaaaagtgatcttggccgtagaagaaaggaaggctaaaatcctacggacaggagggcctaccatcaccttcaacgatgaagacgctgtcaaaatcaggtttccacacaacgacccgttggttgtgggggtccatatagctaaccaaatggtggtcagaaccatgattgataatgaagcgtcttccaatatcttgttcaagactgtctatgaaaagatgggactccagctcaagtgtctaaccccatgtctcccgcttgtctatggtttctccggccaaggngtcgcacctctaggacaaattcgcttaccccttactattgggtaagctccgactagcatgaatatcatggcacgattcctggtattagatgttccttcagcctttaacgtagtgctaggtcgaccagccttgtatgacttaaagactgtcaaatcgatattccactcgtgcctgaagtt

SEQ ID NO: 154874 - DNA, 755 bp, Cannabis sativa
  modified_base (668)..(674): a, c, t, g, unknown or other
tacaaaaaaacataacaggtgcagcaaatgtggtcaacacgggcacaaccgaaagacatgcaacaatcaagcaataaaatagatacatatgaattatttgaattgtttagttctctgggagaattcacacaggatgatatgttatattcgatacacttgggatattattttgcaaatttttaacagtttgctaatagttgcaaaatcgttttatgacagttttgacacttgttaaaggttaactacgaaaataacttcattagcaaagtttttaaaaagtcaaataggaatttataaaacataattaataaggataataaaaaagttgcaaaaaagtgaataatacattgataaacaattgaaattacaagtatgatgaacagtgcacagtgtttgtatatagttgtataatagtttctatatagttgtacgactgtatataaaaatttcaaaaattggaaaaacataaaactaatgctgatacaaacatacaaaaataacatattataatgattaatgtcaaatatactaaaagtttaaaaccagatccagagtataaaaccaaatataatacttagaaacataaaataactaacaattgtctgatgataaagtcaaccaatcacaccaaattgtcactaaattaatgttggaaatttattttaccnnnnnnntagatctactcacaagtatgttctttaacatcctaaatatgaacttactaaaacgatagttaaacacatataaagttaaga

SEQ ID NO: 154875 - DNA, 803 bp, Cannabis sativa
  modified_base (84)..(86): a, c, t, g, unknown or other
caattcgggtctaggtctgatttggaattcgggtcctggtacggttgtggttttggatctatgtccaatttcagttatgattcnnngtccaagtcctagttccagtccgggtcaacttctcgttttggttccaattttaagtcacagggtactgctccgggtccactttttgatttgggacttggttcaggtccgggtgtgggtttgggtccatatgagggttcgggtccagggctaggtcccaaatccaaacaccgactacgagttttttgcaaccccttggtcgagatccggatcccaatctcgggtccgcatctggttccatttctagtgtcgggtcacgagctgggtccaaggttcaagttcaggtctgggtcgggtactaggtctcgatcctagttctgtttcccaagtccctatcctgattctgggtccacgccccgggtattgtgtgggtttgggtctcgctctaggttcaggttcgagttctagtatcaattggggtttaggtctctgtctgggttttgatatgggttcgggtttcggtttaggtcgtggtcctagtccttgttcagttctagttccatttacgattctgagttcgagtttgggttttagtgtcaggttcagtcctggtctgagtttgggttcgggtcttgatttctgtctaggtacaaatcaagctccagttgtaggttcgcgtcctgggtcttggtcgaggttggttgcaagtcccaagtgccaatcccgatatgagtctggattcagttctttgtctaagtccttagttctaatcctggtct

SEQ ID NO: 154876 - DNA, 733 bp, Cannabis sativa
aaaaaacgaagtatgtatttattacaaaaaaaaaagagtacacattaacacgtatttacttatgattttattttaaaaaacaactgaaacaaaaaacacatattttggtaaacacttttttttaaagaacaatcataaattatttcaaagtcattattattttttaaattataaaagtggttatactattttattaaattataaattgaatgatattatatatctatttttaaatagtataaataatattttgagttttatttttgataatttttttgtaatataactaatcaagtgataatatttttaaataaaattattattaaattttattttaacaaaaatagtttaggatattattttataagataaatataattttggacattgtattttgcataaattataaattggatcctctattttgttaaatgataaaatagactctgtattttttaaaatggtacaaataagacgctgaactcaatttttgataatttttttttaatataatcaacttgaaaataattcctaacgtgaaaagatgcaaaaaaatttaattaattttgtcctaacatttttaggttggattattattaagttatgttttgacaaaaaaatcattttagcgtcctatttgtaccattttaaaaaatacaaaatctattttgttatttaacagaacagaaaatccaatttataatttttacaaaatataagatccaaaataata

SEQ ID NO: 154877 - DNA, 501 bp, Cannabis sativa
aagttaaggctgagcatcagagaccttcaggtttacttcaacctttgcctataccagaatggaaatgggacaagattacaatggactttgttaccggatttccaatgagacctttaaagcatgactttgtttgggtaatttttgatcgtttgactaagtctgctgattttattccaatcagaaaggattataagcttaccaggctagctcgactttatgtagacaaatagtttgactacatggactgccttcaagcattatttttgatagagatcctcgatttatatcaaggtcttgaaaggccttgcaacaagccttaggaactgaacttcacttgagtactacccatcatccatagacagatgggtagtctaagaggatcatacagactttggaacacatgcttcgctcttgtgttttggattttggaggtagttggggagaacacttgtcactagtggaattcacatacaacaatagctaccaagccagtataggtat

SEQ ID NO: 154878 - DNA, 560 bp, Cannabis sativa
atttataagtacgtacgtagtatatttgagttttatttttttgttttatttttcccaaattgagttttacttactaccaaactaatttagggtgtgtttagaaagtcataatgtaattggatttgtgtgtaatttaaggtaattacacaatttgtcatgtttgtctgacgatgtaattacactgtaattgtataattggaagtaattaaatggttccaattacacttttcaattctcatgacctcccatgagaattgaatataattacactgtgtaattactaaaaaaatttcatattaaacattaactattaaaaaatataattactaattattttgccaaataagatattaggaattagtgaattttttttttaattatataatatatattttacacgtggagttattactagtattttttatatataataataaataattaattttaactatgtaattaaaaataatataatctcctttaaaaaatataaataactaatatttattaaatatctttgtataataaatgtataatatttagatgtatataactacttt

SEQ ID NO: 154879 - DNA, 849 bp, Cannabis sativa
aagtgatattgaggctgctgcctctatttttgattgtctaagctctgggctttctgatcaaagtgtagagagtctctctcagccttttgttgctgatgaggttaaaagagttgtgtttcagctttctggggacaaggctgtagggttggatggtcttaatgcctttttttatcagaaaaattggtttgttttgggtaatgattttacagctgctattttggactgtctcaataagggggctgatttttctgaaatcaattccactttaattgttttaaatcctaaaaaggcccgtgctaatatgcttaaggattttaggcccattagtttgtgtactactttttataaagttatctcaaaaattttgaccaatcgtttaaaacatgttcttggtagtgctatttccccttttcaaagtgcttttgtgtctggtcgtattatttatgataatattattctagctaatgagttagttcataatataactaataggaaagtaggaacaaggggttgggctgctctgaagcttgatatggctaaggcttttgatagggttgaatgggattttctaaggaatgttatgttccatcttaacttccctgtcaattttgtttctcttatttttaagtgtttatcctctgctgccatttcttttgctgttaatggtgctattagtgagcctattaaacctactaggggtttacgtcaaggggatcctttgtcaccttatttgttcatcctgtgttttgaaggtctttctgctattcttagcaattatcagtgtcgaggccttcttaggggccttgcgattgctaggaatgccccttctatttctcatcttttgtttgc

SEQ ID NO: 154880 - DNA, 554 bp, Cannabis sativa
  modified_base (127)..(129): a, c, t, g, unknown or other
tttttttcactatactggtgatatattaatttttcactatagtacttatgcttatgattgcagaatatagtttttatatgctattgtatatcgtagaaaacgaaaattatttaatagtatattagtnnnagtttatggtatattcatattggtctaaggtacattgtttgtatgtgatatggtatatcgtgaaggatagaaaggaaaaaaaactattaaatattaatttaagtttttagtattttttttttattttgtacggtacatctttattatgtgctatgatatattaataaaaaaatagagtggcatattattcttatttgctgtggtatatcatgaaagaaagagaaaaaaaacttgtggaagtttatttaagttttttttatatatttatttgactatagaattgttgtggtatattcatattactttaaggtatagtattgttatgttatattatatatcatgaagaaaagaaataaaaataaaattaaaagaattgaataatagtttagtgttcggtatatttattttgcactatgatatattgt

SEQ ID NO: 154881 - DNA, 914 bp, Cannabis sativa
cattcattccgtgggtgtgaggacccaatggaggcttgaaacggggacgttacaatacaggcaactttaagcaacgaattagccattggaaacgggagatccaagattggaagaaggggcgtgatgctatatccgttcagaagttccgcgaggctgagctgaatcttagtgaagttatgaacaaacgagaagtgttctggcgccaacgctctaaacagttgtggcttcaagaagatgatagtaacaataagtactttcatgctaaagctacttctagaaagaaacacaatactataactcgccttatgaatgatgtgggtcaatgggttacttgggaggatgggttaccgaatgttatggttgattatttcaataccttgtttacttcaaatgtggccgattactcaactatggtagaggagattacttcttcaattaccgtggatcagaatttggctttacttaggccgattttggaggaagaagttagaagagctctgtttagtatgcatcttgataaatctcctggtctcgatggtatgaccccaggctttttccataaatactagaaaatagtgaagagcgatgttgtgaaccaagtttgccaattttttgtagatggtagtattcctgatggtctaaatgacacgaattttgttttgattcctaagaagaaacaacctacttcgatgggtgaccttcgacccatatccttgtgcaatgtcttgtataagatagtatctaaggtgcttgcgaaccgtttaaaagaagtgttgcctcaggtcatatccccaaaccaatctgctttcatcctgagatgccttattactgataatattatgatagcgtttgaggttatgcactatctcaaaagaaagcgtaaaggcaaagaaggctatatggcgctcaagctg

SEQ ID NO: 154882 - DNA, 554 bp, Cannabis sativa
aaaatatgatatttgtgaaataaaagataagttcttaaataaaatgacaaaattgaaaccctgtagggtccactagggttccgaccataaaggttcaattaaagccattatttaatattttctaattctatttaattctaaacctatccctaggagatatcctagaaatagaataagatgctcttattttcttaatcaactatcagacttcgttgtcagacaacttagaaaataaagaaagagtctctattctattttcgaaatcatcctcttcttcttcctttattatttttgaagccctatagtgaattgagaaatttcccacacaattcaagtcagtactcagacctttgtaaaacattgtgtagaataccaacaactgaaaaagatccaagttcagatcttgatcatactttgtgacataaaggatcatagtttagaaatctgaatggaatgagacattatattatgctgccactaatgtaatgtaatatcacaataagcccaatggtaaataattagagtttatatgtagagtaatttgcggcataaat

SEQ ID NO: 154883 - DNA, 655 bp, Cannabis sativa
tccttgctgctaattatctgctgtaattccacacggctcaagagaaattcagacctgctacttcagcaccacaaccgacggctgctgctgcaactcactctcaccagcttcttaaacgagtcactcctcctgcttcgtggcaacctccaccaccgacagctttaaagcttaatgttgatgctgccttggattctcagcaccacataatcagagttggtgcagtggtccatgactctgctggtgttgttcttgctgccatgtcgaaaccaataatcagcagctttgcttcccatgaaatggaagccaaagcaatcttccacaacatcaattggatcctagaattggaagtgccaattactcacatcgaaacagatgcgctcattgtttctaacgctttaactggttcttgtcctgcaatttcttctttcaaagacttaattgttggcatatcttctatcctttctccctaatgtatctattagtcatgttaagcgtaatgctaacatggctgcccatgggttagctagatatgctttagggttggatgaagcttgcttttggatgggtaatatctctcctccgatttacgatattattgtaaacgaactatcttttgttttatgataacatagtatttctaataataataataata

SEQ ID NO: 154884 - DNA, 855 bp, Cannabis sativa
ttatgtggtatattattacaaaaattgtttaaatatttggttaatgaaaatctatgttaacaataaccaatcaacacttactataccatgagttgaacgagtctttatagctaatgtacatatccaatcactcttcaggatctttaaaccttagtcgctctaataccatattccaatgccctaatcgtaagggcgccacgtgtgtgtacttttataaattagtttacaataataaactaatggtttaagaaaaaatgaattaattaaaactttagaaattgttttcttaaaatttaacttaaaacctttttcaaaatattacaaagtcgggaattccctttgttataaacttttactaaaattccactctattactttattacaaaagattaaacatattaaaaatattataaaagttggatcctgtcaacttagcacaaaagactagggctgtgcaaaaaaaattgtaaaccgcccaaaccgaataactcgtccaaaccaaaccgaaaaaaccgataaaaattacaaatcgaaataacccaaaaaaattacaacccgcccaatctgttaattgggcgggttgaaaataggtccaacccgcccaattaaaccgagtaacccgaccaacccgattttgccttttattttatttatttttttactttttaatttttattatataaatgattaaatatataataatataaaattatatacttaattgttagtttcaaagtcatatatattgtgttgtgctttgctggaatttagtatttttaattcatttttttaatttttattgactttgaaaccaaaaaaaaaaaaagtttggccagtttgggcgggttaacccga

SEQ ID NO: 154885 - DNA, 646 bp, Cannabis sativa
ttattgttatttgtagtatccaacatgactatgaacaatcccatggtgtcactgttgactgacaacaagttcaatggagctaactttataaaatggagagagaacattaatattgatctcactggggaaaatgccctgtttgtgttgactaaagaagctcctgagcagccaaatgagaatgcaaccaaggcagtcaaagaaaagttcgagcgttggcaaaacgttaataacaaagctcgatactttatgttttctagcatggttgacaccttgaaagcaaggtttgcagacactctcatagctgcagaaatcatgaaccagttaattgaactgttcgagatggcatgaattcaagctcgctttgaggcgaccaagaatttcatcaatgcatacatgaaacctcatcagagcatgcgtgatcaccttctccagatgactagttacttccaggaggctgagaatcatggagctgttatagatcagacaactcaagtgagtttgatcttgaacagtttgactccagcttttttcccctttacttcaaattatgtcatgaacaagttggagcttgactttcacgagttgatcaacaaccttcagacatttgaaaattttattggaggaccacagaaaggaggaactaaag

SEQ ID NO: 154886 - DNA, 873 bp, Cannabis sativa
  modified_base (515)..(520): a, c, t, g, unknown or other
aagtggtactcaatcatagtgtgtaaggctgtgaagaatctaaattcaagagaaggagaaccgggcccagatcttagtgatactctggtacagatacgatacaagagttagagatctgagtggaagaagtcatttaattctgcttcacccaatgccaggtttctcaaactttatatgtgtttatttacattattttagaaattcatatttaggatgttaactaacatacatggtagtaaatctagattctggtaaaacataatcttaaaattggcctcagagccatgataatgatttactttcatgaaatatgtatttaaaacgatgtttgtgttgatttggatggtttcatgatggtttatgtgcttatttgatgattgtgtggaaatcgcaatgtatgttgtaaaatattttttgttacattctggaaatatatttactggaaattagacaaaaattaattaatgaatttaggattttacagaactatatttgaattttttatgaattagttnnnnnnttttgaatttggatgaaaatatttgaaatcgagttgcacacacacgcgcgcaggaggtgattcaatcggcatccacgcggtttcaggcaaccatatcgaggaaactcagacacgggctgtctgaaaccgtgtcacgccgagttccctcagccattgaggctacatgcagccctctgtctcggtcagccctctctatccgcgcgcgcaggggtttgcaatgcatacccgtgtataccaaaattgttttcatcataatttttgatacaaaaattatttttcattgaaacaaaattcaaattttggtagaatcttgtgtagaatataaattttcaattaaaaatctaattatcaga

SEQ ID NO: 154887 - DNA, 612 bp, Cannabis sativa
aatggcttccagtattctgcaatggaaggagtctgaacacgttgaggatccgttaaagcattccgaaaatgtcaatgatcaaaacgttcagcaaataacctgggaataatgaaaagaaaattatgctacttctgtttcatgcccttccgcaaaaactacaagcttgtaaggtctatagtattccataattgggataattagattggaatttggtaacttacataaattattggtttctaaaaataaaatataaaaattcattgatttcattttaaaaaaaaaatcattgatttcagtttatataaaattttcgtactaagttaaatacaaggacttaggagtaaaatctgttttgtaaacttcatatctaacagatttttgttactttcaaaactctaaaatgaattgtagtcaaaattatccaagtatagttagtggaagaaaattggagacaagaaaatagagggaaaaaacaagtatatttaagtaatcattaccttattattattttctcatgatttgtattaatattctcttttacaaatacaagggaatttcttttcattcccctaaaagattaaaggaattaaaactgagaattatgttactgtt

SEQ ID NO: 154888 - DNA, 950 bp, Cannabis sativa
tatagtaactcacatgaaaaccaccgaagaaaccactttagaaatccaaaccatacatttgaaaaaaataaattaaaaaatagtatataagataatttttcaagaaattattatttgggaatgtgaattgtgagcttttttttcaaaaataattacaaatgtcaaacttatcaaaaacaaaaaaaattacaaatgccaatgtgcccctactgttccactaaaacatttaaataaaataattatatggaaagtaatttttcttttaaacaaaatggaaagtagtttgagcgtgtgaattgtacaatttgcaaacaaatgggtcccacaacaaacaaactaataataaaaatttgacatgtaagtctcacttagctaaggtgtcttattattagttagtgtatcaaactgctattaatttaattaattattgaatttcatataacttaaaaaaataatttttaaagaacatcattaactaatcgttagtactatttataaaaggtgttggacaacattagtgtccaataacaatgctctatgttaatactcaattactatttgtactccattaatataaaatattgctacacgtgcccaatatcttttataggtagtgccaacgattagttaacaatattatttaaaggttatttttttaagttatataaaatctaagacttaattatattaataacagtataacacaaaaagaataccaggtgccaataatagtagcaattctcattagtataagcgtttggttaattaatttttttttttttgaggaaaaatggtaactttattaataagaagattcaaccattacaatagaaagaagatcagcgggaatattatcctcactaaaaatacgatctggatacaaacaagagctacgagcaagacaatgtgcagctttgtttacagaacgtttaacaaaattaattgagact

SEQ ID NO: 154889 - DNA, 588 bp, Cannabis sativa
tcgcatcaaagtcatagacatttaattggtgatcagacaattaaaagtaattaagtacgaatcaaatagaatacatagaaattgagagaaaattaaacaatattaaaaccaaaaatcatcaatataaaacaatctccatttagaccctaatgaactgtttagctactcatgttgtatcaatttcacacatattaatttagaatttaataagaaaatagagaagaaaaaaatgttgaaaaccccgttgagaaagccttcgcgatcgattttgctctctaaaattcgtactccttgattgcttctgatttccttctaaattgctttctaattaagagtttctgagttttttcagatctgaaaacgtactaaaaacactattaatattgtgtttatataggctaacaaggttacctaaaagatactaaaatatattatttaaagtttaaacttaaatatgattaaaatcgcaactctatcttttttttttctcactatctttttatcttttcttttttagaaatttcctactgcgacgactgatggtattttagccataactctcttgatattgctcggaattggacgatt

SEQ ID NO: 154890 - DNA, 675 bp, Cannabis sativa
  modified_base (521)..(521): a, c, t, g, unknown or other
acgtcaatccaactagcaatctaaaggcacttcggcgactttgaagctataaaattttcttttcgctctggagcttgcttagcaaagaagggtgatgaaatgactttatgtgccaatgatgcgggtatttataggcaaagaggtaactgtctcaaagaaacctcagacgcctgagcttcctgcctcaaaaacgaatatgggaaatcaaaagtaattgagtgcaaccgcattcgtggagagagaaaattagatttcaaaatattaattgtctgagcatttattagctgaaaaccgaagggacgcccagtcagcttcacatcgactcttgaacggtcacgctcgacacgagtccccatccaaaggcagaatcagctcggaagaagtctacacgcaacctcagtggtcctgtacagacttggggggcaaattttatcccaaattttgcactctgacgtggcatcacgagaatggtgacacgttgagtccacttggagcatctgctcgggaagataggccgagcnggatgcctcgctggcatgtcctgagtacgatattcagcgatccgtgcagagcaataaacacatagcgaattcaactttcgcatcatgagtcatcaactcaatccctataactcagggatcaatttacgtggatacggcatacacacgatcccac

SEQ ID NO: 154891 - DNA, 787 bp, Cannabis sativa
  modified_base (761)..(761): a, c, t, g, unknown or other
tcttgtgattttcagctgattatttagtgttgtaatcaaaggtaaagcttttaaaactcctcctcttgttttcttgaactttaagaaattggatttttgcatgatctgtgtttatgagtgttgtagttgttgttggtgtatggaatagtttttatgagtttagttatggttaattatgttgaattaagctaattttgatggatgttatgttggttgagcaagctttgagctttagaactcaagcttggctctttaatggtgatttttgattctgagcttggttagttattttattgcttggaatatgtttattgggttataatatgcaggtctagaaggtttcttaagctttggagttgatttggttagggtttcaaatttttggggttttctagtgtaaaccagttaactagttttacaggccctataaaactggttaaccggatcagtgcttggtctcccaaatttttcatgttgtcgattcttgttaggtgttaggttcagagctttggttggttatttccctgtttgtttagggtatttccatgttaactttcagtaggtcaattgttggtttaaaacctaagtccccggttgtgatttagcgtgtcacttatccatgttgtgaacgatgtgatttaggggcctgtaattcacctaacagttgttccactcttgttggctggcacacctgaatttgagaataaggtaagattagtataatgttatgcatatgtatttacatgtttagcatacatgtngtttatgcctgttagagtacattgat

SEQ ID NO: 154892 - DNA, 581 bp, Cannabis sativa
  modified_base (517)..(520): a, c, t, g, unknown or other
aatcaattatttattttatttccttaaatagaaaatcatttccttaaatagaaaatttatttccataattaaaatattcttataagaaggtcttaaaattgttaaataaactgctagcaaaataaaagaggaacgatattaccgaatgaaaaattctgggttgagtcgcggactaaatcactctctttaagacgttcgcgacactccccaagagtgtacaagcagtcgaaatttgccggtcaatcgcattatatagacgaatggattaaataatatagtgtcacaccaaccagctcgaattggtcgatgcgcacgcgcgtgtggtgggccaagtgtgtgtgtgttctcacccattcgcacataaaagggtgaggagctcggggaccgagaccctatatttataagtgagatactccatcagtatctacaccacattaattgtcagaatattttgacaattaattcagaaaatcaaattaggtaataaatatataaatctgaccatatatagaatatnnnntaattgattttgtcaagattcaatgaatataaaatattcatttatcagaaaatcaattatt

SEQ ID NO: 154893 - DNA, 818 bp, Cannabis sativa
  modified_base (487)..(490): a, c, t, g, unknown or other
  modified_base (553)..(562): a, c, t, g, unknown or other
aacactattctgatttttaatgtttcataacagttgcataaatattttgctaacaaatgtttcgtctaattgaagcctttgtctgatgcaaccttcggccaaccacctagcaaccttcatctgattgaaacattcgtctgatgcaaccttcgactaaccacccagcaactttcgtctgattgaaatatttgtttgatgcaaccttctgtcaaccacacagcaaccatcgtctgattgtgtaagtgatagtgtaagaggtattttgataattaaaagcacataagaagtataaatgttgtccacaccttataaaagtatatttgtaaataaaatattaatttgtatttttcatgtaataattccaaaatataatattttattttattaatatttttattactttttattctaaatagtaaacacttctactactattttggaccctatattttacaaaagttatcaattggactatctgttttgttannnnacaaaatagaccctatattttccaaaattatacaaataggaccatgaactgattttttgtcannnnnnnnnntaataataatctaatctaaagatattataacaaaactggttatattttttatatttttcgtgttagaaattgtcttaaaattagttatattaaaaaaaaaattgttgaaaattgagctcagaatcttatttttaccattttgaaaaatattagatctattttgtcatttaacagaacagaaggtctaattagtaacttttgtaaaatataaggttcaaaatagtatttacccaattattaaaataatattatatta

SEQ ID NO: 154894 - DNA, 669 bp, Cannabis sativa
tatctcacctataaatatagggtctcagtcccctagctcttcactcattctattctattcatcaaaattctatctaaagagagttgagagagcgaagaagctcaatttcccataccgaagctatcgcagggattgaagttcaaatatcaatggctggagctattttgatcctttcattacatatacaattttgatatatttacagtttattctacattacatattgtttataaatgttttcttgttcatattatattatagtctaatagttggtatcagagcggtttttatctctaccttatttttattttgaattttttttcatatatatatgtatacggtgttcttcatttatatgttttatatatatactttcatattttaataatcacgattatttgtatatatatttcatttaatatgtttatatatattatacattgattatatgattttattgcatgatcatttttataatactctttttcatatatttataatatttttatgcggtatatacattatatgggtgtatatataaacatgaacagtttagttttcggtttatttgttctgatttgagtttttttaatgtttatttctatatctatatgcttcaatacgttcatataatattatagatcgttttaagcatgaaaaactcttcag

SEQ ID NO: 154895 - DNA, 530 bp, Cannabis sativa
  modified_base (58)..(74): a, c, t, g, unknown or other
aacatacatgtaatcacaattcacttcaaaattataaattgataactaatcagattgnnnnnnnnnnnnnnnnnggcataaaacccaacagacatgtcttggaaaatgattgatgctctgaggaagagaatgggcagaagctctagcacctcctctccggccaagaagtctaagggcggtgaggggtcttattcgaaggaaaagagaccttctggagaggttattgatctttttgaggagctgactgctgcaaacccctctaccactaaaactgcccagtccaaggagtctggaccaccaagggttgggtctgaactggttaggagtgatcctaaacgggtgcaggcaccaactccacctttgccggtgcttccagaggccaaaaagggcaaggagatgctggcccactacatgaaccggatagttcttgacgttagtgggcaactggctggtgctgacaatgactcatctttggatgtgctacctgtaaatgatgttttagttacctaaaatataatcactaaaacaag

SEQ ID NO: 154896 - DNA, 550 bp, Cannabis sativa
ctcctcttctttgatgttgtgcaatgtgaattaaaaaatacagagaaagatagaataatatcttgtacagaaaaagtaagagagaagtaggtttgtagaagaaaaaaaagtaactcaaaaatcattattttttcattattttgttagtactgaaaagtctattttactataaataaatggttgagatttttgagggtgggcaattaaaataataaaaagatattttttagttaagaagtaaaaagaattttttttcagcatgggcttaagcccacactggtccttcaatgggttcgcctctgattattggtgatggaatgtgaacatggttccagatttacttagtaatcgatatagttgattaataattttgactttgtatcgtcaaaatgttagtctatgaaagtgtagtgtttgtaaaacatgtggtttgaagggatttgatgatagcgtttggttacaaaataaaaatggaataggaatgagaatgagaatgagaataggaataggaatagaatggaatggaatttctattcttttgtttggtaaa

SEQ ID NO: 154897 - DNA, 930 bp, Cannabis sativa
  modified_base (509)..(510): a, c, t, g, unknown or other
aaaaaaaaaaaaaaatcaaaaatgggtcataaatcagctgctaacaaggctaaaggaaaacacccaatcatcgacgatgatgactccaattttgctccccctgtggttaaaggtagtcgtcgtccagtgaagaagaagtcgaatgtgtctttgcctgaaaaaaattttaacttcaacggctaaaaaggaaagaagaactttaagacagctgtgatgaaactgttatgcaacagttatatttgttgtgaaccaactaacataaaattatataacaactaataattctacatatttaatacaaacgaatattacaacaattgtgtttatctttttaggtcgcgtatttgacaattttgagccctgtttttataatactatgatattatagtagcaaaactattattcaactaacgtcaacttaattgcaactataaatattaagggataatttcacaaatacataaaaacaacaaaaaaattacaaaaatacggtttcacagaattttaannatttttacggttttttttttattttatttacagaaaatacggttttttttatgttgttatgttgttaatttattgttgattttttgttatatgtatgttattttttgttattattttgatgttatttaaatattattttcatgttacttttatgtaattttcttgttgtttcatgttatttctatggaaaaccgtaaaaatataaaaaaaaattctttgaacgtaaaaatgtaattttttttttacaaaaagtggtgccttgtgtaattattccaaatattaaatgtgaatgtgaatgtgtatctataagaagttatttaacagtatttttttgtcactgattgataattacttgtaccttaataataatatgtggagaaacaactgttagacctctgtaaaccaactttatatcaacta

SEQ ID NO: 154898 - DNA, 579 bp, Cannabis sativa
aaggtagttagggtgttacactgtttgagatatcggatttcggtcttatgcattggaaatccctacaatcaacctcatccttcccaaaatgggctaacacttcactgaaacacaaaacaaataatcaaatacaataaatgtactaatatcaactacataaaaaatattcaacaaacaagagattaccttggatcatcggcgcaagagaaagtgtaacgaaagaactcgtacatttgattcgaataaacctttttaatagtgaagggcccaatcaccttttctccagaatcttggaatctttccaaggcagtagcatcgaaatcatccttgacggtctgctcaacttcctctttcacaataactgggacttcttctcccgaaaagttgatatcttcaaaagactcttcagaaatagccttctcaattggaacatcgacaatatcttctgatagattaagtgaagggacactcagtgcatcatcgacaacctattcagatttatccttcgtcccttcaccatccttttggtccacacccacatcatccttcttctcggtctcccccttgaaagaaagcgag

SEQ ID NO: 154899 - DNA, 540 bp, Cannabis sativa
gggggggagttggatgttcataataacgcgtctggcgattgtcttgggtgatatctcatagtgtgtgtcttagtaaatatcacccaacctcttacctgaatgattcaacatcgtttgaaggcaggtatgaatcctttggtttttcctctgaaacatgaaaaattacttgccttgtgttacttctgtggaattttaggtcacccattctataaatgtttgtaaaaaccaccaaatattcaacgagatgcggttcttcgatatggagattagattcacgtttcttttcctactaaggtagtaggtctgagatccaaataaggtagacttggtgatgttagttctagctctatttccttgggtggaattaggacccgcaatttttctttgtaatgaccgcgaggtctaactgtttcatttgattaatgtatgttcacgctttgttgaacgataaaaaaaaaaaagaagaggaataaataaatttattattatttcattattggatattaaaatattaaaaataataaaaaaaatatcagtcaa

SEQ ID NO: 154900 - DNA, 684 bp, Cannabis sativa
gtgctttcaacacaccaaaacatcgttcaatcacattccttaatgaagaatgcctataattgaacagttccttcttatcacgtggtcgattacctccattattatattcgtgcaagtgatatcttttgccacgatatggtggaagaaaaccttttgtacatggaaatccagaatccacaatgtaatattcacctaatacgccaaaaagaataattagtatatgcatcatcacataaaaaaaatccatattaggctttcaataccttctttgggcaatgaaaatttatattttggttttgtaattgcatctataaatattctggagtcatttgcggtaccttcccaacccgcagatacaaaagtaaaaaacatgtcaaaattacaagcacacaagacattttgtgttactacacctttcccacctctatagctgacttgcttatcttgagggacccatgcactcacatgacttccatcaattgcaccaatacaattatgacaatacaaaactattaattaccgacaaatatttatacacaaataatataagaaaatgtgaaggtatattataatgaatttagcgaattacctagaaccatggataatattttgaggaattgataatacgtgaaggaagaggagtttgagttgggcgaatgatatccttccctaatttacatattg

SEQ ID NO: 154901 - DNA, 815 bp, Cannabis sativa
aagtagttcgatgggagtaagttctagtctggtgaactagttgataagaccatcttcaatggtaacattttggagaatgcttgatgaagtagaaagtttaggtgccaaaatataagaatgctatattattaaagataaaagaatgttattcttgaaatttgcattgatgccacacaatgacatttgatgctatgttttttttttacaataaaaaattaaaagtacaatatatataataatttaataaaaaaaattatatatataataatatgtgagatcataataatagtatttttaaaagatattctactattggagtatttttttaaaataaatgtataaaaataatgtggaagaaaaataaaataaaatattatatttttaaattgtgtggagatatatagcacctttaaaaaatattactgtagattctctaatgtttcgttgacggatataggaattatagcctctagatccctaaggaacgaatcatatttttttaatgggaaattaaaaaacaaaccatgcttcgcatgcggttatattttagggaaatttatagttttgtatacattatataattttattacactatataatacaaaataatttatttacatttaattatacattctatattacatacataaacataattttaattttctatacaatctatataaggtaattaattttttcttagtcttatataaataaacaataaacatacatatttttccttacaacaaaaaaaataaaataaaataaacatacatattttatttataaaactatatataaaatatattagatta

SEQ ID NO: 154902 - DNA, 524 bp, Cannabis sativa
attaaaatgagttttatttaggacataaaacccaacagattgatccaataatattgattgatatttagtatgaaattctctatttatatacgtaccatattgcatgattagtagttgtaaagtatttattaattatatcaattaattagaaaatataaaattagaagaaaaaactacattaagtaatcaataaatttctcattgatttcgatgtaagtagaatacgtatgggtgatattgatttaattaactctataagtgaagaagtagtaaggtttgagtgtatatttaattcagatgttacaactttttaatattattagatgaaaaaaatataaaaaaaaactacaaaataaaataaaaattagaagaagatcaagtcatctcacttatttttgtttcaagattatatgtagatacaaaaatttacaatagacagatagcttagaagacaacttaaaataaaataataattaaaattaattattaataattaaaaacgtcaaaaaaattattcaaataat

SEQ ID NO: 154903 - DNA, 717 bp, Cannabis sativa
  modified_base (69)..(72): a, c, t, g, unknown or other
aatattatttataaatttctgataagtaaaatgatataaaatagaataaatatcatttttctaacttannnnttataaacaattaaatatttaactaattaagcaattttgaattcgaaaatattacggtgagaatatctataaaaatatctaggttaatttcaaatttattaattatttaatttatcctataagataattttaatataatattttaaatttttaggataaagatatcttttaatttaaaatatcgttaatattaaaacatctgatcttataattaaataatatataaatatgaaaaaaattaataaatttttaaaatctaaccataatattaatttttaaatttaaacatcataatatcaaagaattaataataatctatttaaaattaaatattattaatttaaaattgatattttaagtttaaatatattaaaaataatattttattttgatttttagggtttgaaattgggaaaattaaaaaaatcccacaaaattcgggtttttggctgagcaacatgttcggagtgcacacaggctgcgtgcagcctcatccacgcgcgcaggaatgcctccttgttcgagatgctggtacgagtgatgcaccatttcgacaccaccttgaatccaaaacttccaaaattcataactttctcaatttttattggaatcgagttccgtaaaaactaaaattgcttaattttt

SEQ ID NO: 154904 - DNA, 696 bp, Cannabis sativa
tctctctctctctctctcgtgccttcaagaaaagttttctgtgtaattcaagaattccagcatgtttcttagttatccaacccaaggtaacctctctaacactttgtcctatggatttcttaagcttgaaataaaggttttgcttgatttttgtgagttaggagctgtagttgctattattgtttgttgatgctttctgaagtcaatttgaggttatttatgttgaattgaggtggatttaggggttgttgtgatgtttgagcaagctttgagtttaagaactcaagcttggctttatggtagattttaattgtgagcttgtttagttgttttgttgcttggaatatgtttaatatgatatatttagttgttttgttgcttgaaatatgtttaatatgatatatttagtaggtctggaaagtttggtagagtttggggatgaattgaagttgtattggaattttgagtgattcctgcactaaactggaattccgtttcagtgggacctataggaaccggaattccggttggtccctaggaatccccacaaaaccggaatttcaattggggaaccggcctaccggttggggcagttttgggaaacctagttttcccctttttgcgatatttagggtattgctatatcatttatcgatggggaaacttttagtttcaagtttaagtccccggaaagtg

SEQ ID NO: 154905 - DNA, 500 bp, Cannabis sativa
aaataaggttttcgaaaaataacggtaagctcaaaccctaatctccctttttttttcttatgaactctaatttcgaattacaaattataattctaactctaatgctctgataccatgtagagaatggtgaaaaaaattgtgtgttgcattccataaaataatatatatttatatacaaagctaggagactaaatgggaaactactaaatacaaaataggaaactattaaatacaagttaccttaattttacaagttgcagcatgggccggttgccatggtggaagatatgcagctggagtcattgaagccatggggattaaagaagctctcagttgggtaaagaccaataattggcaacatgtttagatcgagacggacagtcttgtttcagtacaagctattcgaagcaaccaagcaatggagtccactttcagccttttaatcaaagactgccaacttttgttatctatcctcctaaatgttaatttatttttcatta

SEQ ID NO: 154906 - DNA, 513 bp, Cannabis sativa
agtgtaccattggggagcgaggggactatctggtggcacacgcttggggatctcttgaagatcaaacgatagcgttcctaaggagcttttggtaacggtaatggaggttacgatcttgtcgtttttgttgtttccccaattcgacttgaacctcttgcaaggtcgttccgttcgatgtcagaggtggcaaagggggttttcttactttgatctgagtatttggtttttgggaaagaagattagggttttgatgaaaaaacaagatttgggggagttcttatttggcatctcatttatttatcaagcgaaacaaaagaaaaaagaagatagatctatcaattgtccatgcttcaaggtcgaagacttttctcaggaagattgagctctctgcgttttctcgatctatgaatccctttccccggtagtatgaatttttttcccctttatctctatatatgattgtgtttgtggatattgttatttcattggtattagggtttctttctgtaattg

SEQ ID NO: 154907 - DNA, 501 bp, Cannabis sativa
agtgatcaaatattgacaataaattatgtcaaacaatatgcaatctttggactaacacattgttcacacaaaataccttataattgccacacatttatcaccacaaatatatatgaaattcaactaaatattaactcacctttgggttaattaataaatttatgaattacatacacacaattattttaatattttaattaaattaatttacacagaagtgatcactttagtgatattttggttcaattaatttaattaaaatattaaatatccttaaataattttaaaccaaaatttgaattaaattgtaactgtatcattattattattataattaaatgcattaagtcatatcaattcggcattgacaactcaaataaatgtatatatatatatacattaaacaaaagataacttatatatatatataaactaggtgattgttacgtgccaagccacgtagtgttagttttatttaatattttagttttttattttaat

SEQ ID NO: 154908 - DNA, 564 bp, Cannabis sativa
gatcaggattcaaaaaacccgtacccagacttagactaagagttagaccccgaccacaagctggacccagaccatgacccggacccgaaactaaacttgggccgggaataagaactggaactttgactaggacccgaacatgagaccagaaccaaactcaagccataacccaaactcagacaagaacgtggaccaagaccttgaatagcacttgcacttgagacatgggacccggacctggactgggacctggacctgacctggtcctaaaccctcgccgggacctgagacctgtgaaccagaccaggataccgaccctgacaaggaccgaaacctgaacttggacaaagattaggagcgagacctggccctgaaccccgaccgagacctagactaaaaccaagactcgggacccgaagccaaacctagacccagaccatgacctaggaaccggacatggatgggggagctagagcaggcacctaggtcccggaacccagacccagatctaaatccgggactcaaacccaaactaggacctaacctagtgttggaaattatttt

SEQ ID NO: 154909 - DNA, 556 bp, Cannabis sativa
tcccactcgacccacgagacccactccgttcaaaatcgtcccaagcaccgtccacgaaccaggtatgggctaagcttaattttttttttgcaatttatcatttacattgtgcatctgtgatataactgaaatatgtagttgaaattaggttcgatttgcttgtttttgtgtttggagaagaatctagaatagggggaattggtttttctggttttgggtattttgtgcgattttgtgcgatgttgtgcgacgttttatgcgattaaaaatacatttatgatttctgttagttttgggaatttgagtgatgttgtgcgagttatgtgtgattttgtgcgatgttcacctgacagttgtgcctgtgggaattgtgcgattatttggcgatttcatgcgatttttgtgcgatgacttacaccatttgttctctgttttttatgcgatgatgttcgatgtttatgcgattttatgcgatttatgataaataagcatttttgttttgtttgattgtagatggctccagaactgattatgcccttggctgagcattttccag

SEQ ID NO: 154910 - DNA, 755 bp, Cannabis sativa
cttcatggtggaaggcatgggcaccacccatactcggttccagcagatccccacatatcaccgccctcccttcacacttgctcttccacatagagctcagaagcttgccctgctggcgggtgctgcctagaatatcactctgttgaccttcgaggacaactttgtggactacgggctttacccggaggatttcattcctaagcatgtgaaggaggaaaaaaggaaatctagtgccgccctggctgagggagctcataaggagaatgaactcatccaacttaagcatgaagctaagttaaaggaaggtgcaagggccaaatagtatgctcatgagactttgaatcctgaagatgaggagagcaggtgactgcgctcaaaaagaggaagaaacttccggcctagcctaggcccgttgaacatgccattcgaattagggagcccagctcacctgctcggccaccttctcccgtactaggaaaagggaaggccgtcatggcggagataaaagacttgtcaggtgatgatgaacttttgagtcttgctcgaacaaatgcttctcacgaagcacgggatactacgtcttgtttttaaacttcttgattatcatgcttttatacttctgatgccttttttcttctaaccatgttgcttttattctaagatgacatgtctcaaaagatgctcgatgctctgaagaagagagttggaggaagctcaagctcatctcctccagccaagaaatctaggggcggtga

SEQ ID NO: 154911 - DNA, 618 bp, Cannabis sativa
taccatcaaatttatcaatatcaacttttatgttactcatattaataaaatttgaaaaacagatagagttttagaaatctcagtttgtgttttttctatttcttaatctgaaaattgattcagaatcttgatcttcttttctggtttgagtgtgttctttgaatgtcaatctttctttcaagatttcttgccaattccttcctgatattttccttgagtcttgttgatccttcttagccaaaccagactctgataccattgtaggatttttgacacttttaccctacaacaacaagagcacttaatatcagtatcaaggtcaaaaatgacctttcctagtctaacttaacccttagaccaaaacggtaccgttcaaactccacgacaccaaacttagtgtcgtattgaacttttggtttaaagactctgatcgaagagtctagaaaccctagcctcacaaacactcagcctcccagttcgaaaatggaaaccctagcagagcaagttcttcacaagaagttgctcaatcccagtagaaaccctaggatctttcacccacacacacacacaagttagattaaacgagtgaaaaacaaaaataaaggagagaaaacacca

SEQ ID NO: 154912 - DNA, 528 bp, Cannabis sativa
  modified_base (487)..(489): a, c, t, g, unknown or other
atgttcattgaagcataattacacatattaactttaagaaaagagatgcaaatagagaagagaagaagagaagattgctgaaaaccctgagaagtatgcctcaaatattgcagttgatccctccactctgtatatgaattctctcttttttctctctctaaaattgcttcttgaaatcaactcccttcttccctttatatagacattgaaggcctaaaaagatggaaaaaaacgcacatgtttaaattcccattcggatttaaatttttgggaaacctcaaacgagatattttttctattgcgtcgactgatattattttagccataactctctcaatattgctcgaaattggacgatttaagatgttccggaaagataaaagagagatatagaactttcatgttttgactttttccaaaacctaaacagaacatcgtcgaatccaggcttgaagtttcaggtttattttcttgcacaattttctcnnntttaaatatcatgatatttttatctttttcccatctttt

SEQ ID NO: 154913 - DNA, 553 bp, Cannabis sativa
ctaaatcaaaaaagggaatgggggtcccctaaccactagaaagaggccccctccggacttttgtcagcaagaaagccttaggaagatttcctggacaaaagtcgggtgcaagatctcacagatggtgacattgggcataaaagaaaaagaaagaggaagggcaaaaaatcgagaaagacgaagtcttctctattcccttgaaggccatcacacgaagagtatatggtcctttataaaaaataataacagtgcgtaacaagagtaaccctaacaccagagaagggaaatctagacgtattacatgaaaactcaagggaatacattcccagaaacttcaaacactaacccagaaaaacaagtaaatagtaaagcatgccatgaacacaacagtaaagtaaggggtgcgagaaacttacatgaagtgttggaactgggggtttgctgttgatcaaacaaagaaatctgtaaattgtttgaaggttttctggtctgaggatttctttctctctggaaaactcgaagaaagttggtgaaaaaaaggaaagtaaccaaa

SEQ ID NO: 154914 - DNA, 556 bp, Cannabis sativa
  modified_base (206)..(209): a, c, t, g, unknown or other
aataaactcttgctactataatattagattaagattttggtatttttattttgcactatggtatatatttattctgtgataggatatattaagaaatagaaaataaaaaataatattagattaagattttggtatatttatatagctcagaggtatatcttttcaatatgggttatcgtatatacaaacaatttaattttattacnnnnaaaaaattactatgatttctttgttttaggagcaaacaacaattatggaggaacaaaaatcacaggagaatattgaaatgcaggtataaaaatgaacatttaaattatttgtgtatattatgatttaagtttttggtatatttattttacactatggaatatatttattctgtggtatgatatattaaggaataggaaataaagaataaactgttgctactataatattagattaagattttggtatatttatatagctcagaggtgtatcttttcaatgagttatcgtatatacaagcaatttcattttattacgtataaaaaattactatgatttctttgtttta

SEQ ID NO: 154915 - DNA, 917 bp, Cannabis sativa
ttgtaattaccaactttttagtttccacttttgtttatttccttttttagggccataaatgtaaatttcatctatttttggtctataatagaaaaaatctcataattatggcaccattcttatcttacttataaacaacagtattaacttatttttttaaaaaaattatatttatataattagctcaaaattaattacgaagtccacttaacaacataagtcgttgccaccattaaaagtggccttataaatacctgatagtatgatacaatttccaaaatatatatatataattagctcattttgtgcccatatgtagaaaatacggattgcaatccgttgtacggtaggtgggtcccacagtacctttaaatattttttaatttaggtggtcaccggttgttgtaggtgtgttaaccggttgtggatttatttttttaattaaaaaatagtaaggtacgaaaaaagtacaatcatattattgtaagtgttagttatagtacgaaaaggtacaacatacttcactgttcctggcagttaatggtacaaaaatattgtaggcaatgggtccatgttgtcagattgaggctattttggtatttccttccttcatatcatctatgtatttgtgggatggtagttaagtacattatatcaagtaccgtgtatattacttgtttttgcgtgatgtttagtaaaattagtgtacataatatcacgtaccgagtacgttcatttacgtttcgtagtatattgtttagaaaattttgttttaagtcctgaaattatttgttgttgtacatcgagttttaagttggtgtaatttttttattttaattatttcgtatattaaaaattaccacaaaaatatattttttcaccttataagattcagttttttttcctaggcataattt

SEQ ID NO: 154916 - DNA, 523 bp, Cannabis sativa
ttaaattctaagtttatttttaattttattttgaagaatgtcattctaatataactgtattttttggtttggtgttgtgatgtttttcagttttgctaactggaaggtaccttttcaatgtgatggcggtgttgtttgattgtgttattagctttattttctaaatttccgggggcagttttgtcccatgtggctcgggataagaattctgcagcgcatggtttggcaaagcatgcccttcggttagacaatgagctatcctggttcgaggaggtgccgtcgccgattgtggattgttgttgtttatcatgtgtgattttaatcaccgcgtcaaaaaaaaaaatagggctcgtaattgtcaaatacgcgacctgaacagataaaacacgattgttgtaatatttgtttgtattaaatatgtggaattattagttattttgtggttttgtgtgagttggctcgcaatagatataactgttgcattacaattttatcacagttgtcttaaagttgacttcttctt

SEQ ID NO: 154917 - DNA, 1002 bp, Cannabis sativa
ctaaaaattcatgaaatttctcaaacattttaaatttctttattcaaggtataatctagaatgattgtcttaagaattaaacgataactcatatccatacctgaatgtacatccatatgtctaaatacagatgatcttacttccaagtggatattagcatgttttctctttacagagaatgatcttctcaaaactactatgaacaagatataaatgtcatagatgtattattgtggctgaattgtcttttgatgatatctaggtttagttacaataaagagttcttagaatagttcaagtggattctagtcacagaatacaaaactcataatccatacattaatatatagtttgaatccattgttagaaaatggatataaacaacttgtgaaagtttgactgtagtgtttaatgattatggaaactgaacttcaatttctatttagaatctaaaatttaaagtcaaagacataaatttataccaattatttcttgagtaattattctttcttggaccaccactattaatataactcaaagtttaagttgccatatataagcatatttaagtgggagattttctaagatcaaggatttatatcattactggacagaatatctagaatatagatattgcaaaattgaaaaatatataaatatccaaagcatataaaaaaaatataaacaaactctttttactttagaatgaaattccatttagcgtggacataaacctattaggattctctagtgagtatgtataatattttgagtttttagtggctaaattctcccaactgtagtttcacttgcatttaatccttcaagctaatttttggtgataaaatcctttgaacttctgaactggtagtaaatttaaggtgctatctgcttaagtgttactatagactgcttatgtaaacactcttgtacacataacacgtttaaattagtacctaatattattatttaaaaatcattttcaaaatttattttaaaatt

SEQ ID NO: 154918 - DNA, 505 bp, Cannabis sativa
aggtcctaggtcccggtttgggtctaagtttgtgttttggttcgggtttgggtctaagtcccgatttgagtctaggtccaagtttgggttcgggtcctagttcgggtcccagtcccagtgtgggtacgagttttgggtcccaggtctgactctagttcttaggtactgggtctagccccagtttttgggtatcggtctgggtgtgggtccggcactcggtgttggtccaggtcccaagtcacaggtcccgatccaggtccaagtcccggtatgtgttctggtctgagtttgggtttaggtttttgtcttgttactgtcccaggtctaggttctaaacccacacttggtctgattccgattccgggtctaggtacggatccaggtctgggtcctggattcaaacactaactacgggtcaggtcaaagcctttggtccagattcggatctaagtcttgttttagtttaggtctcgaatcttgggtcagatcctaagttttggtttgg

SEQ ID NO: 154919 - DNA, 501 bp, Cannabis sativa
aaagtcgcagatgaatctgttcctgctgctcccaacgcttgacttttcccttctatgtttgcttatgttgaactatatttcttttgaatttgttatttttttatataagcggtacaggggtacccgcactctgtacttagacaaatttgcaatttattttggacaacttcatatcctcgcggggatatttaatgtttaacatttttcgcagtacacatgtactcgcgtttatttattcgactttaattacagcttggtgtaataagtagaaaatctcacaagacttgaaaaaaattgtttaaacttgaagaattaacaagtatgaggcatttcctttatataataaatagtacattatggtatatatacccccctatactaaggatttttttttcttttttttttttataaaaaatgagtaagtataagtacaaagtgaagacaatttaaataatgcgagtactattgataatagaattttaggctttcgccattccaagc

SEQ ID NO: 154920 - DNA, 596 bp, Cannabis sativa
aaacaactataaaaagtgacccaaaacgtaggctaaaaatagcctaacaccttgcaattatttctttatcctttagtatcactaattcactagtggaagtataatttaaattctatctacatttgcacgcaactttccacttttagaattaacacataaagagaactaacattcgatccattaggaaagtaaggattccataattatagatcatgttcccagccatcaacattattagattcgcaaagtagaagttgtaagaatcatattctctgagaaactttaacaagtgaattaaaaaaaactaataatgtagcaccctactagttaaggcgtgctaccgtaattttttaatatgtgcactcatttactaatcaaagggtttatggaaaaaaaatgtgaataatttaaatttttattataattaaactttaaacttgaatatatataaattctttacataattcaggatcctattttaaaattatagccacttaacaaaatagttaattacaaaaattgttgcctagtattgtgatattttgcacacgcaagtgcacgtattgtttacaagtagtagactcaccaagagtgag

SEQ ID NO: 154921 - DNA, 605 bp, Cannabis sativa
ttattaataataacatcttcttcaacatgattcttatgctggagagacatgtcgacactatgagattatttgggaaaaaaatataaggaaaactagataattgagatcaaagagatgaagagaaagatagagagtttgtattatttggagtgcctctatacccttcccaggggttgatatttatatatggacactgttggtacctttccacgccctaagtgcttggccacatcaatatgctaatattgtaatacaactactattattagttagatatatattatattcattttcatattcatgtgctcatatatatacataccgtttattattcaaaaggattttaatataatatataccactactataatgttagttagatatatatacatattcactcacgtgctcatgattagtgataagtatataaatatataaagtgattttaatgcacttcttaaaagagatgtactgatacacttttgatttgttttggtatctagaaaaaaaatttagtctatttttttttttttttcatatttatgtacgttataactatttaagataacctacaaaatttagagaaattctaaataatttacaat

SEQ ID NO: 154922 - DNA, 643 bp, Cannabis sativa
agccccattcaagatgttaattctattttcttagattttataatttctttaattttttaaagattttatttctcatttatttcgtgcggcagatttaaataataataaaaagaaaaaaaaatcattaatacaaattaatttaaaaataataatttttttgacatattaaaaataataattttaatttataaaaattttcaaattaaattaaattaaattaaattttcaaataataattttgtcatcatcaatcatatcaccgtatcgaaatttgaccaaatgttattaataaattaaattaaaaaaattaataaaactttcatttattgttgctaccacactacattatcacatatacaatgttatattttttttaactaaatcacaccaaacatagtatttatccaattatcaaaatcctatcgattaagagattatcaaggatgaaaatactaaaaatagaaaactttgtaaaaaaactcgcagaaagagagaaatctatagaaaactcactataaaatgccgaatttgaaattcataaaagtaaaaaaaataattaatcactatacaatgttagatctacaaaagaaaaagaaatttaatataatgattattaaaaattgagaactttgtaatgaattca

SEQ ID NO: 154923 - DNA, 511 bp, Cannabis sativa
gttcgagttattgggcatatcaaggtgattatggacatcatcctacctctttacatattattgaaagtgtccttgcgatatgagaccttctatctcatcttccagacgacactctttcgtggtatgacaaatatccccatgatattcacacggtttagttggatcgcttttacgcctcgcatgtttcataggttttggctcactaaaaatgacttcccgtacatgtgcgaggtaaaaattttctcgagtttcactaagctcgatatattcagcataaagatgaatatatttttttgtgtttcttatccttgtgcagccttttggaatcgtcttttctctttgatcctgaggcttctgattcaatttctccaacagagtcatgccccggttgtctcctgagtttcgtgacttgatgccttctaaacttattctccatctcgtctatttgcaaatggagtgaatcctttggttttggacctagttattaacgaagatcaggcttcttcaagtt

SEQ ID NO: 154924 - DNA, 696 bp, Cannabis sativa
tgatttttacccaatatttttattatttttttaatccatataattcaatcctaagccctagttaaaaataggggtgagcataaaatccagaaaatcgaataaaatagttcaaatcgaccgaccgaacaccgttggaatcgaaaccgacgaaactgaaaaccaaaaaaactgctaacagttaaaaccgccattaaatggtcctttttttggataataaaccgactggtatacatatatatatatattaatttattaagtttttttttcttgtattatagttattaataatatataaaaataatataattattttttattaatattaaagttaaaagaataagataattagtttttgaacaattaatttgtatgtttgtagttgtaaaatgtagaataatgtattcatagaataaattagatcatttttttttaaaaaaaagttcagtttgggcagtttaaaccgaccaaacagaggttcaaaacggtcagttttaagataagttctggattggtcggtcagttttcgaattgcaccaatcgagaccgaaaaacgaattttggatttttatataaaaaaaaaactaaccaaactgactgatgctcagccctagttgaaacactataaaaggaacataatgctctcatctcatcctcttgtcaacttgactattcaacctaccaaatttagttttcatt

SEQ ID NO: 154925 - DNA, 557 bp, Cannabis sativa
taattaattaattatgatttcgataagatatcaattagttacttttgataaaatcatcaattttaaaataaaaagatgatgatcaaaccaaaaatcctataatcatttatatatatactcatatatgtcaaataaacagattagtttattttggcatattaaaacaaatttttattctttgtttacatttttcgtatagtctaccatcatatgtgctaataaatctattggtttattttggcatattgaaacaaatttttattttttattttcgtatattggaacaacaatttatttcatttcatatagcccactaatattatatatgtcaataaacctactagtttctgtttgttagaacaatattttatatttttcaatacagagtaaactataatcaaacataatgatatgcgccaataaacctattagtctatttttagtatattagaactacaattcaatttttatttcaaacacaatgtgtgctataaaataacaaactaattagtctatttttttttttcaagtctagacatcaaatctagttgtataca

SEQ ID NO: 154926 - DNA, 545 bp, Cannabis sativa
agatcgtaaatcaatcttcgaaaacactatttttccttgaagctgatcgaataaatcattgattctgggtaacggatacttattcttaattgttaacttattaagcttccgataatcaatacacattctgagggaaccatccttctttttcacaaaaagaaccagagctccccagggagatacactaggtgggataaatccaatgtcaagcatcccctgaagttgtaacttaagctccttaagttttgttggagccatcctatatggagctttaaaaacaggttcgactccatgtaccaaatcaattacaaaatcaatttcttgatgcgacggcaatccccacaactcctcaggaaacacgtcgagaaaatcttttatcaccctgactgcctaaggcccaaatgtttcaggtctgctggagtcaattaccaccgctaataatcctacacctcaaatgtgtagtaagtctcttgccctcagtacagaaataactgggatcccaggcccctgaactgatccattataaacaaatggatcttcacctt

SEQ ID NO: 154927 - DNA, 1012 bp, Cannabis sativa
agcataaattcttagatgatgaaattttattttgtcacttgatttctttatgtttgtttgttacccctttacaaaatctaaaatttattaaatcaatgggtcaagaattttattaaaaataagtttttctattctccttttgttttttgaagatataatcttaatacttatactaaagtataatagaattctcatgattcaatttatattttgtaccataagagaaattataaggtttttttatatgaggcaaatttcaacaaatttataaataaaaaattagtagaaccaagattttcaaattctaaatgaacaagaatgacctaatttattcaaaatagaattcaaaaccaaaactcatctaggtgatgatattgtataagtcttttccaaatccaaaaataactagtcttcaaccacagtttgaatatccttataccctcatatgtagatgtttcacttttgcccctaaagatgaatatttcatcatcacttgacttttatttaggtacaataaattaaattatttacaaaacaaaccatagtgagaaactcattttcattagatatgcctaatgacatacttggaacactttaacatttttttaattcattttgcaaaagtcaaagataattccatatctaatatctttttcactttctttaatagtgttccatatgcaacatactgaattttatctttatccttatcctttatttaaacaaggtagctaaagaagcatgtttgtctcttttatttagttaacaatttatctcatttagcatgagaattaactttatgttggtagatataactaaaacatgagctaaaaagagaacaaaataaacaaaggttcacaaaaaaatccacataacaaaataagttcaaataatggcaaatcctatctcaagatactaaacacaccattaatatcaagtctttggacaataatattaactgtaagttgtactcttgttgtagcaatcaaatattgacaataaatcctgtcaa

SEQ ID NO: 154928 - DNA, 977 bp, Cannabis sativa
taaaaatccataggtaaataagcacctagaggtaatcacttgcgcgagcaggacgaaacaaaagcgagaatgtagtaacgcaaacattagtgaaaatctaatggcccgaaaatttaagggttcatctacaaggttcgttcatggaaggtgagtcagagcctaagatcaggttgaaatagtcgatgaacaataagtgaatattcatatactgagattgttgaatttaagaatttttgtttaatttcatttaattttactaatccggtgattgtttaggttagggattttaatgttacgtatacacaagtaggagtgttcgcggtgcggatagtgtaagttataacatttttttcaaaccaaatcgtagatgcagtttttataatttctaaaaccacaactgcatcgcgagattttaaaaccacaaaaactatactgcgaaaatacagtgtagtgcagtgcagtttgaacgatttacactatgataattatgaaacatcataatgaaaattcaaaaaaaataatctaataaagttttaactatacaaaaaaaatcttattaaagtcttaaaatgatgacatatatactaatgaatgtaatatacacatatatttgttcttatatgaaaaaataataaaaatcgtaaaaattggtaactttaaaaatatatagtgcggtacgatttaaactgtaatgattaaatttaaaactacaaactacaaccgcactgcaaaagattacaaatcgaattttttatgcagtgcaggcagtttgtgtagtgtggacagttgatgaacacatgccctatacacagatatatacaatgattattcatttagtaaatacctaagtttaatttttagcgataataatacttaatttatatttttggaactccataacaaacggttgacgtttaaatatcaagtcattattcatgtgttatttttttttattggtatatttaatttaatttttt

SEQ ID NO: 154929 - DNA, 549 bp, Cannabis sativa
  modified_base (289)..(291): a, c, t, g, unknown or other
caaagatgggctcaaggtggatccaggtaagatagaatccgtcagggattggccaagaccaaaaacagtgacagaagttagaagcttcttgggtcttactggttattatcgtcagttttatgaagggttttctaaaatttcaatacccttaaccgagctcacaaaaaagaatcagcattttgtatggacgaataagtgtgaatcaagtttttaggagctgaaacacagctctagtgttagccctatcttctgacaaggagaggttcgtggtttattgtgatgcatccannnagggtctggggtgtgtactgatgtaggctgatcaggttatttcttatgcctcccaacagttgaaagattatgaacagcggtacccgactcatgacctagaactttccacgatagtgtttgctttgaagatatggcagcattatctctacggagagaaatgtgaaatttacactgaccgtaaaagtctcaaatatttctttactcaaaaatatttgaacatgagacagagacgttggttaaggattacgattgtgagat

SEQ ID NO: 154930 - DNA, 515 bp, Cannabis sativa
attgtaatccttaaccagttccaggcaccttctctgcctcatatttagatgtttctgggtgaaaaagtacttgagactcttatgatctgtgtaaatctcgcatttttttaccataaagatagtgtcgccataattttagagcaaatattagagcaacaagctctaaatcatgcgttgggtagagctgctcataatctttcaattgacgggaggcataagttataactttgtcagcttgcatcagaacacatcctagacgctgtctggatgcatcacaataaacaacgaacttttcttgatctgatggcaaagctaaaagtggtgtcgttatcaatcgttgtttcaactcttggaaacatgcttcacatttgtctgaccacatgaattgctgattctttttggttaactcggttagtggcatagaaatgttcaaaaatcctttgacgaaacatcgataataccctgctaaactgagaaaacttcaaacttccatcacagattttggcctcggccaa

SEQ ID NO: 154931 - DNA, 549 bp, Cannabis sativa
  modified_base (399)..(399): a, c, t, g, unknown or other
agtcttttctttttacatcctaatcctattcctattgcatatattttatttgttgtaagtctaaactttcttgtagatatacattccgattttatagtgtatagtgtatgaaatatctggcctggtaatggtcaaatactacaatttgccaataattcttctgtatagtgtatgatcaggcaaagtttccttctcatcttgcccaagtttcaagttcccatccattggtgtactcataggcttgctgcccaaaaatacaagatcttcaaggagttaagtgcatatggtctttgagaaacaaatatctctttgcttgatctagcaatttctagccccaaaaatgtaacatcctaactaattaggcatgttaacgtgatttaaacatactgtgcagctcgntgctaatcaacgagattaatgaaagacgtgattaattaaaattttcttatttgattaataaacttaaagtaatatatatataaaatttcgggatcccgtttacaaatacatttacaaaagtttgctactcatatacaaaagttttgtcgc

SEQ ID NO: 154932 - DNA, 745 bp, Cannabis sativa
  modified_base (496)..(497): a, c, t, g, unknown or other
caaatagcaagcaagcaagttctagaattgattcttccatcattctacttttctatttagcatgtaaaaactacactcaaataattaaaatttaccaagtatggtaccgtattaatttttatataatatttagatccaacaatagccaaaaaaaaaaaaaattcaaatcatgcaacataaccctagtattagtgtatcatcagctcataaagtgacaatttgactcataaaaataaacaaatctactctttactaaacataataatatgtaaagtccttttttggcaatttaggtgtcaaaatattttttatttatggtgtgatttctttgtgcaattaaacagattttattaccttaatattatgtatttattgctcttttctatcaaaggaaataatcatttttcagctatcatttttcttattttagaaacttcttgtaagagaagaaattttcttattgtaagtttgtttgatatggaaactttgaccattnntatttctctttaatgtgtttgattgtgtcttgatcaaatcaggtcaagcacactatttttggcaggtatctagtccatgttcatgatcgatcacctatttggaaagtttcttcttttggtctagtttgctgctatagaacctgattctgatgatgcaaaataggtgtcattgtagaaaagtttgtacaactatggaatcgattatgtggctgtctctagggttcctatgttctataaatagaacctag

SEQ ID NO: 154933 - DNA, 523 bp, Cannabis sativa
aagacctggacccgcacccaggacgcgaacttggacctaaccttaacccacaccaagaccgggatctagaaccggacccaaacgcagacctagactcggaccaggattcatacctcaacccagacccaggccgaaacccgaacctagacactgaatcgaaatggaatctgggagaaggacccacacctgaatggacccagatcaggacctagtacctggacctacatttgggacctagacttgggcctcgaaacctagacccagatcggaactcgggactcggacacgagccttgaccgagaatcaaacccagatctggatacatattgagatcagaacccaagcccagactcggacatggacttgaaccccgactgggtcccgaactcagaccgggacctaggacatggacctggatgggggacctagagccgtgacacgggcataaaaattgggaccgagacccgacctcagattcggaccgtaacctaggacccggaccaggacctgggacccaaagtcg

SEQ ID NO: 154934 - DNA, 775 bp, Cannabis sativa
tttttttttttataaatgtgtggattagattggattagatcagttacttttacatgtcaatcaacatccaatctacacaagtgcggatttggaattttccaatccgcacaagtgcatctattcgaactttccagattagattgaatcggttattttctgaacacccctagccacacggaaaaaattatatttttactgttctggctttttctttttcttttatactataaacaccgaaaataaaaaaagagatctccatcttccacactcacagacagaaccaccacaacaataccagaacagccgaaaaataatcattaatttcggcgagatgtttaatgcttgaattgtcatagtttttctaaagttgtttttgggttgtactgttgttttgtatgtttaacaaatattggttgcaaattacaaggttaaaccaatcactgaatatttatttgaggtaatcggaatgaaagaatcagtgacagtaatagtcttacctcccattgaaatggtaaaatctggaagaccaaaataaaaagaggatggaagctggctggaaaaagaaacaacataacaaatacagcaaatgtggggagctgggacacaacaagagaatatacatgagaaggcatcaaaaatgaaaagaagtagaataattaaaaaaaaataccggtggaacaatggagaaaaactgaacatatattggagcataggatactgaaaaaaataacttacatacaaatttcattagtttcctattactattaaaaataga

SEQ ID NO: 154935 - DNA, 706 bp, Cannabis sativa
  modified_base (492)..(498): a, c, t, g, unknown or other
atcataatcttacttcattaccaacataattacatatttaataaaatatgcctatttaaatattatttattttccaggatattacaccccaactcaagactgacgtacaaaagactacagtgaaacctactccaacgagggtgttcaggataactcaggctgatgtagaagccagcccttcagtagcgctctcggtcaacaactcttatttctctatgttgtttgattctggggccactcattcctatgtggcagcaagaattttaagtaaattggatagaccgcacgatagttatgaatcagcatttggaaccctattacctggcggagagttagttatctctaaaaggtggattaggtctatgctgatcagaatcgaggatagggagttgagtgctaacttaatagaaatgagtttagcagattttgatattatactgggaatggatttcttgtccaagtattcatccagtattgactgtaagaggaagnnnnnnntcttccaaccagaaggtgaagaaccgtttgtttttgtcggatcggttcaaggatcccagatcctgataatgttagtattaacagctaaagaattggttatcactccgtctgactctatttggccagaagatatcaaggtggttcaggaatttctagatgtgtttcctgatgaacttccgggtttaccacctcagagagaaattgattt

SEQ ID NO: 154936 - DNA, 677 bp, Cannabis sativa
  modified_base (615)..(619): a, c, t, g, unknown or other
ccctaaacaacataaaaatgggaataactagggttcccaatttttcccaaaccggtaaaccggttctacaaccggaattccagttctgggaattcctggaagcccctgccggtagaccggatgctgcaggcttcactgaaccagaattctggttcagtgcaggaaataatcaaaattccatatctcattccaatcaactccaattcacaccaaaacttccatacctattctaaataccccaataaacatctctaaagcaataacacaacctagaaagcacagaacgaaaaatcaacatgtgagctacaagctttgacttcaaacctcaaacttggctaaagctcacctacatgcatcacaacctgatttaaactacttaatcaagcatattataacctctgaaaacaacatcaaacatctacaacaagtacagcaccagatgtcatcatttcactttaaaaatcatagttttgagtaaaaatttcaatcttgaaccaaagcaactaacatgcatcataaccagctctaatctactcaaataaacatgattaaacttctgaaatcaacgcataaataaagcagcaacaacactccaaaattaagcatgcaaatcannnnntttttcttaaaactcaagaaaacatcaagacaaattcaagaaccttaccaacaacttg

SEQ ID NO: 154937 - DNA, 596 bp, Cannabis sativa
ccaaacagcattggcgtatctgcagctgaacaaggcgtggcctattgattcccaggcagatttacaaaccgagcatgttgaattcgcgataacctttcgtctaaccaaagaggtagcaaccggtagtgcattatgaatcacacgccaagcaaaaatctttacttttatgtgggagttttaagccccaaaaaagcttacaccaggctgcttgtgagttggaacttgagccaagagcagtttcagcatccgcaatagacgaggcaaggtgataacccgattggacagtgtatgtactcgtagtattgtagtgccaaagaagagtatcattactctgaaagaaattgatgggtatagttaatatacgatcaacatccagtggtgagaaccattctttgagaaggggaacattccattggcgttcatcagttattaattgggagaccctaccatcacaagggccagtgtatcgaaggggaataaaagtttccaagcctggtatccagggatcagtggcaatatgaacaagtctcccttctccaattttccaccgtagccctctaatgagtaactctctaccccaaataattccttgccaa

SEQ ID NO: 154938 - DNA, 526 bp, Cannabis sativa
tgtttttaatcagcataatgtttctgctgattttaagtctattgtaatggctgaaagtgtttgaataaaattttcactttgactcaaagaaaaaaagttttttttttcaaaaatacgacacagagacttcttcttccccaaaagaatttctccttcttgcagagcaaaataatgagtttctctccattgtcgacaactcttattaagggatggagatttgaaaatcatcaaccaccgatgatgtagaaactattttgcgatctccatgaacgccggcgaagaattttgccctgatctccattaacgccgacaagaagtttttcttagatgttctaccatggcaacgagatcactgtgaggagatatccatgaagccaatgagaaagaatcaacaatctagggggagatctagtggaatcagagatatcatacgactgagaggtcttcttgaatttttatacccacacgttttgggttttctttcaaaaataaaatctaatttttatgtagtttttgaaaaaaaaaa

SEQ ID NO: 154939 - DNA, 641 bp, Cannabis sativa
gcatgaaagtgaaacaacagcacataagttccaaataatagtttcataatagtcattttgattcatcaatgcaaaaaaaaaaaaaaaagttctttataacatagaaaaatcactcttttaaattaaagcataaattcagaaaatttaattccaagcaaattgataccatgaaagtgaaacaacagcataaaagttccaaataaaagtttcataattatcatttttgattcatcgcatgcaaaaaaccgtgttcataacatagaaaaatcaactcttgtaaagcacaaaattgagaaaaaaaatttacttgaattaactcatctccaggtgaagcacaagccggaatctgatctttaggcaaaactctaacctgagcaccactctcctgccttatcttctcgacaatcttcccaccacgtccaagcacacacccaacctgactaccagcagccaacaatctacacgccacaaacccatccccactatcattctccttctcattctcattctcctccgccataaccatcttctccaacacctttaaaagcgccaactgagccgccgagggcgagctttctccatcgctagggctagagctattactccgcttgttgttgttatccaagtgatcgaatttcgac

SEQ ID NO: 154940 - DNA, 522 bp, Cannabis sativa
tcccacaactaaccatgattgagagattttttttttttcttttttttttcttttcccaaaatcactgaagttttttttctttcaaatcttttgattcatatttcactttcttttttttttctcaagtgatgttgagtttacaaaataatctttttttttctcaatcttgcaagttttctttcttttatcctctctcacactatatattttgctcccccaaactaatttcaaagcttatgatatcattgggaatatagtgaagacaaaattaacagtgtggatacaaatttttgttcaataggtgaagaaacaaaacaagtttaggctcaagagggttaactaaggataatcatttcatggtatgcttgaaaggctcaaactatccaaacaaatgcctaaatcatgttcctattgaatgttatcaaggatttttccttgagagaatatggcatgaaagttctaagctatccaatcaatcttaccacaaaccacagtaaaacaattataacatatttcacagat

SEQ ID NO: 154941 - DNA, 627 bp, Cannabis sativa
accgctttagttctttgcgggtggttcctccaatatggggtcctcttgagatcatggccactctcccattgggtctgggtggcagaccgggggtgtgttgggcatctcaggtcggagcaactggagccaatactcctgctgcaccccctgtcacctgacccggattaaggtgaggcagcctattcttgatccactcgtagaggtgccccaattggatcaggttttcaatctcatccttgagatttttgcattcattggtgatgtgcacaatgtcattgtggtattcgcatcttttgttgggatccctccgggagctatccttgtacaagggtggtggtctccggtagtgtgtattttgcctagtagtaaagtacacacgctcttgggagtctgtaagctctgtgtactgggtgtattgtggagtgtaccccctcttttggcgtttctcctccgtcctggtgctgcctttggaggatcgtttactccttgaaccctgggaagggcctgccaggctagcagttggagcagagtgtgggggagtttgtccatttatccctgagggatttccaaaatgggatgatgcgggtgccaaggcctggcccagactatatccgggagtagcagaga

SEQ ID NO: 154942 - DNA, 534 bp, Cannabis sativa
gtccccatctctagcttcggatagcacctcataaccatttttcattgaagcttctaaaccagttgtaacagcctgtttggagcttctttttcgaggagtaatccagcttgaatcttcagtttcaactgaatctctaacctgcttcccattccctctttgctcatgttctgcttcgggtattctgctgctggtaacattagttgctgctggttttgtaatctcagtgttggggatatcattcatagtctcctttgccttatttttctgctctatccccccttttttcctccaaaccactggccctttctctttattacagtgacctgtaatatgtcctaagagatcacacgccccacatttagaaggaagccattcgtactcaaccatttgttccactaactgctttctttcattaatataggctattgtttttggtggacaatcagagatctcaatatcaaccaaaactctagcatatttaatcatagtcctactcaaagtgaccttatcaaccattattggtttgcctatagt

SEQ ID NO: 154943 - DNA, 748 bp, Cannabis sativa
  modified_base (27)..(30): a, c, t, g, unknown or other
  modified_base (681)..(718): a, c, t, g, unknown or other
aaacgtgattaactgctaatttccaannnnaactaagcggtctttacatttaaagactagaccggacgaaatatggaagtatacgtggatgacatgctcgttaaatccaagaaagttgggggtcatctagaggacatggacgatgcttcaaaatcctcagaaaatacaacatgaaattcaatcccttaaattgcttctttatagtcagctcgagtaactttatttgatttattgttaatgcctgacgtatcgaagccaatctagagaaaatacaagcccttctggatatgaaatggccagcaaaaactaatgaagtctaaagcttaactggtcaaatagccgcactcagcagatttgtttcaaagtgaacatacaagtgtgttcttttcttcaacatccttcgaggtaacaagaaatttgaatggacggaggaatgcgagaatgcctttcaagaactaaaaagacaacttacgaaacctcccgtactctcaaaacccctaaacagagaagagttgggaatatacttagctgttacagaatatgttgtgagtgtcgtgctgattagagaatagaacaacgtccaacatcaagcctattatatcagcaaaagactcattgaggccaaaagattatacccattgatagaatagattacttacggttgggttttgtgccctaaannnnnnnnnnnnnnnnnnnnnnnnnnnnnnnnnnnnnnaaagatcagaaataatattttatgttgcat

SEQ ID NO: 154944 - DNA, 732 bp, Cannabis sativa
ccaagattattatcaatctcatcagtagaataatttggtttataattttattattactccactataaatatgaaattacactattgacaatatagatttatatttacagagttcttacttgtagtcttttaatataatcaatataagcaattcgtcttcaaattattagttcataactagagttggtcaaaatattattttacccttctaattatctcttgattccttacgtaccattaatttaatgtgaacagttaatctataacttattacagatttggatccaactgttagcactctcagaattaacattatatgggaactaatatttgatccattaggaaagcttggattccatattgtataatatgttcccagctactcatgttattaagcttataaaacagaagttgtaagaatcatcttctccgagaaactttaacaagtgaatcaaagaactcaataaacacaaataggagttcatgtatactcaggattcaggctgatctactaatgatcatcattgtgatatgataaattcttttcatggtaaatgacaatttaatgaaagatatttattacatatcagctctatcatgtataatctaattatacacagtaacctttactacatgtccatctacaaatgtaatctgaattaaaatcacatacactagaagtatagtgtatagtaaaccgtacttagcagttccatattaaagattctcaata

SEQ ID NO: 154945 - DNA, 748 bp, Cannabis sativa
  modified_base (27)..(27): a, c, t, g, unknown or other
  modified_base (167)..(167): a, c, t, g, unknown or other
agagaatgatcttgtcaaaaccactangaacaagatacaaatgccataaaatataattattgtggttatggtctagttacaataaagagttcttaaaatagttcaagtggaccctaatcacagaatacaaaactcgtaatccatacataaacatacagtttggatcnattgacagaaaatggatattaaaacttgtgaaagtcatgatgtattgatcaatgtattctggaaactgaaattaaaaatttctatttggaatctaaaatttaaagtcaaaggcttaaatttataccaaatatacatgagtaattattttttcttggactaccactactaatctaactctaagtttaagttgctataagtaggcatatacaagtaggagattttaagatcgaggatttatatcatttcgggatagaattttcagaatatagacatttgggccattcagtttcataagagaaattagagtgacatcataagcaaatgatttaaaaaccattcatccaatgatatactatctaggcaaattctaaatcaaaaaactaagaggaaactaataaaggataatttcgattaaaataagaatctaatgatgtcccggtaggcgagagtaaaagtaatcttattttatgaatcttcattgtttcatgttgcaaacactagtctaagttgtcatctatgaatgtacaactagatgttgcatttacaaatacttatatgttgagatctaacactattatgt

SEQ ID NO: 154946 - DNA, 575 bp, Cannabis sativa
taattaattttacgaaattgtttattttgagttttaataaatatattttattatttaatgattaaaatgtatgttttcatgtaataaactttcaaaatgtacatgagtttttaaaataatttatgttgtttttgttgtacatttatgaaaaaatccctttttttattagcatattttaactaattttttttaaataataaaaattttatgacttggaccaatcaaggattgctatgtggcaattcacttaactgggtacctacagaagttttaaaattataacttaggcattattaccgccaaaaactaaaggcattaaactaaagtatttatttacaaccgaaaattaaacttaagtatttatgtcgcaaattactcttcattactcactacagacgcctgcacactcatattattgtgtgtgacaagtttaagaaactaagcattgctggacatggagtggagtctccagagcaaactctaatttttcttaaatccttgttggttgatgttcttcaatggtagtgtacatattgaatagtgttctaaccaaagttgtttctcaaacatatttt

SEQ ID NO: 154947 - DNA, 596 bp, Cannabis sativa
tgggtaagtttagaaccttattgcttagtgggatatatattggagaaaattaaataccgaggttgagcggggttatggattttgaccattttacccctaggcttgaaatagcttaagattgagcatcaaagggcattttagtcattttaatttagggattaggtggctgtgtgagggtgtgacagctgccctttattgttggctgagttagtggatttgatatgcattatgttgaattaaggaaataagaaaaatagaaagaaaagaccaaaatagaaaacctctctttcccatctctctctttcttcgaacaagccaaaggcaaggagggattgttgctggtttttggtgtttccagcaagaaattgaggagactttatctaagggcatccattcaacgcgggactttccgttcaggtcgaccaattcatttgaatctggaaagaaggtaagaactgtatataatgtgtgatatgcatatctgaaagtatgtatatgtttagtatacatgtatgcttatatgttgtgattcatacactaccaacacttgtacagttgcggtacaaagtgcattggtaaagtgtatgatgtctgaa

SEQ ID NO: 154948 - DNA, 782 bp, Cannabis sativa
aaaaattcctacaaatatcgtgacaatttgaacttttctatttattgctatcttacacaggtaagagatatgaaatctctttgttctacttattagcagtcgacaattggcgcgttgtatgagtcataattggggtcctcctgaagtgagtgccaacctcatggttcatcatcttcaacacttccagctggtggacacgcatcatattcagaataaataatcttccattccagtccattatactgaaagagatagggatcctcattgatttcttggtccatgtatggatcttgtgaatcctaaaaaatgcttgtcttacagagtaggacctctacagtgtctgtttctttgaatagtgatgaatttttcttcttttgtttaggggatgacctgattgtgactattttcaaaggtttggaatttttttagatcctttgctatttgtcgtgaataatctgagggaaacatttttcatggggcatcatcttctatttttggccaaatttcttgcggaatagtttggtttttctcaaaaataaacttttggagatccatgtactctgaactttctctgaaaggtgcttcttgggagccatatagttcaaaggtagaattgcaaactattttcttgttctcgtccaattttgcattaagactgataaggaagacaatgtagtaatccatcatgttggctacatgtggtcttgatggataaacaaagagtgcctattattgcgaactttttcccattcatcccaaagtatttcttccactcctctaaa

SEQ ID NO: 154949 - DNA, 506 bp, Cannabis sativa
aaaatatttaatttggattccttgtgaaaaattaagcaactttcttttttacggaactcgattccgttaaaaatttaaaaagatatgaattttggaagattgggtgtcatggctgtcgagaggggtgcatcaatcgcacgaggcactcggacaaccagagatccgcgggcgtgcacttggccacaacccgtgtcttcagagacaggacactcccttcagacacgcctgcccaaacgctacaatccgcccacgccatgctgcaggcgccgaggtttctcggtgttccccttcccatccgcgcacgtaaggcctctcgtgcagcctcctagggctgcacttggagcctacaccaaatttgcgatttttgtggaatttttcccaaaaatccaatttttcccaaaaatctgattttccaattttcaaaccctaaatttaaaaaaaaaatatattatttttaaatatatttgaacataaatatatattttaaattaacaatatttattttt

SEQ ID NO: 154950 - DNA, 574 bp, Cannabis sativa
tagggatggctccctatgaattgttatatggccgaaagtgtagatctcccattcactgggatgaggcaggggagaagaaatacctaggtccagcatcagtacagcggacaattgaggcaattgagaagattaaagctagaatgcttgtctctcagagtaggaaaaagagttatgcagatctgaaacgcaaaaatgttgagttccaagtaggggatcacgtatttttgcgagtatctccaatgaaggggatcaagcatttcgggaaaagaggcaagttatgcccaagatttacaaaaccttttgagattctcgagaaggttagacaagtggcatatcggttaccttagcctccagctctttcagcagttcacaacgtatttcatgtctcatattgagaaaatacgtttcggaccctgctcacgtacttagctatgaaaatcttgaactgcagccagacatgtcatatgagaaacagccagtttttatccttgacagaaaggataaagttcttcggaataagaccatagctttggtcaaagtactctggagaaataacaaggtggaggaagccacc

SEQ ID NO: 154951 - DNA, 576 bp, Cannabis sativa
catcttgattaatattcacttgtgttattttaagtttcttgaattactttcattattttcaaatcgcaaaaagtattgatttgaaaatagaatcataagtataatttagtagtaattaatcaaattccctgtggttcaacctcacttgcgtgagtttactacttgattgcgtgcacttgcgtattgtttaataattttcgtaacaagtttttggcgccgttgccgggaaattgtataaagattaatattacataaaattatagtaacttctactttggtttatttctcttgctaaatttctaatctgtttcttgcaatactgtctttatctatctcaggaattttagtgtatgcaccgtcaaggtcaaggagttatattgcccgttgatcctgaaattgagaagacttgtaggagaaatagaaggaacaaaaggcaagagagagttttagcacctgctgaaacaccaaaaatcattgttgataacgctaatgttgcaaataatggaggaaacaacggtaataatggaggtgccgttgaagatcaagctaatagccacagcttgagagattatatcc

SEQ ID NO: 154952 - DNA, 533 bp, Cannabis sativa
  modified_base (379)..(382): a, c, t, g, unknown or other
aaatttaatgttattttgaaaaataaaattaaatatccaataaaataaaatgataaataaatatcatttatctaattttataatttagtttaaataaaaaaacaacattttaaaagttagcaaaatatcttgttactatataaaatttcttgattaaaatagtaaggtcattttataaaaattaataaaatgattttaaaaataaaatatctgatcttaaatttaaaaataagataaaataatcaaacttaaaaataagataacaaactaaggaaaaagatagatttttacctattttcaaggttcaaatatcactaatatcttaaattaattaaaaaaatattaattgactttgttgactttgcttttagccaacgannnngagtcttttttataagcgataaatgatatgtcgtaacgaatatataataaaataataatgagacacaagacttttatagaggttcagccccgagcagttcggtgatagcctaatccttgttctttgtattgactcaagaacaaggaagaag

SEQ ID NO: 154953 - DNA, 517 bp, Cannabis sativa
aaattttcaaagcaaacactaccgcggccagttctaggtcatgagtcggatatcgctgtttataatcttttaactgacgagacgcataagcgataacccgatcagcttgcatcagcacgcatcccaaaccctgtttggatgcatcacaataaactacgaacttttctttgtcagaacgcaaagctagcactggagctgtaatcaatctcttttcagctcttgaaaactagcctcacatttgtctgaccatacaaaacgctgattcattttggtaagcttggttaagggtgttgagattttcgagaaccccttctacaaaccgacgataataaccggctaaacccaagaagcttctgacttctgtcactattttcggtcttggccaatccttgacggattctatctttcctggatccaccttgatcccatccttgctaaaaattagccctagaaaggacacctgagacaaccaaaattcacactttttgaacttggcataaagcttgtgttctcgaag

SEQ ID NO: 154954 - DNA, 820 bp, Cannabis sativa
aaatctcactataacacatgcccctagtttcgcgactgacaaatcaggtcatgagggaaactataagcgagaggtaggcgaaggggtgtcacgaggtggtgacctttggttgtcccatcgagggtttcaaaatgacggctgtaattattacatttaacccatttggggtgccacatcacgaaactctttggaattcgtgcaggcatgcttacagataaccgttagattggaagaccttaggcattctcctgccacgtgtcttaatctaaattaatgagggataattgtatttaagtcccctgatatgaaatgattcccacattttccctctcatttttgtttttcttttctcgttgctctgaattttcgaaacttcaaaaactccttccatatttcttttctctcttctacgaacgatatttgaaagcttctaaatcgaccgaggatagatcgacattccctaaggttagtgcaagaattgtttgcaactattcttcttttattttaagaatcgagctgcattatgtgttttaagaggtagaatatgcatgagataataagaagtgtgtatagaactttattttctgtcaaaactgggtgtttttcaggaaaatataagcctgacacttaggtaactacgggcttcaggaagaacacttcgagtattcgcattccttttgttgaatattctgaatactcgcgggtattaggatgaacatcttgaatactcgcatacatacatataccaaaataccttagcaaatctgaaatttagttatcttaacccctgcttatgttaaaaattattttaccaggatct

SEQ ID NO: 154955 - DNA, 536 bp, Cannabis sativa
  modified_base (433)..(435): a, c, t, g, unknown or other
attcataggcggtctttacacaactgatttaaacattgatactatatagtatataaaatataccagttatacaaatatttatactaatatatttattttaatttttatatataataatttctacatgttattatattctaattagtgtgatatatatactagaaagtagttataatcatattttgtaattttaacaaattatgtgattttatatatactaaaaggtatatatattttaggtattatgtaatattgtatatttgtatgtacatacttataggtatatatattttaaattgcatgtgtatatatttttaaattgttgtgtataaatactagaacatatatatatttaaatacattatgtgattgtatatatactaaaagtatatagtttttaatccaacaaaagaaagtaatattaacatatatnnnaaaatatagtttattattatttattttaattaaaaaatttacatttattgtgtactataattatacgttttattttattaaatctaatgggaatataaaat

SEQ ID NO: 154956 - DNA, 507 bp, Cannabis sativa
  modified_base (148)..(149): a, c, t, g, unknown or other
  modified_base (284)..(302): a, c, t, g, unknown or other
cttaataattcacttgccttcagtcaaattttgagccttctcttctctctctatttcgaatccttcctctctctttctctcttctattttcgaaccctagtgacagagtatatacccacacataacaagttggtactcaatcatagtnngtaagactgtgaagaatccaattcaagtgaaggagaatcggggctcaaatcttggtgatactctgctacagaaaggatacaaggattatagatctgagcggaatgagtcatttaattctgctacaaccaatgtannnnnnnnnnnnnnnnnnntgtgtttaaattctattgttttagaaattcatatttaggatgctaaacaacatacatggtagtaaatcttgatcctgataaaacaatctttcaactactagtatcagagccatggtaatgatttactttcatgaaataaggatttaaaatgatgtttgtgctgatttggatggtttcatgatggtttatatgcaaatttgatgat

SEQ ID NO: 154957 - DNA, 634 bp, Cannabis sativa
acaaggtaagcatgcaaattattttggtaaaaactcgtcattataaattaaaacatagagtcatttggatacactccaaccatgagcatgcttcatccagtcctaatgcaaatttagcaaaaccatgagcagccatattggctgtacgtttgacatgagatattttaacattaggggaaaggaaagaagacaagatacatcaacaattaaatcagtaaaggatgaaatagctggtgaaggagaacataaggcattgacaaccatcaaggcatcaaattcaatgtaagtaaggccaatttgttgctgagatgcccaaattagactatggaagagtgccttgaattccatctcatgagacttaaaattacttaaaacatacatttctttctggttacaagacattataccaatattatttaaattattgaaaatgaccgacccataggctttgcaatacaagcacatgccaagggcccaaaaaggtaagagggcctaatttatttgtttgtttattttttcatgacacataggctcaatatgttattgggaaattttcataaatatgggaattgagggtatagtttacttttttatggcataaataaataacactatagggttatggacttttttt

SEQ ID NO: 154958 - DNA, 644 bp, Cannabis sativa
  modified_base (569)..(599): a, c, t, g, unknown or other
tttgatgtttggggcattgattttatgggaccatttcctaactcttttggatgtatattcttgtttggagttgactgtgtgtctaaatgggttgaagttgttgcatgtcacacaaacaaccataaagttgtgcttaagttcttgaaagaaaatattttttcctgtttcgattcaacacgtgctatcattagtggtaatggtacacacttttgtaataagcattttgagcatttaatgaaacaatatggtattacacacaaagttgctacaccttatcacccacaaactagtggtcaagttgaaatatcaaatagggagattaagcacatcttagagaaaacagtcaatccaactaggaaagattggtctttaagactcattaatgcattaagggcatatcgggctacatataaaacacccattgggatgtcgccctattgacttgtgtatggaaaagcatgccacttaccttgagttagaacatagagcttatttggtcatcaagcagtttaatttttttatagacaaagtaggtgagaagaggaagcttctgttggaaatattttacnnnnnnnnnnnnnnnnnnnnnnnnnnnnnnnattaacatcctaatatgaattccaaaacaatgaaataaacacata

SEQ ID NO: 154959 - DNA, 983 bp, Cannabis sativa
ggtggcccagtcgacaccaagggtgttgcagtggttattggagacgagtcagctggaggatgcagatcttgttcgactggactggagataggggcaaatacaaacagctccccctgcacatgtgcgttagttccaaacgcatcagaggatgcaccaaacgaatctctatgaaactcaggcagagaaatgtcaatagatggaggcacaaaatccccagaataatggtgcaaaagagtagacttgatagtgcgaaccattttatacatggaggcctcaaatgcaagctgacgcttttgatccttcttatatcgtttgataaaagatttaaactcagaaaacatttgtacctgccagctggaatccgaaagccctttgaacataggagacttgcctttactaaccttggatgcagaaggagtggttgaggagggatgtctattaaccacagagagaaagcttttactgaggacaggattttgaacttgatagtcatgcgggtgagcagccataagaactcgttgaacaaggcttggaaagggtagcttgttacgagtgtcagtagtttctgaagcttcaaggatccgttcaaatatgagagaaggcagatcaatggacacatgatttcctacaacatacagaaacttgctaatctcaagtgtaactgatgacaaatgagagttagggaaccagttgtacaatgctacccgatgaagaaccctatagaaaggcgttagatgagtggctaaaatttcctgtttatcccacagataatcatccctgccagttagcactctacccatcacagtttctggattgtattgttttccatatgttggattcctgatggactcaactttcaacgtgcatgcaatagtggaaggaccaaatggaacacgattacccctaacaaatgcactcacacaccctggatgcccctcagcaataacagtcctatctagattggcatagaattctcgaactaa

SEQ ID NO: 154960 - DNA, 563 bp, Cannabis sativa
atttagggcacaaatcccaacacacccccccttagtatactctataatttgtttataattaatactgtctctttaaaaaaaccttactaggtaaaaaaatccaatgggaaaaagaccatagtaagggaaaaagagtaaagttgaataaactccccctcacaataacattaccagttatttctcatagattttgtagatgacggattccaataccatgtctcaattttttttaagattgtagtaggatgtgaatttgtgaaaagatctgatagattctcactggatctgatgtattgtatatttagctcatttcttttctcaagttcttgtgtaaatgagaaaaatttaggaggaatgtgcttagttatatcgcttttgatgtaaccttcttttatttgagcaacacatgcagcattatcttcatataatatgttcggatctttatgggtcaaaagaccacaactttcttgaatatgttgtgttactgatctcaaccatacacattctcgactggcttcatgtagtgcgataacctcagaatgatttgaagatgtagcaacaag

SEQ ID NO: 154961 - DNA, 518 bp, Cannabis sativa
aaacttcagttctcagttcgcttttttcgcttttctagttttctagtttgccatctttctttcttaagacatgaagagggcaccccccgaattctataatggtgtaaactggtatacgaccattccaaatttctaaaggtgtttaagggactaatttagatggaacaacatttaaaatgtcagttgccatctaaatagcatatccctagaaggacgtaggtagagttgagtagctaagcatagacctaaccatttccaaaagcgtcttctttctgcaactccatttcactatggagtgcttgggacagtcagttggaaatcaattccaagttcagttaaatgatctttgaaatgcatatccatatattctccacccctatcagttcgtaagatcgttaaagttttaccaaattagttttgaaccaatgctagaaattcctgaaacttttcaaacatttcacatttcttatgcatgaggtaaatatgaccatatctagagtaatcatcgatgaaagtga

SEQ ID NO: 154962 - DNA, 514 bp, Cannabis sativa
aatcatgtgaaccatgcaacgtaaaagtgatttcagatctttaattaattagtaaatctgattatattaaaataagttttatttaggacacaaaacccaacacatgcatacctgatgcttctactgtttcgaagaagaaggttaggaagagggttagaaatgctaatgttgcacttcttactcaagactctggcatggagagtctaacagtgttggtgctgatgagagatctccgtcgacctctctctgaatgaggttgagcatggtgttagggtttatgctctgtgttgaccgaggttttcggcaaccaatataataataatatttaggaaagctgttagaagttaatgcatgagatttttccatggttggggcattaatgagccttagtccacgagtctgcatatttatgagagtatttattacagagaatgttcttggtgagtttatttctcttcttgctcttttgcaaccaagattctccgaccccattaaatgagctttgagggggtat

SEQ ID NO: 154963 - DNA, 586 bp, Cannabis sativa
tggtaaaataaatatccaacaggtttgcgcttgaagacataatgctccatttgtcaatcgcaattcttggtgataaggtgaaattcagcagtaaacatcatttgaattttagcttctatctgagagagctgactcgatagagttgtgaatctaattgaaagatgtctggagctgattagtgaatgtaccacgagtgtaccttcctatagcgagatggattccttgctattagttgtttagattttctctactgttatacttagtttgtataatgtgtattatacgctaagtgccttaacaatcatcatgtctcatcatgtgtagcgaggttgatgcctcgtcttgtactactgatgtcgtatggttttgttaatatgtgagttattagttcgtacatccttgtctcgcttatgactttacaatcagcgagttatagatatactctaccaattcagtatttaatgagttattccatcttaacatctacaaatataattaatagtatatttgctggttcgttgtaacaccctaactagcataggcgtattgcgtgatttttaaacatactgtgtagctcgttgctaat

SEQ ID NO: 154964 - DNA, 916 bp, Cannabis sativa
  modified_base (32)..(50): a, c, t, g, unknown or other
  modified_base (160)..(161): a, c, t, g, unknown or other
aaaatatttccaacaagaacatgaatagcacnnnnnnnnnnnnnnnnnnncatatcaggattaagatcttttgttctaagatcaataaaatgatattgacttagaaagatacaatggtaagtttataatatcttcaccaagttcaatatcggtccagtcnnatgtatactccatacattcaatactagcatactttactaataccatgaaaaggacataacccttatccaaggtgtaagtaaactttatcgcagattatcacattagtgtaaatccagttcattgatgcatcataggtcataagcttataatcacaattacctaacacagtgtattgacatcactgtaattgtgaataaaaatatgttatggatttattgaaaattgtatattaaagcataatcatgaaaataacattctaacttaaatgaattttaatcttcgattgataacaaataagattatattgaaaatggttttatttaaggcataaaatcctaacaggttagacttggagtgtttgggtctttgggacagtttatgctcacattttgttagccgttgggcgacagcttttgtataaaacatattttagaaataattgtaagcttttaatgggattgcaggactatgtaaattatgtttatttatttaagttcaagtttatttaaaagtttaaattaatcacaattttcgataaatccttatattagcaaatgtgtgtacaataattaagaaaaattgtagcgccgaaactagtaggtcattacatcaatattctttttggtgaaaagtattgcacatattatagttccatctgttatattatttattatataatataatgtttaagattaaaattgtgatatgttatatatattattacatataatataattgggaattatatgcatgt

SEQ ID NO: 154965 - DNA, 1049 bp, Cannabis sativa
ccacatacactacgtacctcactgcacgagtgttggtagggtttgttttgtaccctgagtaccactaagtgatataccacacacaccctgtactttcccgtacttctactggtatcaccgtaatgtattctttaacaatatacaatattgttaatgcagatttttgttaactaaatttgagcctcacgattatgattcaacacagaaataatgaaaactatagaaaaattaaaatatgaacaccgagttttttacgtggttttgtagttaaaattctgcataatccacgagtcaatcttattcagatatctgagtgtttttcttagggcctcttgtataagagtttttccatccctttttcgagattgtctaccactatttgtaattgtatagtggtagttaattacaaggctgaccaaaatgtaattacagttattatcccttaaattgtgggatatgattacatattacaaaatgtaaacggggtgcatgattttgaaagtcatacagctatgattttcccgcttttactgggtcagaaataacgtgtattaaacacgcctttaattatcgattctggagatgtctcgacagaaacttgatagtagtgatctcaatggtgagctggaaccacccttctttccgagatcgacaagatgtgtctcacgtcgatcgtggatttaaggaaatctgttgacttaccggggttgtgaatctcgcttccgttagttggatgaaactaaaggacgtttcctcgtagcgaggtgctcatctcgcattcttgtattccgagccaatttgacttttatacttagtcagcttattgcaagttgaggtatgtgttactcttctctggtgcctcgctattatcccttagcgatatatgatttctcgttaatactctaagtaccagttcgtacattaattcctcgtctaagactttacagtcagcgtgttgcaaatatactctagtacttacacaattgatgagttattccataaaaagatatggcaccgattcacattccctttatcttgacacgtgtcct

SEQ ID NO: 154966 - DNA, 619 bp, Cannabis sativa
tattctgtctctaagaattctggaataaacttcttaaccagattgggacatttctacaaaaaagaacaatcccaattcctagatgaaatttaataaaccaaaggcttaaagaatatgataaacctaaattatgccgaaaccctaaaagttacccagaaaacgtaaacctgaatcgccaaaccaaatggagtgacaagatgcaagataatcataaccaaggaaaattaaaaaaaggagatggattagacacttactgtatgaagtcgagtggtggagaattctgcaaacggagacgggatgaacagcgcgatgagttttttgaacacctgaagtcaaaaagcaaatctgagtaaattcacaggaagaatgtcaaagacaaggagggcatgcacggtttccaaaagctgtgatgaaattttttcaaaaagcttgagttttttgaaaaggtaaaaaagatgaaaaatggatcctttctcgttttatactttgaacttagtaaccgtcagatcaaaatgtagaagatccaatggatgaaaatggaagagaaatggaaaggatggctcattaatgctaatgatgtcccttgaaaccacaaaaccgccaaaatcaaaggcatgca

SEQ ID NO: 154967 - DNA, 605 bp, Cannabis sativa
  modified_base (444)..(454): a, c, t, g, unknown or other
tttgatttttacttttcatatttcaaatctaattatcagaaataaatcaatttgaattttgaaaattaattttagatgttagtgtaatttgaatttgaaaataggtaaaacaaaaaaaattttgcttacctcttttcttatttttttaaaatttgattattttatcttaattttaaatctaaggttagatattaaattctttttataaaatattctattttaagtaatttgaccttatttagatgtaaaataagattactataatcatggtattttaaaaggaaataagatacttttgctaatttttaaatttttttatttttacttaaattaaattataaaatcaaaaaagggtatgtatttatcatttttttgaatatttaatttataaaataacatgataatttataaggtggttagcaatttttttttgaaatgatattnnnnnnnnnnnaaacctaatttttcaaaaaattgtaggcttaattttaaatattattttattttacttaaacccgaattttttcttatttattatttttgaaattaatatttttaattaaataaatcttacatccaactatccaatctaacttgttgcagga

SEQ ID NO: 154968 - DNA, 501 bp, Cannabis sativa
cttgaagcgggaaatagaacatctgatcaagaaaaacaacccgcacttacagaagtatgtcaaggccaacaaaggtcagaacaaccaagatctgttgcctcaaccaatagatggacacttgcaagtcattattggaggcccacacatcgctggagatacgggaaaagctcgagagagatatgcccgaacagctcagtacgagcaagaagaagttatcctggccgtggaagagaggaagccaaaagttccacgcgcaggagagccaaccataactttcaacgatgaagatgctatccaggtcagattccagcacaacgacccattggtcgtggaagtccagatagcgaacaaaatggtggctagaaccatgatcgataattgagctttttcaaacattttgttcaagactatttatgagaagatggggctccaactcaaggatccaactccatgcctccagcctgtctatggtttcttcggtcaagaagttgcgcctctagg

SEQ ID NO: 154969 - DNA, 694 bp, Cannabis sativa
agatcccacaagcatgcctcggtagccatggacggagggctcacccacctggcacccaaagtatcttgccttttatgaggaaccgctgtagtaagttcctcactggtgcagtccacgccctcaactaggacgtcgccatcagcatcaactggctccccagcctcattgtatcccccatagtttgggggtgcaacctcctcctcttcctccaccttggagggactgctaggatggacatcgtcctactcctcaatctcctggacctcagcgtccccttcatgatcctcctcctcttggacagctggatcgtgtttggtgttgggtaaggtggcgtgccgggacacttgagggtcagatatgtcaaccctatgcattgtatttttggtacgagccatcatcctatggctggacaaaaggcttaagctagaatgcctatcactcgaagaagttggggtagaacggagaccaggatgatcctcgtgcaatagttgaagtagatcctggtcgattttgtgttcgcttccccaaaactcacctaggttcatctacaaaagacaacacacaagatgagtgtttgctcgagatatcgaacatgaaaacaagcaaatatgctgactaggagtactcaacagattaaagaataagaatattcaacgaaaagtcaaaactcaggaagtttgaaattttctcgagt

SEQ ID NO: 154970 - DNA, 604 bp, Cannabis sativa
ccctttgcaaccagcaaagaattggcaactttcaaggtatttctattacgcgtaatgctcctgtcatatctcatttactttttgcagatgacacattgttgtttgctagggctactcaaacttcttgtaatgctatcaaggcagctcttcagctttataaccaagccactgggtagcaggttaatttcagcaaatcatcaattcttttttctcctaacactccttctcatgtttctgattacttttataataaccttggtctagctcataagccttttatgtctaagtaccttggggttcctcaatgttttggtcgatctaaaaagaatagttttaattttgtccttgatcgagtcagttctcatcttaatatctggaataataaatttttctctaaggcgggcaaagaagttcttttaaaggctgttattcaggctataccctcctatgctatgtcctgctacaaaattcctgcctcaatttgcaaaaaagttgagaaactcatggcacaattctggtggggctcatttgggaaaaataccaaaactcattggaaatcctggtctttcctttgtaactttaaattttttgggggtctgggctt

SEQ ID NO: 154971 - DNA, 776 bp, Cannabis sativa
  modified_base (735)..(739): a, c, t, g, unknown or other
tgggacccaaaccaaggacccaaacttggaccccaaatcagacctggacccagacccagatccgaaaaacccgtacacagactaggactaagactcgggccccaaccccaaccttgacccagacccgaaccaggaaccaaactcagacccggaatcaaaactggaactttgactaggacctggacttgagacctgagaccagaacctagaccgagaccttgactaggactgagacctaagacttgggacctgaacttggaccgggacctggacctgacctggtcttaaaccctcatcgagtcttgagacccgcaacccagaccgggatccaaaccgtgacaaggacccgaacctcaacccggacgaagactgggatcgagacctagacttgaacacagaccgggatttggactaaaaccaagactcgggactcgaactcgaacctggaaccagaccaggacctaggaacaaaacttggatgggggacctagaccaaagacctaggcgctgaaacccagacccagatctaaatccgagactcaaaacttaacctgaacctgaccttgacctgggaatccgaagtcggacccaaacccggacccaaaacctgcccaggacccaaaccatgacaggaacctagactcgaacccatgtaaggaccaaacccaaacctaggacccaaaatcagacccagacctaggatcggacccaaacatggacctagacccgaacctnnnnncgaacccagatcgggatcggaacccaagacttagacc

SEQ ID NO: 154972 - DNA, 551 bp, Cannabis sativa
aatccatataattcagttttaagctctagttgaaacactataaaaggaacatgatactctcatcttatcctcttgtcaacttgactattcaacctagatgagagaattccttccatacatagcaagtcaattactatagtgagtaagacggtagtaactaaactcgaaggagaaagaaatccaggttcaaatcttaataatgctctgcgacagaaaagaatcaaggactagagatcttgaacggaaggactcattatattctgctgcaacctataaggttttctaaattcttatttatttaatttaattgttttagagatattcatatttagaatgttaattcaacatactttttaataaatttagatcatggtaaaatattccaacataaactaatccacttccaacaattttctcaaaaccaggttttgtttccctaagagcaattgtgaaaccagtccaccatataaattaggggtgtacataaaaccgctcaaactgctcaaaccgcccgcaccgcaaaaaaaatgcggtttgaaattcttcgcggt

SEQ ID NO: 154973 - DNA, 507 bp, Cannabis sativa
gtatcttaaatatgcctttatatggaaaaaaaataaaaaatacgaagaaggtgcatagtgctcctatttttagagtgcaagctctctattgttttttctttgagttgagggatctgaatttagaactactctataaggtaaaatgtattattattaggcattattaagtgaaaaaaaaaattaaagatatattatgtcctgaatttaagaatatactattaaaatattgagcacttgatgatgcttattaataattgagagcaatcttgtagaagtgtaaataagtagtgaaaagttaaaatatagcttatttaacaaaaagtgtgctccaatagtgtgccaaaaagagatgtaaatttggcacatagtaaattttgtgccaaatttgatacaatatttgctataatgtaacatttacaccacaataaatacactactttttcatttatatttatgtcatttttattattttattagtatatttaactatcacattaagttatgaaa

SEQ ID NO: 154974 - DNA, 861 bp, Cannabis sativa
  modified_base (77)..(90): a, c, t, g, unknown or other
  modified_base (814)..(836): a, c, t, g, unknown or other
accccagtctcgatcccgaacacaaactcaaaaatgggacctgggacctgaaccataaccagaccgagacccgtgannnnnnnnnnnnnnttgactcgggattcgggtaacgagtcctggaacaaacaaatagtcggtgtctagatttgggactcaaactaggagtagaacccagacgaagaaccaaacctgaccctagacctagaccagggaccctaaattagattatgaaaaagaatcaccgaacaaggaccctagaacaagactaggacagttacctggacccgaacccggacttagaaccgaacacagacctagcctcaaacccaaactgagactggaactcgggcccggacacggttgtgtacccagatcggaactgagacccggacctggacctagatcttggactcaatcccaaacatagacttggacctagatagggatccggatacgaacctagactcagaccaagacccagattgggatcgaaatgttgaacctagatgtggactgagatcatgacccagacccaaacttggacccgcactcagtacccaaacttggacctggacccgaacctagacctagattggggccggacctcgacacaaacctcgaaacgatcctggacctgaactcaaatgcacacctagaatcagacccgaacctggacccgaattcgaacccagacgatcagaaccaagaaccaaggacttagatcaagaactgaatctagactcagatcgggattgaaacttggaagtcggactccacctagacaaggaccgaggacgcgaacccacacccgaannnnnnnnnnnnnnnnnnnnnnnatccggacccgaacccaaactcaaa

SEQ ID NO: 154975 - DNA, 517 bp, Cannabis sativa
ttttaagcttagtaaaatacatgccaatagattgattatcctgtttaagattcatgacatcttttctaagattgtatatatgggggccatttctttggtggaacctaatcttgaggtcattccaaatagcataggcagattcatcatagagtatgctagatgaaatttccttggatacagaattcaaaatccaagaaataacaatattattgtttcttatccaagcattgtaaagagttagatcagaaggtgaaggtttagtgatcgaaccgtccaagaaaccgattttgtttttgacagaaatggcaagttgcattgccctgctccaagctacgtagttatcttgtcccgtgagtggctgagaaaccagtgtgtgccatggattgtctccatgatgaagaaagtacggattcgcaggatcttcaagaggacttcttgaattcgaaatatgcagagaagaattctgggtttcttcaatggtggtttgtaccacggcttcatcttgagtgccctggtt

SEQ ID NO: 154976 - DNA, 710 bp, Cannabis sativa
ttgcaatagggttttctatacgattttttgttgtaatttaggttgcagcgctagttgcaataggaatttctatgtagaattccgtaaaaaaaaagtgttctgaagtgtaaaaataaaaaggtcccttatttcttttatttttttatatgtattaaattaaacatatataatataacaataaaacattactattataatatacaaaacatgcacaatatcaatactattataaacaacaatgccttcatatatataattgggtggtttaattttgtaatttttgccaagaactattgagtattgacacatagacagaataataaaaattaatttaaaccaaaaaactcacaaaaactatatatataataatttggtggttagtgttatcttttagggttattttattttttaattaataatttaatatatataaagtataatacaaaaataaaaatatatataatatatttaaattgcgggttggcaggcgggttggtgggttcagcccgaaactcgatagccataaaaactcaacatgtgaacccgcccgaagtgtaccgggttgaacccgactcgcccaaacatttaaaaaaaaaattgcgggttcattggttcgggttcgggcgggttgctcgggttcgctcaaaatattcagtcctaatctattgtaatatcccagaaaataaataatatttaaatggacatatttt

SEQ ID NO: 154977 - DNA, 521 bp, Cannabis sativa
  modified_base (169)..(175): a, c, t, g, unknown or other
atttctttaaattttgaagcattctacgaggtctatggtatgatccccagtctttattaattttatcaacatatcatcgacgtaaacttccatgttccgcccgatctggtttgtgaacatttcgttcaccaattgctgatatgttgccccagcattcttcagcccaaannnnnnnactttataacaatagagtcccatattggttacgaagtttttatgttcttgatctgggacatgtattttatctggttatatctagaatatgcatctataaatgacataagctcgtgcccagctgttgcatccactaactggtcgatcatgggtattggaaaataattttttgggcacgctttcttcagatcaaaaaaatcgatacaagcttttcaagtttcgttaggcttagggatgagaacaggattagctatccacaagggataaaacacctcatgtataaagtcattgaccaataacttttccatttcctattttagtggccattgtctcttcgaatccaaggg

SEQ ID NO: 154978 - DNA, 527 bp, Cannabis sativa
attttcaaatattcataactttgttatctggactccgtttcgggagttctatatatttgttgaaaagctcatcacgagctttatgtgattatctataatttgccaattatatattttgtggaagtggatttagggattaaccctatacttgtgaatcgcagaaattatgactaggattaccagcacttggtcaggagcacctggggatttggaatctccacgtttgcgagacatcaggtaagacaatagttagcacatagagttatgcgcggtggcgcttatattgaatgtgatatttgtgagtaattagaaatcaagattagggttattaccctaaagtaagcagtttatgggcctatggttattaccctagtaagttgtaaatgttatgccacgttgtatatattttgaaaataagggttatacgttcaaggcataatcgggttggcgtcggtaattagaactgaaatgaatcgttctaaggccttattgtatttacacgtatgagcgtaacacgtaggtctatg

SEQ ID NO: 154979 - DNA, 502 bp, Cannabis sativa
tgtcaaatgatctgcaaacaagctggctcatattttagccaggaattcttgtttctctataggtcatgtgcttcagttggaggattgttccaacgaaatgcattctataattattaacgattgctagttaataaagttactaagttttattaaaaaaataaaattagttaaatatattttttataaataaatttaaaaccagattaaattttatatatttcaaaatataatataatcgtattagatttaattttattattattatttaaattaaaatttaagtaataacaactctaattaaatatgcattttaggttactaatacttagtattttatgttactaatacttagtgtgtgtatatacatacatctatatattagatttttatttaggcttacaaatacaaagttcaaatagttaatgggcttagcattgtatgtgtataatgttagacaaattaacaattaacccaagatctatttgtatataacatagaacac

SEQ ID NO: 154980 - DNA, 673 bp, Cannabis sativa
gggcacaaaacccaacagaaagtagggtcttaactttcttgaggatatcaggaggtaaaaaactagtttttcgatcacttgctactgtgtttccgcccctatcatgcgtttgctgacatagtacatggggtgttgagttttttcctcttcctggactagggttgcactaaccgcattctcggagacagctaaatatagtaacaagtcttctctgagaacgggttttgacaagattggaggtttagccatgtgctcttttaattttttgaatgcctcctcgcattcttcggtccattcaaattttttgcatttcttcagaatgttgaagaagggaatgcatttgtctgtggctcaggaaatgaactggctgagggcagcaatctttctggttaggctttgtacgtctttgtgcttcttgggagaaggcatgctcaggagggctagaattttttccgggtttgcctctatccctcgctggctgacgataaatcccagaaactttcctaacttaacctcgaaagtgcacttcttcgggttaagtttcattccaaatctctgaaccacttcatagcattcctcgaggtcatctgcatggcttgatcatgcctttgattttaccaacatgccgtccacgtacacctccatgtttcgtcccagaaggcctttaaacatc

SEQ ID NO: 154981 - DNA, 941 bp, Cannabis sativa
catgtctttggcctcgcccaggtaatcgaaatttgcctgggggttaaccttccaaaagtcataaaaaatctcgagaccaactatctctaaggcatgtactttttctttctgcctcgccaccttcgacttgtgtttctcaatctcagctgtaagctactcctccttggtcttcttctcctcttccagccgatggaagacaatccgaagaactcccctttcctcttgaaggctattcacttctgtcgacagggtgccgatggtagcttcaagctggtcagaagcctcgaggtccttagtcaattcgactattttcttctcaacactaaaaagcctcttgttgacctcacctagctccaagttccaccctggcgtcatcagcgtccttcctggccaagtccacctccgccctcatggtgttggacatagcagcgttcttggaggcgaaagacttggctcgagaataagtgtaagccaactttagaccagcctacaaagagaaaaaactttagaatctgagccaagtaaaaaggattaaaggaaactgtcaagaaagacttacccttgtgaattccctcaagactcctcctatcagcatctcaagagaagattcgtagtcagtgccggccagctgctcacttaccttaagaaacaactggttcatgtaatgggaaagcatgtccttgcctttcttcgcctcgggatgcactggaaaaggtggagtaggaacctgcatttgctcagatccgctcttcgccagctcggatccaccctttgattgctgaggcctatccgagcttcctcctcgagaatctttgtacttagcaacttttggagtagaagggttcgtagtagttagctccttggaaaggtcaataacctccccgactggtgccttttccttggaaggggtcgcctcaccgcccctagatttcttggccgga

SEQ ID NO: 154982 - DNA, 507 bp, Cannabis sativa
gtgacttgcgaatttactggttcctatgctttctcgatcattagcgcgacgagcattttctcttcctcgagttgatcgactatgggtccttgagcatcctgaggtcatacttgcttcttcacactctgttcttccccctgagcatggtttgttgtatttcccccactagggtttatacgagccctctctctatgggttcgggaagaacgctggtgattccttcccagtgacctatgttccccgggttgcatcccagggtcttcctcatttccacgaggaatttcctgtttgttggtttctggttgccacccattctcatttctatgagagagttctggctggtcattcagactttcagggggaacctcattttccccaggttgttcttcctgagcattttcctgtctcctggtttgggagcctcaaggtctgccccatggtcttctcactccagggtcaggttgattttgagtgtcattcccctgtgtcgccctagctgcggctgca

SEQ ID NO: 154983 - DNA, 611 bp, Cannabis sativa
aattaaatagcgggtgtcatataaattaaaaaaataaattttaaaaaatatcgctaaccagtggtgctcatttatttataacttgccttctctccaaaattaatttattcataataattttctcccaatcgcccgtagatctaataactttcttaatcattaagagaaatgctaaagggtactagcggtatctagcaccatcatatgtgtcaatatcgttattggtccaactaagtatcaggtcccatataatttaacataatagcttttagggagtatcgctagccaatcgcaacgcgacatgttgtaaaggtgctagacaccactggtgcctaatagtaatgctcaataattaattatgtctgatatttttgattcatatatagttatacgaagttggcacaaattttccaaaaattatatataatttagaataccgataagattaattaaacaacatatcttatacgtctgtatatataaaactcaaaataattatgtgtagtaagaaaaacaaaatacagttcatatatgtactgaaaaagtgaaaatatactaaaaaaatacacattattataacgtgttataatataatataaagtagatgagaa

SEQ ID NO: 154984 - DNA, 618 bp, Cannabis sativa
tataagatgaggcatgccttagtttttaatttgtttgtgtgtgtaatttctttaaaatgatatatagttattttaatagggggaacatataggggtataagggtaatttgatagtttgtcagaagagaaaacgtaagatgaggacatggtgtactcattccatagaagatctatgcttgtacattataatatacaaatgtccgtacgacttgtttgggggcaactcactccaaacatgtcgacactctttctcatcattcctctctattctattctctttttagcaaaaggtatgatattataaaagaagttaaaagaagcataaattgagttatgttttgtactctcttaaatcacaaatcacttttagggttgtttctagtactcttttagatttctagcattcttcatttagcatttgttttcatgttatatgttattggtgtattaaatatcgaattttatataattttatttaataattttttagagaatattgctaacgaatcataagacatcacatataaatggtactagacactactgatacccaataacaatattttttttttcttttagttcttaaacttgacgttataactcatccttattattttc

SEQ ID NO: 154985 - DNA, 535 bp, Cannabis sativa
taacactacgtggcttggcacgtaacaatcacctagtatatataatatatatgtgtgcattaacataaaattacctcttataataatatatatacttttaaatcgtcagtcatttttttttaaaagcaattatcagtcatttaataatatatatatatgcattagcataaatcaaaatacatattaatataaaattaaaataattattctatttatatttctacaaagtcatcatcaaaattaacatttctaaaactatatacaattataataaaagattgttttgctaaataaattattgaacctatataaaaaagatatagtaataaacaaatctatactcatatttaattgatccttttatcatgcactatttttgcctaattgttgattcttcaaaattttactataataatatagacacttaacataaaatatttatctcttaaaactttatcactttctcttaacaacatatattacatatataattatttatatatagcataagtgatcttcaaaattggtaaaaaaa

SEQ ID NO: 154986 - DNA, 697 bp, Cannabis sativa
cattcgatgttgattcttcttcactttcgtgatcaatttccatacgagactcaagaaatggataagcaatgtaattggttgcttctagttggacaactcttctgaccttcttaaaagcctcttcgagcttgacgaaaccatcaactatgtttgaaaattcttgaacaatgtgtactgatttgagtttcaagtctttctagtatagactcataattgttagcccatttgtcgttgccatgaccttggcatcttcattgagtattcttgtctacgtggtcacttctaagaaacattatagataatcatttagagactcgtcttcttgctacttaatgtagaccagatcgtttggctcaatcagtgtgtgccttgaagggcagaattggtcataaaatgcttgattaagtgttttccaagaatcaatagatccaatagaaagcttgaaataccactaatgtgttacttttgatactgtggatggaaagattcaacatcaagaatcgtcttgaatgccttataggtcagtttgtacttcgaaattgtgtatgtgagagagagttaatactttactagtgtatggatgccatactttactattgacaagatcaaggcacggatgcttgcttccgaaagcatgcagaaaagttatgctaatccgaagcgcagagatgtcacatttcaggcaggggaacatgtt

SEQ ID NO: 154987 - DNA, 640 bp, Cannabis sativa
  modified_base (133)..(136): a, c, t, g, unknown or other
cataatgaataaaaataaataataaaaaataactcaagccgattataattcaattataaccgactttgtaacataatgaataaaataaaaaacagcacaaaataactcaaaaccagttataattaaaatagannnngttctataacagtgttataataaataaaaataaataacacgaaataactcaagctggttataactaaaatagaaccagttatataacataatgaatacaaacaagtaacatgcaataactctaaccgattacaatttaaaaaaaaatagaaaatcagttcctaaaatactgaaacatagattaaaaataaaactagttccacaataaaatatctcataaaatcggttataattttttttttttaaaaaaagtgggaatcaattccaaaaaaaatattgtggcataaatgtgaaaagaacgagttctataacgaaaaaagataaacacaaataataactcaaatataatataaagaattcggttatatttatcaactagtttaaaatttgatacaaaaaactggttctataaaacaactaagatataaactcacacacaaaaactagttaaataaaataacttaaacaaaaacacccattcaacatgctccaatccaccaaataa

SEQ ID NO: 154988 - DNA, 547 bp, Cannabis sativa
agtgtaatacatgctgatggtttgattctcttgtcgaagattcatcaagccttttctcagattataaatgtgaggaccatttctttgatggaaacaaatcttaagatcagtccagattgcagctgcagattcatcatacaacaaactagaggagatttctttagacatagagttaaggatccaagatataacaatgttattattcctgatccaagcattataaagattgaattcagtaggaggaggtttaggaatagaagcgtctaagaatcccagcttgttcttgactgaaatggccagttgcatcgtacgactccatgaaatataattatcttgtcccgtaagtggctgagagacaagaatgtttccaggattatcaccatgatggaggtagtatggatccgaggggtcttcaagtggatttcttgatccctgcaactgagtattctggccactttgatcgatgatttgctgtgggtttctagtaatgataggagtaggaactcctgtttcagtccctgcttcttgtgttgggttttatgcccta

SEQ ID NO: 154989 - DNA, 693 bp, Cannabis sativa
gtgactattcaatgttatatttttattgtaaccatcatggttacgttttttttttacctgtaatagcagattacgaatagataaaaattctatttttagaattaattagttataatatttaactatcttttaaataattaaataaatatttaacaagacttcttttcgcaattaaaatttaaaaataattttttatttatatataaatccctactataattattttaacaattaagtcatttaattataatatttacaatttttttttacaaaaattaaacttattttatataaattaaaattctgtataaatttttaaataattaatttttttttttacaattagatgatgaggcctcaagctagtgttgggcctcaagcttataacttttggtgctactgggccttgattcaacaccactcttggaaaagtgttcgttcttcttttttgcagggtgtgttcttgtgatgattgtctgggagaatcagtgtagtaaatccgaacttgaactgcgaacttggcacaaatgttcaactgtttttgttcctaaaatgctcaaatttgatgttttcgtcctatagctatagctaacctctcattcactttcttctttcgcaattctcaattaggggtgtccatccaatccaatccgcactattttgctcatagtgcatccgatccgcactaactgc

SEQ ID NO: 154990 - DNA, 539 bp, Cannabis sativa
atccaccttgccagtatcatcatccttcgaaacaacctcagggacaacaacaccctcatcattacgatcatccccagtgtgagcctcatcctgatcagcaccaactcaagctccatctagatcatcatcatcatcatcagtatcatcctcatgatgttcatctcctttatcatcctcatttttagcgtcctcatcttcctctgaagtagaatcttcatcatcctcatttcagaagaacgaagagcatcttcagactgagatccattgtgagtatgaccaccatgagatgactggaaaaaaaaacataaaaaattaatcaactgtataaaacaacataaaaacactactaaaaaataacaaaaaaaaaaacaaataatgacaataaaaaaaaacacctcaataagaatatccaacttcttgttcatttcagcaacagatttcataagaatcccttgctgggtgacaacaacatattgttggaaattattttaccaggatcttcgatctactcacaagtatgttcattaacaccctaaata

SEQ ID NO: 154991 - DNA, 689 bp, Cannabis sativa
gtatgaagtggatgttattaccaatttgacagctcaggtagaggccctaacaaaattgatgtctattcaagtaaaacaagctcaagtggtctgtgagctatgtggaggtcctcatccctactcaaaatgtcaagaatatgtgaatgatttgccaatggatgaagcaaaagccattggaaattagtctcaaaacaacaacaactatgggtttaattaaggaggtaatcgaaggaatagtgggttctatcaacagagaaatcagaaccagtcacaaaaccaacaatagattcagcaacaaagctctagtggaaattctggtcttcagacagatttaatattgcaattcatggcagagacaagatcttccattaaagacttgcaaactcagatggggcaactagcaactcagatagcaactcgtcctcagggaaacttgcctagtacaaccgaagtgaatcctaaagaaaactgcaaggcaatcaccctgcaaagtggaaagaaatatgaggggcctgatatggtacagccattggatgaagaaattaaagatcaaccggcaccaaccccaacaacaacatagcagaagactactgatggtcttcagcaaaaagaaacttctccccctatcaacattgaccatcacatcaaaattccctatcctcaaagactttagaagaataagatagata

SEQ ID NO: 154992 - DNA, 926 bp, Cannabis sativa
  modified_base (382)..(385): a, c, t, g, unknown or other
ttaataaaattatactaaaattttaactttactattaaaaaatttgtgacataaatacttaaaatattaaatttgttgctaataaataccgaaattcgaaaaatagtaacataagtttttatttatggttaaatttttattctgatgtgtgtgttgagttatgggttcgaattttattgtgtgtatttttaatgtttgagttttagtgttttactggggttctaatgtttaagttttagtgttttactggggttctaatgtttgagtttgtatttatgagatctgtttttatttatttatttttgtagatttaaagaacttgaaatttgatgttgtttctattgattattgatcaactaatagaacgataaattgagtgttnnnnttagaaatttgaggatatcaatagcaactacaatgatgacatcaactttatatgattggaatataaaaataatgcatcataaaaaaaaattgattcataatttcacacctatttcttcttctacataatctcacacttttttttgttcaacttttgttcaattcataataatttttttctataaaaaaaaaatatttttcctatattctgtaaagtaaaaaaaacttcacatatatatagttatgaatatatatatatatatataaataattaaataattatttaatttaatttatctttattattatgtgtttgttgaaaaataattaattgaagatagatattttttatagaaaatttgttaaaataatagtaaaatattaatttgtaaatttatgctttaataaaatattaaattaatggagataattaaggagaatagctttggagagattttagactgccactgtcaccgctccttacaaaaaaaaattattgttaatctgtaaagataatatgactggaagaagatggaaaaatt

SEQ ID NO: 154993 - DNA, 990 bp, Cannabis sativa
  modified_base (590)..(592): a, c, t, g, unknown or other
  modified_base (828)..(828): a, c, t, g, unknown or other
ttcttttaagactaaatcatcaacatagcagactagtatttgagttccttgatagtcattgcagtggataccagctaacctgtaacatcagggcctgagattacaagattggtatgcgagttccttgatgtctttcctgaagacttaccaggatcgccacctacccgggagattgaatttgttattaaattggttccgggagtggatccagtatctaaagcaccataccgaatggctctagctaaattaaaagaattgaagatacacttgcaagagctactgaatctgggattcattaggccgagctactcaccttggggtgctccggtattgtttgtgaagaagaaatacggaaccctgcgaatgtgtatgattactgggagttgaacaagcttaccatcaagaacaaatatcctttacctcgaattgatgatctatttgatcaactgaaggggaagacggtcttctccaagatcgatcttcgctcaggctatcatcagttgagaattcgagaggaagatatcccaaaaactgcgtcccgtactcggtattgacattatgaattccttgtgatgtcttttggactcacnnntgccccggcagcattcatggatctaatgaattgggtgttcaaggactacctggatagatgtgtaattgtgtttatagatgacatcttggtgtactccgagtcagaagaagaggatgagttgcatctcagagcagttttgcaacggttacgagatcataagctatatgctaaattcaagaagtgtgaattctggttatcccgtgtgtcattcctggggcacatagtggataaagatnggatcatggtggatccggccaaaattgaagttgttcgggattggccaacaccaaaatcagctactgaggttagatgttttctaggtttagcggggtattattgtcggttcgttgagggtttttcaaagatagatgtacccttgacggaggtgactcgaaaga

SEQ ID NO: 154994 - DNA, 825 bp, Cannabis sativa
  modified_base (646)..(649): a, c, t, g, unknown or other
atgtgtttccttctcttgtggcttcgaggctctaaactgttggctatagcactagtgttgtcacaaaataaaactagtggtttttccattctaggaaaaacatcaagtcttgagaagaactttcttagccagaccagttccttagcagcctcagcggcagctatgtattcgacctccttggtagagtctgatattgcgattagcttaacacttctccaaacaactgctccaccccaagagtaaatacccttgtagactaagacataatgcctagtacttttcaaatattttagaatatgctcaactgtagtccaatgtttctctccttggtttttctgataccttctcacaatccctacttcatagcaaatgtcaggtcagtgcataatattgcatacattaaacttacaactgttgaagcataaggaacccttctcatgtcctctatctcttgaggatcaatgggacagtgttccttagatagacggataccaggtttagaaggcatcatttcccctttagcatatgtcatggagaatctttcaaacaccttatcaatgtaagttgtttgagagagagcaagggatctattcttccgatttctgatgatctgaataccaacaacataagcagcttcacccaaatnnnncatttcgaattgagtgtcaagccattctttaatgtcaatcattttcttgatattgttgtcaataataaaattgtcaccaacataaaggagtaggaatactaccacttgattatccttaagttggtaaatacaaggttcatcatcgttttggtgaaagccgtaggttttgattattt

SEQ ID NO: 154995 - DNA, 574 bp, Cannabis sativa
atctcaaacaacttgaatttaaggtagagaagaaaccctaaaattccatctatagctcaatcaaacaccacatcaaagatttaagcataagcatccacaaactcaacaaaattatctacaactctttcatacatgcataaacaagattatttcacattattttcagcaagtaatttaattaaaattcagtagggaaactactttacttccaattcaaagccaaactcaaacaattccaagcatcaagctccaaaattatcaaaactcctaagcacttcttcaattttcaagattgcaaatcaagagggtaagagagggagagagggtcgggtttgaaggagagaaaggccagaatttgctttgttttctcttgaaattcaatcaagattaaggtatatcattaaaagttaaaagactaaaatgcccttagggccaattcccacataattacacatacaagggaaaatttgacataacacactcatttaactccaaataaatttcagattatcaaatatcaaataaaatgccaaataaacaatccaatttgcatttcaggcccgaacccagttcg

SEQ ID NO: 154996 - DNA, 518 bp, Cannabis sativa
gaatgcaagaatcagaagtaaatagaatcattgaggcatctgaatttacaaggagtacactaccatttagataccttggtatccttatatgttcaaagaagatttctagagcagaatgtcaaagccttttagaaaaaatgacaagcaggataaggatgtggagcactaggaacttatcttatatggggagagtaacactgattaactcagttttacttgccatacatacttattgggcttaaatctttatcctaccaaagaaactgttgaaggacattgaagctacttgcagatcatttctctggaaaggcacacaagaaggggctggtcttggattagtggcatgggattcagtttgcagacccaaggcagcagggggtttaggatttcgaaatgtacatcattagaacatttcagccttggggaggtatgtgtgggatatagctagtaaaaaagattgtctttttgtcaaatggatacacaatgtgtatatcaaggagcaagattggtggagctat

SEQ ID NO: 154997 - DNA, 1072 bp, Cannabis sativa
tttcctcttcctcccctttactggcttaggaatgaaatccttcggatagagcccgtacttcacaaagttgtcctcggaggtcaactagatgatatttcggtcatcccccgacaactaggcaagctcttgagctctatccttaagagtaagagtgaggggaggacggtgatatgtagggatctgttggaaccgagtgtgagcggtgcccatgccatccaccatgaagtactcataaacaaaatgcccaattttgctgatggccggatccccagtgcccgtcaaccacttgaagtctggttgagagaaatagaagtaccccgacctgccttgtttaggggtggacttcaaataaaaaaaccagctaacctcgaggggagaaggcatgtcccaattctgggaggcatagagaacgaagagggcagacagatacttaatgccattgggagtgaactgggtcggacagaggtgaaagaagtccgccacattcttaaaatacgggtgcaaaggcaacaatgccccttgctgggcatgagcacctgaccaggcacacgtcccccttttagggtttgtggctcgattattatgggcgggaatgtaacaatccaattcgcctaggtagccatcctgttcgagaacccgcaggtgtgcctcagtaaccttggacggaaggctcaccaacctggcacccaaggtaccttgccttctatgaggaaccgtagcagtaagttcctcactgacgtagtccacgccctcaaccaggacgtcgccatcagcatcgacttgctccccagcctcatttttcccccgtagcttgggggtgcaacttcttccactccctctgcctcggagagactgctgggacggacatcgtccttctcttcaatctcctagacatcagcgtccccttcatgatccccctcctcctggacggttggatcttgttcgacgatgggtaaagtggcgtgccgagccactcgagggttagaagcgtaaaccatacgcattgtctttttggtacgagccatcattctatggctagacgaaagacttaaggaagaatgcctttcactcg

SEQ ID NO: 154998 - DNA, 698 bp, Cannabis sativa
gttcatctacaaaaaacaacacacaagatgagtgtttggtcggaatatcaaacgataaacaagctaatatgccgaccaggagtacttaacgaattcaaggacaagaatgttcaaaaaaagtcaaaactcaagaagtttgaaattttctctagttaaggaaaaaatttcatgaagcttagaataagcaagatgaaagacaagcattacgcagttcagaaagcaagcattatggactgtaaaatcgcatgaaatcatgacaaagaagaatcgcagagtttctggaccttgggtttcctaaatatttttctacaataaactcgaaggtgcattcgaaatgaaaacatgcaaaaataagcataaagaaaatcaaaagctcactcaagagtcagatatttgggttcaagcaacgtcaatccaacgagcagtttcgatgaaggcacttcagcaaaacttgaagccaaaaacttctcttttcgctctgaacacacttagcaaagaaggatggtgaaaataagtttatgtgccaatgctggttgatatttataggcaagtcacgaaaagaggtaatcattccaaagaaacctcagatgcctaggttcccccctaaaagcaaatatgggaaataaaaaataatcaagtgcagccgtcaaccatggtgagagaaaatcagattttgaaatattaattgtcaaaacatt

SEQ ID NO: 154999 - DNA, 539 bp, Cannabis sativa
caataaatattgtgactaaaaatacatttagtcataacaaatggtaatttttgtgaataatactttttgttacagaccttttagtcacaacataataatgataataatttataatatttagccacaactttttttttttgtcacaaattttgttgtgactaaaagttaaattttttgtagtgttggttgatattaagcggtagcagcctagcagggtgagcctctaaaggttacatatatttttttctctttcaatatatttttttttggaaataatatcttagatatttcaaaggaaaacttacaaaaatactagattttgacccaatttttacaaaaatattgccacacggcaaaaataacttttatactgccttgggactttttttttttcttttatatactgtaaacgccgaaaataacatcacacagacagaaccaccacaataacatcagaacaaacaaaaaacaaccattaaatccggtagcagaaacattaaaatcattaatattaaggctgtcatggtttttctaatgtt

SEQ ID NO: 155000 - DNA, 689 bp, Cannabis sativa
ctgtggcgaatgtaaaatacagaatctgaagatttggatttacatggattggagatctatggtggttctatgaatgaactgaaattcttggattctgctcagtcaggttatgttttgttttgtgtaagtttccttgaatctgaacaaaaaagttacgaaaacgacatgttgccttagcttacgaaagttcatgtcgttgcaaacaaacgacgatttactttatttgtcgttttccgtaaatacgacacgtcgtttactcggtttgctgctccttgaaaaataaaaaaaaggattggacctaatttagaaaagttaattaggatttttgtctcttcaacttaaacatgtaataaatcatgcttttaaacttttttactcgttaaaaattctttatgaactattgaaattgttgtatttaaggactttttttcaattttactaatccggtgattataagcactagcggacccaattaaggaccagtgtgggtttaagcccatgctgaaaaaaaaatatttcatttacttcttaactaaaaaaagaaattattattttaattgtcaaaaaggagatcaatagttgaatgatattttcacagtatatctcaaaaaggatgtattcaatgctattgacaacgagcttatcattcatcgtttcaaaacatgaaaactcgtcgatgacaactctaa

SEQ ID NO: 155001 - DNA, 628 bp, Cannabis sativa
tctctctctctctctctcaagaaggtagcatgaattttagtttttcagcttcaattcaaaggtttctagctgaatttttagtgtgtcaactcaaggtaaaccccttagctctccttcctttaattttatgagttcaagttaggttctattgcatatttttaggaattagggttctgtggttttaagagttgtttgattttgtcttctgatgttatgttggggttatttgagatgttctaagttgttttgatggttgttgtggtgattgagcaaggtttgagtttatgaactcaagcttttctctctattggtgatttttgctataaatattgttggctggttttattgcatggattatgtttattatggtgtaattaggtaatctggaagttattgtttagtttgggatcgaattgtggtgtgtagaaggttttgagtgtttcctgcacttaactggtcgaccggttcagtgggaccctagtttttcagttggtccccaaaaaaccccactgaattggtcttccaattggggaaccagtctgccgattggggcagttttaggaaccctagtttttctcatttttgcaatatttagggtattgccatgttatccatcgataggagatcg

SEQ ID NO: 155002 - DNA, 543 bp, Cannabis sativa
tattcttgcccctaaacttatcatactatcaataaatacctcatgaaatataatatttattatggtccatcttttatttttgatgtcaaaaagctatgtagcaccacacctaatacatagttgattaattaaatttatcatgacccttttaccctttaaatattaattaaaatagtaatagtaatagaaaaaaaaattagttgactacaattagaacttattaaatttttttttgatagaaagttaatacttattaaatagttcatttttttttattattatttcttctttaatgaaaatttttaaaagtttcttctaactcaatataaatatattagatttttttttttttccttttttttattaattaatagatttatggaaagctctttccggttgtttgcctacgcgtactcaactttataatagtacatctttaatataccaaaaaaaaaatacttacatcaaatacaatctaaaaactattaatacatatataataaaaaaaaaatatacattttaataaaaacatacatttcacaa

SEQ ID NO: 155003 - DNA, 601 bp, Cannabis sativa
  modified_base (539)..(555): a, c, t, g, unknown or other
ataattgaagatgttttggtaaaactatcagaattatactaaccatagctactcagtttgacctagaagtggaccaaatggatgtaactacaacatttataaatggagaacttgaggaagagatatacatgcatcaacctaaggaatatgaagagaaggggaaggaagacttggtttgcaaactgattaagtccctgtatggacttaaacagtcaccaaggcaatggaacaaaaagtttgatgagtttatgatcaagaaagggttcactagaagctactatgatacttgtctatactacaagggcactaaaattgaagaagtcacctacctacttctgtatgtagatgacatgctcattgtgagcaaagaaagaaccagaattgaccttatgaagggttggctaagggaagagtttgaaatgaaggacttaggcaaggcagctaagatcctagggattaacattacaagagacagtgaaagtggaactctaaggctacatcagaaaactacataaaaaaagtgttggaatttattttannnnnnnnnnnnnnnnnctcacaagtatgttatttaacatcgtaaatatgaactttctaaaac

SEQ ID NO: 155004 - DNA, 508 bp, Cannabis sativa
ggcaagctactgtgctaatacaaaaagcctatcagactggcgcgcagcagcctgtgaatgtcattcctttgggcgaaacagatgaagatctagcgatgaatacctctcagactataactggtcagtcgtcaaatcccctgtcacaggttccacttgtgggccaagtggtaggtgggcagaccttgtctagtaattcatcggaagaactcatacgcaataactccaaccaagttaattgtgccagtcagcaaattggccaaaccaaccagtcactgagacaaccaggcgttttcgtatttgataggtttgggacgactcatgatctcagaaacgatctgaacaggaggagaggagttgacggtcagcttgacacgccaatcgtgcgacctagaacccgtgtcgaaatcccgcttaaaaagatgctaatgtgactcagatcggccaagaggccgaacaggttagtccagccgtgtaggcacagctggacgaactaaaaactatgttccaa

SEQ ID NO: 155005 - DNA, 709 bp, Cannabis sativa
aatcctcaaggcgccgtgcctccacgcatgttggcaggccctcaagacaagccactaaactagttgcatacattagacctctgtctctttttagcatggtgcatccgtcctatgcacgtatgcaaactagcccacgaatgactgcacgtgtcatctcgtgttgagacttatggccaaggcgcaccataacgtctcttagaggtttaggccacgtcccgtgcaagcggcataccgacaagccaatggagacgtacctgctaacctctggcagcattcttagacgcactactgagttggctcgatagtgtccatgagtattccaacttatggagacatatgagtcccctcgtggtcctcatatgcctgccctactatccccactgactagtagtaactcacttagcacaaaggtgtcagggggtggtggagagctgacatcaagtactccccccttaaatagcattctaagtttttagccttctaccaagaacatatataattttggcatatggtcaaaccttataccaaatcatagagtttctcaaattcgattgcaccattgtattcgtaaacccaaataaatagcgaacaccaagtcccgtcccaatccggacaatattgaagatattcatgaaaatttcactgtcgtacaaaataagcatcagcatgccaccacttgaccaccacttggccaatttgtgggcatcac

SEQ ID NO: 155006 - DNA, 649 bp, Cannabis sativa
ggtggtggccttggtttggcgggtgtcatcactgagctttgcggggcatatgatgtgccacaactggaatatgacaatattgtggtacctctaagaaaaatggacatcagtatggtcaacgggctaagagagcatcatccttatggacaacccctgctgatgagcaacaacaaggccgaaggcggcgaagagagcctagtgtcgaagaagaggaggacaatgcaggtgtactcatgcatagctgagttacataattcaacaaaataatcacatgcaaaactatatggtgtagaggagtattcatgatgaaggacaagttagccaactcaactctctcatcaacagaatgaacatcgggattgacgacccgaattacttggcgccacctcctcggttttattcgtaagatcagccgctgccaccaaaccctttttgaaagggcctcaggtaagtctctcacttttgcattttattgtacacattggggacaatgtgatatttagttggggggagagatttaaaatttttaattatttttaatttcttctttaatttttattttttctgtttttagttaggaatgggcaataagctagaagataattgtgtgctgttgtttattgtaatgtgctctgaaattgcaaaataa

SEQ ID NO: 155007 - DNA, 800 bp, Cannabis sativa
  modified_base (60)..(74): a, c, t, g, unknown or other
ggttggcttaagtactaatcgacaatatcacatccatacgactagagtatgactagcgtnnnnnnnnnnnnnnnatattatggtcgatagtactgtactatttaacagtatcacatctatacgactagagtatgactagcgtaccgagtataggctaatgttatggtctatagtactgtcgtatgaacgttcttgactcagcaccgttttgaacacggggatagggttatggttgggtgtattggcgcctgattataatccgggttatagatatgttattgtttatcttttcttacggagtccgtcgactcacatatattgtttgcatgtgtaagtaagggcaaggctaaggttgagcagccgtgtgagcgagcgaatgaagattgtacatgtcggggcagttaggcctggagcgtacggtctttaggacagttgtacatattttgtatagtcgctaggcgacaacttttgtactatgcattgtgaaactcttgtaaatattttataaacaggatcccgattttatataagtatgttattttgatatttataaatagctaaataaagttttaattattcacaattttcaataaactcgttgattagcaatgagctgcataattaagttaaatatcatgttaacactcctaaactagtagggtgttacatcaggattccataattatacatcatgccatgcaaacaatatctatgagtcgacatactcagaaagaaaagcataaaatatagggtaaataccattttgaaccatgtattttgcaaaaattatagattagacc

SEQ ID NO: 155008 - DNA, 698 bp, Cannabis sativa
taggatcgattaattatttatgaaaattgtaattgttttaggctgtgtttaacagttgatttttgataaaaatagaaaaaatgcaagaaaaaaaaaacagtagaaattaaaacaaaataaattataatatttagtatgaaaagaaaaatatagaaaaacatccaatttaacaaaaaatttcatttcaagcataaaaagatggttttctttttttatttttttttttttctgcactttttttgttttttacatttttcttccaatcttttttttgaccaaaatttaatatccaaacataaccttaatttattaatatagtgaattctcatattcccaaaaaaaaatataaattatcaatgacatgttagcactcttatagtttaataaaaataacgagtaaaatatccatattgtatgggattgttaaataattcaggtgacataggaatatgaatgagaataggaataggaataggaataggaatagaatagaatagaatagaatagaatttttattgtttggtaaagactatggaatcaacaacggaataaaaattattatgtttggtattgtataaatggaatagaactttattattttgactaaattattatcttcaaaaataatatttgttttattaaattacttatagtttataaagaataaataaattatgtttttagcaaaaaaaaaaaaa

SEQ ID NO: 155009 - DNA, 596 bp, Cannabis sativa
tgcccatcctcacccaacacaagttcctccaagtcaacaaataaaggcggctgacccccagtgatgtaactcacaaactcaatctcattcggtcggggagataatatagagtaaattgtcaactgaaaaataaaaaaaatatattaatataatatatgaaaattaacatgaattaaatataaagtgtaagaaacttacattctagcaaataatctgatcacttcgtccttcctgagtgtcgtgttcggcttactctcccagttcaccattctcggaaagcgatgcgacttcttcactgcatactcattgtccagctccacgatggcctcgtatgcccaatactgcaacgctccagtatagctgtaagatgagtattttgcctccttctgagtaactcccttttcaatctttttcagcatcatattcttcacatccacgtagtctttattacaagtttccatcagcttggtgtacgaaatctttcctcacgggtactcgtataagaatggaaggttatcaaccattcttatgacaaaaggaggaacgacagtcttctcctccttaccagtgaggacgcccataacaaacaaggccat

SEQ ID NO: 155010 - DNA, 514 bp, Cannabis sativa
acagcagaagagttctttaatatgaagcactcaagtgctaggaatgtaattgagcgttgttttgtattattaaaaatgcgatgtgctattctcagaagtccatccttttatgacacgaaaacacaacgacgtatgatttttgtttgttgtatgctgcataattttattcgaagagaaataaacattgatccagtggagaatgagatgaacagtgtattgggaaatcatcccataacagataataattatattaataatatcgagtcttcatatttatggactatttggagacaaaatttggcagaaaaaatgcataatacgtggctagcaaatagatgattagaatactagtatttatattttaacaattctaataatgatttgatgtatgaaagacatatgattatgtgtttgctttagtaattttttttttgttttttaatattaatttatgagtattttaagtcttcaaatttatgctttgatgtgtttatgcatagataaatttatgatt

SEQ ID NO: 155011 - DNA, 832 bp, Cannabis sativa
aaaaaaaataaaaattttttatttttgggttaaaaaaaataaaagaatcgttaaaccaagaattcccgttaaatcaagaattgccgttagataggcacttttaatatataaagatatgagatattgacggtaagataactctaattttatattttttaactagaatttaaatcgtgttttgcatgctattgtatttatttttagcaataattaatttataaattatattaaatatcaaattttgatattttttttatctaatatatataaaataagatttaaaaaaattatagataaatttatagaaaactcattataatttcaaaattattatccttaccgtatctcacttgtagttgctactatatacactcaaaaccgatgtcatcacaatatttcacttgtaatcactactatattgaatatcgttgtcatcaccgtattaacaattgagaacaaaataataaaataaaaatttgaaaatgaagatgaccatgtagactatgagatgatagttagatcttatggcatatgatatatatatacacataaatatactttttaacttaatacttaaaattgatgtattttttttttttgacataataatatatttaggacatgtctacagtaagcactttacttttgtctctatggtaggtattttttatagccataaatatttaatctaagtgtaataaattgatgagtgtatatagatagttaatactaagaatgtactagattattcctaaaattatttttttaataatattcttaaattaataataattatttaaataattaattatttttaacctcctccaattaa

SEQ ID NO: 155012 - DNA, 685 bp, Cannabis sativa
  modified_base (496)..(497): a, c, t, g, unknown or other
tttttttttgtttgttcgttatggtttttttttgttactctgaaatagttttcagattggtgtaactgtgtagaatgcaacttttcagtatgtttttattttttttattctttatgattgaaactttgtatagttgtttaatgaaccgcaaataggtatgatgttttttttgttgtttgattatgatctggttgagataatgaaccaatggttgctaattgactgaaggtttgagctcagaatatctatcaatggaggttatcgataatggcgttttatgcatttttcggggatggagatttgcgactatcggagaattttttaatttttttttgtttcgaatgagctttaaaatgaaaattgaggaatttatatgttagttgtagattgtgaatcacgcgctttgattcctgctttttaggattagcagttgatttagtttttgaaggttcccgtgaagaaaatgatgacgtgtcacgtcattatgtgtttgatnnatatttaacgttatttttgtaaaaagtttcctaatatagtatattcctaaaaaagttccttaaataaataattgttagtgaaaattacatcaaatgtgagtttttaaaaatatttttcttaaatatggcatttttaagtttgtacacgttttatggtagttttgtatttttagactttattatgggat

SEQ ID NO: 155013 - DNA, 847 bp, Cannabis sativa
  modified_base (35)..(39): a, c, t, g, unknown or other
caaccagcctagtctgcccaataacccaaacaacnnnnngttacaacctcttcctgttgaaggggaggacatcctggttattttgggagggccacatatcgcgagagaaagcaataacgctcagaaaagatatgtgaaagaaataaaaaacgagcagtcgacattttccccataaccttccaagaaggtgaaaactgaggaacctcccattatattcacggaggaagacgagaaaaacgtgagatatcctcatgtagatccattggtgattaccatccaactcgtcaataaaaggatcaaacgagtgttcatagacaacggaagctcagtaaatatcctttataaggaaactctaaggaagatgggctcgaaaaggccaaatttaggccttgatggtgaatctttgcgaattcactggagacaacattgttagtcttggcataatcgagatcgcattaactttgggtaaagcacccctatctgccactgttatgcaagattttctagttgtcgacctgccatcggcttaccacatattgttgggtcgtccatcactcatcaaactaggggcagtcaattcgatcaagcacttatccttgaaattccaaacaccaaaaggcgtgggagtggtgcgtgacgaccagatgatggctcgcgattgctatgcatagagttgcagcataggaaagctagtcatcacttgatggcgatcttggcagaagaaaatgaagaaaaagacgaagatcttgaccccagagttcaagatgagaaaaacctattaaaaccaattgaggaattggaagaggttattctcgacccaggaaatcccacaaagtgtgtatacatt

SEQ ID NO: 155014 - DNA, 573 bp, Cannabis sativa
ttgtggtttagggccctgtaaagcattgagttgcagttccactcaggatgaccagcacacctgagcacagaaacgaggtaaaatagcataaaatatatatgtgaatgaatgtatattgctatctgcttacactactaacattgttaaaatgtgtgattgtaaggatgttattacttatataaagtcaaataataataataaaaaattttacaaaatacgcggcagctttaaaagacaactcaaaatgccataagactgaaaccctctaggttgtactgtcgtgatatgtacaatccttgccaagtttcaactcactgctcctctagcttagctttttccttacctacacaaggtagcaaacttaatcgacagactcagtaagatatgcataacatatataggtagtgttatgtcggctttataattaagctatcctgagcccaacaaccgagctcgccaaatgatttagaacgatcttgatagaagtacgaccactgtaccatatgcactaaagtaccaactctgtactcgtgttggtagggccattactgtacttctgagagttactgagtg

SEQ ID NO: 155015 - DNA, 528 bp, Cannabis sativa
ttgtttttgtcttttttttttaattattattgttattaatattaatctacgaagatatatttaaaatttaaagtacacatgttagtgtgataagagaaaaaccatcatgaagttacttggaaattaatgggggacaaaaaacaaaagagaataaacaaatatacaaatatgtgttagcagttaaaacagctgtgaaactagtgaaaaaaaatgagatttcaaaagagaaaataaaatgaacatatgtaaatattttaatttacgagtggaacaaacaaaattaaataaataaaaaataatttgtagtttatataattaaatttaattaacaattataaataaatttataatattaaataaattgtgacgtgataatttttaatagattcatgttattcaaattttaattttttaaaaaaatatattttaaatatacagtaaaaattaaataataatttaataattaagtataaattacaaaaatataacttatatattattattattaaaaattaaattttaatattt

SEQ ID NO: 155016 - DNA, 955 bp, Cannabis sativa
tattacggtaaatttctcatatctaatccaagttcaatatcaatcccttctaatgcatactccatgcatccaacccaagctttactttgactaatgcccttaaacctagaaaagaaccgagacctggaccaaaaattgggaaagggacctgggcaatggaactaggaccgagacttagtacccgaccccaaacctggacttgaacctaggacccagctcgtgactagacacccaatatggaaccagaccaggcctcgagatcgggatctggatctcgaccgggggcttggaccgaacccatagtaagtctttggatatgggccccgaacccaaacccagaccaggacctgaacccaaaccttgacctaaacccagtcccagatccaaaccaagaccagaaccgtaccctgcgacccaaaattagaaccaaaattacaagtagaccagcacctgcgaacgggaccgaaactaggagacttggacatgtggaactggtaaccagacctggacctagacccagaactataacctaaccaggatctggactccaactcatacctagactcgaactcggacctagactcaaatcccaacccagacctggactcaggacccgaacccagacccgaactcaaacccaaacatggaaccggactcgggacatagaactagggctgcaatttaaaccagaccctagtctcgatcctgaacccaaactcgaacctacgacccacgacctaaaccagaactaggtcggacccatgagagggatctaatcttgagtcgagatctgagaaacggaccttggaatagacctgtagttggtgtttggatcttggactcagacgaggacccggacctagaccagggcccaaacaaagacccaaacctagacccgagacccgaaactggtacctgaacaagaactacggaaccaggaccctgggacaagact

SEQ ID NO: 155017 - DNA, 526 bp, Cannabis sativa
tcctcagttttcaccttcttagaaggttctggggcaaagactgactgctcgttctttatttctttcacatatcttttctgggtgttattgccttcccctgcgatgtgtggtcctcctgaaataaataggatgtcctctccttccacaggaataggttgcaacccctggttatttgggttattgggcagactgggctggttgtatccctggccctatcttttcacgtactgcttaaaatggtctcgagtgatgagatattctatcttgtctttcatttggagacattcgtcggtcgtatgtccaatatccttatgccatttacagtatttgttaggatctcttttgctcctcgaattcctcataggctcgggtttgtcgaaggctaccttctgctcttgtgcgaggtaaatattctcccgcgtttccttatgttcagtataaatagtatacactggtacgtatttgtcatgcttcttttgtttctttctctccttcgacgattccttaattctgtcctttctcttcg

SEQ ID NO: 155018 - DNA, 707 bp, Cannabis sativa
cttgaaattggtgagagactagctggaataaagattgtttgttgggataattgtgttgaaggcttggagttagcttgtgcaagaaattaaggtagctttcctactcaattttaattgaattccttgctgaatatgattgtggaaaaagtatgaattaaatgaaatattcttgtttatgcatatatgtaggaattgtattgtttttgagagattaaagtgcaaattccttcatttagttgtgatttatgtttgttgagcatggaataagattaaagggtattttctatattggacttcatgatttgtttggaatattgttgctagaaaaatacatttgggtatgttgaaattaagctcaagttcaagagcttggattttatgagtttaagcatgattttgtgttgaattgtgggatttgtttttggtgaattcagaggcgtttttagggtttcattgagtttaaaatctgattgtaacttttattttggttgtgtaaagcaagcttgagttcatggaactcatgcttggtgctttaatggcacattttgattcttggtgaaattattgtgtttgtggtgtagaatatgcttgatatgtcatatgttgatgctcaaggaaatttggtggtgattggggaagatttgagtaggttttggaggtttaaaagttatgatttttcgtggtgttgctgcccagacaaccgaaat

SEQ ID NO: 155019 - DNA, 1105 bp, Cannabis sativa
tcatgtgtgaggtaaatattctcctgagtttcattaagctcggtataaatagtatacactagcacgtacttattgtgcttcttctgtttctttttatcattcgacgattccttaaaaccgtccttcctcttcgaaccagaagcccccgagttatcaattctcatggaaacagtacttgttgaaacattgctgggtttgcttcccgagcttgttttcaccaaattcatttcctttcgggcttcttccttccgaacgaatacctgagccctttcgttgaactcagtgatgcttcttactagacgaccttgtaagtcatcccacaactcgcccctttggttgattgttcagtagagatccctgcctgaagggctataagttgtgtgctgtcatccaaattcctaaccctacccgcaaccgtgctaaaacgacttaagtatgccttaagtgtctcaccgggctgctgctttatgttggttagcgaggctgcttcgaatcgtctatccctagcagcctggaactgtttcttaaaatccctggacacctgctcccaggaagttattgaatgatgagtaaacttgttaaaccagctgctcgctgctccaacaagcgaggtggggaacaaaatacaccgtaaattgttcgtcacattactcgcttgcattattgtgttaaagttattcaaatgcaagaccggatcagtggttccgttatatgacgagacatgcaagtttttgaatcccaaaggaaaaggggtattcattatatatggatgatacgactgaagctcctcatccgagtcgtatccagattgtctccctagttcccccacttgatatatcctgaacttgtccgccagctcatttatctacaattggatgagatcctcttgctttggaccaagctattggcgaaggtcaggtttcttccgattcaagtgctcttgaagatccggttgggagtaattgataacaaacctcgtcttacacacagatctcgtcctactcatagcctttgtctttgagtgactcgcggatttactggttcccatactttctcgatcgttagctcgttgagtactttctcctcttcgagttgattgactatg

SEQ ID NO: 155020 - DNA, 628 bp, Cannabis sativa
agacatttacaagtgttttgtagctttttaatttgttttattgcatttaggatagatttgcatttgttagttttaaagtaaaaccgtgaaaatcgtgaaaaaaaaaattcaaaagaaggccactgctacagaagtcgcgactgggtcattgcccgtcgcgactgggccttctacgaaaaagaaaaaaaagctacagaagtcgcgactaaggcatttcccgtcgcaactgggaaggatgaaaaaactcgaaaaaactctgccaaatgccgtcgcgatggggcacattgcccgtcgcgacgggagccccctttagcacattaaaatcccaatttcacccaatttcaccatttaacctaaatttaaaccccaacccgattttcttccttttctcagccaccacacctccattccaccattaaacctcaaatctcttctcattctcttcaattattccatctaaatcactagaaacacaaatttttctcataaatcttctcttttcttcaaaaatcacaccacaaattaccatttttcacctaaatccgaattttctactattcatcatcttcaaccttgagttctccatggatgtgcaacaatggtggtggatgaacgacattctcgctta

SEQ ID NO: 155021 - DNA, 573 bp, Cannabis sativa
gattagctcctaaaacataacaaacaattgagggtttccaaaaatccacttcctcttggatatcatcattagtaatcttcaccttattgcacttaggaaatagacttctaacaactaaaccagatcttagaacagggggattagaaaccataccttgtgcaattttagcagagcactgctcagacgcctccaagaaatgggcaaaatccaccctgatatcctcctgttgcataatcaatcttagcgaggacttcggcgtcagtggatcaggttccagcatacccggaggtaatccctcatttccgtccaccgaatcctcatcgtcgacattagaaaaaactataggagcaacacctagtaccgcatccattgatttggttttcctaacatcagaaacagaattaggacctttcttcttcactggcttcgtcagatttcctttcccatgccctctacctcttgtcttcgccatggctccagcacttgctgcaaggagtcgagagagagagaaaaggtacatgatcaactattgatattgacttggaaagatatgacggtaagtttataatatct

SEQ ID NO: 155022 - DNA, 1045 bp, Cannabis sativa
ttgataatgtttgtaagtttcagcttatggatcgtattgagagacttgctatgcttctttagggagtttgggaagctcgtaatgacttggtgtggagtaatgagactttgtcgttagagatggtggtgaatgatgtaattacttaccttgattcttggaagagtgctcagctggaaaatagtgttgttttgccagtttctggtccgactacaaccgggtgtgagcaatgggctaaacatcgttttgatgagataaaggttaattgtgatgttgctgtctttgaggatgacaatagtcttggtttgggttagattgctcgagatcataatagtttgttcattgatgccttggcggttaaattttatggtcaacccgacccatttatggctgaagctatggcgttgaagaaggcgctcagttgggtgaaggggaggtgggttgaggggggtgtgcctgctagtgtggttatgcagtcggactcgctgttgctggtgcaagtcgtgcaacagaagaagcggttgttgtctctggtggggcttttaatcacggactatgttgctcttatgcagtcctctcatttgtttcctatttcaattaattttgttaaacggtccggaaacaaggaggctaactttttaacttattcttttggttctattcctggttgtgtttcccgcaggagttatgtccctgctggttggaagctattttggtaactgatttgatttaataaaaattaattttctggttcaaaagaaacaaaaatatttttttttttaaatatcactcatcaattaactaatcacgttttttttttcttttttaaaatatcattattttgcacattggtatatgtacttattattattatgattaacaaaaatatatatattttttttttaaataccattcatcaataactactcatatttctttctttttttaaaatatcactattttgcatattggcatatatatcttttataattaattttttctttttctttttcaattttatgtgtatagaaaaataactttccacttc

SEQ ID NO: 155023 - DNA, 557 bp, Cannabis sativa
  modified_base (478)..(481): a, c, t, g, unknown or other
ttatcacagttttttcaaaaagtagcttttagcttttccaaaagctgtgccaaacgggcctttagccatgttatgggccgcgaagttacaatatctaggaataaaagaaaaattataacatgacaatttagtaaagacgtgtttacaatgatgcacatagttatcaatctcccaattggaacaagtgcccctcagagtcttgataactatttcagaatcgctctccaccaaaacaaaaagatgttgtaaagagacgaccatttccatagctaacagacaagtcgcagcttctccaatgagaggatcaaagaagttgagcttgtttgtaaccacccacaaaacagattcattgtggtccctggcaatagccacaattcacatggtgtcccttccaactttaacgtcacagttgatcttgacccaatctactggcagcgaggaccaaacaggggttgtatgtaacaccctaactagcatnnnngtattacgtgatttttaaacgtacggttgcagctcgttgctaatcaacgaggtttatggaaatcgtgattaattaa

SEQ ID NO: 155024 - DNA, 809 bp, Cannabis sativa
atattatacgataaagtcacataacttcggtcaaaattaatggattgatcatatttattatctttattagttatatttaaataacaacggataaaatatctaattaaattaattagtgaattagatgtaaaaaaattaaaattataattgatgtatttcaatatcagctcccacaaattttaatttaataataaattatgtagaaaaatgctaactaactattgggtaacagatcagtatagtattgagtattttaaaatgtcacataacaaacaataatagtacgaaaaatcatttatcgaaaaaaatagtacaaagattattcgtaaaaaaaaaataaaaaaaaaatactaactaattattgagtaccataccgatatatcattaagtacattaagagtaccaatatcaagtacaaaaaatcattgtaaaaaaataaacaaaaaaaaaaaaacataaaagataaaaaaaaattagtaaatgttacaaaattatttaaaaaaattactaactaattagtagttatttaaaaaaataatagtaaatagtacaaaaattatccatacaaaagaaaaaaaaaatacaaaaattacaaaaaaaaaattgcaaactaattatttatcataccgatatgacattaagtacatttaagagtactaatagtaagtacaaaaaactatttataaaaaaaatagaattaaaataaatttaaaaatgtacaaaaaaaaaataataataccacattatcgatatgacattaaatacattaaaaatatcaataacaggtacaaaaaattatatcctgaaaa

SEQ ID NO: 155025 - DNA, 1172 bp, Cannabis sativa
  modified_base (569)..(571): a, c, t, g, unknown or other
ggggaagtgacaaaagccaggatcagtctcctccaccttacattaagaaaaccgtaaatgtgatctcgggagggtcagacctgagcgggaattcaatacgagcttcaatgtcatatgcccgacgggtccattcggtaagggctatggcggtaattgacagcgacggccctgacgcgctcttatcattcaaccaaggggaagcctctgaattagaacacccccacgatgacgctcttgtcatcactctggacgtagcccatgttcgaaagaaacgcatgctcgtcgacactgtaagctcagtcaacattctattgccggagttctgaaagaaatggaaatcgaagacttaaaagctcaggacacccaggtcacactagtagggttctcgggagaaagcgctatcgctcgaagtttcgtccaactacccgtctacgcgaacagagtcaacaaatcagtgaagtttttaattgtggattgcccatcggcctacaacgccatccttggcaggaaatcgattcatgcaatgaaggcggtcgcgtcgtcctaccatcaagtaatcaagttccccnnnaagggtgaggtaagggagattcgataggaccagttgggggcccgcgagtgttactcctcatccttgaggagtaaaaacaagttatagcaattaatcaactcctcgacctcggcgaaagagcaatcacccgcggtagaggagttgcaggaagtacacatacacccaacggacccaacaaaaacaacctatatcggcatgggacttactggagaccggaagaatcaaatcatagaattattaaaagaatatgtccaagtatttgcatgggatcactcagacatgcccgggatagagcccaccataattactcacaaattgaatgtaaacccgaactatatcccggtcaagcagaagaggcgaaaaatgggaacagatcgaaataaggcagtaaatgatgaggttgcgaaaatgcttaaaaacaattccatcgaagaggtacaatatccaacttgtctcgccaaccccgtggtagttcccaaaaagaatggaaagtgtagatttcactgacctaaataaagcttgtccaaaggacagtttctcgctgccacacatcgatatgataattgacgccatcgcaggacacgaactaatgagcttcatg

SEQ ID NO: 155026 - DNA, 526 bp, Cannabis sativa
  modified_base (195)..(201): a, c, t, g, unknown or other
tgagttgataaaatcgaaggtgcgatctatctcaggctatacgggcgagatgctgaagacctatggaattgcacttgggcaatcgtgccaggttaggttagtatgagagggtaaattcagttgctaccgcctgcacgctttgccaacagtaacccaggaacaagtggtgagactagtactagtggttcaactagnnnnnnngcctggagccttgagcatatttgtgcaggggccatcctcccgcttcgggactacttcaaagacaacaaaaatcacattggggttgccccattctagctgactcccatctcctacaggattctcgccagtttgaaagtcttgtacaaaattatgaattggggttgtcccacacccgtagagattgagtatctttacttaattaaggtcgttccattcaaaaagaaagccacagtgggctttttctatcttggtactcacgctagcgagccaaaaattattgtatacttgccaaataaggtgtctttcaaggacaacttcttctgga

SEQ ID NO: 155027 - DNA, 578 bp, Cannabis sativa
aagtggctcgactaggattggcgctggagccttgaacacatcagggctggagtaataatccccctgcgagattatttcaaggactttcctgaaccatctcgggcttgccccattccagcttaatcccatttcatacagaatcctcgcaagtttgagggttctatacaaaattttaaaatgggagtcccccacccctttggaaatagagtatctctattctgtcaaggctgatccagcgaggaagaatgccgcatggggtttttactatcttgggactcatacatgtgatcgcaagatcattgtggatttgctaaataaaactcccttcaaggatgagttcttttggacgaacagtctctcccgcatcaacacagccactttccgcattatatgtaaatgattatttgcacaagacttggttaaattagcccatgtcttttattcaggtttagctgattgtaaattcgctttgtttttgacagctgtctggaaaagaccagcccttactcttgagatggctgagcggcacaggctcctgttgactctcccatatggtctttgtgttggaatttatttta

SEQ ID NO: 155028 - DNA, 542 bp, Cannabis sativa
attcccccatgtacctcacgtagtatgtagtcgcactcttcaccgtcgatgcatttgagtagcggttgactaaaacttctacgatacaaccttttatcgtatatgacatatcgggcggctcgttgtcgcagttttcttgcttctaccttgtcatcgggtagaacgccctttttcaagtatgcgactatcggagtcatccaggtgacttcttgagcggtatctatttccatgatctcttcttgatttatagttgggtgggccaatacatccactggaattacatcgagcaactcggcttccctagttgaggccaaacgggccagtgcgtctgcgtgcaaatttcgagcacgcggtactcgagacacgaccactttcttgaatttctgcatgagctcgcatacaatggctaagtacttaaccaatctcccacctctggccagatattctccatttacctagcacaccacgatttggggatcgctaaaagcttgtagatacttgattttcatctcgagagcgagcttcaatcctgcgattaaagc

SEQ ID NO: 155029 - DNA, 649 bp, Cannabis sativa
gggctcctgaaggaatttaactgcaccctcggctctcagagctttttcaaccatttctgcaaaagtggttgcttgattggtagtgatcaccagatcatgtttaatcttcacatttaaatcggccaggtacttttctttcttactaaaatctattggcacaatacccatgacgagtttggccaaatgatcgaactttgtggtatactctgtgacccacattccctcagtctgcacaaactcagtgaactctttccggttagcactacggacgacttcattgtaatacttggcattgaacaactcccagaattcttcccaggttataatagtgacatcccaggtgagggacaccagttcccaccacactagggcgtcctcctggaactaaaaagtggcgcaagtcacccgatcattaccaaacacacccataaaattcaagattcgttcaatcacagtgagccactactcatccttcatcacatttggacgtcccagaaacactggaggtgcttgcttaaggaatctttcgtataatggctccatacggttgccagcaataggttgttctgttggcaccactggagctacagcggcctgagcttgttgtggaggcacgacaagaagaccctgctgccttaatctcaaaatt

SEQ ID NO: 155030 - DNA, 513 bp, Cannabis sativa
tttgttgaaaaccttagaaattatttaagatgtattttcgcacgtgtttcttacttgtaaaatgtatgataatttctgaatgtgtatgaatttatattgaatcatgttgttttctgttattaatgttgtagtataattttgaatattcattgttggtctaacttagtttgttgtttttaaagggacaaattccaaaggattgtcatccgttagacaaatataatagtgttagatctccatagattagtgtttgtaaatgcaaaatctagttgtacatccaaagatggcaacttaaactagtgtttacaatatgaaacaatggagaaataataaaataagaataactttgactcttgcctaaacgggacatcgttggattcttatttttagacttagagttattcttagatgactatattctcgacattctatcccaaaatgatatgaattctcgatcttagaaatctcctacttgtatatgtttacttaaggcaatttagacttagagttaga

SEQ ID NO: 155031 - DNA, 744 bp, Cannabis sativa
  modified_base (685)..(686): a, c, t, g, unknown or other
tcttttcctttgaagaggacccctcaccgcccttagacttcttggtcagaggagaggcagtagagcttccgcccattctcttcctcagagtgtcgatcatctaccgagacatgtctgcacagaacaaaaatagtatggttagaaaacagccatcagaaacacaaggcatgaaaatcaagaagctcaagaatgaaatgaagtaaaatgcaaggtgatcgctcgcacaagactcagaagtcaatcatcacctgacatcgatcttatctcagacatgacagctttcccttttctgaacacgggaggagatggccgaacaggtgaaatgggctcgcgtatgcgaattgcatgttcaacaggcatgggcgaggtcgtgagtttcttcttcctcttccgtggagtcacctattcttcctcagcttcatcttcaggattcaaaggctcctgagcatattgtttgatcctggcacctcctttcaacttagcctcgcgcttgagttgaatgagctcatcctccttatgagctcgtttaggccggcaagcaccagatttcctcttcttccccgtcatggacttaggagtaaagtccttaagataaagcccgtacctcacaagattatcatcggaggtcaactacataatattccagtcttctcccagaaatcgagcaagtttttgagctctatcnntaagagcaagagtgaggggaggatggtgatatgtcggaatctactgaaaccgagtctg

SEQ ID NO: 155032 - DNA, 741 bp, Cannabis sativa
  modified_base (539)..(546): a, c, t, g, unknown or other
  modified_base (594)..(614): a, c, t, g, unknown or other
ggtttgaaaattgcaaaaaattgaaattttgggaaaatcccacaaaaatcgcatttgtgggtgtggctgccaggaggctacacgtgcagcccagacaggctgcgagcagccgagacgcgtgcgcggatgaagcaagctccagggccctgcaccgagaaatctcggcaattataggatttccgtgggcgagctgcagcctggcatgcgtgtctgagtgagggataatcaggggcttcagacaaaaaattgtttggctcaagcgcgcacatcaggcctccttgtctgagatgctagtgcgatagtgcaccatctcgactcacctttgatccataactctttcattttttatcagaattgagttccgtaaaaaataaatttgcttaatttttgacaaggaatccaaataaaatatttttagaacgaaaataaaattatttttaatgaaaaatttcgtaattcacatacattcattaaataatcacataaaccaacatgagagcatccaaatcaacacaaacatcattttaattcatatttcnnnnnnnnaaatcattaccatggctctgatacaagttgttggaatatgttttaccnnnnnnnnnnnnnnnnnnnnngtatgttatttaacatcctaatatcaatttataaaagaaagtaatttaaacacagataaagtttgagaaatcttacagtgggtgcagcagaattaaattactcgttccactcagatctctaaccctt

SEQ ID NO: 155033 - DNA, 597 bp, Cannabis sativa
  modified_base (174)..(188): a, c, t, g, unknown or other
atatggctagagtatgactgacatattgagtacaggctaccattatggtcgatagtattgtcgtatgaacgttctaaactaataccgtgtcggacacggcgatagggttatggttgggtgtatgggtgcctgattataacacgggatactgttatgttttatgttatgcttttnnnnnnnnnnnnnnngactcacagtgctatttccatttgtatataagggcaaagctaatgctgagcaatcgtgagggggagcagatgaagatcgtacatgtcggggcggttaggccgggagcgtacgatcttcgggacatcaaggcttttcctgtatagtcactaggcgacaaacttttattatgaatgttaaaattttgtaaatgtattttctaaacgggatcccaggattttataaatatattactttatgtttctaatttaataaccaaattttaattaatcacgtttttcattaatctcattgattagcaatgagctacacaatacgtaaaaaatcattctaacatgcctaatttagttagggtgttacaatttggtatcagagccgctaggttgtcttccaaagatcgtcacgacatgt

SEQ ID NO: 155034 - DNA, 763 bp, Cannabis sativa
aaaaaaaaaaaaaaaaatagttagcacatgcatttgatctgattttcaaagattctaaataatttattattcttaaataaaattcaaagattataagtgacgtgtaactaaattttttaagcttgttttttatattttaaattattttaaaacaaatgtcaatcaaaattttaattataattttctaagtattatagaaatgtccctatcaacaatgatagaattttttaattaatgaaaattaatgaaacgcgtttcctagctagctgtctccattattcaaactcgatggacttggtccaattaattggaaagaaagacaaaataaaaatgaaataggaaagagaaggggaataagaatatgaataaaatggaatgaaattttcattcttttatttgataaagattatggaattaataatttaataagaattgtgatgatgggtaaagtacagaatgaaatgaaatttttattattttgaccaaaatgtcttttactttttaaaataatttttgttttataaaattactattatggtacaaataaaaatataataatatatatttatgtatcacttttaaattatatatttttagatctaattatcaagtaataaaatataaataaatatctaatttaataatctatagacatttagttaagggtgcgtttagaaagccacaatataattggattggtgtgtaatttgaggtaattacacaatttgacatatttgtttgaccatgtaattacactgtaact

SEQ ID NO: 155035 - DNA, 500 bp, Cannabis sativa
gaggtcaaacttcccaaagaaagaggatcaacctagttcatcctctgcacccaaaccagccaccgcaactccaacccctcaagaaaaagcaacctctatttcatctcgttctagtgagataaagtgtttcaaatgtcaagggcgaggacacatagctagccaatgtccaaataggagagttatggtgattcgagaaaatgttgaagtagattttgaagatgaagaagagcttgctaatatgccaccattggaagatgcttctatagaaggtgaagagtatgggccaaaatacggtgacatgcttgcactagtcaccagacgagcattaaactcgcaagaaaaagaagaggaagaagaggtacagcgtgagaacatttttcatactctttgtcatgtgaaagacaaggtgtgtagtgtgatcattgatgggggtagctgtactaatgttgctagttcatccatggttgagaagctgagacttccaacgcttaaacatccac

SEQ ID NO: 155036 - DNA, 902 bp, Cannabis sativa
ctggaagagtacttgaggcactatgtgactgctagtcagagaaattgggttgagttgcttgatgtggcccaattctgctacaacattctacaatcttctgcaacgagaatgagtccagcggagattatcttgggaagacaacctctgatgccacatgaagtggcaaaatagaaatcttaaggggtttgtcatgcagcttatcggttcgcgagggatagaactgagttgctagaattggctagggacagcatgggaaaagcttcacggaggatgaaaaaatatgctgataagcataggatggatttggaattttctgttggagatcgagtgttgctgaaactcactccacagatttgggaaaagataaccgataagaggtatcataaaggcttggtccagaaatacgatggtcctttcaaagttgtccagaaagtgggggctgtagcatacaaaatgaagctgccggaacgtttcatgctacatccgactttccatgttagtttcttgaagaagtgtcatgaggacaaagaggaaggaagacagcaaggggtgagggcaccgcctactgtgaggaaacaattttagatgaagttgtcgaagatctttgatcatcgcacttttggagccagcaagaagaaccagagaactgagtatttggttcaatgggaaggtcacaaggctaatttctcacactcaaattttccctgcgatggcctagattcacccaaatctagtcagccaacccaacaacccgttagtatgcacccacactcacggtctaacaagtatgtttcattaacatcctaatataaattctaaaacaatgagtgtacggggtagtgggtcatctaaaaagaacctacacgtagctaagaaaaacttatgttaaaggagaaaagtgt

SEQ ID NO: 155037 - DNA, 588 bp, Cannabis sativa
gtgtttgctaatgctcttagaagcactagtgcaacacttgccattgaatctgcaatccatggagactctttaatattctagaactcttactttgttaaatgaattagatgatttagattggacatatagtatgttatacattatgctctcttaatttggagattgtataaagcttcagtatttatgtggtatacacaagcatagtttgcagatcgtatacgctgtagataatttgtgctatagataagttatgctttccaaaatcaatgttaacatcctccttgctagttcaggtgtcttttatcaggctattgccagtcagctattttttgtgacatgttttgtggttcatcttattcaggtgctcttatctggtgtagtaattttagaagttcctatctggaaggatttacttgtttacttgctatctagaagttgctatctggaaggatttacttgctatttggtttaggtgtttacctttacaacccgaaagcccttattgcagccgtatacccttgatctggtcaattggtgttgtgagagtccacaccaatggcatcacaagagggctcaatctattgtata

SEQ ID NO: 155038 - DNA, 755 bp, Cannabis sativa
gaaaacataacccaacaacaacaataagaacaacacacaaaacatccaaaacatgcataattcactctctttaaaatcaagaaactaaaagggagttgcttgagatcttacctagagcctgagaccaccgatttcttacaaaaactagcttgaatttcacaaagaaaccccaaccctagctgccctaggatttttcgagagagagaaagagagagtttgagagaaaaaacctctcttgattttattttctaaatttccaaattttgaataaataaattaaaacttaatttttctaacattaatctcagcttaaagtattaaaaataaatcagcttattaagttaaattaaaaaccactaaagacaaagcataaaggaccaaaatgaccattttgcccttttcccacaaaacaacaaaaaagagcacttaggggtattttgggaaactctaaaatctcgactattactgacattctcaatgtctaaaatattgtcctgttgaactaaaaatactaagatgtgattctaatagccatacaccgcgttccaatgttgccgggcacaaaatatgcaaaatcatgaaatttctatatgtgacataaaaatgcattctgaattcaaataaataatcataaatagttaatttaacattaataaataatcttcataataaagccctaattatctgctaaattccaaattaaagctaagcggtctttacaattatcccctccttagaaggatttcgtccccgaa

SEQ ID NO: 155039 - DNA, 629 bp, Cannabis sativa
cgcaaggtgtacggtattctggcgacccaaatccttcctaggctttctctacacaccataattgctattattattattggtctattcgattgttgacttgtcttttttatttattattatccctatatcaatcttacactgttttaaattatgtatagatagatacatattgttcttattgattgctgattgctgatcatgtttgtgaaatatatcgaattaggttatttattttatttttgccttttctgattcgttaggatttggaacacacttatagattcttgatcctatcattggactgttgatagattgattgagtgagttgttagtaactggtggagaagaaaaattgtattattaaaccgtcgtaaatgatgatcattagtattaaaagctgatttactcacttctctgtgatggagatataggcctggttcccaattttcttgattgtgatattgataacttatcaaaagtttatacgtcgtggtttgtttgcagtattgtggccattatatgtctaccagcaaaaacatcctcagaacttcatcttccttggactttgtactctgtcactcagtctaacacagatggaaaaattgtacttgaagcattgatttgcataa

SEQ ID NO: 155040 - DNA, 756 bp, Cannabis sativa
gatttattaacttgttaatacttgaactaattttacaatgtttgtgtaatatttaattacttttatgaaatgaaattaagtattttagtccattttaaaattagtttaaataatatttaatttaccttttaaaaaataaatatgtaatttaagtttaaatttaaattaaataatatataaattaataaatatataatttaaataaattatatataattaaaaaaactaaaaaacgctcatatatgacgtcgattattagctaggaacagacgctatatgtaccctatggcatcgattcctagctaataaccgacgtcatagggtatatacgacgtcgagtttttaaaaccctttagttttaccctgttcagtgtcggtagcgaatttcgccaaaacagacgctgaaagaactaaaaaaccgcatctaaagaagatttttgtagtagtgcccttttgattttttttttaacaaacctttctcttatgtattataaatgtagcttcttcttctaaattatgttttgctcactgcaacatctatatatcatatatgtaataagtgtaacgttaaatacacaataggaatgaataataatgatatctgctaataaaatatgcatctaataaattttgcacactcaggtgcatgacagattttaggggtgttcatcaaatcgcttaaattgttcaaaccgcccgcaccgtaccacaccgcaaaaaaaatatagtttgaaattctttgcggtgcagtcacgg

SEQ ID NO: 155041 - DNA, 718 bp, Cannabis sativa
  modified_base (48)..(71): a, c, t, g, unknown or other
  modified_base (464)..(464): a, c, t, g, unknown or other
taatttatcgttttagaaagttcttatttaggatgttaaataacatannnnnnnnnnnnnnnnnnnnnnnntaaaataatttccaacaatcccatgatgtgtgattgtgtaccggatatgttgactcgttgtttcaagctatgttcttgtcgtgtaataatgtgaacagtaattataaaaatttaagttcatctcttttatcacagcaagtgcatgagcacacggtaattcgtcaatttggaatctgttacaactacatgttttctcctttataatcacccatgatcttgttagttctaccacttcgaacatgctctcgtttattggctttacctgcaaattaggtcaagaaaatcaattgtcaaactgtaaagaaaactgaaaagaaactaaaaggaaactataatgcaacttgtagttttaagtgattatacattttctgtcaatgagtccacaaagttatngactagctttttctctactataggcatcaaaactgttgtggttttctgtgcttttatcctgtttgtgtatgtccattgttgtatcaaagctctcaatgactcaattagtgttgtgattggtagttctctagctgctaagtttgctacgttaagagattcagcaatgttagaagtcagaattgaatacctgttatgtttgcggtggtatcttgaccatttatggtatccaacttgttgttgttggaattatttta

SEQ ID NO: 155042 - DNA, 640 bp, Cannabis sativa
cgtctaattctaagcaatattgaaagaattatggccaaagcattattagtcgttgtactaggacgatcgctgccgaaaatcgtgcttcaaggaccgcgacactagtgtcgcagcccgcctcttttaaacagcaaaaaataggttttttttatcgttttttagctatataaatgcctcttttcaacaatttttgggagacaactttgggagacaaaaattagaggtagaaagcggctctggagacttttattaatatttttttacgagtttttttcttctactattttttatgttcttatttaattgttatcagatgtttacactgattatgaatagctaaatttttattagggtatttatggagattgtttgacactttattttggtttaattagcatgatttagttattccctaatttttctatgtgcatctattttattcgtacttaattgcttttaattgtttgatcactaattaaatattttatgattttaatataaaatctgaggagtgagtgttgactgtgttctagtaaaatagatataaattttgagataggacgagggtacctatatttttttttgaaccaaagattgcaactttcatgaaagcaaatcaactatcaaaatagcttccaaa

SEQ ID NO: 155043 - DNA, 793 bp, Cannabis sativa
aaataattaaaagtatattcaagtttgcttaaggcatattataactgccatagcgaggcacaattgagaactgctcgaaaatcaaagaagtttggtaggtaacttactacttaaacaggatgattacgagcaatggaagaacccaaaagtactttacatttgattaaaatatagttgttcacattgtgaataaaaatgcaagcaaatacaattgtattaagtttgaatgaaaatagtacaagacatttaacataaaaaaaaaccccaagtcgggttataaacttaaatgctactaggggcaaaccattaaattcatcttcctaaaacaaagaatgagggatcggtaaactcgagaaagaccgtcttcatatagctcagaccggctatacatagctcgagaaagaccgtctacatgtagaaggtctcgacctctgcatagacctcattctcaacatcaaaggatcccatttcctgcattcaagacctcattcccaacctctggaaatttctcgatactagagagaggttggcacaaaggtcttctggtgcaggtttgggtcttgggttggttggattctttgatagaaaccacgcaaacattcctccttgattcacctgaaaccacgccaactttctcctttgattccttgtcagcctgaggaggacctctaggatcgctcgtaagttctatgtccaaatctgtaaaagaaacaagggatcagtggagcaaaaaaaaagagtccagttcagactgccatttacaagggctaatacttactctcaacaatcactt

SEQ ID NO: 155044 - DNA, 521 bp, Cannabis sativa
tattattattattattataatacggctaacttaccatgaagttgtagtccaagttctttaaaagcatctcttctggattcccaagattgattaaaccccaattagggggaagaatggccttaagtttgtgccagcaagcaatcccatacgcctgggaaaattcagatccagcctcccccactacggctgacaaggtctcaatggccttgctcgaggaggaacattggtgttgggagcgactggaggaggaacttgttcttgaatctcagtattagagacctcgacatttgtggggacccctgaattggttcccctcttcttccctttccgatccatgatatcttcaaaacctcccatgtctgcaaaacaaaataaagtgttacttttattaaaaaggcagatggaaaaagaggaggggagtacaattttccgcctaagggatttacctaaatcactagaaggcgagctatcactagaagagggggtagaaggaccataatatccactaaaatccctacagc

SEQ ID NO: 155045 - DNA, 527 bp, Cannabis sativa
gaaaatatctgttactgtcattttcaccgtttaaatattttattttatttattaccaaaaaccttaccattttcggaactaggttagagttgtaatagcttagattatataagtattttcttcgatctcccgcaattcccatgggttcgacctcgttcttcacaatctccatactacaataaagatttgtgggcttgcgagttgataaatgtaaaacgtaccacatttcggtacacaacaagtttttggcgccgttgcctgggaactgcaaaaagaaaaactattttaatataggttggtataattcttatactagttgttatattatacatattatattacgtttctgaatagtgaagtaagatttatctatatatatataaatttatcttatattatattatattattattattatatattattattatatatacattacttaactattaaaaaaaacaaattattaatataattatatattataaattataattaatattaatatttatatttcggtcaaatat

SEQ ID NO: 155046 - DNA, 592 bp, Cannabis sativa
tcgaggttggcaaatctcaagtgtagagatagcttgtatgggtgtgtgaaagagagtgaggaagagagttatcaaacttaggcttagagcttggaggctagtatcatgcttaatgacttagattggacttagttctcacttaagttttccaggttagagttaaggcctttatataggaagcctaaaccctaatttacaacttgaaaccctagatatttgtatatttaattagttaatcacaatagaccaaaatgcccttgaacatagatattatttagctattctattgggcttttagggcccaattcacagcccaatcatgcagtccatgtgtggaattgcacaggaaaccctacaggccttctcttggctggcttgacacctgcagggagaaggctggccagccatggtgctgtctaaaggctggctggctagcttctgtgaggaagttagtcttccatttgatgcccgttttagtgttagggtccccatctactaaggtactgacttggacttcttgttggtgagttgtattgccacgtgacactaattttgtctgtgtaagcactgccacgttaggtgggtaaaaatc

SEQ ID NO: 155047 - DNA, 753 bp, Cannabis sativa
  modified_base (154)..(165): a, c, t, g, unknown or other
atcttttaaatattaataatttctttttaaattaaaaaaattatcttaggcacatatctctctaacaaacttatcttagagaatatcacaaacgtagatgtttcctcttacttaaaaggttctatccttaaaaaaaatattaataatttttttnnnnnnnnnnnnaaaaaagaaaaatctttatatattcatagttgttatatattatccgttaacttaaaaaaagaacaaaactgatttccttaaccctaactgatttactaaaactatgggatcatgtggaaaattagagtttaattagtcaaatattccaaagcttctccttcgcaacaattttgagaaagattaattagtctttgccaaactttgagattgatggagttttaatcaaagaaacattatggaccaggtttgtcttatttgatatatagtagcagaatatatgatttttatttatgtatttttttttatttatgagattagtaatttctttattgtgtcatagtactgttatgatttttttcgactttcaaaaccgattaataatatgagactctctaaatggtaaagtgacaattttcaatattcttttcttttaatgaattaaagaatgaatattcccaaactactttatcatttatcttattaattttattttaaaaattcatgtaactatcttgaaccagtgatataaaaatagttagtttcactattttttattttaaattttattgaattgtccattatttgaat

SEQ ID NO: 155048 - DNA, 933 bp, Cannabis sativa
  modified_base (495)..(498): a, c, t, g, unknown or other
aaccacgtaaaaatctcgtgcattaactttttacagctttcttatatattattattatattggttgccgaaaacctcaatcaacactatggttactcaaaccataaatatagtaaaacttgctatattacatgtactttttctttagcagtcatacatgtggaatttatatatataatttttcgagccttttttttgttataaaaatagaatgtgatgccattatatttattctatataaaatgtgactatgtaatagaatttttggttgtgtttacattatttattttctttttttctttctttttgattaatattttcgatctatatattaatggagtaaaacttaatgatttttatgattttatcaattgatgaatttcaaatggtttttaaaagaacatgatcttgaaatataatttatataaattattttttaatatcaaaattgaaaatattttaagtcaaattatatttgtaaggtaagtcaaacttnnnntatcatgattatatgaagtactaattattaataagagttatatatacactaatgttgctccaatagttaaaaaaaaaaaaatctcaaatctcactttaaaaattaaaaaataatatattatttaattaaaaaaaattaaacatacatatattacacttaacatcacctaattaaacctagtcaatatatatatatatatacatatatccgtataaattcaatacatcaacaatatatatatatatatgttatttgatgcttttaacgcaccttaaatctctcagtgaaatttagatcacttttgtaggaaattaaagcattccgaaaatccccctacaccaacaccacaaagccacaaaatccaaggtcacacttgaccttttgcctcaaaaccctgcctttatgacagtataaaaactcttttatttggctgaa

SEQ ID NO: 155049 - DNA, 555 bp, Cannabis sativa
agctacgcaacccacaccaaaccgtccctcctgatcaaacaaagtcccatcaacattaattttgatcttatgtaacataggtgcattctaatgctcagaatgtcacccccttcattcaaagaagacaaagaaagacactttctaccttgagcacatttatactgatcaagcatgtttttcgctgatgcaacaatatttgatgcatcccaactcttttttcgccaaacaaaatcatttcgtgcacgccaaatagccaaactcaccacagccgcttcctccatctcactaacacctcccctgccgaataacaatagtagccaactgctaaatgttgcagacccgcccctaacatccaccaagctgcaatttcaggcagctgtagcaaactcacactccaccaaggcatgatgcacagtttctgcagcaacaatgcacaaaggacatgcatcattaacagggacatgacatttttgaagctgaaaatacgttggaaggacacccgatgcatctctccataagaagttactgacatttggaggaacatttaacgaccat

SEQ ID NO: 155050 - DNA, 687 bp, Cannabis sativa
ttacccccaagccttgtttggtaaaaagtgaacaaggcttgcttagattcctccggttgtcttatcagcttcctgtcacgtgcttcgggcgcgtggtgacatattaatgatcatcattacggcagttatttgctttttgcaggcgtcgattcgtttcttgttcatttattgataaggcgcattaaatgggtgtcaaacggctacacaaacgttttctaccgccttgatgagggtttaatctaaccgttggatctgtagaattcaaatcgatggccatcctaaccgttcgatggtggctgatcacagctgtctcacgcctgttctagcctataaaagccagccttctaacttcatttggttactttcagaatttcaccaaatttcctcagagttttccaaagagaaaagaaactttaaacaccattgatttcttgctcttatttctttgatgtttccagtctacgttttaccggcgatcaacaccaaccccctgccttcaaacttcatgtaagttcttcatatccgtacatttgctgtttgtttatatacatgctttacggtttctgggttggatgttgaacttctaggaatagtcttgtttgagtttctgaatgatgtgttaaatttcttcttttttgcgtttagattacttcttttcactacgtttttgctggggcatcatcctca

SEQ ID NO: 155051 - DNA, 659 bp, Cannabis sativa
ttttaaaaaaatttacggtttgggttgttctggtagtttctatgtgagttgttatgtgaattttagttgctccgttagttgctatatgtgttgatgtgttgatttttgtaaaaatgtaaaaaaaaaaaataaagtgtaaaaacgaaaaaatccctataaaaaaacataataatatatagtttactcgtaatacttataattttataatactctacattttttttttagaaatatcacatttttactttttatttttacacaataatagaaatatatttttttggcaaaaaaaaaagtgataacaggaagacatattttagatatgtacaataggttaatattttttttgtagtgatcaaaatcacacatgattaacaatgcagtaatccacaatcggcagcacctcctcaaaccaatatagctcatcgtctaacaaaagagcatgcttttccaaaccatgcactgtaaaattcttatcgcgagctacataggacaaaactacccccaaaaatttagacaataaaattataacatcctcaaatagcactcccagctcattaaaaaatacatttcctttgttgatagttgttactagagagccaaagtttcgacttgtaatacagaaatactacctgaaaaaaacaaacaacaccaaaaaa

SEQ ID NO: 155052 - DNA, 665 bp, Cannabis sativa
ggcataaaacccaacagttgattggtatgctgtgcaacggtcacggtaggagaagcaatgggaatgccaaaggcaccagaacttggatggcccacaggaatggtatcagttacgtctcgtcggacgatatatgtctagttggacaaaaggtaacgtctccaccccttcctgagttcccaaatgaactgcccgtagccttcacctgcgatctgcttggaataaaaatggtgctatacctcgggttcttaggaaggtttaccctcactacttacttccaagttttcgaaacttgagttagaaagtctgtcactcgaggaggacagactagcgcaaagatgaggttgatcctcgtgcaaaagttggggaagatcctggtcaatatggtgttctcctccccaaaactcaccagggttcatctacaaaagataagacacaagatgagtttttagccaggatatcgaacaaaaacaagaaaaatatattgaccatgtctaatcaaaaaattagaacgatgaaaatttcgcgtgatttaggttcataacccagaatttcaaaacctcgaattaagagttaatcttcactaaactccgaattggaaaagtgagacgaatattgtgaagttaaagttagaatgccacaacaatcaagttatatgatctactaca

SEQ ID NO: 155053 - DNA, 564 bp, Cannabis sativa
gttgattacttcactaaggggacagaagtcgaaccactcgcaaccattacatctaagaaagttcaagactttgttgtgaagaacataatcttcccgtttggatcgctgtacaaaatagtttcggacaacgacaaagagtttgacagccagtctttcactaatttttgtgcgaaccagggcatcatcaaaagtttctccgtagtagcacatcctcaagcgaatggtcaagttgaagcagtcaacaagaccctgaaagatacactaaagaaaagactcaaggatgctacaggaaactggctgaaagaacttcctgaagtcttatggtcgtacctaacaaccaagaaaacggcaaccggacagactccatttgccatggcatatggatattaagccatgctccctgtagagctcaaactaccatcccatagaagattgacgtacaaccaagaagaaaatcacatactcttgggcgaatcacttgatgaaatcgaagagaagtgaaccacagcaaacttaaagttgatagcccatcaacaaaaagtagctcggtatttcaataaacaa

SEQ ID NO: 155054 - DNA, 773 bp, Cannabis sativa
  modified_base (92)..(93): a, c, t, g, unknown or other
cctaatcaggtgagcccacatatcacatgcataatatcattgcattatcgatactcaaccaatcaatctttttattatataacaatattaannatatctcaatattaatcaatttattgcaatactacaacgtactatacagtataatatacttttcttacctcaagttttggttcaggtatgttggccgacctacttggagtacgatcgatgatcccgggccctaagtcataacaataatagactaataagtgtttatcccaaaacactacttaacagttgcaaaggacaacctagggtttcctaccaaaactcgtagttcaaaaaataaaacttatattttggctctaaaacatacaccatattgtagagctcattgcaagcttcaaaacggtatatagaacgtccaaaacggacacccgagtgaaaagttatgataaaaaatacgattcccgagttcccgaggctgcccgaaatggtaaaccggttggctagaaactggtttatcaggggcaaaaatatgatttttcaaatttacgcactcaccgaaacgctaccagaacctgtcctaatcaccccaaacttcatagggcatatataccatatatactaccatatatacttgcgtaatagaatctaaaatcgagcccgtaattaacaaacgccacttgtgtttgaacttaagttataaaaagttctaaactcaatttctaacccaaaatcacctcaattttagcaagaaaatatcagaagtagtcccatgactacccgag

SEQ ID NO: 155055 - DNA, 504 bp, Cannabis sativa
ttttttttggggggggggggggggcactagctttcttagaagactacatttggagttggatatgatagtcatccgggaacaccctttcggaagactccttctagagggacaagtttgctatctgggaacatacttcctggatataactaaatttccattacttgaacagtcatatggagatcttttcattaagaggaactataccataaattccacctagttacatcaaatgaaaatattaacggtgatgaagaaagtatacaaccatcatggttgatgttccaaaaatctcagtttactaatttttgagattgatcaagtccaagcaatgcttgaacttttttactgttaagaccttagtaccaacatcagcaagtttatcttccattttgacattatctaaatcaactaatccttcttctatcttttctctaatccagtagagtcatatgtctatatgtttgctcttttcatgataataagatagatggatgactcactatc

SEQ ID NO: 155056 - DNA, 975 bp, Cannabis sativa
gaaccatacccaagggagaagaatagggattgaagaggcaagtgttacctcaaggcgcacaagaacctacagccgatcaacgcgaggaggagaaagtactcatcgcaataatgatcaagaaagcacaggcactagtaagactgcaagtcactcaaggacgaggtctatgagcaggatgaggtccataagtaggatacagtccctgagtagaacgagcccggctagcaattataaccaaccggatctgcgagcatacttgaaatagaaaaaaacctgatcttcgccaataactcgatccaaacaaggggatccaatccaattacgaatatatgtgttggaggataatttcatgaggtgtcaagtcggggagcaaggaaaataatctagatgtgactcagatgaagaactcgagccataccatccagatatcatgaatactccttttccccagggatttaaaaacccccacgtctggtcatatgatgggaccactgacctagtctcgcatttgaataattttaatactataatgcgagctagcaatgttacaaacaatcgttgtattttgtttcccacctcagtagttggagcaactagtagctggttcaataaatttactcatcgttccatcacttcttgggaacagttgtctaaggacttcaaaaagcagtttcaggctgcaagggataggcgacccaaagcatcctcactcaccaacataaagcaatagccttgcgagacgcttaaggcgtacttaagtcgtattgatttctttaatctgaataaggcatgcccaaaggattgtgttccattatctaggattgaccaattggtggatgcaactgctgggcacgagctcatgtctttcatggatgtatattctggataaaaccagataaaaatgcatgtcccagatcaagaacatacgagcttcgtaacaaacatgtgactttattgctacaaggtcatgccatt

SEQ ID NO: 155057 - DNA, 694 bp, Cannabis sativa
  modified_base (617)..(621): a, c, t, g, unknown or other
agccagtaattcacagaaaaactcaacgaaacaaattacgccattaaagatcgaagctttgaactcaaagctcaaacttgcacaaaacctaatccaaccatcaataccagctgctaggacctaaaaccaactcaaatgaaccttaaaattctaaccctaaacaaacctaaccctaacaacccccaattcccaaaatcacaaactcaaccaaaacttaaattcaagaactaaggtaaagagatgctagggcttaccttggcttgatttccccttgaattccttgctgaaaacactaagaatcagcaaccaattctccttgctatagctggttcgaagagagagagagaggaaggaaagagaggtttctttgatttttttgtattttcttttgttttctctaaatggaatgaaggttagggaaaatcaatttcccttgctgaaattcacttttctaggtgtcaaataactaggcagccacctatccttagctttacaaaaagttcaaattgccctttgacttaaacttagggtatttccaaatctaggggtaaaatggtcaaactccataacctcacttaatcccgatattttactttctctaaaatatttcccactannnnntaaggttctaaacttacccatgtggtcaaactagccatccatcgcattctccattgtcgctgagcaaaaatta

SEQ ID NO: 155058 - DNA, 601 bp, Cannabis sativa
accttcaaggcttgagcaaatctcatgagtcaaaagaaagacactcatagcatagctgggcaaagcttgagcgactgactttatcaaaatttctttccccgccttggataagaacttagtttcccaactaaagatcttctttttcatcttctctttcaagaagccaagaattgcgttcttattccgccccattatacatggaagacccaaataaaaactatcattagacgcctcactcagtctcataacaccacaaacccgatcacggacagccacagtagtatttttactaaaaaagactgaagatttagtaaaatttacttgttgtcccgaagcaagttcataactattgagaagacgaatcacattttgagactcatactcatttgctttgcagaaaacatagctatcatctgcaaatagcatatgggaaaccataggagcacctctagctacacggcagccagttagccaatggcgtctctcataatgctttaacagtgattaaaacccctctgcacaaatcaagaacaaataaggagataatggatctccttgtcgcagacctctacccggaattataggccccattaaatgtcca

SEQ ID NO: 155059 - DNA, 829 bp, Cannabis sativa
  modified_base (300)..(307): a, c, t, g, unknown or other
gaaccgtaaccagaacaagacccggactccaaatcaaagctaaactcgaattaggagccggacctggacaccaacccgaacctgaacctgaacttagacaaaagaatggaactagagtaaaaaaacacaacaagggtcgggacctgaaaccgcactctagtctcgatcccgaacccaaactaaaaaatgtgtcctaggacctgaaccagaacaagatcgagacccgtgacagtgatctagatcttgcctcgcgatccgggtaacggggcctggaacaaactagtagtcggtgtctagatnnnnnnnncagactaggaccagaacctagactaagaaccaaacccgaaaaaagacctagacatgggacccaaaattagaacctgaacaagaattgccgaaccaggaccctagaacaagactagtaccgaacacagacctagcctcacacccaaactgagaattgaacttgggcccggaaacggtcgtgtacccagactggaactgagacccagacctgggccatcccaaacacagacttggagctagatagggatctggatacgaacctggactcggaccaagacccagaatgggatcgaaatgttggacctatatctagatcgagatcttgacccagacccaaacgtggacctgcattcgggacccgaactttgacctggatccgaacctagaccaagatcagggtctagaccgcgacacaaaccaagacaaagtctcagacccgaaatcaaacccacacccagaatcagacccaaagctagacccggaagaggacccaaactcaaacacagaccaagattagaaccaa

SEQ ID NO: 155060 - DNA, 738 bp, Cannabis sativa
  modified_base (301)..(301): a, c, t, g, unknown or other
  modified_base (394)..(405): a, c, t, g, unknown or other
  modified_base (537)..(543): a, c, t, g, unknown or other
cttctcccaaatccttcatttggactttgtcggctaaccacttctttacatctgataatctttctacattgtttctaataagttaaatgtcatcaacataaagaactaggagcctctcatgtctgagcgaggcacattcccgtgtcttcagacaactcctatcctaggcacgcgcgcgtaaggccgagcttgtctgagtgcctggtgcacacgatgcaccttcaatctgattttcaaacctccataactttttcaatttttagcggaatcgagttctgtaaaaaccaaaattgcttaattnttcacaagaaatccaaataaattatttttagaataaaaataaaattattttcatggaaaaatttcgtgattcacatacattcatcaaataacnnnnnnnnnnnnatgaacacatccaaatcaacaaacaaacaaactcatcattttaaatctatattacatgaaagtaaatcattaccatagctctgaggccagttgttaggaatattttaacatgatctagatttactaacaagnnnnnnnattaaaatcctaaatatgaatatcactaaaacaataaaattaaacacataagggattagaaaacctcagattgattgtagcagaatacaatgattccttccactcaagatctcaagcccttgattcctttctgtcacagagcattatcaagattggagcctggatctctttctctccatcgggtttggttaccac

SEQ ID NO: 155061 - DNA, 520 bp, Cannabis sativa
aagcaaacatactaatcaacatcatatttgtttttactaagaaaaactcagaaaattttgcaagtaattaagcgtttatggagatttgcctcaatcgtgaccttcttggagatctctattgctagtcgtgtttccatggctgatcgaaaaaagcttcttgccggtgttcatggtgatcggtaaaagctttctcgtcggcattcatggtgatcggcaaaagcttctacattgttggtggtgttgtttggagaagctacattaattatggagtagatcttggattgtttgggtgagctcatgataatttcagatctagaacatttgaaaaaattattttgggaagctcattgtagagaccgtatttttgaaaaaaaaaactttgagttttcctttttttgtttaatttccgatatgagagtaaaaaagtaaaatttttccaaaataaagctatatttttattattatatactatatggtggctcccacttaaagtcaaacaattttttttttcaaaaaataa

SEQ ID NO: 155062 - DNA, 653 bp, Cannabis sativa
tcagacataaataagctcaagatgaaactcagtcaagaatttgaaatgaaggatctaggtaatgctaagaaaatacttggaattgacactcaaagaccctcatcaaatgttataaacttgtctcaaaagagttatctacagaaagtgttaaacaagtttgcaatggacagctccaaagtagtttcaactcctctagctcagcgttttaagctgtctaactcacagtcaccagttacagatgcaaagaaagagaaaatgattaaaattccctatgctagttgtgtagggagtttgatgtactcaatggtgtgtacaagacctgatttagctcatgcaatgagcatgaaaagcaagtttgttgccaatctagggaatgcagactggactgccttgaagtgggtaatgacgtatataaaaggtacattgaacacagggttaacctatgatggcactagcatattcaaggagttggtaactggctatgttgattcggattatgcacggtgtttagacactaaaaagtcatttacagggttcattttcactgtctatgggggttgtgttagttggaaatcaaacctaaaaaaggttgttgctctatcttctacaaaagcagaatatatggctgaaacagaggctattaaagaggcaat

SEQ ID NO: 155063 - DNA, 567 bp, Cannabis sativa
atcttccacgttggcattttgaacttttgaggtagtggcaggagattgatctacggtgagaagggaattctgcgtcctcagtctaactcaagatcattattacgctgtccagccatgtcatgaaacatattttttaattcgtcaagctgggcctttacggctgggctgacctgctcggcattctggtcgatttggattacgtcagcgtctttctcagcggggaattgagtatgggctccaggctgcacgatcgttgtagtactctatttgtctgttccccttcttctgtttagatcgttccttaggtcatgggttgctcccaacctttcgaacacaaaagagcctggttgccttagcgattgattcgcttgattgacgggtggaatggcaccattagtttggttggagccgtcaggtatgactcctcctaatgaattttcggacaaggtctgctcgcctaccgctaggccgatgagcggaactcataaccggggattgggcggctgaccattagtagtctacgaagtattcatcgttgggtcctctttcgtttctcccaggggaatg

SEQ ID NO: 155064 - DNA, 557 bp, Cannabis sativa
  modified_base (462)..(462): a, c, t, g, unknown or other
gtcttacacactatgattgaggaataacttgctatgggtgggcatgcactcaatcaccaaggctcgaattttgatggtgaagaacactaagaatttcgaaagtagtagagagaaaagaagaagcagaagtctcaaaacactagttgtttgatagaatgaaaactaggtttaaagctatagaagcattagttggatagtgagacctttctcttctttttatactaattctcttagggttaggattgaattatttgaaataaaaaatgataaaaatagagcaaaaataggacctagtggccggcccctatgtgggtcaatcactagttagatttttgccatttttttcaattatttatctatttttcacaaataccactttttgcacttttaatcctataaataccaaaactatttatttaataattaaaattaatcatcaaataaaattgtcatttatattanttattaattagacttcataaagtctcttaattaacgaatcaagcctaaaattatatttcttcacaatcaagccatatcttagtgaaaattcacaa

SEQ ID NO: 155065 - DNA, 567 bp, Cannabis sativa
tgaactcctcacattcatggatgcctattcctagggctgagcatgaaatccagaaaactaaaaaaatcggtcaaaccgacctaccgaacaccgctggaacagaaattgaaaaaactgacgacagttaaaactgccattaaacggtcggtttttttttttgggttctgaaccgacaactaaaaccataattgaccgactttatacatatatatatagaactttcattttatttaaggcgtgcacagttatacatatatacacatataacatataacatttatacttctttcaaaaaaaaaaataacatttgtactattatataataataataaatataacaatacaaatttaacaaaaagacaaaaacctcaaaactttctctttctcgtaacttgtctcaccctcccaagccatagtcatctctttcattctttcttctttagaatccttagtaattttcttctgctactgctaggcatggtcgtcttaaatattttggaggccatgttctaatttaaaattggggcccctacaaaaaaaatgcaatttataaataatattttttaa

SEQ ID NO: 155066 - DNA, 573 bp, Cannabis sativa
ttgagtggatcagcaccaccctcaaacactagcgggttctgcttttggaactgctcatacaatggttccaaacagttcccttcatccggtggcactaccagagctgccggaggatcaggattagggtttagagcaggctgagctcgctgctctctcaattctctgatttgctcaccctactgctgaatagtctcttgcattgtagcatataaatcttcccagttttgtggtggtggaggttgtcaccctcaccaggagccccgagcccagctagctcacgggtacccctaccagttcgcctcgggtgcatatctatacacctgcggtcacatttcaggtaataacaatactaataagtatttccatatattatagtcctgcccacacctcgcagctaatgtacatatcaaaccagtcttcaagatctaaaaaccttgggctctgataccatgttgtaacaccctgtccaacaagtacgccacgtgtgtgaaatttaataaaattcttatatagtgttgtcgagtgaattttgcaacaccaaattatatgatattattagtgacaagaagcaat

SEQ ID NO: 155067 - DNA, 818 bp, Cannabis sativa
catggaaaaatattttcatcaaatattacatctctactattaatagttttaaaacctttttctcttacccaaagtctgtacccttttgttccttcaggatatctcaaaaatacacactttagagctctaggctttatattttcaccaccttggtgtgcatatgctgcacacccaaaaacttttaagtgggataaatcaggtggtttgccagaccacctctcttcaggggtctttaactccacagcacttgatggacttcggtttatcaaataagctgctgtgagaactgcctcccccaaaaatccagtagctaaccctgcttgtaatagtatgcacttggctttatttaaaatagtcttgttcatcctctcagctactccgttttgtggtggggttagttttacagtcctatgcctttggatgccattattcctgcaatacatgttaaacaaatcgttgcagaactctagactgttatcgatcctaagagtcttaactattttgttagtcaaattttctattgaaattttccattcttgaaatttagcaaaggcatcatttttatgtttcaaaagaaaaacacatacattcctagagtattcatccacaatggatagaaaataactactccccccatgtgtagctgtattttctggaccccataaatcagcatgtatatattctaaaatttctttagaattatgtgtccctattttaaatttaagcctatgatacttacccaatatgcaatgctcacaaaaaccaactttacttactttatctttgcataaaaaattttattcactcataatttgcaa

SEQ ID NO: 155068 - DNA, 594 bp, Cannabis sativa
atgtatttgaacccacatgtctatcttgtgtagatgaaccattctcggattctcctcaatcttcagcttatgaaagaccaatggagccttattaaaagtccaaggactaccatctataacactttgaatatcaggttcatgataaaattggaaaatatatagattagtctccaattccatgatatacactcccttcctcggctgccacaatgaagccattaagtgtctcatagcatcaaagtctatacatttagtaattataaatatatatgttagattttttttttctttctcgttgattaaaaaaaattgtacactttgtttatctatattttaagtgttattcaaattatttgtttttgattattttgttgctagtttttgttttgcaatctaattttttagtacatttttagcttaagaatagactattattattatatttttttttcgtttttagattagttttagtccttcaatttaaacaaaaaaaaatcataaaaaaatagtgttgagaacgactatgtaatggtaaaagtggtaaaattaagaatattctgtctaagaaagattggctttaaaggtttgtggtag

SEQ ID NO: 155069 - DNA, 825 bp, Cannabis sativa
  modified_base (172)..(173): a, c, t, g, unknown or other
  modified_base (207)..(211): a, c, t, g, unknown or other
gttagttagggtgttacaaagaacatacaaaaattgttgcttggatccaaaatgcaagtgggcactaaaggcatctagaaacggaccaaccaattcattcataattcgaaaatatgacagagaggtgattcacacttgtgatctaaacataagatttgcagacaaaagacannctacgacgaagttgattggaaactacatcaagcnnnnntttaccaacataaaaacaactcaaacgtacgccacaagacatcagaggagaaatgaaacataagtatggggtgagaatgaactacatgaaagcatggagaagcaaagatcacgcgtaagaataattacgaggaaaagcaaaagaatcatacaagttgctgccaagttttttgcacatgctgcagaaaactaatcttggaaccattgtacacatgcaaacagaggaagaaaacagcttcaagtacttgtttgtggcactagatacttcaataaaaggatggaagaagtgcaaacccataatagttgttgatggaactttccttaaatcaacatatggagggacattactctctgcttgtacacaagatgcaaatggacacattttccccctagttttttctgttgtggatttagaaaaaaacaactcatggcaatggtttttcacaaaactaagggaaatatatgggatcagagaagaatagtgcttgatctcagacagacatgagatcataattaaggcagctgctcgtgttttctagaaataacgcatggctattgtgtataccacctgttaagcaacctgaaagcaaccttcaagaagaatgcaagcaagct

SEQ ID NO: 155070 - DNA, 585 bp, Cannabis sativa
  modified_base (244)..(245): a, c, t, g, unknown or other
actagttggatagttggatataagatttatttaattttaaattaattaattaatttcaaaaataaataaataaataattttttttggaataaattcttttttaattaaattaaaaaattaattttaaaattaaacctataaatttgaaaaattacctttcaactaaaatatctatttcaaaaaaaaaatgctaacaacttttctaaatttcatgtcattaaaaaaaaattaaatattcaataanntaaaatgataaataaatatcattgttcaaagtttacaatttaatttaaataaaataataaaatttaaaagttagcaaaatatcttatttcaatttaaaatttcatgattaaaataatcttattttaaatttcaaataaggttattttataaaaaaattaaataatttataaatattaaatatctgaccttaaattaaaaactaagataaaataatcaaattttaaaaataagataacaaactatgcaaaaagatagattttttacgcttcaaatttcactaatatcttaattaatttgaaaaatattaattaatttaactctgataattagatttgaaat

SEQ ID NO: 155071 - DNA, 787 bp, Cannabis sativa
  modified_base (348)..(363): a, c, t, g, unknown or other
gattagattgaaatgggttttatttagggcataaatcccaacaaaattaagtttggcttaaattttataacagtgcttcaatgcatttatgataaaattaactctcttttgatagaaatgtgtaaaaaaatgggattatttcataaatacacaaaaataacaaaaaagttataaaaatacggtttcgcggaatttttaacatttttacgattttatttatagaaagtacggtctttttatgttgtattcttgttaatttattgttgattttttattatctgtatgctatttttggttgttgttttgatgttatttttatatagttttcttgttgtttttgtgttgttnnnnnnnnnnnnnnnnaaaatgtaaaaaaaaaaaattaacgtaaaaatgtaatttttttacaaaaaatagtgccaaatgtaattatccctaaaaaagatcaacaaagtattaaatttttactaaatgatataaaaattctattaaatatataaataaaatgtaaaaaataattaattacattagtaagtgacaaagagtaaataaaaattaatatttattatggtattaaatttagcacatgttatattttgtgctaaatttgacacatcttttagcatatgctaaatttggaccaccatattaaagatgctcctaatatgtacatgtcctctactttcggtttggttattagagattgtaagagtttattgtcagctttaaataatgttagtattcgttttgttagacgatcagcaaatcgagttgcccactttgttgc

SEQ ID NO: 155072 - DNA, 558 bp, Cannabis sativa
  modified_base (427)..(430): a, c, t, g, unknown or other
tttaatttagttttactcttgtttagagcaattttacgttttttatcgtttattcttgcagacttaaaatagaagaagattagaaaatatcaaaggattaagatagaaaaaaagataacaaaatctcacaaaaagatgatatataaaatagagaaaactgtgcaagaaaataaagttgaaacttcaagcctgaatttgactatgttgtgatcagattttggaaaatgtgaaataaaagttctagatctctcttttatctttcgggaacatcttgaatcgtccaattccgggcaatatcgagagagttatgaccaaaatactatcagtcaatgcatctgaatatgttttctaatcctaaggagaataggttttttttttttttcttcagcgatttttattttattttattttatcattttttggctannnnagaagtggacttcaatagtttttggggaagcaattgagagggaaaaatgagtacaaatttcatagatagaaatcaatactggaggcattctgtagagagttttcaacattattttattctctatcttc

SEQ ID NO: 155073 - DNA, 740 bp, Cannabis sativa
gtgttaatttgtgtaggaaaattatgattaaatgtaaaaaatcaaattaacaaaactctaataattaaataattaacaatgacaaaattaatattttaagaacaataattgaaagaaaacaagggcaaacagagaatcatgaaaaccaaaaataataaatgcataaaataaaaaaatcaacatgtgatatatactagttcaagtttaatagattgatttgatctatggctctattccagttctgaaatactatcataatcctcatttattgattgagcaagaataagtacaatataatagaggcgagattcttagttgagtcctcactaagtgttttgactctcacacttacacacaggaatattcttcatctatagaaaattcttcttacaaaatctaaattcaatctctcccctttctctacacctctctccctacctctcaaccttcttctctctcaaactctcaatctcatctgaacagagttctcaaactcatgtctctgtctctacttgaaaaagataagtggtggtatttataggctcaggatcaagatcctaaagttagtgggtgcaataaacgatgttgttaagttagttagaaataatcaacttaaccaactctgagaacatatatgagttctcgaactcacggaccaaggacactcactgaagacgcttctgaataggattgagtctactggagtcgactatccagatctaacactctaggagtgacaa

SEQ ID NO: 155074 - DNA, 825 bp, Cannabis sativa
acatgcatttaattgaaatgtgagaattttccacgttttgtgaacagtttcatttcaaataaatccatttaaataactgtcaacatatattcctataaatagaggcagatttcagagaaaaacggatggagaatttgagagagaaaaaagagatattatcaattatatcttgcattcagaaaatatcttacataagatagactcgtggagtatgattaaattgcaaactacgtaaaaatatatggtgtcacatatatatttattatttctcattattttgtgatatattgattacgaaaaggcttattatttttagttaacgaaaacatgcgttaacaatatccatgtaacaattgtgaaataggatatttatataattaaataatcatttaactaaccaattaaattatgaaaatttagttaaatatcttttcaaaatttaaaattaaaaaagaaactaattttaaaatatctagttttatttgaataattttatcatattaaattaaatatctaataggataaatgatttgaaaatatgcaattagatattttcaatatcattttataatcttataatttaataaaattaaaataacaaaataaacaaattttaaaactaatatagttagacaattattattttaagaataaaataataaaaaaattataattatccaaattatatgtattaaaatttcaaattaagctttttccaaatttctacaaaaatatctaagttagagaaatattttaaacattatttataaatttcttataagtaaaatgatataaaatatcaattttctaacttataatttataa

SEQ ID NO: 155075 - DNA, 805 bp, Cannabis sativa
  modified_base (325)..(327): a, c, t, g, unknown or other
aattttgtaagtatcacaaggacattgggcatacgacagaggagtgtcgtcgttgaaagacgagatagagagtctcatcgcgtgaggtcacttcccacaatatgtgaaaagacaagccaatggacaaaactagccaaactcacccaataacccgggcaaccaaggattacaatctcctcctcttgaaggagaggatattctggttatcttgggagggacatcgttagattcttattttaatcgaaattatccctttatttttcctcttagcttattcattttgaattcgcttaaattattgatcattggatgaatggtttataannnatttgcttatgatgtcattctaatttctcttatgaaattgaatggcacagatgactatattccggacattctatcttgaaatgatatatatcctcgatcttagaaatctcctacttgtatatgccttacttaaggcaacctaaacttagagttacattagtagtggtggtccaagaaagaataattactcatgtatatttggtataaatttaagtccttgactttaaattttagattccaaatagaaattttaatttcagtttcctaaaatacattggacaatacagtatgactttcacaagttattaatatccattgtttgtcaaaggattcaaaatgtatgtttacgtatggattatgagttttgtattctgtgattaggatccacttggactattctaataactctttgttataactaaacctttttcatcaaaagatcacaaccacataatttatatatatctatggcatttgt

SEQ ID NO: 155076 - DNA, 531 bp, Cannabis sativa
  modified_base (27)..(29): a, c, t, g, unknown or other
  modified_base (371)..(373): a, c, t, g, unknown or other
aaaatagattacattgaaatggagttnnntttagggcataaaacctaacatcgggtcccttaatggttcgtgccacactactacaaaagttaaaattcgtgatggtcctaaattgagagactgtcgctaaaaaaattaagtgtttaaaaccgtcgggaaaaattagtattctcgacggtttataacagtaattacagaaataggcaactattttaattggaatttgtaaaatttattgggcccttataggcgatggtttaaaaccgtcgggtataagagcccaataaaaaatcgttacctacttctcgccacatttcccacgtgcccacctacttcttttctattacccacatgcccacctatttcttctnnnttttcacaccctaaaacgaaaatcttaattctccaaaaccccacccacgcatccgcaccatcactctcctcttgccatcttcctccctctctcgatctccctttcttctcgtccctctcgtccatcgatctcaacccacccctcctcccgtcggtctc

SEQ ID NO: 155077 - DNA, 520 bp, Cannabis sativa
aaaaaaaaaaagtctattgttaaactgtgaaaataacatggctggaagaagatggaaaataataaatgatttatttttatttcagttaatatgtatataaagttttttcttttttgaataatatgaatttgttttaattaatttttgtttttaaaagtattttttctaaaagaatcattagtttgagcaatactatatttacatgtggcactttattgatcaattaacataacattaaattgagtgttaagtttagaaatttgaggatatcaatcaactttatatgatcatgatataaaaataatgcatttgaaaaagtttgattcataatctcacacctatttcttctacataatctcacacctactttttttgttgttcaattcataatgtttgatccataatatatttcgcctatatacataaaaagcactctttctatattctgcaaagtaaaaaaaatcttcacacatatatatacattgcaaaaaaatatcacttttagtgataattttttagt

SEQ ID NO: 155078 - DNA, 533 bp, Cannabis sativa
atatataaatatatattttgtaagagtctcacattgtttacaaattatgtgagtattatacttattaactacaagtaaacacaatatatattatatttaataaaaaaaatactacaagtaaaatatttcttcattcacaccgatttgtctaaaaattaatattgtttctctttgtaggggcaattgaataccttatccaattaattttatatatttatatataaatatatattcaattgatcaaatttatataaatatctaaaaattaatattttttttctatacatttgattatttttttttcatttacttataatatttgtaatttttttatttcataattactttgaatatacatcttaattagtttgtgtatatacatcttaattgagtttaaaaaatgtggcactaggaaagagaagagacaaaaatattcatcaattaaaataaaaatattagtctaacttaaaaaattgatacaaacaattaatattataaataataatagtaatgttatcccaatttttacactc

SEQ ID NO: 155079 - DNA, 689 bp, Cannabis sativa
cgtatttgaaaaaatttttactaaaccccaaaagcgctaattttattatattataattatataagcttataagtcgggatataattatataagcttataagtcgggatctcgagatttaaacatagttacaaattacatttaccatataaagttaagtaatatttttttttacaaaacatagggcatctcaaaatgttataaaactgaaaccctccacgttgcactgccgcgatatgtaagctctaactcactgctcctccagcttagcctttcctttacctgcacaaggtagcaaactgatgagtcaacagactcagtaagatatacataacatatataacagtgatgatgtaccgactttgtgcttaagtcgtcctgagctcaataaccgagctcaccaagtggttaagaatattctcaacggaagtacgaccactgtaccataggcactaaagtaccaactctgtactcgtgttggtagggactttattgtactttcaggagttactaagtgttgtaccacatgcatgacgtaccccctagtactcgtgttagtaacactgtaaccactttaaaaccctacactgtactaacacccatataatcatacatttaacagtgtttagcatgtctctcaccaaaattacaatgatgtgatttagggccctgtgaaacgtcgagctgcaat

SEQ ID NO: 155080 - DNA, 550 bp, Cannabis sativa
aaaataacaaaagtataacataaaaatacatcaaaagatcatattttctgtaaataaattttataaaccgtaaaaatgtttaaaattatgtacgatcatttttttataatttatttgttatttttgtgtatttatgaaattattcctaaaaaaatttataactgaaagtttaggaatgtattttaaaaaaaaattgtaatggaattgtggtcttaatatacactacttttttttttctctcttttttttttttataaaaaatctaattttaatctttcgcacaaggctttcaaaatgtttgggccgaccctgataataataatcatacaatagtaaatataaaaattaataataagataattataattattaaagtcagcaaatgaacatgctaactaaattttagtaatataatattaaaaatagcataacggtaagagaaaatgctaaggggcatcattggtgtttagcaccctcctacgtgtcaatatcactattggtgcaattaagtatcagatcccatatagtttagagaaatgctaaagggcac

SEQ ID NO: 155081 - DNA, 943 bp, Cannabis sativa
atgtagacagagcgtcaaacaaaaaaggttccaaagccaaaatcattttaatatctccacagaacctccagctccaaagtgcacttcgtttcgagtttggagtttccaacaatgaagctgagtacgaggctatgatcgttggtttacaactagcgaaagaggttggcgctaaaaacatcaaactctatattgactcacagcttgtagtcaaccaagtgttcataattttagattggatctaaattatactttgactagtgaattaacgttactaaatgatagagaagtaattagaagggtaaaatagtaatttaatcaacactaattacgaaccaactcaaggagggctaatcactaaaattaattatattaatggacattgtagtaaaaattagtaaatataattctataataactaagatttcaattttatatttatagtgaagtaatcatagaattaataaacaagattatttgattaatgagattcaataaataaatctagtttactggaacttagaattataggtctatggtccccaaatcaccaccttgaaacactgtcaaggggtaagaaatgttgtacatggaagttcaaaaaaatctattttgaattagcaaaatagtaattattttttttttgcaataaataatttatttttaaaattaattaaagagggaaaagataaaagttatcgagacaaaagttgtctggacaaaaggcttattccttgtcttaaacaagacataggaggccccacatgcattgtgtcggacacagtgcatgcgccccatatagtgtggggtgtccctattacttttgccattttaggttaattaattagttaattgatttgatggataaatatttgaatttaaaaagtagttgaaatattctctcaagtggttaagaaattctctcaattggttattagatgtaaat

SEQ ID NO: 155082 - DNA, 524 bp, Cannabis sativa
aatcttcaactgctattgaagaatcagccccaattttttttgtctctctttttttctacaattttctaaatataactcgttcttcatcttctccatctccttgtgtaaaaaagtttaaattacaagccctaaaacttcaaaaatagggttgaaatctatcaccaaaaaagggaaatggaaagaaaaaatgaaattaaatgatggtttttcttatgataattttgttgaggcgcacatacccaaataggggaggcttctactaagaagaaatctaatatcgttaaaggagagaaaatcgaggggagtcctgttgttgttggttaaaagggaagaatcaaaattctcgtttgattgaggtttgatatggcatacaagtttaaatcaactgctatgcaactatttaaaaatcaatatgcgcaatgtattaaagaaaacatttcttcttgtatgagttttgaaaaaacttacaaaaaaaaaaaaaaaagaaagtcaaaaaaatttccttttaatatattgtagaacct

SEQ ID NO: 155083 - DNA, 714 bp, Cannabis sativa
  modified_base (426)..(439): a, c, t, g, unknown or other
accataaaaaatcttaaatgtaaaaaaatgccatagaagagtggcaaacttaaaaatgccatatttttctaactttgttatgaaatcccatatttcatgtaattttcactaatatatattagtgcaaatcatttattttctttggattataatgatcgtatgctccttgccttttttttttcttctaagaaattaagtataaattaaaaaaaaaaaataaggacaaaacgaacataccaaacttttagatgacttataagttattataagtaattatattatacatatctattctatataaagtgtgcctatataatagaatttttggtttttgagaaattaatgtgtgactttttatttatattaaaaataagatggtttattattaaaaataaaatgggttatgagaaattcatgggtcacttnnnnnnnnnnnnnnataaaataaaaataaaataaattctattaaatccaactaaaaaaaatagggttctagattttctttaattaccgtatttctaaccctatttgattatttatgcctctattataaaccctatttgattaaagttaagattataggattaattcaaattattgttcatatattgattattcctgtgtctatataacagaattcttggttgttgagaaattcatgggtgactttttatttatattaaaaataagatggtttattattaaaaataaaat

SEQ ID NO: 155084 - DNA, 523 bp, Cannabis sativa
  modified_base (480)..(480): a, c, t, g, unknown or other
tcatgaaccaaccaacacatattggaagaaggtttgcgtacttcacatcacaagaaatcgctgacaatagacttcgtttgaaaacatcaattgagagaattaggtggctagcgtttcaaggatgcccttttagaggtcacaatgaatctaaaacttcaattaatcggggaaactttttagagttattgagtttcataacttcctataatgataaggtagcagaagttttggataaagctctacaaaatgccatatatacatcgccaacaacgcaaaaacaagttttgcatgtcttgggaaataaagtgagaaacgcgattcgtgaagaaattgttgatgcaaaattttcagtaatagttgatgaagcacaagatgaatctaagaaagagcaaatgtcaattattttgagatttattgataaatatgggtatgtgcaagaacgttttttcgggcttattcatgtcaaagacactgctgctntaacattaaaagaaggtattttctctatactctctaattatag

SEQ ID NO: 155085 - DNA, 724 bp, Cannabis sativa
tgaacataattaaaaagtatttttgtaatagaaggattgagattcttttgatcctcctctgcaagcctgcatttttttatacacgaattaaaatcatttatgaatttacgatccggatatttaccgttagtgtaagattaaagagactctcttttaatagggtggagattttctgtctaaatagaaaaataagcagggataaaaattagagtaatttatggcataaatacctaagttttatgccgagtagcagataaatacttaagtcgtatttttggcggtaaaaataccttccgttacactcttggaacttccgttggtacctctccgttatgtgccaaattagtgtctacgtgtcactcgttcattggtccatgccattattttctttatttattatttaaatatttaaaaatgattttaaaaatataagaaaaataaacaaaaataaatataatcaatttttttatcattaattcttatacatttaaaaattaaataaagttaaattaaacataaacacttaaaaattaaattaaatacaaaataattttccaaacctaaaaaatctgagaacactaaaattgccttcttcctcctcaccaacaacagccctattcataattagaactgaaatttatacaagagtagccctatttatacaaaaccataaactgatttttgacggaggtgaaggaaaaacttattctctccaatggcagcc

SEQ ID NO: 155086 - DNA, 547 bp, Cannabis sativa
gagatcaatacaaatataatctatggaaaataaattgggcgaaagatccaaccatcaaactccaaagatttctgaaaaaaaggaaacaatttatagagaattattagcttggttacaataaaaaataaaaatatgaaaaaataactttcaagaaaaatattattaataacaaaagcaatttataacataaatatttaagtttaaatctcaattataaataaatatataagtttaatttataacggtaaaaatacctaacttataattaagaacttctgtaggtacctgattacgtgttaagtaaattgctacgtgacaattcctgattgatccaagtcattaaattttttatttttttaaaaaaataattagttttaaaataccaataagaaaatagtgtgtggataatgacttgacatttaacagttatgtacctatagagttcaaaaaatataacttaagtattattatcgccaaaaattataaacttaagtatttatttgcaattaagagttaaacttaggtgtttataacgtaaattactctt

SEQ ID NO: 155087 - DNA, 536 bp, Cannabis sativa
tataaatttccattttagttttcttttctatggctgtcacacgttctaagtctacttctcttgtagttaaaaagctccaaaaacacccttaaatctaagttacccaaatctacaatgtggaagcaaaaactgaaagacaatcctccaagtccttcttcccctgctccttccaaatgcaagttagttgctcaatctccttctaagagtgtttgtaaacatcatcgagctattgaggaggaatctaattctggttttgttgtggtatttttgcacacgcaagtgtacgttcgtaacaagtagtaactcaccaagagtgaggtcgatcccatgaggattataattaagtactttaaaattaaatctttacttaatttggctatataaaatttaagaggagattaaaactagaaaacaataaaaatagtgaaagaagaagcaattaaactaatgaagggaaaaatagtgaatgaaagttagggctttcgatttcaattgtatctattgattatggcctaatgtgattattttcctattac

SEQ ID NO: 155088 - DNA, 667 bp, Cannabis sativa
caccttctacctagtatatatatacacaagtatgctacatatattacaaataaacaaatcgtggattaattttatgaaaagaaattaaacgagaattaattgcaatggtgacgtaaaagtgtattatgttaaatatgtacataactttttttttattttaatgttaaactaatatatttaaaaatatctataatatttaaagtatattaaatataaattaatttttttataaaaaaaaattatttaatttttatttttaaatatatatataataatattataaagttaataaagaatattctgttaagtaattgttacatagccacattttatatagaatagatatatatatatgttatacccaaaattcgacgagcacatcaaagaagacacgtgtcaagctgggaagaataaaaaactcaaacacgtcatcgtacttacactttacgtggaataactcgttaaaagcacaatttgcagagtatgtttataactcggctgactgaacattcttttgcgagataaaaatatactaactgtaaatttgtgtctcgatgagaaaccatgtaactgtgtgcaagacgaggcatcaacctcgtctcgtggatgagatataatgagaacaaaaatacttagcgtatagtacacggtatacaaactaagtata

SEQ ID NO: 155089 - DNA, 651 bp, Cannabis sativa
attgctaacagttttctggttttgaaggtttacccgcagaaatttaggttttgggggtttaatgaaacccccaaaacgaaagtattgggggttttgccacccgagccccatagtttcctccgtaatcatttttacttttattatttttttaattttctagtaaaccatgcatattacttatgttaattaagaaataataatataatcaactctaaacaaaatcatcttatatattaaagagcagatattaacaggccaagctctgagctaaggtaaattagacccatatttaaggttcactccaggacctacaatttttataatgtatacttttatgcagtaaaaaaagggtatttttttgtaaaattttataaaataagtccaataatgcttagagcatctccaaagaaacattaaatttggtatcaaaaagtatttctactccaactacaacacaaaaaattacactaaaaaaaatattctttattattatattaattttttaataaaataaaaaaaataatatcatattaattaacaaaatttaccacaatttatggtatccacgtttaaatttacacaaaaaaaaaaaattataataaggtgcttttacaatgtatctctctcaataaaagagtcacgcgacagaaa

SEQ ID NO: 155090 - DNA, 566 bp, Cannabis sativa
tattatgtgatcaaacatttatttttttgtttttcattatttttgtggttataccctgtgaaaaaggaagaagaaatttttattgttgtgctggaatttttgaaaaatactaaaagatcaaaaatactaaaagataagcatggtgtttaatactttactggtataatattgttatttgtgcaatttaatactaaatttcacttattttactttaataaaaattataatactaactatttatagaatgtaccttacggttgtgttagaaacattcagatttcatagcaatgttaagaatttcgtaacattataaaataatggcactactttactgttgtacactatgccttagcctcttaggcttagctcttaaaaatgtcatcaatctaaatgaaatggaacttcgctagacttgaactatagggctgttttaaacttaaaagaaatatatatatatatatatatttttatatatactagatagatggtatgtgttaaatcacgtatgttaattttattttagtttttagttttttttaatatcataattttaaaattaataatat

SEQ ID NO: 155091 - DNA, 583 bp, Cannabis sativa
ctagtatgaggaccatgagcctgtataaccgaacttccaataagtagatctagaatttaccaagaaaattctctaacttattaattcctctttgcactctatagatttagaattgcactctcaattatatagactgttttatatgttacacgatatagatatgctatgaaattatccatttattataatcctaataatcaatgatcctctttaaatgatctatcttgagcaaggacaaatttaccgtcacaccctttaatgtattttatccttaaaatacttagctacctataaaagatatttcagtgaactaatataatcagtgaaatgagtactcaaccatttctctctattaagctaagctcaaaggaaatcatcgtttgacttctatgtccagataccgtatctatgattagcactcccactcaactgaactactatgtccttaatatatatgtcacgagaagatccattggtcgactttaacgaacagattacagaacacaaataatacaattgaactagaacctaaccatctcaagattgagatcatttgatctaaactaggtgatattgaattgaa

SEQ ID NO: 155092 - DNA, 784 bp, Cannabis sativa
ctcctattacagaaatgacatgtaggaatgaaattgtcattctgtggaagatttcctacatcaatcctccttccttcaaacttgagtttggtgggtccagttggaccttgtttcttctcagatgagtctgattcgttaatgatggttgggacgtctggtaactcatcttccttctttgttgattcgacatttgagggttgtgaattctcaacagacaagtcattaccttgttcatatagcatcttatagcctaaggaggttcgatcaccataaggcttctgtagctgtagggtttgattgatagttgttgtgcctgggaatattaattgcagagcttacttggttttaatcagatcagcagtgagtttatagatctcattctccttttcatcaagaagtctgttgaggtttttgactgtgtcctctaactttccttttcaagtctctacttgctctagagagctttttagaccacggatctgtttagtcatatactcccattgtgcaaacatttcttcataggcattttctcgtcctaggctatcagcttctgatgaagctgagactgcatcatcttcagactcatctgggtgatagctttgggccatgaacgccactacttgcttatcctcatctgatccttcactggcagtggagttcttctcttcttcactatcactccaggtttctccaaaggccttcttctttttgagtgtgttagcgcactcagcctggatgtggccatatccatcacactctctacacttaattcctcgattctttt

SEQ ID NO: 155093 - DNA, 1277 bp, Cannabis sativa
tttcgttaactaaatttaagcctatttcgtgatggatttgcacagaattaatagtagtaaaaggaaaagaaataacacacgcttttttacgtggttatgcagttaaaattctgcatagtccacgagtctatcttattagatttttgatacaaaaatagggatttttccctaaaggattttccatcccttttacagtgtatgctgctcctatttatagttatataggagggcagttaattacaatcagactgacatcccacaacaataatctcctgaaatgatgggatttgattacgtcccacgtaaaatatatgcagttattatttaaaaatcacacagcagggatctatctatttttaccaggtcaatgctgtggataaatacgctgcaaagtgtatcgtgttggaacatctcgctaggaacatagaaacaataaccctggcagcgagctggatcttttcccatgtctttccgaggttgataatgtaaatctcctcatttttgcgtttgaagacacaatgttccatctgacaatcgcagttcttggtgataaggtgaacttcatcagtcaacaccatttgaatgtcaacttctttctgagaagctgactcgacagagcagtaggtatcattgaaagatttctagagcagactagtgaaagtaccataagtaggccttcctatagcgagatggatgccttgctattcgctgttcaggttcattcaactgttatgcttagtttgtataatgtatattatacactaagtcttttaacagtcaacatgtctcgtctacatctcttcatacataatgaggttgatgcctcacattgtacttctgacgtagaatggtttcttatcaacgcgcgagacaatagtgtgtatatccttatctcgcttaagactttacagtcagcaagttataaatatactctatcagctccgcatttaatgagttattctattttaatatcttataatataattatcattatatttgttgattcatattcttccagtttgacacgtgtcctctaaagtgctagccgaatttcgagtatcacattagatattttaatatttagtgtattttaaattaaaagataacattaaccttttaacttgaaatattaaattaaaaatatcttatacgataaattaaataattaataaatttaaaattaacctagacaattttatatatatcataactataattttttcaaattcataaattagttattttgttaaatattttattgtttataaattataagt

SEQ ID NO: 155094 - DNA, 702 bp, Cannabis sativa
ttcgttattaagcgcagatggttcatctggtcttagaacataaagcccctgttccatagatgcaacacaattttgaatgtcatttcgagaaatggtagaacaaaaacttaaaaaattcaatttgtattgttgcaactgtaaacatgaaagtttctactgaaatttggaatgaataagacattgtctaaatccaaaattgtactctgaaacttgagtttggcttttcctctagctctaacaaataccatttcgccattacaaacattaagtttcaactctccggatttcaaataattccaattttcaagcaattgcaatgaacaacagacatggtttgtagatccagaatcaagagtccagatggatttatcatcttctaaaacacatgattcaaaaactaaagcttcattgcttaactgtttttggattgttcttattgatggttcaatctgttgtgaaggataatctgaggaagtggaatcactttctctattcttctcaactgagcttgaagtagtaggatttttggaggaattatcctcaatatcttcagcttttcttttgcccttatctgcattacttgagaaggatctccatgcaagtgacaatgtccgttcataagcacgcaattcaacgtccaacttgtttatgtcgaataagttccaattgtttaaaacaaattggttaaacttaggtgataag

SEQ ID NO: 155095 - DNA, 837 bp, Cannabis sativa
cattctagagagtaattgaaagttttcataacctatgtgatgtgtatgccttggggtttggtaccctgttacctttgggagacctaatagtatccactaggtggattcagtccttgtctttttggattgatggttatgagttaatcgccaatataattgagttacaactgtctgattttgacataatcctaggaatggattttctatctaagtatggggcaacgatcgactgcaagcggaagatggttgtgtttgaggacgacattgctaacccgataatgtttttgggtaaggtccaggggatgcgcataccaagaataacacttttaaaagctgaagatttgatgtgcagaggttgtttgggattcctagtcactatggtgatacctgtcaacctgtgtcatctggacctgagaatacaagattgctatgcgaattccttgatgtttttcctaaagatctactgggattaccaccttcccgagagattgaatttgtgattgaattagttccgggagcagaaactgtatcaaaggcaccataacgaatggctccaacagaattgaaagaattaaagatccaactctaggagttactttatttggggttcattagaccgagttactctccttggggtgctctggtactatttgtaaagaagaaagacgggtcattgcggatgtgtattgactctcacaaattaaacaagcttactatcaagaacaagtatcctctaccctgaattgacaacctatttgatcaattgaagggaaagacggtctttcctaagatttatcttcgcttaggttaccatcaactgagaattcgagaggaaga

SEQ ID NO: 155096 - DNA, 543 bp, Cannabis sativa
  modified_base (335)..(351): a, c, t, g, unknown or other
tatggcatgctttactatctgtttgtttttctgggtttggtatttgaagtttctggaatgtattcttttgagtttttcacgtaataggtctagatttaccttctctgtgttagggttactcttttcacgcactgttgttacattttgtaaaggaccgtacactcttcgtgtgatggccttcgagggcacagagaagacttcgttctactcgattttctgcccttctttctttttctttcatgcgcgatgtcaccatctgtgagatctttgcacctgacttttgtccaggaaatctttctaaggctttcttgttgacagatgtccggagggggccnnnnnnnnnnnnnnnnnggacccccattcccttttttgatttagggttttgtatgggcctaattgctggaattttacctcttttttcagaataaaaaatgtctgcatctggctcaaaatcttccaagaaggggggtaagcttttggctaccctagaggacgtcatgatgggtcccgttgcccaggaggggtacaaacctcgggctacgg

SEQ ID NO: 155097 - DNA, 664 bp, Cannabis sativa
ttttggcttgcggttgaggacgggcgcggactttaagaaagtcatctctgcgaggacaaataaaagataactgtgaataaacttcaaggcactagtttataacgtgagatatgttacctgatgttggtcaagaggtttgcttggagaggcgtttgtctatccgctcttgttgtttctcagatggttcattgtacactggctcactttgaagacttgcattctctggaatcagcttgtgttctcgcagcttggcagtcgtacacaataatcgccagtcgtgatcttgtactggaaggctcccgagaacttcagctgtctctctgcgagtcgcgtcaagtgtcggtcgagctggtctatctgcgaaaacaagaaagagcgagttagcatgaaatctcaaaataattcaaaaaataactaagtcaggaagcatgcgacatactaggtcgacgattaaagtcagtcctaatcccaggaactttgaatatataaaaccacttcgatttccaatctcccatattggaaaccatgccttctaccccgttaatctcagaagttgctgaagcagtaaaaaccattgtggaggcctacgctctttatgtcatagaagtaactaaactcttctactgtgggagccctatgtacatactccatgtacatcgcataa

SEQ ID NO: 155098 - DNA, 501 bp, Cannabis sativa
aatatcacacctattgtaaaattatatcaaattgtaaattttaaaatttttgatgtaattttttaaatacattttgtttttagtattgatgaaaaattatataaaaaataacaaaatttgattcaattttcattatttagttatcatttcataaaatataaaatttattttatatatatcatttaaaaaaaatttaaatacccgccgcgaagcacgggctatttactagtttggtgataaaaaaaaataagaatcaagttcttttagtataatttttttttcttccgtactaagcaaaacaatttattttctattttttccttacattttcttcacattttcctttggaaaaagttcattctaatcaagttttatgaaatgattccaagaataccttatctttttttattatatcattttgaacgatattttttttaatatcatgtattaaattttaggctaattaggatttttaacctttgacatgtaccaaatcatgcc

SEQ ID NO: 155099 - DNA, 892 bp, Cannabis sativa
  modified_base (614)..(617): a, c, t, g, unknown or other
ctaggtttacacagatgaaataaattgtaaaatttacctgttacaaattatttataagctctattgacaattgcactatgattaaaatcaaattgttcgatatgtcaacaagttaatcatagcaattaagatcaaataaataataggtttttaatatttttttttgaataaataaataaataataaaataaatataaaccaaacaagttacagataactggaaagtcggctaagatatctctattttaaaatttaaaacatatcttcactagaatttaaaatttaagttgttagagaatatttgaaaaaaaaaattaaaaacctaacaaatctcctaaatatcctaaattcgaacttaaattcaaatatctaacatatttttcaaattttaagtttattcaaaatttaaataattaaatttctaattagataatataatatatatcttgaatttttttaaaaaaatagtattcttaatcttataatttaataaattaaatattacaaaaataaaaaatttgaaaaataatttattttatggttaggatattaccaattttattaaaaaaaaacaaaataaaataagtttgaaaaattttatggttagaaacccnnnnatttctattcaaacctaaactaacaaattttcaaatttttatgttatttttgctaaaattaattttaataaaaaaatatctaataagataaaatgttaaaactgaaatttatcaaatcttataattttaatttaataaaatatttcaaaaataacaaatttgaaaaaaaagatatggtgagcaaatttttaaaatttgaactagattatttttaaaaataatattttaatatcaaaataagatcattcaaatttaataataaaaataagtaatat

SEQ ID NO: 155100 - DNA, 608 bp, Cannabis sativa
  modified_base (106)..(107): a, c, t, g, unknown or other
gatactgacgagaagatcttaatagtcttattcctctcatagaactcagttcatagctcaccatcaaactgagctccattatcaaatactatcttaatgggtattnnaaacctacaaattatgtttttgacgataaagtcaagaacattcttgcaggttatggaaacaagaggttccgtctctatccactttgtgaagaagatgaccgccaccactgcgtactttgctcctcctcgcctagtggggagtgccccaatcaaatcaatcccccatattgcaaatgggtaagacaaggtcatcattcttagctctgtcggtggtacgtgaggtatatgtgagaacatttgacatttatcgcattttttgaaaaattcgtgtgtgtctttatttatagttggccagttgtatccttatcaaattattttctttgacaagattttccaacctggatggtctctacaaaatccttgatggatttctttgacaatctcgtttgcttatgtggggagaacacaccgtaggagaggcattgaatagccccttatatacaatttgccttctattatcgtgtagcgaggcactgaatacaatatttttcgtgcctcatt

SEQ ID NO: 155101 - DNA, 694 bp, Cannabis sativa
atagaggatttagggtttatttgttaattaagagacttgtaaggtctaattaataaataagttaaatagaaattttatttgacaattattaaatcaatggatttgacattcataaagttagaattaaaatatattgtgtatttgtgaaagaaaaaaataagttcttaaataaaatggcaaaattgaaacttgtagtgcccactatagtttggccatttaagtgttcaataaagccattattttatcttttttaatccatttaattctaaacctaaccctagatgtaatcctataaatagaataatatgctcttgtttagatcttgatcatactctacagcagaaaagatcatgggttagagatctaaatggaagaagacattatattctgctaccatcattgtaagattttccataattttatatgtatttatttcattattttaagaattttatgtttggggtggtagatcataattctataatcaacatatatgttagtaaatctagatcctagtaaaataagttctaataactagcatcagagccatgatattgatttattttcatgaaatattaatttaaaatgatgtttggtcgatttagatgtgttcacgttggtttgtgttttggaaatattttatttggaaagttggtgaaaaattaagaaattttggcttttacaaaacttaatt

SEQ ID NO: 155102 - DNA, 501 bp, Cannabis sativa
cttaattcgttatctttaactattttcattctcgacgcaccttattatgccataagcttttaatcaagtttgggggaaataaattattgtaagtggggaataattttgaaagtaagagataaaatatagttgtgttgtgttgtgcctctattgttaaagaaaacaagaaagagaaaaaaaaaacaaaagagaaaaaataaatgtgataatttcttcttgataaacaaatgtgaacaatgaggtaggcacataggaaaaaaatgtaatctcttactatcttctttgggatgaaaaaaatggataagtgtgggtgcttgtttggtaaagttgtgcttatggtataatgtagcctaaatgacttctcatctacccgtttcacctaagccatgctattacaaccaaaaaagaccttttaattctgagcaagaattgtcaacattagtggagaaaggtatgtcactcaagcttattgaacatgggttagcggaatgtcagagagtg

SEQ ID NO: 155103 - DNA, 586 bp, Cannabis sativa
atgggaacaagtgtttaagatatacaaaatttggatgacctagacggtaataccataacacatgataatatactgtgattttattgactgatttactgaggaaagagattgaccttggggaaacatcaatgatttccatggttaaacatggggttctcgatttttagtagatacaagcccttactgaactcaacctagccaatcttccccgattccacatcctgaaaaacacaaaaattagcatcgaacttaacttcacaattaagatcactactcaatttgcttacacaaagtaaattgcaatcaagctttggaacgtaaaggacaaaatttaagacaagaattgttgagattattatagttccaattcaatcaattactgaacacgaaccatctgctatgcgaatagtcctttcatcatagttcttacttagaaaagaaaatagtgatctatcacctatcatatagtcagaagcactagaatccacaatctaagggtcttgagggatttgaataacttgaagtgcatgagtattgcattgtcttgcaactaaagagatgtctcttaatgagttttgttctgcca

SEQ ID NO: 155104 - DNA, 530 bp, Cannabis sativa
aaaaccagaaacctgctgctttggtaatcaatggaacctagagtaaatgaggtggttaggagaatcaaggaagaagtaaagagtagattcatttatgtttggcctaaaaatgtatctacacatgacaatcaatagtttttagagattgtacagcaatagaaaatgggaaatagagggggaatcatgtaatattgggatgtaatgtgatatagagttatgctcacacatagaaatagatcttctctttgaagatgctaataggatgtaatcaaattgttgaattaatgaattacactgatttacaaaaaaaaaaaaaataatgaaaataataaattaaagttggtctgaaaaaaaaaattaatttaaaaaaaaaatccaactttaattaaattttcaattatttaattttcgaaacttatatattaaatatatatatataaatcaaaattaaataaataattaaaatataataaaataaaatttgaaaaatatctaatttaagttgttctagaaaaatctaaaattccaac

SEQ ID NO: 155105 - DNA, 867 bp, Cannabis sativa
gtgtgtcttattatagttatattatatattcattacgacatatcgtttattgcttgtaaaaaaactcattgtcattggctaaaagcgaaatcaacactttcgaatacagatacgcctagctgtctcagtgattgattagtttggttaacgtgcggaccggcaccattaacctggttggaattatcaggtatgacttctctcgatgaattacaagacaaggtctgcccacctgtgaccgaagatttggcggctgaccatttgtagtctgagaagtattcattgctggatctttgtctgtttcacccaggggaatgacattcgggggttgttgcccgatagtttgataggcctttcgtatcagcatagtagcttgccgactacgattgtcaatctctgcatgatgggcccttaacgattccatctctttgtctctccattcggcaaacatacgcctctgctcttcgaacgcaagatttaccgcagcgcggagttcctccttatcatgatgtagggtgttggtatgaccttgcatgagtccaagagcagcacggaggttttggatctcagtatcatctccaatggtcgttcaaacgttggtagcaggcggaatggctgtgttatgaatgcactggcttggtgctgaactggtattccaagtctcttgcacaccaggcgcgatttcatccacatgagtcgtcacaccatgacccgcgtttgacagttgctcagggttaacagctggcagaacccttgtttttcccgagttctacaatgcaacatccaccgcctgtggatttgccagatcaaccatgcccctacgagtctgtatcaccatcgtacttgtgattaaatttagaatgaagagcg

SEQ ID NO: 155106 - DNA, 789 bp, Cannabis sativa
caccatcgtcttcacacccacgaccagtgggaaggcctactgtgacgcacgacaaccactgaagaaagaaaagggagtcaagacccataaattatgagaacaactgaagagagaaaaagaaactaatgtcccccgcaatttgtgtttcttgcttattttttggtaaaaatcgagttttggtgaaatttgtattttttggactctctatgatttttttgtatagggtaccataaggtacgatggtgggtacgatagcagtataatctggaggttatggatgaaggttcgatagttgatatagtactatagtggtacgatatagttaagttcctgcttaaaatttatgccataaattttaagtacctattgcaccacaccatcgtaccctatcgtaccatcatcatactaacatatccttatcaaccattgtaccctatcgaacctttatccataaccttcatattacacaactatcgtacccaccattgtaccctattgtaccttaacctccatattatcatgctataaattttatggatattggtagctaaactacatgaactttaaattttttaacacttaaccacaaaaaccaatttttttgggggcaaaactacctaaactcacattctgttttgctctgtacctctccgtccaaaaatcatagttaaataccatagtggactgcctacctgtacacaagagtacacgtggcaaaattttagcggtccacgtaattttaattttaaatataataaaaattatttaaaaattaaaaaaaaattataa

SEQ ID NO: 155107 - DNA, 533 bp, Cannabis sativa
ctccgccgaggcaatgatgtccgcccaaagtgcctttttagcgtccggggtacgaatgtttgggcagaggaccttggagaggttgaagtcgtccacagattggcttcccgaggtgaggttggcctttcgacggttctccgttgtaacaaggtcccccacgttaagaccatttctgtcataagtggagaaaaccttagcatgctggaggaaaagctaggtaggagcagtgcaatgcagtggtgggatcctgacccactccgtgacaagctctgggtgatccacggcttggaagctggaagagaagaaaaagcggaccctcattagtgggatccttaacatttttgtgaaaattataagggaccggaccctcattagtaggatgggaccggaccctcattagtaggatgggcccggagagtgaaaaaattgtctttcaacttatcccccttcttggggacagatacaagttcgtaaaaatataagatctcagtcgggctaggtgaagcccagcctcgggctacataaaaaataaa

SEQ ID NO: 155108 - DNA, 714 bp, Cannabis sativa
tatattgccttataaactgaaaaatcatatattgataaaatagataatatatttcttttctgctattaaaactaataaaaaataaaaggtaatactaactcttacctatgacaacaaccatattagatgttgatataggtacaaggttttgcttctagtacatcaattctgttttgtgaattgttttaaatttctaatgtataatttaacgagaaaatatgaatgtatgaatgtgaatgaattatatgtgagagtgcataaagataaagtgaaagacatggaatagtatacatgtacatgatatcttttcttaacaaaaattttataggaaaaagtatattttctctgatctgagagaagaaataggtcactaagttccctgtagtttacatcttgggtttcctctatgagctctttcagtccaagtttggactgaaaatccataaaattctgaaaataaaatagtttgatattaataggaaaggtagacccacatgtcattacaaagcaagtttactggtattgagaagacctctatataacatatagtgtttaaagccaaagtcctcttggaaaaaactacctatccacgacattgcaattacacaacattatatattaaagcaaatatgaactgtcattcagacaccacgacattacgatcacacctagcctttcaaaatgagcattagtaaaaattcaaggattataaat

SEQ ID NO: 155109 - DNA, 584 bp, Cannabis sativa
acatataaatgtctaacagtttgtatcagagcggattatatatctctgccttgatttattttgagtttcgtttgttcatatatatatatacatacaaggttcttcatttataatataaattatatatattttaatatatatatatactttcatattatataatcatgattatatatattcatactcaatttatttttatgtatatatattcatgttcatgttcattgatatatatatatatatatatacaatacatcggttagattggttgggttttgatttatgtttaaaatttacgtatacatattatatatagatttatatctatataattctaatcaaatatatgctttcatattcacgtttatatcttatacatttatatatatgtacatttagatagcgtatatacatatatatttttttatatatgtttatatattatacacattcatttatttatttaattctatatagaaaactagctaatctcataatcaagtcaacttgattgaagggggtaatggaggaccaagcaccataagagagattagcaaagaaaaatacaatagagtgatacaaaa

SEQ ID NO: 155110 - DNA, 602 bp, Cannabis sativa
aggtgatcaattcactttagtatcattggaggtcgttcacctctaggactttagctcttggttcatgtcggattagtctagcatacctttctaaagccttccttgaattccaagctaagtgagggtctccaatcatcatctccaatcatacataccactgaagagaaccatgtttctggctaatgagaaattctatctcatctcgcaactggttacactcatttgtgtcatgactgtagttgttttgttgtggtaacaacagaacttcttcatgtccctttttcctaattctttgataggaagaggtttacgatacgacattattgactgagtggccatatatatctcctcccttggagtaaaaagaataaagtaggtggtgaagagaggctcataatctctcaagggcttgcccctaattttagacttttttcttttgggagagtttccttgcttgccactattgttggctctctttcccctattcaaacctccctttttctcattggcctgcaactcagtagtaggggctttagtgtctggcgacttcttcttaccaccctttgtgccctttgcttaggtgacgacttcttcaagtttga

SEQ ID NO: 155111 - DNA, 1200 bp, Cannabis sativa
tagccatattgatgtgacaacatcgataagtatttcacacaacatacatttatcagtaatagtacaactctaagtatacaacaggcataaacaacatgtatgctaaacatgtaataacatatgcacgacattatagtaatcttacctcaattctgaattcaggtgtgtcggtcaatctgagtggaacaactgctcgacaaattataggctcctatatgacatcgataataacacgaataagtgactcgctaaatcacacccgggacttaggtttaaaaccaaaaccctatctactgtaaattaatatggcaataccctaaactaatagggaatcaaccaactagaaacctgaaactgatgtgaaacgacaagctgaattttcgggattccctgctgcaaaatccgggtaacaggttttacaagcattgtaaaaacggttagccggttttatccaaaaaaacccaaaaatcaacaaagcctaaccaaatcgttttcaaactcaaccaaactttccacacctccatattataccacaataaacaatttcaaagcaataaaataacaatcaaagctcagaatcaaatttcaccattacagctccaagtttgagttctaaaactcaaaacatgaaaacaacaactaacaacccttaattcatgctcaaaacaacatatacaactataatctaacaccagaaacacaaagcaaacaccaacaacaaccacagcagcaaaaaccacaaaaacatgcataatccatttctaaaaattcaagaaacttaagagagtgaagagaagagtttacctagaacttatgaacactcaaatcctgctgaaactagcttgaatggaggaaaaattcagcaaaccctagctgcttctaggtggaatcgaaagagagagagtgagagttgagagagaaatgctttcttttttccaaattttctatttttttttttttttgtaaaatggataaatgttgttttattaacacattaatatcagcatataactcataaaaaaatcagtttattaaatcaaactaagtccactaaagaaaaaaatacaaatggaaaaaaagaccaaaatgccttgcccttactgttgctataattttaaacactacgcaagtatacgcaatcaagtagtaaaactcacacaggtgaggtcgatcccacagggaattggattaagtaccact

SEQ ID NO: 155112 - DNA, 815 bp, Cannabis sativa
atattattttacatattacaattagattatttttttgttatttttttattgctttgtagttatctttttattgttttcatgttatttattaagttgttctataattgttttttagtttttttttattttatttaaacacaatatttttataattttaaaaatttaacataatattttttaaaacttggtacagtaaaaatataaaaagaaaagagtgtggcagtaaaagtgataaataaaatgggtattttttataagatccccatttttgtaaaggattattttacaaatacacaaaaatagcaaaaaaaattacaaaaatatagttgtacagaattttaaatacttttaaaaattttataattttctttacagaaaatattatttttttgctgtatttttgtgtgtacttttattaatttgttgttgattttttattatttttattgttattttgatattatttgaatgtaatttttttttgttaattttatgtaattttcttattattttcataaaacaccctaaaaatataaagaaaattttaaaacgtaaaaatataatttttttttgaattatttcacaaatacacaaaaacaacaaaagaatatatataaatacggttttatgaaattttaaacatttttacgattttttcgatttttttacagaaaatatagtctttttatgctgtactactattaatttattatttattttttattgtctgtatgttattttttgttgttgttttgatgttatttatatattatttttatgttatttttatgtagttttcttgctgttttcgtgtt

SEQ ID NO: 155113 - DNA, 584 bp, Cannabis sativa
  modified_base (147)..(148): a, c, t, g, unknown or other
  modified_base (203)..(203): a, c, t, g, unknown or other
ccgaaccgagactaggactcgaacccgaacatagactgggacccaaacccacacaataactgggacctggacctagaataaggatacggaccaaggaacagaactaggttaaggacctaatacccgacccagacccgaacttgaacnnaggacccagctcgtgacccgacacgagaaatggaaccagactgcgacccgagatngggatctggatctagacccagggcctggacaaaactcgtagtcgatgtctaaatttgggactcagccctacacccgaaccctgcaaggacccgaacccacacccggacctgaacccagttcaaaacccaaaagtggacccaaacccatacattgtgatccaaaattggaaccaaaactggaagttgaccgggagtggaactaggatttggacttggaatcataactgaaattagacctagatccagaacagtaactggaccaggactcggagtccaagtaagacctagacccgaattgggagacggactcggatccacaccaaaacatggactcgggacccgaacccaaacctgaactcagacccaaacatggaaccagac

SEQ ID NO: 155114 - DNA, 550 bp, Cannabis sativa
cccgagattgggatccagattttggaccctgggcttggacaaaactcgtagtcgatgtctggatttgggacccagccctggacccgaaccctgacacggacccaagcccacagtcggacctgaacccagtcccaaaccaaaaagtggacgcgaacccttaccctgtgacccaaaatttgagcccaaatcagaagttgaccgaaactggaagtaggacttggacttggaatcataactgaaattggacatagatccagaaccgtaaccggaccaagacccaaactgaaaatcagacctagacccgaattggaagccggacccggatcccaacccaaacctggattcgggacccgaacttgaacctgaactcagacccaaacatggaatcagacaaggcacatagaaccacgggacctagaaccgcaccctagtctcgatcaagaaccaaaactcagaaatgggagttgcgacctgaactagaaccagaccgagaaccgtgatagtgatccagatcttgactcgagattcgggtaacggggcctggaacaga

SEQ ID NO: 155115 - DNA, 1030 bp, Cannabis sativa
ttttatcaaaaccagatgcttctagaagattgataaaatagtcaattaaactgggacagttcgacataacataccatccttgaacatctatcaaggaccaagctttacctgacttcttgatagaaggtataactccagaaaaaatccaacctgatcagagagactcaaaaacctggaagttatatgtggatggcgcatccaacgaacagggttcgggtgcaggggtaagattaatatcgccggaaggctttaagtttcactatgctctgaggttccaatttgatgcatcaaataataaggctgaatatgaagccttgattgcctgtttaaagatagcagaggccttaaatgttaaaaatctcatttgtcatagtgattcgtaactgattgtgaactaggtcctcggggaataccaggccaaaggcttgaaaatggcgaactatttagagaaagtttggaaaacttgaaaagattcgattactttaaaatcgaacaaattctgagagaacaaaactccaacgccgatgccttaacaaagctggcctcgcagaatgatcttgatgaactaaatctggttccggtagaaatgctgagcgagccaagtatatgtgaaactgaagacgtcgagatgatagatagctctccaacatggatgacgcctattatcaactatttactcgacgggcaacttccaaatgaaaaaaacaaggcgcgaaaactattgtatacagtgcctcgctacacaatggtcgaagggaaactatatagaagagggtattcaatgcccctactttggtgtgttcctcccgcagaagcaaacgaaatcattaaagaaatttatgaaggcttctgtggggatcatgcgggtttgcaaagtctgactgaaaagatcattagacaaggatattactggccaacgattaataaggaaaaacatgagtttgtcaagaaatatgataagtgtcagaggttttcacatatacctcgcgtaccgccaacaaaacttagaatgatgatctcgccctaccca

SEQ ID NO: 155116 - DNA, 568 bp, Cannabis sativa
aattttttagtcaatttttatgtttgaaattacatatcgtattttttttaatttttttatagcagtttctgttataattatagtattattcttataaatttttgaaaaatttcgaatagtttatattattgaaaatagagttggtgatatttaagtttatcactcttgtttgaaaaattttaaatgtatttttagtattgtaactatttgaatttttttcaaaattttacaagaataatattgtaagtttagcgaactttgttatgaaaaaaatattgtcatgtgttttcagacatgaaggttgactaagaggttgtaatagaaggttgacggtagcactcatatcacttattgtctgtaggggcatgtgtcattgaaaatttcgacaataaaactatgagaatatttgtaacgaatgccatgtatgtgctcaactaagatcaattaggagaacaatacatcttttagggtttttaaattcactcaggataaggatacttaatcaaagaaaggtatcgaaaccaaatctaataactcggaatccgattccagccaataaagaatccac

SEQ ID NO: 155117 - DNA, 907 bp, Cannabis sativa
tccagctctgatttctctctttcttgtttgagttctctccctctctctctctgatttttctgcaggtagtggtggtggtccgatgggatggtggtggtctactgggatgtggtggttcgatgtgcttttggtaacacgatgggttcctgtggtggcagtatttattattgttgttgttgttgttgggttgttgtggcagtccgaagggttgtggtggtctgaaagtttatatatatttttttaaaatttttattcttttgcttcagttcataactgaagcgaaaaactaatttacatcagtgctttaatattttcttcgcttataaactgaagcaaaaatcttttagcgtctgttactaagtgaagcaaaaaataagactatttgcgtctactgttatagcgttagttacacaaaccgacgcaaattatttatatgtcatttacaactgaagcaaaaggccatttttgtaatagtgtgaagtgcatttcgatgtctatatggttagatctctcataaaacatagggttcttcatttggtggagtgccctttggttatcatagaacactgtgatattatctatctttaatctcatctcctttgctacaccttttagccatacaccttctttaattgtctcagtagcttccgtgtactcgcttctgttgaggatagagctactaccttttgtagattttccttccaactcacacatcctccttgcattgtgaacacatatcctgccatagatctcctagtgtctatgcaacctgcatagtctgagtctacatagactgagacatcaatctctattttgcagcttttgttgtaggtgaggcctaaatcaagagtgcctttgatgtacctcataatccacttaagaacatcccaatgcttctctccagggt

SEQ ID NO: 155118 - DNA, 930 bp, Cannabis sativa
  modified_base (629)..(644): a, c, t, g, unknown or other
ctattcctgtggaaggagaggacatcctggttattttgggagggccgcatattgtaggggaaagcaataacggtcagaatatatttatgaaggagataaagaacgagcaatcagtctttgccccagaaccttccaagaaggtgaaaattgaggaacccccgtttacgttcacaaaggaagacaagacgagcgtgagataccctcacgtcgatccgctggtcataaccattcaactcgccaataagatgatcaagagagcattaatagacaatgggagctcggtaaatatcatttataaggagactctaaagaaaatagggctcgaaaaggccaagttaaggccttgtatggtgaatctttgcggtttcacaggggatagcatcgctagccttggcgttatcgagctcgcattaactttaggtcaggcacctttaactgctactattatgcaagacttcttggtggtcggcctgccctcggcttacaacatattgttgggtcgtccagcactgatcggactaggggcagtcagttcgatcaagcacctatctttaaagtttcaaacaccagatggcgtggtagtggtgtgtggcgaccagatgctggctcgcgattgctatcgcatagannnnnnnnnnnnnnnngtcggtcatcagttgatgacgatcttggaaggagaaaacgagaagaaagaggaagatcttgatccccaagttcaagatgaaagaaacctactaaaaccaattgaagaattggaagaggttattctcgacccaagaaatcccaccaaatgtgtgtacgttgggaagaacttggaggagcagctcaaatagaaattaattagctttttgaatgcgaaccaagatcaattttcctggagtcatggggatatgatagggatcgaccctaagattatctgccatcacttaa

SEQ ID NO: 155119 - DNA, 539 bp, Cannabis sativa
ttgccagcgcagtttacaaaatccactgataaaagttatttttaccagcacagtagcgaactgtgctagtaaaaatgacatttcttatagtgaatttttattattacgctcgaatgtataatagtattgtaagcactcgtgtttgagaaaattgtaaaggaaaattgtaagtccaaacaaattacgatctaaaaaaattatatgacaaaacttaaattttagaatgttttcctcaagaaaaaaaaaatgaaaaaagttagtgttttagccaactactattataagtatatttatattctttatacatcacttgtgatctctatggtcttatatgggaggttcgaatactattgattaagttttgctaattaattttgatttatgttaggggtgggtattatctaatccaatccaattgaaccgaactaatcaatttttatccaattacaagaagttggatatccaattataattggattggcttggatgttaaaagttgaactctaattggattggatcggttattggatgtcaatctc

SEQ ID NO: 155120 - DNA, 720 bp, Cannabis sativa
ttagggcataaaatccaacacctaaatcccaacatacataaaggggtaagtgatacgctaaatcactttttggagacttgaactcaaaactaaaagtttccctattttttgggtttagctggatcttattgccagtttgtagaaggattttccaagattttaatgccttaacaaagttaaccaagaaaaattagcggtttatctggtgagacaaatgtgcaagttttcaaaagttgaagcaattattgactacatccctagtgttagctttatcgttagatcaagaaaagtttgtggtttatttttatgcatccaaacaaggtctaatgtgcgttttgatgcaagatgataggattattattaatgcatctcgtcagttgaaggagtatgagcagcgatacccaactcatgatctagaactcgactcagtggtctttgccttgaagatttttatgacacactatctctacggagaaaagtgtaaatatatagtgaccacaagagcctcaaatatttctttacttaaaaagatttgaatatgagacagaggcagtggttggaattagttaaagattacgattgtgaaattttttatcaccctgggaaggccaatgtagtggcggatgccgtaagcatgaaaggtccgagaggaagatttttagtatgactatgatttctccccatttggtggctgacatggtcaaattaggtattgagttt

SEQ ID NO: 155121 - DNA, 876 bp, Cannabis sativa
  modified_base (26)..(65): a, c, t, g, unknown or other
  modified_base (814)..(821): a, c, t, g, unknown or other
ttaaatataaataaaaagtcacccannnnnnnnnnnnnnnnnnnnnnnnnnnnnnnnnnnnnnnnctttatatagaatagatactagtttatatactaggtaggtaaaaggtctagtagaaatttgtttagaaaatttattatttaatatttaattaaaaataaaaaaaactataatatttaacttatacattcttaatcatatatgtaatatcccaattttttacgatttaaaaaaatagttccttaaaaaaaaaaaaaaactaatgtatataataaattgaaatggtattttatttttaattgtgaatattacgattgttttcatcgtatagtaaatgtaaggtgttgatgcggtttttcgttaacggatctaagaagattataaacgagcaaaatgaacacaaataatagttaatcaaagtaaaccgatttgcaaaagtaaatttaataaagacgaacacgagaattttatagtggttcaccccctttcaacggtaatatgatagtccacttggagtgttattgatctcaatgcttgagaagagttctccagagttaagtcctccaagagttcactcctcaagtgagtttttagaatttgagagtgggagctcaagagtatgatttcgtgagtatcaagttcaaggtccctttacaagtgattttcactccccttatatagattttcatttaggatttaaaatcccttaaacataggtacaccttcccgtaactataatcgggttacgtttaagatacaaaaaaataataaggctaattcagatttttgcctcctgaactttgacatgtannnnnnnntgccccctgaacttttaaggttgttaaaaatgctccctgaactattgagattgtt

SEQ ID NO: 155122 - DNA, 566 bp, Cannabis sativa
ctttaatcttctcaattgcctcattggtccgttgtactgattctggacctaggtatttcttctcccctttctcatcccagtttatgggagatctacacttttgaccatataacaattcatagggagccatccctatcgtactttgataactgttattgtatgagaactctatcaacggtaggtacttactccaggagccctcgaaatccataacacaggctcgcaacatatcttccattatctgaattgtcctttcgaactgttcatcagtctgaggatggaaagctgtactgaatttcagtttagtacccatagcccgttgcaaatttcagtttagcggtaaatttcagatctctatctgaaactatggattttggtacaccatgcaatcttactatttctttgacgtacaaatttgcgtattgatccactgaaaaggtcgttttaacttgtagaaaatgtgcagacttcgtaagtcgatctaccacaacccaaaaagaataaaaaaaactcgtgattctaggtaatccaaccataaagtccatcgtgatatcttcccattttca

SEQ ID NO: 155123 - DNA, 529 bp, Cannabis sativa
agatttctcagtaaaatatatatgaaatctctcttttattaagaaaaatgtgtaagatattttttttgataattttttttaattaagtagctataacactattcatgaatacttcatgcaaagggttggaaattcttgacttacttgttcaggaaaaggatagagtgctcatacttattgtaattgttgtgatattttgcacacgcaagtgcacgtatcgtttacaagtaatatacttaccaagagtgaggttgatcccacgaggatggtagttaagtacgttaaaattaaacttatttctatttggttgaataaaaattaagaaatgattaaaactacaaaataaaaacagtccaagaataagcaattaaaataataaggaaattaacagtttataaaaactagggcttcgacttcaattttttctattgattatgacctaaaatgattatcttcctattatcgatttctatacaataacaggtttactaaggtaatttatagtcttctcagatatataaatctcaat

SEQ ID NO: 155124 - DNA, 523 bp, Cannabis sativa
cacaagtactaacaaaccacaactccccctggaaaaagggtccagagttggacaaaacaaaaaaagcagtttaaaaatcaattatttctcccctttttgtttatcggagtgccaaagtaaaccaagaaagataaatagaaacaagttcaatcaaaagcaaagaaaacaacaacttagtctcggtagagtttaaccaaagaggtcaactgcttggacatcttgtgctgaagttcttccattgcagcaagacgattgttcacattctgaacttcattcttgacttcctagagttctgcagcagcagaacttgaacttgcagcagcggcagcagcagcaacagcagctccagccttaggcgtttttgaaacacaccatcaaagtattccgacggttggaatgtaggactagtgacagggggctcaagtgtttcatgtgattaggccacattcttctgtgaggataaaaccttaaagattagattaggaaagacaagtttaaaggttggctttttacctcttcggaa

SEQ ID NO: 155125 - DNA, 511 bp, Cannabis sativa
  modified_base (167)..(177): a, c, t, g, unknown or other
atcataggaattcatttaatcacagaatcttgattattttccactgtgctgacaacacaataaacaataatatcaatgtgataaggatttggatgataatcaatctgtttctttattgatgattgaatagaaaatattacattgaaaaagagttttatttagggcannnnnnnnnnnaaactcccacttgcactaacattaaactatcagtacatttcaattaatcctattttcagtctgtgcttttcaaatgtagttacagtcaaaacttggtgaatggattagctaagttgtcttcagtatccactttctccactagtacatcctttcttgccacatattctttgatgatgtggtatttcatctctatgtgtttgcttctcttgtgatttcgaggctctttattgttggctattgcaccagtgttttcccaaagtaaaaccagaggtttttccattccaagaacaacaccaagtcatgagaataactttctaagccatacaagttcctt

SEQ ID NO: 155126 - DNA, 508 bp, Cannabis sativa
gcagacttcataacggagtgtcatgaggcagaggctaacgcaagcgtgcccacaccgcaggtcccaacgtggaaagtatttgtggatggggcctccaacaaaaatggatccggagcgggggcagcaatgatattcccaaacagacttcgactccaggcagccctacggtttgaattcacagcttccaacaatgaggccgaatacgaagccctaatagcagggctgaaattagtgaaagtcgtgggggctagaagagtagaagtcttcagtgattcacaactggtagtgaagcaagtgtcgggggaatatcaaacgcgcggagaaaaaatggctgcgtacgtaggaatagtccaggagttgctccatgagttcacggattacaaagtagaaagaatccccggagaaaagaacagtcacgtagactgtctggctaagttagcctcagacagcgaaattgagaaactgggggtagtgcccgtggaacgccttgcggaaccaagcattaaag

SEQ ID NO: 155127 - DNA, 615 bp, Cannabis sativa
taaatctgagcttgcgatactggccgtgatggtaatatggctgctgggaagataaaatctccacaaattgtcgagtctgtcgttgttgtggtaaattcagaaattgttgttgttgcaaaacatttggagattgttgctgtggcaaaaaattcgggaattgttgctgaaactgaccaggaaaaatatatggattttgtgcaccgaaaaattgacccggagaaggttgcttcattggacccccataaagcatcgcctgttgagatgaactcccaaattgaccaaacatcggctgctgggactgtgatcctccaaaaaaatcagagtagaaaaattgaggagactgggaggagcgtccaaacatgttcggaataagaggagattgggaggaacttccctgcacattaggagattgttgagtctgctgtaaaggttgttgttgcggccttggacatgttgcactaccctgaggttgggttggtaaatattgttggaggaatctgtcaaatcgcaaccagatcagaagtgtcgtgtcccggtggaaagcgttcacgcaatctctgaaacatctcaaccataataccaacatcttgagaaagagtagaccctgcttgagat

SEQ ID NO: 155128 - DNA, 663 bp, Cannabis sativa
tgttgacaattaatatcttcttctatctgtttcgattttttttttttacacttctacatagtagcttctttagtggaattatgtctattttaggacttattaataaattgaattttgtaatttgctgttatgtacaatatatgcatcttgatatttatttatttctacatagtaggttctttagtggaatctcttcttatattagtaagcatgatcttcactatggtgagatgacagtccgcgaaacattagacttaaaagctaatctttctgtgtcctactagataagactatcggcccaaatcaacaatgctccgataattctcaacgtggattgtgacatgtattcgaactactcagaatcagtgagagatgcaatgtgcttctttttggataaagaaaagggtcatgagattgcatatattcagtttccacaggcatttgagaacctctcatagagaatgatatttacagtggttccttgagacttataatggaggtaaatttgcccatagccagagattttgagcacccttttcattaatttgatttcataagaccaaaccaatgcatgtatatgatgatcccaaggttgatcttcgaggatttgactctaatggagggccttgctatattggcaccgggtgctttcatagaagggaa

SEQ ID NO: 155129 - DNA, 676 bp, Cannabis sativa
  modified_base (112)..(130): a, c, t, g, unknown or other
  modified_base (629)..(639): a, c, t, g, unknown or other
tctttattataaagctcattatttaaaataatgtatttttaattaatcatttattttaatctatatattttattaatgaaaaaataattaatttatgttgatccaaaattannnnnnnnnnnnnnnnnnncaactttaatttaatttttaaaatccatttgtaaacaaatataaaatttcgaaattatataaaatatattaaaataaatttctgaaaaatgtctaatttaagttgttctaaaacaacaaaattttcaacttaaataatttttcaacatttaattaaatatcaaattaagtatcttgaactaatcaccataatttgaaaatatccttatttaagttgatccaaaattaacaaattttcaacataaaaatattaaagaatatctgaataactaattttcaagaagattctacttaattattaatttcaaaatattcaaatttaagttgatccaaagttagtttgaaaaactaattttcaacttaaatatattttctttgaaaattcaaataattaagtttcctgaagaatctaattagttataacttcttttatttaattaaatacagaaaaatacatcaagtttatcttgcatttgaatttcattaaactaagtgtgttnnnnnnnnnnnaatttcaaaataatctgatgaaaaattaatttcatat

SEQ ID NO: 155130 - DNA, 558 bp, Cannabis sativa
ggtcatttctctaataacccacattatcacatcattcctaattattcataaaaattctcaatacctctttataacaaaaattatcggtaccactaaaattctaaattataccactataatatttttaccgatccgtcgagtttcaattgttgtcaatcataaacataataaatacatattgcaaagaccgcttagcttaatttggaaattagtagataatgatttatttgaattcagaatgcattttacatgtcatatctaaaaatttcatatttttgcatgttcagtgcccgacaacattggaacgaggtgtatggctcagtagaatcacatcttggtatttttgtatagcggggcagtttagttagacattggaaatgtcaggattggttggaattttagaatttcccaaattacgccttagtgccattttataacttttagtattggagcggcaaaatagtcattttccctaagtgagttttgtcttttgtggattttatttaaagtttattaatctgaatttttggttaagtttatgctgagtattaagcaaga

SEQ ID NO: 155131 - DNA, 566 bp, Cannabis sativa
ttcaaagcacttcgcgaggtctgtagtatgatctccactctttatcgaattcaccaacatatcatcgacgtagacctccatgtttcttccaatttgtctcgcaaaaatttcattcacaagtcactgatatgttgccccaatgtttttcaactcaaacgacacaactttatagcaataaagtcccatgttatttatgaagcttgtatgttcctgatctgggacatgcatttttatctggttgtatccagagtatgcatccatgaacaacataagctcgtacccagcagttgcatccactaactagtcaatccttggtcgtggaaagtaatcttgtggacacgccttattcaaatcagaaaagtcaatacaagttctccaagttccatttggttttgggacgagaacaggattggatatccacgagggataaaatgcctcgcgtataaagtcgttaactaaaaatttatccacttcctgcttgagtgccccttgtcttttagaatccaagggtcgcctcttctgtctcttggctaggtaattcggatcgacatttaagtggtggcaga

SEQ ID NO: 155132 - DNA, 588 bp, Cannabis sativa
acccactaggtttgtgcaccaagtcaagttctttggttctcgttcagaaaaggttcttctcgagccctcctgttccctacccctcgaggccaagcctgaaggctcgcaaatctgctcactgcatgctaccaatggttggcgtaacttcctaactcttgggtctggggattgggagcttctcacgcgaggctgctttgaggatcttgccaaaaggagttatgaacttttacatcaggttaatttccctttctccttgttctcacttttccttattttatcaccttcactatttttaatttgcttccttctcccgagcatttcttctctcctttgctactcatcataggttgtctcagtgggctgaaatgctcgagatggagcttcgtcagaccagggagcatagggaaactttagccaaaaagtggaatgactctgaggccgaggtttctcgcataaaagaagaggctgaatagtagcatcaggccgacaaaaagaagatgaaggagcttgaggatcctctcaagtccctccaggctgaccatgacaaaaaactcaaagagatggagactgaaaccaaggaaagggtca

SEQ ID NO: 155133 - DNA, 587 bp, Cannabis sativa
ttaatcgaaagtgggaagagtatatcgctcgaaatgtggatatagttgttaaacaattgggagttgtccagttccatgctcaagtggttgagttaacccttactgttgagggtgtaaagaccagatcaaagagagaaataatatgaggaaagattcataaaagcgaacgtccaatgttggatcaggtaagggttcaaaccctgatgatctcaagaaaaaggactaacaatccaccagttacgagtcctagtaagcaaatttaaggtaaccaaagtttctaacgtggtgggaacgaagatttacaaacccatctagagggttgagatgcaagagatgccaacaaagtgaatgctacacgagagcctgcttccaatgtggggtagtaggccatttgaaaagaactgcccacagttatagtagccagaatagaacgatgattgaaagtttgtgtatatttaataaggtgttaccaagtggttatggtaccttaatgttaattggaaaattggttttttttcagcaggtggtttaatcccttcccgtgttgtgggggaaagggaatggttggttgttttagttgagctaaa

SEQ ID NO: 155134 - DNA, 586 bp, Cannabis sativa
ggttgttggtagggctcctactcctcctacataaggctttagtaggggaggtagtggctcgaccactgaccaaaaagaaaggcacctactacatacggtggcttaagttagaacaagaggttccgagggaaccagggctgaggtaatcgtcagggtagctttgaaacccgatacacttacccagaatgccccagttgtgaaagcatcatctgagagagtatagaaggcaagggtgcttccagtgtggtatgtcaggacactataaaagggactgccccaaactccaaaaagaataacagaagactgcaacaacaaaacctgcaccatcgaggagggtgttcacaataactcaggctgatgtagaagctagcccctcactgtagcccctcactggtaacaggtcagctctcggtcaacaactagggccactcattcttatgtggcagccagaatctttagtaaattaggtagaccgcatgatagttatgatacagggtttggaaccctactttctagcggagaattagtcatctccaaaaggtggattaggtaaatatcgatcagaatcgaggatagggagttgagt

SEQ ID NO: 155135 - DNA, 682 bp, Cannabis sativa
ataaaatttaatgacttaatttaacttaatgattgtaatctatataaaatataaaatcatagatagagtataatcatactaatggcaaggtcctctattgtcggtagattttcttctttctcattatattcacgaacaattataggttgatgtaattggctccactaatttttcagacatatcaaagcttccacagttgttggattcaatgagctcctaaaaggataaaaaaatatgccctctagtggagaaagtcgcctcagaagcaacattagtaactggaacaactaagacatcacgagcaatttttgacaaggtcatgtattttgatgaatctagacattaccattttagtatatcaaagcggtcaggttgactcacttttataggtttaacatcatcaaagatgaagtacttatgtaattcatcttttgacacttcaccatattgctcgatcctctcttgtagaaactcaacatgcatgccatccgcaaaaaattaataagaatctagtgagaatgtagtagtagtatcaacactaggagtgtcttgacgttggcttgctagaactgaaggttgttgttgtaattgctcatacccaccatacgcctcaaacaaagttctcaaacttgtttcaatcttgttcaccatcaaatttgacgtgattgggtcatgcaattta

SEQ ID NO: 155136 - DNA, 742 bp, Cannabis sativa
taccacgaatagaccaaatggtggacgccccctccagattcaagctactgtccttcatggacgcttatgccggctacaatcagatcaagatgcacattgcagatcaagaatgcacaaggttcaggaccgataagacggtatactgctacctagtcatgcctctcgggttaaagaacgctggtgcaacatatcagcgaatggtgaaccggatgtttaaaggccttctgggacaaaacatggaagtatatgtggatgacatgttgatcaaatcaaaggcatgtacaagccatgaaaatacctcgcagaatgttttgaagtggttcggagatacggaatgaagcttaacccaaaaaagtgtacttttggggtcaaatcaggaaattttttgggatttattgtcagccaacgagggatagaggaaaatccggaaaaaatccaagctctcctgaatatgccttctcccaaaaagcacaaagatatacaaagcttaaccggaaaggttgctaccttgagccggtttatctcccgatctacagacaagtgcattcctttcttcaacatcctgaagaaatgcgaaaaattcaaatggtccgacgagtgcaaggaggcattcaaaaaactaaaagaatacatggctaaaccctttatcctatcaaaacttgtcctcgaagaagacttgttcctatacttggccgtctccgagaatgcggttagcgcgaccttagtacgggaagaggaaaaa

SEQ ID NO: 155137 - DNA, 774 bp, Cannabis sativa
  modified_base (47)..(59): a, c, t, g, unknown or other
  modified_base (303)..(303): a, c, t, g, unknown or other
  modified_base (521)..(521): a, c, t, g, unknown or other
  modified_base (740)..(743): a, c, t, g, unknown or other
aatagttttatagaacatgtttttaaaaaatattttcacttttctannnnnnnnnnnnnaaaactgattaaaaaagtgttattaaacgccacctaaatgtataaagagtaatttatgacgcaaatgcttaagtctaactcgcagttgtacattaatacctaagtttaatttttaacggtaataatacttaagttatatttctaaaatttttataagtatctgaccataaagtgtcaagtccacgtgacagtctttggttggtccacgtcattaaattttaatttttatttaaaaattaatttnaatatatcaataaaaaaataacatatgtataatgacttgactctgtgcctacacaaattctagaaatataatttaggtactattaccgtaaattattaaacttaaatatttatctacaaccgaaaattaaacttaaatattaagaattttaccatcaataatacttaaggtttatttggtatgtcgtattataccatattgtattgtatagtattatnttaaattgtattttatgtaatatttttatgtaaaactatatgtggtgttaacttttatgagcacttcaatatataattttttaatataaattaaagtttaacatagtattatatgaaaatataatgtataatacaatacaatacaatacaatacaatgagatattccaaattaactcttaaataataaattaagagaatttaatatatatatatatacnnnnaaaaagttacgtgcgaggcacgtagatcgga

SEQ ID NO: 155138 - DNA, 660 bp, Cannabis sativa
tttaggtcttttatcatttggcttatagtgagttggagaagctgccattacttagtttaattaggaaaacaaaattatgataattaacttaaggaaagaaaggaaagaggtgtgaatagagaactttgtagctccaatctctctctctttttcatgcaacccaaagaccagcaaaggaagggattttgttgctgaaattgtagtgctataacctgtttaaggagattcaatctaaggtaataactcctagcctttcctatttgattttagtaagcaaaagttaggtttaaagcttgattttgggaatttttgggctgtgaatataattgccattctaattagagttctgaagcttattggtaatagattaagttgttagcagctatctttgtgggttgttttaaggttttggcaaggattggatttgataactcaaacctagctctctaatggtgtttttgaaattggtatgaattattgagttttgttggttgggttgagtttatttgggtatatgcaggtactctagcgaaaattatgagatttgggattgaattgaggtgtgggagacggatttttggttcccagtctagaaccggaattccggttcctgggagcccgtggcaaccggtcgaccggttggtcccaggaaccggactt

SEQ ID NO: 155139 - DNA, 568 bp, Cannabis sativa
aaatcatatgttagaattttgggagtgtatagttaaggtgcataggattttatcttgaaactaattcgtaatgagaggaataacttatggagattatatatggtgtcacctgtccacatattagatatgtgggactttaacattccctcaagatagaggctttgctcacgaatcttccacagctccatcacaagaagctctttttagctcactatctccgaatcacaaacaatttttttagttcatctttttagatttatgttttatttagatcggatactcgttagagtttagtttggctttgataccattttagaatttgagagtgtatggttaaggtgcatggagttccacttcaaaattaataagcaataaaagaagtagctcatgcatcttatatatggtgttatcagtccacacattaacaatgtgagactttaacatcataaatcaagataaaaagaatttaaataacttttattagttaataacttaaataataaatataattatttttaattcattaatctttttatttaaaaaattaattttatttcattaattgaaa

SEQ ID NO: 155140 - DNA, 604 bp, Cannabis sativa
cattgataatcatgctactaacacgaacatgttttgagtcaattgaagttctccttatactatatcttatactaaatttaacataaattttaacatgtgccaattaagggagtactttgtggttgaagattaatgttgatgagtgatgagaggagtagttgtatgaatttcacagaaatatccaccttggaataagtgcttatcataactcataaactcataaatagtaaccaaaaaccaaactaaaccgaaaccacactaatagtacacacttcgtactcatctcccacaaaatcacatgtgcaaacacaacattattatttattattatcataaatacttcttcttctttctttctttttctttcaaaccaagaaaagatagaaccttcccaatcttcttcaactttttccccatttttttgtcatcattattatccaatactattatttatgatcactacaacaattaacgttattagaggcggaggagtccgctggtaataatcctttaatccatcggtattttgctttagcggcgggggtccgctggtaataatattaaaattaaaattaacaaatccacacataattatcatccatac

SEQ ID NO: 155141 - DNA, 729 bp, Cannabis sativa
  modified_base (56)..(56): a, c, t, g, unknown or other
cctccagtcattgcttctccgatttctactccaacacctgggtttggtgatcatgntgaatctcattcatccgatcacactttatcgaagtcttcttcttcgaatggtggcccaaatgtcgagaaagctatggtgactttgcccacggtgagttctcgaacaaggtccaaggtatccactcctcaaaaacccgaagtggttctgcctctccatagggaaaaaggtggtgccttcatcttcaagggccaaaaatatcaaagagaatcccccttctgtctcatcttcggattccaaacctgaagaaggaactgaggaggatcacgaatcaaagggcttgcctgattcaagtgtagagtttgtgcccaaagatcaaccctttgctgatgattttgggtctgaaagtgaagaacctgaagctgatcctgtcagtacaaaacctattgttgtccctactgtaattccaaagaaggacaaaggaaaaagacccatggtctttccaagtcctattcttccccagaaaagaaagaggccttctggtatttctcttgaaaactttaagcctcattcttattatttttgttataatgatcatgccagagacatgaaattttatgagaataggaattttaccgttgagaaaaatttaaatgtcattgctcataagccatttggggtttataacatgttgaaagaaagccaatgggtggatactttgattggttttgatgg

SEQ ID NO: 155142 - DNA, 596 bp, Cannabis sativa
aaaaaaaaaaaaaaaaacaaagtgccccaccagcatatgttctatacgcccactaaccactaatctgtcttatatattctatagtcaaacatattacacaatactacatagtaacattttgtaacacaaaatccttagtagaaaaaacccaagaagaagactaaaaataaattacaaaaagaatacaaaatagaagtaaagagcaataacagaatggagtgagtaagagctctaattacatgtcttgttcttccacttgccaaccacctcagatagtgctttagtagaagccccatttggactcagagccttagccgcagcttctttaagatccttcatttggtttctcagttttttaccatcttccccttcgataagggacttaactactttagcaatttcttccctttgaacaataccgttctcactcactttaggccttatggcaactttaatttcatgggtcaacataaaagcgttcattctttgctctgcgtagagaggccaagccacgagtggcaccccactgaccacgctctctagtgtggagttccagccacaatgggaaaggaacccacccgtcgagccatgcctca

SEQ ID NO: 155143 - DNA, 765 bp, Cannabis sativa
atgaatttactcccttatttgtgactttgttaaagaagaatgtttgtatcatcctagtcccacaccaagttcttctaaggacactcgtagcgaggttgggagttatgttccagaaataaatccaaaggagttggttgctgatgtgttacctgaaatgaacactatgatgtcgagtgctgacattatagcaaaaatgcccttcattggtagttttttttatggtccagaccctgcttgctatgttgagggcaatgatgacgtaagagacgaccacaatacagaggtccctgctgctatagttttgaacttgactccactatcgtaccaaataccatccaggccaccgacacggaaaagaatgcctcgtagagaaaattgccatacacttggtactagtagtagtcgtctaggtgaaatagtaatgctagaggaaccactgacagtacaggtcctagtgatgctagaagaaccagtgaagttagggagactaatgatgctagtggtcctagtgatgttagagggaccaatgagactagatttagcgatccattttcttcttcgacaagttacggtaaatttaaggagaaaatctttacaagagaagacattgaggatcatagtcattatatatctatgggtggcacagcaggtggggaattacatgtaggaacattttttagagacaaagagcatttaaagatggttgttggcatgtatgcaatgaagaaagggtttgactactttgttaggaagtccggtactact

SEQ ID NO: 155144 - DNA, 710 bp, Cannabis sativa
atttgaactgttgattagaactctgcgaggtaagtagagaatcctaagcactttagatttatcaaactattaataattaagtgacgtttaggtaatgaaatgaaatggaaaagaaataatttttattttattattttatttggttacattttaaagtattggaatgtcattccaatataatgactatttcatcatttttggtggaatgactattccattttaaaatggaaggaatgaccattccaatacaagataaaaaaaatatttttattcttatatttttattcatcccaactaaacgtcacataaatttatttatttagtctcaattctcaaatgatttagtttaaattgattagagtttgaaaccatgatttcggatggtaaaaaaaacaaccacattagtgcaactctaatggaaattgctataagtgtggctgttaaaaatgtgagtccatataactttaataattattgacttttcattgataatatgaatgttttactgacaggagcaccgatatctactttttctttgattggttactgtgtaaatttaatatttaagaaaataaaaaagagctctaccaattttgctcgctttggagatgcccttaaaattcattaaatattaaacatgtactaaatcatgccccctaaatttttttggccgttaaaaattctctctgaactattaagattgttaaatt

SEQ ID NO: 155145 - DNA, 613 bp, Cannabis sativa
gttgtctgcaatcattgcactaagcgctttgatgacggcgtctttatggcctggcagactaatggccaaaacctcaagctcgacttctatctaaagcctgaggaagttcttgtttgcttctgggagaagaagaagagacttgatgccctgctggaggagcgcaggaggcctcgtcttccaccccgtattgattaagccaaccatcacctgcttttattactatctctctctctctcttttttttcctttttacatttacagtcctttttcccttctttcagacaatttcatcttttttctttaaggggagacaatttaaggcccttccccaggcccttaatatatttttttagagcttgctactgggcctgaacatcttatatttatgtttaaatacatactttgctttgcattttaacttcgttaaacttttggcctgttttacatttgtccgtgtggtatgccttactaccccccctgagtgtcatgaaaattatttttagggcactcagctttacaaatattaatttggaggttgcacatacttatccggtacaaatttactttacagagcataagtttatatttcttgactattggtaatactttcgga

SEQ ID NO: 155146 - DNA, 512 bp, Cannabis sativa
ctattttagaaaatacaaggtccattttgtcatttaaaaaaacacagggtccaattggtaacttttgtaaaacaaagggtccaaaatagtatttacccttttatttttaggaaacccttttattttttattttttatatataaatatttttattattgcaattaagataagcaattttttgttagaaaaaaaaaaaaggcaattttttattttttcttaagagcactcccaacagtttttttattccatcttttaatatatatcataaaaaatttactttttttattttaaattacacaatatattagtttatttaaatacattaacaaaattctattttttaaaaaaaatatattatattttattcattttaaatatataatattaatctatacacatgtccatactaggtagatgttacgtgcctgttaattttattttagtttttaattttttttaatatcataattttaaaattaataatattcaatatagtgataatcattgaaatt

SEQ ID NO: 155147 - DNA, 583 bp, Cannabis sativa
attttttttttattatttttaaatgtctaactaattattttattatatatgcacaaaaattactaattataaaaaaattattataattttcaataaaatgaaaaaaattataaatatgtatgaatttatttgaataaataaatatgatacctatttttggtcattatatatttgacaactatatgcttatttagtttaccacacttatatacaacttttctaactcacaactgttttaacattatatttgccaaacattcagcagtttttttctcacaacacagctacagctgctttattatatttgccaaacattcaataactttttctcacaacacagctactttatctcacagcatagctacagctgtgctaaactgacattaattctttttttttttttttggtttgttgctgtgatcatatagtgtttggagggctttgaatttgagagattaaacaaaaaggcattgagttcatttaattcattaacctaattatctaacaagtttatctttagaacaaaactgtgtgttatcataatcaatgtcgttttggtgatggcattgtcgtttcactataa

SEQ ID NO: 155148 - DNA, 538 bp, Cannabis sativa
  modified_base (363)..(363): a, c, t, g, unknown or other
aataaacttcttattattaataatacataacaataaaataaaataaatatttaataatactcaatatacaatgtaattcctatataagagagaaggcttcagactaatcataattgtcaattacattaatcaccataccatattaatagattattttatttgagacttttaaatttttctttaattatttaatttctctccctataccatattaattctttcatatatatatacaaatatccaatctagctaatttcacgccaaaaaaatgcagatataggaattcatcttttggtaattagcatgtctttgggaggtcactttctaactaattgaagctagcaagtatgaagataataatgntaaatgttaaaattaaaatgagtttatattgttatatatattttggtatagatggaggggttttgttcaataattttggatatttgatgtataaattttggatgttgcaatcatgtaatatatataaatttattgaatatttttttcatgctgctctccagtagaggagttctct

SEQ ID NO: 155149 - DNA, 1235 bp, Cannabis sativa
  modified_base (82)..(86): a, c, t, g, unknown or other
  modified_base (317)..(321): a, c, t, g, unknown or other
  modified_base (955)..(955): a, c, t, g, unknown or other
ctacatattattcttaactttttccacccctatcagatcaaaagatctggttattagataaattcttaataattgttttagnnnnnacaattattcataaacatagaattgaaattataagtgcttatgtagtattaactctttgcagagttaaagatactatagaatttgtatcaataaaaaaatacatacacatacaaacattaaaacatataaatataattggtactagcatactcaagataaagtaaatgaagctcaattcataaatgcaattcattctcaaaataggaaactttattataaaaatctccaannnnnaaggaattgtctacaacaatatgaaaaatagggaataaaattccaaactaataattgaaatccaaattattcttaaaataaacaattaattcaaaaaataaaaaaaattcaagcttcatcttcatcttggactatctccacccatctatccaaccatccgattcaactcgctaagatagcatccgagttcaagcagctggagctgaaataagaagaaaaacaaacaaacatggttagtaggtctagaattaataatccaagtggataataattctctaaaacgcatgagtttatataaaaaaaaataccctgtttctttgttagaaatttaggacattgcggtttccagtggcccttttcattccaatagaagcattttccttttggtatatcaccagtagtagcagcctttttatttttatctgttttcacagcctgaataggtttcttgctattcttccatttcttcttgttctttggtttggaagtagaggcaaagtttgcctcagccttagccaccccattagcattcccagaattatgagctttagatcccttttactgtggtcctccaatcaaattttcaaatatctgaaggtctttaaccaactcgtgaaagtcttgttccttcttnttcatgacataatttgaagtgtaaggcagaaaagctggagttagactattcaagattagactcacttgagttgtctgatccataacagctccatgattctaagcttcttgaaaataacttgccatttggagaaggtgatcacgcacgttctgatgaggaatcatctgtgcattagtgaattcctcgtcgcttcaaagcgagattgaattgatgccatcccgaataggtcagttaactggttcatgatttgtgcagccgtgtcagtgttggcaaaccttgt

SEQ ID NO: 155150 - DNA, 513 bp, Cannabis sativa
cactctttccctacacgaatcgataatttttcgatatattatcgactttaattactaagttaatattttacaagaacagcgcattatcgacatatcatcgacatattgtcgacattacagagttaattatgttttggttccacaatatagttcttatcgacattatcgacatgatgtcgataatctgcgcgattttcgatgtcatatcgataggatgtcgatattttatcgatatgttatcggtaattttgagaaatcggaaaaaattctctttctcaacatataagtagagtaacaaccttattttaaagtagttttgaataataaatacacaacatgttttacaactagtaggtagactacgcctcaaatacgggctttgcatgttgctttgttgtggcctgaaccgcgatataggctgcagtttcgaggtacagttccttttttatcaccagacgggaaacgattctcctgtcttcttctagccttgcttttccttggatgacctattgg

SEQ ID NO: 155151 - DNA, 619 bp, Cannabis sativa
tcattatatatttatgggaaccctcttaaaaacctgtttcgttattgagaagaattttttagactaattgtttttaatatttgtctatgctataattatttaagatattttacaaaatgttaagaaatttgaaataatttataatatagaaagcaatattcaaacagactatttcacacgcgtataaaataaaatagtcacgtgtgcaatacaatgtttgaatcctattttcgacgtgttaaatttttttgaatttcttaaaattttagagtatgtctaactataaacgtacatgattataaaattgactaaaaaattatttcggattccaaaacagataaaaatacatcaatacattttttttaagagggtacattataaaattttcttatatttattatattttcttgactgccaattgataatgatattagaaacttatgtaaatatatcccacatttttcattaaaaaaataaaatttatttaagagcgaagacaattattaagtccaaactaggtctcttcaaaaaaattaacaaaccgtccaacccgaataaatcgcccaaaccaaaccgaataaatcgacaaaaaatttaacccgaataactttacgaaaaa

SEQ ID NO: 155152 - DNA, 535 bp, Cannabis sativa
gcattcaaaaaacgcctttgaggcttagcctccgtcactgtccatgaggcttatgtctcggccttgtgaggcgtacaccttgaggcttaagcctctgaggcgtgtgaggcttacgcctcagctaattgagttattttggacctttttgaaagagtttcattaggcttttttaaagagtttcactgtgtctttttaaaagagtttaagtgagttttttttaaacttttcttggactattttgagttttattttgtaaattttgaaaacccaaacccaaataaaaaaccctaaacattcatcactttccatcatcccttgcacaatactctcctcctctctcccttctcttcacgcttgcaatagcaacaccaacacaaggctcttctctctctctctctcttggaacttggaatatgtcttttaatctttatgtttgaaactttagatttcaaatttatcatttgtctattagttaagattttaattttgaaccttttatgtctttagttatattttaagacttatagctagtaat

SEQ ID NO: 155153 - DNA, 990 bp, Cannabis sativa
  modified_base (831)..(831): a, c, t, g, unknown or other
gctcgagatcattgtttctctatctggccttgccttggaacatatttttcagctcgtctagttttgcctgcacagctggactaacctgctcggcattttggttgatttgaatcacattagtatctttctgagcgggaatttgagcacgggctccgagctgtacgatcatcgtgacaatctgattgtctactcctctccttctgttcagatcactccttaggtcatgagtcgtccccaacctatcgaatacagaagcgcctggctgtctcagcgattgatttacttggttgacaggcggaatagcactgttaacctggttggaactatcaggtatgacctctcctgatgaattactagacaaggtctacccgcctaccgctaggcccacaagccgaacttgtgaccggggatttgacggctaaccatttataatctagggagtattcatcgctggatcttcgtccgtctcacccagggggatgacattcggaggttactgtccgacagtttggtatgctgttcgtatcagcacagtagcttgtcgactacgattttcgatctctgtatgatgagcccttaacgcagccatctctctgtctctccactcggcaaacatgcatctttgttcctcgaacgcgagatttaccacagcacagagttcttcctgatcatgatgtagggtattggtatgaccttgcatgagtccaagagcagcacggaggttttggatcttagtatcatctccaatggctgtttgagtgttgatagcaggcggaacggctgtgttattaatgccctagttggatgctgaactgttattcccagtctctngcacaccaggcgcgatttcatctacaagagttgtcacaccatgacctacgctcggcggctgttcaggattaacaactggcaaaacccttgcatttcctgggttctgcaatgcaggatccaccgtctgtggattttttggatcaaccaggcccctacgag

SEQ ID NO: 155154 - DNA, 693 bp, Cannabis sativa
  modified_base (588)..(588): a, c, t, g, unknown or other
ctcatggttgttctaactttttttctcttacctacaccacagagcacccgtgagtcacatacacacagcaagaaaagtaataaagaaggatacattaaataactaattatatatttcattactacataatgattaaaatataacattaaatagtaggtaaataaccagtcgtataaatataaatagatatgctcacgtatttgcattacctaatcaggcgagcccctgtcataatgcaatatcatatataatatcactgtgccacctaatcaggtgagcctgtgccacaacttggctctaatatatcgcatcgtctaatcagacgaacccatacctatgcccgatactcatcatatgtcactgacgcccatacctacgcccgatacgtcgccaggaagaaacccaacaatgatttcaatctatgccataaccaggcaattttatatcactgacgctcgtacctacacccgatacatcgccaggaatattgaatcacctaatcaggtgagcccgtacctatgctcggtactcatcatttgtcattgatgcctgtacctatgcccgtatcgcatcacctaatcaggtgancccatatattatgtccatagtatcattacattaccaatgcctaatcagacaatcgataatttcagaacatgtcatgccatgtagtacattatacttttcttacct

SEQ ID NO: 155155 - DNA, 992 bp, Cannabis sativa
agcaaccattacagcgactaaattacgcgagtttgtctacaactccataatttgccgatttggcatcccttacaaactcatctcggacaatggaaagtagttcgattgtaaagagatgcagcaattatgtgacgatctgggaattaagaaggcattctccgcagttgcttacccacaaagcaacggacaaactgaagttgttaacaaaataataaagcacacaatcaaagggaaactcgaagaacgtaaggggacttggccagatgagctctcgcaagttctttggtcttacaacacaactcctcgatccacgactggtgaaagacccttctcgctttcctatgggtgcgaggccatggtaccagtcgagattggcgcaggatccctacgaagagatgtgttcaacatctcgcaaaatgaagaaaaacaaccattctacctcgatcttctggaagaaaaacacgatcaggcgtatttaaaaaatgcggcttaccagcggagaaccgcaagatatttcaattccaaggttaaagcaaaagtcctgcgaacaggagacctggtccttcgaagagtaatgccaaataacaaaaacccagcgcatggggtcttcggagataattgggaaggatcatatctcatcgcggaaaagattggtgacgcaacataccggctcgcagcactcgatggtactgcgattccacgagcttggaatggtgaaagcctaaaattctattatcaatagtactcacattatctaaattgtgttcgccttgtacttatacttagtcattttttatatataaaaaaaaatcctaagtatagggggtgtatataccataatgtactattgattatataaaggaaatacttcattcttgttaattcttcaagtttaaaaacaaatttttccaagtcttgtgagattttctacttattacaccaggttgtaattaaagtcgaatagatattaaaacgcgagtacccgtgtactg

SEQ ID NO: 155156 - DNA, 541 bp, Cannabis sativa
ttcataactattgtgcggtctacccaatttactaaaagttctggatgccacataagaatgagtggccccagagtcaaaaaagacagagaaataagagttgttgatcgagagctaacctgttacaactaaaaggctaccctctacatcagcctgagttagagcaaacaccctagctggagcgggtcttgctgcactcttctattcttctttcttaagttgtggagagtctcttttatagtgccctagcataccacactgaaagcacccttaccctctacactcacctagatgatggtttttacaactggggcattccagttaagtatatcgagttttggagctaccttgacgattacctcgcccctggttcccttagaacgtcttggtctgacttgagccaccggatgcagcaggggcctttcttttctggtcagttgttaagccaccacttcccctattaaagcctgaggtaggaggagtaggagccccaccaacaacctgagtccctcgagactcttgggtgcactccactacgccctca

SEQ ID NO: 155157 - DNA, 696 bp, Cannabis sativa
acgttaatattaacgttgtcaaaaatacttcttaattttattaattagtaaaaattaaaatttttgttaaatttttcacttgtgcaaatatcaatttatagggctgaaaaataaaaaaagtgattaattttttttaaaaaaaataatgaaaaatatgatgaaactaatttatagtgaaaatcaaatacattctcttaaatttatttttatttcaatttgcttgggtaagaactaaattagacaatactatttcataattgtaagataactaagaaaattgacaaaatattacagaatactaactttccataattgtctaaaatataaaatgtatatttaacatccatataaatacaagaggcatgatattttagtgacaaagtttaaggagatttttttacaagttaactccatatttgtataatgaacatatattatatttgttaacacagattttcgttaacgaataatgaacatttttttcgtgataaagtaaacacatatatattagaaaactgaaaagaattaataataataataaataataataacgacaccaagttttttacatagttttgtagttaaatctgcatagtccatgagtctatcttattcaatatacttttagatattcaatacagtattataatcagtgatctttttctctcaaagattttccgtccccttttctgtata

SEQ ID NO: 155158 - DNA, 595 bp, Cannabis sativa
aatataactgaatttaattattatatgtatatttttaaaaaataatatatagtataggtatatttataatttttattagctaatttattatatttggccattttttttcaattttttttaaaaagggacatttactaacttagattttaaatttagggtcattttgcatctcaacccgttattttttttattgttccactgatattttaattaaactattttgttgttttacggttgtaaactttgcctaaaatctagtatttttgtaaaaatccctttttactattaataatcagtatttttatcctataagagttgactaacatcaaattttgcccaattttattaaaaaaattacttttaaaaattagtaaatcaaagaaataaattcacaagtatattcaaagttattatattcacaagcacatcttaaaaaataacgaaagaaaaattattattgttgaccgagattttcgacaaccagtaattaaagtggtatgaagtaattaatgaatatgagaagagataatttttaacgtggttgggacattaatgagccttagtccacgagactgtattaatgagagtgttttag

SEQ ID NO: 155159 - DNA, 906 bp, Cannabis sativa
tgtctaaaaagatcattaggtaaggatattactgtccaatgattaataaggacacacatgagtttgtcaacaaatgtgataaatgtcagagattttcacatatacctcgtgtaccaccaaccgaacatagaatgatgacctccccctacccatttgctatatgggggatcgacctaattcgggcattacccactgggcaaggaggagctaagtatgcggtggtagtagtcaacttcttcactaaatagacagaggccgagcccctcgtctccataacttgcaagaaggtccttgactttatcgtcaagaacattatctgtaggtttggaattcccataaagatagtatccgataatggaattcaatttgacggcgacttgttcactgaattctgcgagaggaataaaaatattaaaagcttctcgtcagtatccaggccttaggcaaattgacaagtaaaagctgttaataaaaccttaaagaatactatcaagaagaagttagacgctgcccaaggcagatgggttgacgaactacctcaggtactctaggcccacaaaactaccaagaaaacagccacgggacacactcctttctcgctagcatttggctcggaagtaatgctgcctgttgaagtgaatatatcgactcacggaagagtgttataatcaagaagaaaaccaagaacttttaaaattgtccttaaatctacgtgaggaaaaacgaactgagtcgcaaatcaccaacgctgcataccaaatacaagtcacaaattacttcaacaaaagagtcaagaaaagactgttcaatgttggagatttggtgtcaagacgagtctttgcaaatacgagagatgcatcaggaggagtattcaacccgaactgggagggtccatatgtcatcgaa

SEQ ID NO: 155160 - DNA, 514 bp, Cannabis sativa
catgtattgtatttgttgggctgacaacactcctgctttttattatgtaccacacaatatacacttttgaaaaagagaaagctaaacattcagaacacgtttattgaatttacccagctggaccactacgtagtttacatctctctagaagttgcaatataattttgaaatattgttagttttattatttgattgagataaaattaattaaaaaatgtgtatattgttcagtatgaaaccttgataaaatataaaaactcataagcctcatccacgtaaagatagcattttcgttaagcatattatttagcaccttcaagaatgattatctttattaagggttcagaccagattaattaataccatattcctaccaggcatattcatttcattttcccccttcagtatatatactcatttgcaccatcatatgctatagtcccaatactcaatatcattatatgctatgttggttcggtataaaacttcgataatcagtgttttctatctcaaa

SEQ ID NO: 155161 - DNA, 752 bp, Cannabis sativa
tgcttctagcttgtccatgtcagatgagttaaaattgttgatcatataagatacaacaaatccattatactcaggaggaagactattaagaatgtattgaacccattgttctctacataattcaattcccagcaaatttgctttttggaacttcagattcatcatcaacaaatgttaattaatgcttttaccaggaagcattttcacactatagagtttatttgcaaaggcatttacttggagagggtcggggtgtgggttttccattttgacactacaaatatcaataaacagaaataaatcatttggttctataaattcatacacaagatcagaaaataacaagtataacaaatatgtttgtaaaaataccaaaataaaacatatttaatattttccaaggttttcaacaaactgatatagtgtcccgtttaggtgagagtcaaagatatcattcattgaatagagtagccaactcatctaaaattacaaacattatatcaaccttttattcgatcgaaaagagaatttgacgttgtcccgtttaggcgagagtcaaggtcagtccaatttcatgagcctccaccattgtttcatatttttgtaagtcttactaatattagccaccattagggtgatcaatactaagaataaaatacttacaaataatacttatctttcgagatggtacgtcgttaaattgctaatgaacgttcatccattatggatgattactcactaaaacaagaact

SEQ ID NO: 155162 - DNA, 532 bp, Cannabis sativa
  modified_base (293)..(299): a, c, t, g, unknown or other
  modified_base (475)..(479): a, c, t, g, unknown or other
tcccgcgcgtgcatatgctgctagcagcctccgtgtgaggcatttcacgcctaacacccatgttgtgcgcgccataccatccgcaccaaatgcaacttttttcatggaattaatttcaaattttttgtgtaattttgtatttatatttttatttttcatatttcaaatctaattattagaattaaattaattaagttttttttaattaatttaagatattagtagtttttgaacaagaaaatagatagaaaaaaatctgttattttgcttagttggttatcttatttttaaannnnnnntattttatcttattttaaaatttaaggtcagataatttatattttatattatttaattaatttaataaaatgaccttatttgaaatgtaaaatacgattattttagtctagaaattttaaattgtaacgtgatattttgcaaactttcaaaagtttgttattttatttaaattaannnnnaaaattagaaaaatgatatttatttatcattttatttgattgaatatttaatt

SEQ ID NO: 155163 - DNA, 823 bp, Cannabis sativa
tgtactgaagattctaatttatagctactaaagatgagcatattgatgactaattatagtgaaaatattgaaagcgctgaagccaagtttctaacaagaacagagtaagtaaccgaatgatactatcttaaaatcttataagaggtttgttttaaattttagaattgtgtggtttgttttgaatttatgtgattgtgaagtaagtaaaaattaaatttaaatcaatttattatacaattgaaatataattggtaaggccttctcttagattttacaaacgtaatatattaaatcaagctcttattattaataaattaacaagatgtagaaaatgtatataaaaataatgtcccattaaaataatattgtttaagaaaaaaaaattgaggctgaatttgttttttgttttttttttcggaattgtttaagaaaaataatgtcccattaaaaataagattctttcatttattttattttctttaaaaatagatcataaatatataataatgagaaaaatgcgagtgaaaaaaataaaaaatattttaactatgattattaatgagatcttaaattttaacagaacttagaattattttttataaactattatatatatataactaaagaagtaaaatgaaataagatgttaaaacataaataattataatttgtgaaataacaataaaatttgtgtaaaaaaacattaaagacattctaattattattattactgagatcttaaatatttgtaattgaaaatgtttttactcttgaaaaatatcacaataataatagttgaagatacaaaatttaaacatttaag

SEQ ID NO: 155164 - DNA, 663 bp, Cannabis sativa
tttttttttttgcagcaataattaagtttaactcttgattacaaataaatacttaaattttatttttggctgtaataatacttaaattatatttatttaattctgtaagtatctcagcgttaaatgtgaagttattatgcacgtgtcaattttttattggtatatttaaacttattttttgaaaaaaaaaattaatgatctagaccaatcaaaaattatcacgtagtaatttacttaacgcttaacagctagttacctacataagttttaaaattataatttaaatattattaccattaaaattaaatttaaatatttatttaaaatcgaaaattaaacttaagaatttatacagaaattactttattttttatatataacgataagattttctcttaaagaaaaataaaagaaaaggagaataaaatttcttacacaacaaatttagtaataatacttcttttataattttcacagttagaaactttctttatacattcaaattaataacattgtgatagttaaaactttaatacttatcagaaatagatatgtggatcgaagtaaattagtttttttttttaaaaaaaaaatatatataaaaaaaaacaatcgtcaattaactcttaattaattaaatttaaaattccgtattttaatatt

SEQ ID NO: 155165 - DNA, 714 bp, Cannabis sativa
  modified_base (668)..(679): a, c, t, g, unknown or other
tatctcatgagttgagaatacactgtaatcagaaagtttgttcatcttgtcaaatctataagctcactcttatcctgagtgttgaggctgatctggaaaatatggtgtggattattcatcaagcccataaagctatggattgcatgttcgaatatttatacaaaaagattcaaggatccctgataggaatcaagaagtaaaatccttattccaagtagctagatataatttatgttatactctgttgagatttggggtttatggttcatattagattcaacaatttttttaaaaaaactaaatctaattttgtacttctactagaactctgatatgaaccctaaaaaccaacatcctccttgtccttctcctcgttcttcacccttgtacttttttatcttgaattttctctctgtacttgattttattttctatataagtgtctaacaatggtagccacccttaatgatagatactttcttcttttaaataaagcaagggtacaaaaagagttttaccaaaattcaatttctccacacccactaatttggaccaatagacttcagctgacatcacttaaagttccatgccacctaggcactaagtaaatgaggaaagtccagttgtcttgaactttatattgggaatattttaccaggatctaaatnnnnnnnnnnnnatgttgattaacatcctaaatattaatatctctaa

SEQ ID NO: 155166 - DNA, 654 bp, Cannabis sativa
  modified_base (614)..(616): a, c, t, g, unknown or other
tttttgcaaacttttgacatttttcacaccttcgaacatactccatggagtcttctatcatggttggccagaagaatccttgccttagtatcttcttggataagctttgccccccaacgtgattactgcagaaaccctcatggatttctttcattagtcgttgggcttggtcttgatgtacacattgtagtaggggcattgagtaccctccccgatacatgacactgttaatgattaggtaccagctagccttccttctcattttctttgcctcatttttgttggtaggcagtgtcccttgttctaagtaagcggatatgggggtcatccatgattgagtcgtatcgagtaggagtacttcttctttggtttggatgcttggcttgggtaagtattctattgccacaaggctggccttatctatcttttcactcgttgccaatcttgccaaggcatcagcggtagcattctcttctcgtggtatttgttgaatggtgtacccttctagttgggcaagcatgtcttgtattttgctgaggcaggccatcatcttttcccctctagccatgtactctcccaaaacttggtttacaaccagctgggagtcgctgtannngtctaagtgtctggccttcacctctttcgctagtttca

SEQ ID NO: 155167 - DNA, 510 bp, Cannabis sativa
ccggtagaccggttccccaaccgggattccggttctgagtagaattcctggaagccaaccggtcgaccggttcctagaggcctccctgaaccggaattccgatttagtgcaggaatttttcaaaaatttataactcaaccaattgaaccccaaaccacctaaaactctccagacctgctatttagaccccaaagaacaaatccaaaacaataaaacaaagctttatgcacaattacaaaaactaccattaaagctccaagcattgagttcaaaactcaagcttggttaaaccccactaacatgtatcaaaacctgttttaatctacttaagtaagcataatataattgcagaaaacatccccaaacacaaataacattcacagaaactaattcaacatttcatgattgaaattcaagattttgagatcaaagcttacacttggttaaatccaactatctaacaacaaaatctgtttaaattcactcaaataaacatatataaacctctga

SEQ ID NO: 155168 - DNA, 726 bp, Cannabis sativa
aaatgtttcgggtttgctggagtctaccaccactgctaaaaatcctacacatccactatgtagtagatctctagccctcagcacaaaaataaaagggatctgagaccccagaactgatccaacataaacaaatggatcttcaccttctggttgaaaagtcaccattttccgcttgtagtctacactggctgaatacttggacagaaaatccgtctcaagtataatgtcaaactctattagttccagctctataaggtcaacactcaactccctatcctcgatcctaactggcatagacctaatgcgcctattggagataaccaactccccgacaggcattagggttccaaaccctctttcaagtatatcacaaggcctacccaaaagatcaattacccgtgtagctacatataagcgtgtagctcccgaatcaaataatacagtatacaaagagttgttgacaagaagctgaattgtaacaaaagaaggactggctgcaggatcagcttgggtaatggcaaacacccgagaaggtacaggttttgcctctgacttctgctcttctttcttcgcctgagggaaatccttcttgaaatgctccaccataccgcactgaaagcatgtcttctagttacactcacccgaatgatgtttcttacaacgtgggcactcaaggtaagagtaaccctagcatccacctcggccttggttcccacaaaactgctt

SEQ ID NO: 155169 - DNA, 596 bp, Cannabis sativa
aaacctagaaacttccttatctggagtattgctaagaaggaaatattggatgaaatataacacatatagtttcaaacctagggactcatcctgtccccacccacttcctaagaaagcatcctctatagctttatgatctatggtttttacgccacggaaacaaacctcaattaactgatttgattcctaggaaaacaacagtttgttgcaatcaccaaagcaatcaataccagtgatcaagtaaaactcctcggcactgaaccgtatacaacgaccagcaaccttagcccaaaattcttttggattgggctggtatactttcctcaaaagtaggctatggacaacttgggggtgaaaaacaaagtcaggtatatccaaaaatgaccaaactgggtgtcacggaacatagacaacaaattgacagacaaagtatttttaatgttattaagaatagaaaaattacccgcacaaacacatttcgatctaaataaatccgagggactgtatttgttaacccagacctgcaatttaacagccaaagcaaatataatcaaataacatatgcaagtagccaaactataataaaactacaaaac

SEQ ID NO: 155170 - DNA, 580 bp, Cannabis sativa
gttagttagggtgttacattttagctacttcgtatttatcgtttaaaatggattgatgatgtaggatcatttaaaaaaaatgctacagtgttatgagtagacaaatatgtatatggagattgaataataccttatgatgatttgagtggtctgccatgatgtttgtttgccccgtattgctcatgctcttagcctctgcttcttttatatactctctttttttagaggaaacttgtgttgcttctcctgtactgtagtatgcataatttcatatacaaatatatatatatatatatatatttttttatgaattgtaatgtatttggctgtggataaaaggagtttgttttgtgtatgtgtttatgcagattgaatggaactccatactatgggccataaaagaaaggcagtttcttcaactgtagagagtgtagtttcatctaaatgtgatgacgctccaccttctcgtgattaattatttcctactatctatgaggaagacggggtttacctttatcaggactcagcgagagatcatataatttctggccaagatcttccattgcgttgtcattatgaa

SEQ ID NO: 155171 - DNA, 774 bp, Cannabis sativa
  modified_base (106)..(106): a, c, t, g, unknown or other
atctctcacacacaagaatcacagaatatacacagctggttagataagaatcaattgggtaatcaaacttactatttttagcttaatttccataaataggaaagcnagacaactttccttccaagtttggatacacaaaataaggaaactaaattaaatataccagccgaaaataataataaataataaaatatttttgtcaattaaatatgtcaaaaatagaattaacacattttgtgttatcttcataaagaactgctaatgttgatactactttattaagcgtaattcatatgtctcttgaatatgttatgtcaatgatctcactcccacacattttctacttgcttcataaagtgcaagtatattagcatggtttaaagttgtcttgttaaaaattttgtcaagaaaacctagtgggacaaaatgttagtttttgttatcccaatttttgaacacatgacatgccatgtccatattgggtttttttgccctaaataaaactgattttaatataatcagatttactaatcaataaaagatcaaaaatcatttatattgcatagttcacatgatttctttcacgattatatgtttaatgtataaattctattaaatttagaatatatatagttattcatgattatagtgttgtcaacacagtagaatataatcatgattatatgcttaaaagtttaagtctcatgatttagtacattgaatttatactgacgtgataatcagcgatagaggttacttacaccttggataagt

SEQ ID NO: 155172 - DNA, 567 bp, Cannabis sativa
ttttttttaaattatcccaataatttatgtgcaccaaaaatatacacaaaagaaagaaagaaagaaagaaattgacaatttatatacttcaatgcatgaattattaaaaaaaagtaaaaattcttaacaatcaattttttttatgaatcaagtatgtgtattgctcaaaaacgatttatacaaccttatagcattctctaagtaagagaatctaaatatttataaaactttacaaggtatcaaaccatatttctcacttttggttgctttgttttgggcatatacatgtaattctttttttcactatgtttttcacttttacaattacaatctctacatttgtattggagttctgtcaaaaaatattgtttcttgtacgccatatttcgtaaacaagagctgctatgacaacaactaaaattgacttctttaccttgcttatctttgccctttcttagccaccttatgattctttccaaggtagtagctgccattccccaacttagccaagatttcacattttccaaacatttcgaagagaaggaacactcaaaaaataagtgaggc

SEQ ID NO: 155173 - DNA, 585 bp, Cannabis sativa
  modified_base (543)..(548): a, c, t, g, unknown or other
tctctctctccctctctctctcattcacacacccacctagctattctcaatacttaagatttgccgtctttgattcctactttgtaactttaagggagctatatcagatctcacctatagtgatctgaatagtattatccctcagtatcaatacacctaaaaaggaagtaggtcattacccactaactaagggggccaaacctctataaaaatatctgtgttctttacttttgagttctaattgtgtaacaagtggcaaatatcatattcatatgacctcgctgtcggttgaccatttttcgaggtcaacagtttggtgctttcattaagagcgaatggatatcgtatctgatcaaacgccatggttaacacgagaagaactctggttgcactatctgtatcttcgagtctttctcaagacccacaaactgcagatccttatgttcatgttccaaccaactaggattcctatgaacattgcagatgtggtcaaccctgccaccaccacaggcaccacaaatgtgtgttgggttttatgccctnnnnnnaactcatttcaatataatcagagatcggaagagcgtc

SEQ ID NO: 155174 - DNA, 588 bp, Cannabis sativa
tccaggcataactgccccgacatgtacaatctccatcttcttgctctcacagctgctcaaccttagcctttcccttacctacacatggaaatagcagctgtgagtatacaaagtcagtaagaaaagcataaacaataacatagcaataacctggattataatcagacacccatacccctaatcataaccctatcctcgtgtcccacacggtgctgagtctagaatgttcgtacgacactactattgacaataatatcagcctatactcggttggctagtcatcgtctagccatacagatgtgatactgtcaagtagtacggtactatcaaccgtaatatcagcctatactttgtacgctagtcatactctagacgtaccaatgtgatactgtcaaatagtataaaagccaacatacaaatctaatgtaatcgaacaggctcaactaacatgcacactaaatatgtaaatacatatgcctatcattacactaatcttaccttgtttcagaattcaggtgtgccgaccaacttgaatggaacagctgctcgacgaattataggccactaaatcacattattcctaaaact

SEQ ID NO: 155175 - DNA, 625 bp, Cannabis sativa
tttttatttttacaatttaaattagtttttttatatatatttttacagaaatacacatagcaacctacctaataacaacaacctaaatcgcaactcaaactcacatatataacaattactggagcaaccaccggagcaacccaaactgtaaaaattaaaaaaataaaaataaaaatagtatatgggatgattcccctaattaatatggtagattttaactttttaattattttaattaattatgaaatatatattgcagtgatttttttataatatatgtattttctttaaatcacttaaattgaaataaaaaaaaatataattattgatgactctataaaaagcttatcatatgattttaaaaccgttgttatcacaacatcttatcggtagtcatcactatatttaaagtcgctgtcattaaatactgtattttccaataaatttgctatatacataaaactaatcaaacaataaatttaccactgatcacttttatatataaagtgaatttagaatatatttctttttttaaaaaataccaaataaaatctattaattaataatgagaaattagattaaattgtatctaattatcaattttaaattcaaatagtatgcttta

SEQ ID NO: 155176 - DNA, 518 bp, Cannabis sativa
  modified_base (66)..(80): a, c, t, g, unknown or other
cttatttataactggcccaaatcaggacttgatttttttaaaacaaattagaggttattcttgaannnnnnnnnnnnnnntagaggttctactgtattaataaaggttttttttttataagttttcgtagtatttaaaaaataatttatatatagttattttttatctagctagtttggttttatggggatagtttatagtttatgtttgtagtttgtgccattttttttgctagtttgtgccattttgttttggcaattttgtactatattagttagctagtttcgagtttgttgttagctcgtttacgcatggattcaacctcaaagagtgctattgtagattttcacagataaattttaaattttgcttttaattatattttaataagtttggaggaatttctttctatcattgtttttcgtatcatttatttattaggcaattgagttttgttacattttttgaaaaatagttaatttatttgggatttgatttatttagtttgattaatctct

SEQ ID NO: 155177 - DNA, 910 bp, Cannabis sativa
  modified_base (122)..(123): a, c, t, g, unknown or other
cgtagagttatgcgcggtggcgcttatattggaaatgatatgtgtgagtaactagtaaccgggattagggttatcaccctaaaatcagtggtttaattacctagggttattaccctagtganntatgctgtgtaaatgctatgccatgttatatatatgattatattgagattcagggttatgtgttcaaggcataaccgggttggactcggtaactagaactgagatgaaccgttctaaggccttattgtagttagacgtgtgagcacaatacgtaggtctatgttacatagacataaataggcatgtgagcgtgacatgcaggtttgtgtcacacaagcgtataagaatggcattaatgtttatatagtgtgataaatatgtttatcaatatttatactttcttgttgggcttgggtcacgggtgatctactgtgcaggaaagggtaaatctattactaatcagccatgagtatgggagctggacagtgtatgtacatgatcgggccacactagaccaagcgggttgtggtctaccaatgatgtatttttgtgactctgttttgtcgcctaggtcggctggggaaaacgaacttgtaataacattttgaaaaatactttttttgcgatcccgatacatgaaacttttagtttataaagtttgaattattacaagtttagtttccttccatttgtaattaaagtttaatttccgcactaactttattattaatcctgtttaggggattagggtttcttaagtatcttgggtagtgtgcctaattgttagggtgttacagtaccgttggtaaaagtaggaacttctggcaaagtttgccacatgccgtttgttggaaatattttaccagaatctagatttactaccatgtacgtttcattaacatcctaa

SEQ ID NO: 155178 - DNA, 561 bp, Cannabis sativa
ctctctctctctcgttcactctctgttttagtgtacgaaattagaactcaaaaacctaatttctatcgtgattaaacccaagcaaaaagatcactttgaaccgaagtggaacgattctcattccacaaaaatctcggttgttacggcacggttatacataatcgtatatatgcatatatgcatatatacaaaacaacaacaacgatattctaacgctctgatgcttaggcgcgctacagtcatttttcaaataatatactaccttgctaatcaagggtttttttagaaaatcgtgtcaaatcaaaacttgaataaaattaataaactttataaacatacatatgtatatatattatataaccgagatcccgtgctaaaaacttttataaacattttgaatatattttttttatcaaacctgtggcatagcgactacaaaatatattcctagctgtcccgagaccgaacactccagatttctccaccttgacatgtacaatcattacccgagcttggaactcactcctattcagcttaaacctttcttttacctacacagaa

SEQ ID NO: 155179 - DNA, 1015 bp, Cannabis sativa
taaattaaatattatttatttttgattcatttatttccttccgaactcataatataatacttaatataaaacatagcatacgtgcatcgcacgtagcaatatactagtatataattaatcgggtatttattatttggtgttctcttatctctactttttcttacttcactttttttaaaacaacaaattcagatgtaatcattttgccaacccaacacatttttaagatatgaaattatgctaaatcataaatgatatacttttttttttaataattagaaattttgtcatttaactatttaatttgttccctaaaatatataatttgttaaaaagtatctcataaaatataaaaattacataattatgtctattttgttaggttctatttcttttattgttaaaaattagtatttttatctcctaaactttaattaatatagaattttgcttcttttaataaaaaatttaattttaaaaattataatgttgtattaattatgaaaaaattaatgaaaattattaaaaagtctgataaaaatattaaatttacttaaaaaaaacctaaatcattactaataaatattttcaaattttattttacttataatcacgtatcttaaaaaatcaaaccaaaactatttaaaatttaatacacaatttaaacaaactaagaattttttgaaaaaaaaaaaaatcaagcttatttatatttataaactcatatcttgaaaaataacaaaaataattaaaaatttagtaaaaatataaaattactttgaaaaaaatagaaattaaactaaatttatatttttggagaaaaaaatatacttaaacttgtttccataaaatttagtttttacaaacattgaattttaatatattttttttttatttctgaatagattttttaattaaaaataaataactttaaaatcgcttaattagttttaaaaatttaatcaaggcaaaggattggaaggaggttgttattaaaactgatagtcttacagtg

SEQ ID NO: 155180 - DNA, 613 bp, Cannabis sativa
gaccttaaaatcaagccaaactctaccaaactttccagtatacctgtacaatgcatacacattataatccaaccagaaattcccagaaaaatccaaaagaatctcaacttgccattaaagacctaaacttgagtttcaaaactcaagcttgctcaaattcatcaccatacaccaaaactaacaaccagaacttaaatttaactctaaactagcataaaatcagaaccctaagcaccaacacccctagcaacccctatttcacaaaatcaacacatgaaaccaatttcaaagcttaaaaacacaaagaacaaagagctagggattacctcaacctcaagaactcttgaattcctagctgaattccaaaaattcatagcagaaaagttggttcctcttgctttgggtttggcagaaaaggagaaagagaaagagaaatcctattttttttgtttttcctttaatttttgattttcttcaaatggaaaaaggaaatctaattaatccttgctgaccttagaaattgctaggtgtcactaacataaccagccacctaacactcaaataaaccaaaagaataaattgccctttaacccaaaactaaggtttttcaaaa

SEQ ID NO: 155181 - DNA, 547 bp, Cannabis sativa
tgaagcaagcttcggcttccatgaaggaatgctgaagttgcataaaaatccaagcttagacttcacttgaaaagatcaaaaggagaaagcaccacgggaagtaaggcacacttcaagctgtcctttcattcaggaaggagggtggaagacgtgtcatagcccaatgatctttcttgcacaaaaaaactgcgcatgcgagagtcatgtgtaatttttatggagcaagcttaggctttcgcaaaggaaggttaaggttgaagttgaagttgaagttgcattgcataaaaattcaagcttagacttcacttgaaaagatcattaggagaaagaaccatgaggagtaaggcagacttcaagcagtcctaccatttcaagaaggaggcttgaagacgtgccattccctcagtgatcttttttgcacgaaaaacatcacacatgcttgagtcatgttgaatttttatggagcaagcttcgtcttctgtgaatgaaggcttaagttgttttaaaattcaagcttagactgtagggttttatgccctaaataaaa

SEQ ID NO: 155182 - DNA, 577 bp, Cannabis sativa
ttctataataaaaatagataaaataataggtgaaaaaaattataagatgtcacctcacctactttatactttcctttatattaatatatagatctatagatttacaaaatttatattaaaatttaattccaatatgcacacactaataaattcaaaaaaattataactaattgaacaagattgagatattcaatttcaatcatccatgacaaaataaagtgaatgtaagagtactttatttatagcatagaaatacaaaacacacatcatttgcaaacatgtgggacttttgttaaaacaaaaaagagaaatcacaaaattatactaaattcaataattctaataaaatagatatatttatacattttatattttataaaagttaataatgttatacttatatgtatataaaattataaaccacccaaaataatttcatgaacttattatttttttttattctgcccaatatttagtattaagaatgtgagaatatcacaatctaatttattttttgctaacttttatctgatacgataagcacatgatacaattataataaataatattatgtaaa

SEQ ID NO: 155183 - DNA, 595 bp, Cannabis sativa
  modified_base (384)..(392): a, c, t, g, unknown or other
atgagatctcatcaacatataccagaactatcacgatctttgcttcccttactttgacgaataagcttgaatctgcatgtgtgttgtggtatttttacacacacaagtgtacgtatcgtaacaagtagtaaactcaccaagagtgaggttgatcccacgaggattgtagttaagtactttaaaattaaattcttactactgtttggttaaataaaattaagagagaaaattaaaataagaaagctagtggaagtatgaagcaaataaataaataaaggaaattaacagttaataaaaactagggcttcgatttcaattgtatctattgaatatagcttaatatgattatcttcctattatcaatttctatgcaatagcaggttnnnnnnnnnaatttatagtcttctcagatatataaatctcaatcacatgcaaactttctactctcgtgataaatttaacatgcagtaggcattaaatacagaaaccctataagtcatctaaaccttacaggtactctcgtcctatatcgaaatttagttctatttcactatagcataatcaacactcacttctcagatctcgcatcgaaatc

SEQ ID NO: 155184 - DNA, 582 bp, Cannabis sativa
ttttaggttgaatactcgcaattgctcttcaaacattttcttcttgttattaatattattacatacttttggtgttgcaaattttgctcgacaagagaagttgacttgaattaaatgtttaatgtacgaaacttaatttcgagtataataaggcagttgctcaattttggttccttgaggttcctatttgaggcaatacttcccactattatatttgtttaagtgttaaattgtctttagatataataaggcagtcgcttacttctggttctttgaggtgttgatttcaggtaatacttcctactctgatatttgcgaatttaacttagctgtttcctagcaaaagtggtaaaattatatatgacaatatcatatatgctacccccaactgattaatagatgggacttttgatcacttgttacatgatagaacttttaaagaccaaatatgaaatgaaaaattcttcttttattataataattttgcgctgaggtgtacatggaaattaataaaaaggtaaagaaaaatagaaaggaacctgaccacacaaagtttactgatagtatcggtgcaggtggtca

SEQ ID NO: 155185 - DNA, 609 bp, Cannabis sativa
atttgggataacattagtaaatctgattatattgaaatgggttttaattagggcacaaaacccaacaagggagcctacaagctgggaaggtacaacaagaacatggagctggttctccgacaaagatactggaatggagagcaccttcacaaatactatcagtaaccagcttacagaaatttactccaaagtagcggttctatctactcaacattagagtgcaaaagcgctagcacccacaactcttttaggcatggtctcccactgttcttcaatgttggccttgctttactaggtaagcaggggtagccacttgacatctagaagctaattttttgtagtataggcttatagattcaatttatgtaagttgcacagcaacaaagaccaattaatgaataaatatttatattctgtttattgtgtctatgagccacttgctcacagattaactttttaaattattcttttagttccacatgcgtactacggtaccctcgcaagatagaacctaggaaaagtctatgaaacttggtgaatagcaagtgaccaagagacttgtctgcatggtcacttgggggcactcatactgtacaatgcattgaacta

SEQ ID NO: 155186 - DNA, 773 bp, Cannabis sativa
tacttacccaatttgtatgctcctgactccagaacttcaatcacctgatatggtccttcactgtttggtctgagctcacctaccgtgctgtttttggtgttcaaaaatacccttttgaggaccatatcgcccacaaaaaaatttcgtgctttcacttgcttgttaaagtatcgagctacctttttttgatgagctaccaatttcaggttttctatggttcgcttttcttcgatttcatcaagtgattctgtgaggagtgcatgcttaacttcttagtcatatgtcaatcttctgtgggaaagaggttccagttctacgggcagcatagcttcataactatatgccacggcaaatggagtctgtttggtggctgttttctcggttgtgcggtacgaccataatacttcttcaagttcttttggccaatttcctttagcattttcaagtcgtttctttagagtatctttgagtgtcttattaactgcttcgacttgaccattttctttgggatgtgccactgcggagaaactttttatgatcccatggtttgcacagaaataagtgaaggattgactatcaaattgtttgccattgtctgagactatcttgtacgatattccgaactgacaaattatatttttacaatgaaatcttacactttttgggatgtcatggttgccaacggctcagattctgtccatttggtgaagtaatcaactgcaaccactgcgtactgtactccaccttttctcttgggcaattgtccgaccaag

SEQ ID NO: 155187 - DNA, 1066 bp, Cannabis sativa
ttttttatatctttcatttcgtctttataatggttgttacatgtggctttgcttctccatctccattaccaaaaaaaagtttcaaaaataggtcataaatcagttgctaacaaggctaaagggaaacgtccagtcatgaacgatgatgactccaatttcgcttatcgcgtgggtaaaggtggtcgctgtccagtgaaaaagaagttgaaggtgccttttcctgtaaaatattccaactctgacggccaacctatttttatatctgggcttaaatttgtgctttatttttttaattttttttacaattactaaattatatgtatatttcaaagctttagttatatttatataaattttgaacaatattttaccgataatcatataaaaatttattcacatcattagaatttaaatatttacttacaaatactcacatttttatatcacaccctataaaatatataatcttaattttttttttatgttttaatagttttaataaagaataattgtaatattaagttttattattattttaatttatttataattgataaattcatatcttattattatcattattaatagattataaagttttttaatatgtcatgtcatgcttttcgagcttgtcgtgtgtcgtactcaggggcggagcgagaatgagaaattaaggggagccaaactattttataaatttaagtgacaaatgtttgagaaacatttcataattaaaatttctttcaaaaaaaaacttcatgattaaaattaaaatgcagaatctttttcttgcatatcacaaaaatttatactattttttttttttttgacgatttttcttttttaatatataatactaacaaataactacttaaatatttatttttcatcttgttacaaagtgtagtttttactatatttataactgaaaaaaaaaaaaaaaaaaaatcattttgtggtagttcttgaagtgtaagaataaaaattatcactatacacaattaaaaaatttgaagtagtacttcaaaaaaaattgaagtggtatataaaaatcaattactaagaa

SEQ ID NO: 155188 - DNA, 942 bp, Cannabis sativa
  modified_base (528)..(530): a, c, t, g, unknown or other
caggcttgatgccggccaccaccacaatgtgctccagctgatgagggcaagttaaggtagagtgaagctcgaccgcttcccatcctgtggcacgaggcttatacccctcttgggctacgggacccatcatcacctcttccagggtggccaggcgttttcctcctttcttagaagatttggaacccgatgtagacattttggttctgaaaaagatttaaaaattccagcagtcaggccccataccaaaccctaagtcaaaaagggaatgagggtcccctaaccgctggaaagaggccccctccggacggttgtcaacaagaaagccttagaaggatttcctggacaaaagtcgagtgcaagaatctcacagatggtgacattacacataagcaaagaagggaaaagaaagagaaagggccaaaatcgagaaagacaaagtctcctctatacccttgaaggccatcaggaaaagagcagatgggcctttgaaaaatataatgtgcaaaataagagtgacccaaacaccannnaagagaaatctaaacgtattacgtaaaaactcaaggcgaaaaaatccccagaaacttcgagcattaaacccagaaaaacaaatgaacagtaaagcatgccatgaacacaaacagtaaaatgagggatgcgaaaaacttacataaagtgttggaactgggggttgctgttgatcgatgaagaaatgaagactgacagtaacgaacaaaggttaataagaaatctgtaagtgtttgaaggttttctggtctaagggtttctttctctctggaaaactcgaagaaattcggcgaaaaaatgaaagtaagcaaatgaaggaaaggtggtggcttttataggccaaggtgcatgtggaacaggcgcaattacctaccaatcgaacggttgggaaggcgcacgattcgaattcccaag

SEQ ID NO: 155189 - DNA, 784 bp, Cannabis sativa
aaaaaggcaaaaacatggaagctagttccttatgagcccaacatgaatgtaattggttgcaagtggattcacagggtgaagttgaataaagatgggtctttaaacagatacaagtcaagattagttgccaagggttatttacaagaggctgggatagactttgaggagacatttagtcctgtggttaagcccacaactgttcgaactgtgctatccttggcagttacacaaaactggaatgtatctcagtttgatgttagtaatgcgttcttaaatggaccattgaatgaaacagtatacatgtgtcaacctccaggatttgaagactctactcaccctactcatgtgtgtaagttggaaaaggctctatatggccttaagcaagccccacgtgcgtggaatgataagttgagacaaactctagtctcttggggttttcaaggttctagagcagatagttctttgtttatctatgggacaggagctaatattgtcattttgttggtatatgtcgatgacatattaattacaggtcccaacacaactctcatctccaaactgatctcggatttgaataaatccttctcattaaaagaccttggtcctatacattacttcttaggagttgaggtttatagagatcacacaggcatgtacctgtctcaaacgaaatatatcactgacttgcttgtgaaattgcacatggagggcgcaaaagcaagtcctaatcctactagcaccagtgttaaattgtccttagcagagggggaaccatttgaagaca

SEQ ID NO: 155190 - DNA, 735 bp, Cannabis sativa
agttattatgtggattggattgaatccaaaatataaaatccgcacttagtacagatcgaatgcgctcaaaatatagtgcagaatgaattgcatggttatcgctattgagaatgataaagagaagataaaaaaaaaattcttaaaaaaatgaataatgcaaaaaataaactgtataaaattaacaaatgaaggtgtcacggcttaaattcatgtcacttaacaagagataggataatgtgcattatctctttccaactatatatgtgtactattagctaactagttcatgcaagatttatatatagatagtgttattaaaatatataattaattcaatatttaaaaattttaaatactttgaactaagttgaagaataagcttattatgaatatgtattatttactatttcatgcatgattatataaataatgtaattaaagtaaataattaatttatatctaaaattttaaatacattgaacattataattttaaaaataaattaattaataaaatatgataaaattttgaaattattaaattaattgaaattctaaattaaatataaataaagaaaaagaaaaagaaaaaatattacttctaaaggattgaactcatgacgttttgattgttttaaaaaatacttatattgattattatatgttgaacatattataattttctataagtataattattgttttaaaatagaattaattaaaatatatttttatg

SEQ ID NO: 155191 - DNA, 543 bp, Cannabis sativa
  modified_base (193)..(195): a, c, t, g, unknown or other
agtcgacagactcagtaagaaaagcatataacatatcatataattctgacttgtaactatgcgcccgtacacatatttacaaggcttaacaaatgagtaagaacattcaatattagggtgtagccactataccacatacactacgtacctcactgtacgagtgttagcatagggtttgtttcgtaccctgagnnncactgagtgatataccacacacacacttagtactttcccgtacttgtgccggtatcactgtaatgtactcccaaacaatattcactataccaatgcactatgtaccataactgtacaagtgttggtagtgcaactaacacataagcatgcatatacacttagcacatgtatacactcagatattcatattacatattatacatagttcttaccttctttccaaattcaagtgtgctagctcacctgaacagaaagtcttatgctagatggatgccctaatcacataacgaaaccgggtaaatcacatgatccaaaaccctaatctgagaaacccgaacccacaaccct

SEQ ID NO: 155192 - DNA, 558 bp, Cannabis sativa
tgacgtgacatcacacgatggtgacacgtggaatcaactccatgtacctgctcgcaagaaatatgccgaacagggcaccacatacattcgctcggacagagccctcttagtcgggcagtgagcaatccgcccagcatgccaacacttagcgaattcagctttcgcatcgtgagtcaccgaagaaatccatataactttgggatcagatcacaaagatatggcaagcttatagcccaataaatagtgattcatactcactgggcaaagggtcaaaaaacttatctaagaattcatactcagagatactatagtaagagctctaagaaaaggaaccgttttccttattcttaagtcaatacaaactaagaggattaggctattaccgaactgcccggggctaaacctccataaaattctcgtgtctttatttgatttatcatattatactcatgatatactgtttattgtttacaatttagactcactgtcattggctaaaagcgaggtcaacattttggtactttcattgagagcagaatctaggatcgctctttatct

SEQ ID NO: 155193 - DNA, 584 bp, Cannabis sativa
aaagtagaggagatattttttttcttgattccaaagtgttctatcatcttattctatagaagatgatcccactgcctctgttgtcttgaaacaactgtagaggacaacaccgctaatgttcttagatagaaagtgatagtaccttctcatagtgggagggttttaaggaactcaccctgttataacttggaagacacttgtgatgaaatccattgttagtttaaataagtaatagatggtcagaataaggaactaagaagtaaagctaagagaactatgggtaaaaccattcatatggagtaaccaacagttttctattacaaggacaagaaaggaaattttgaaaataattgtattcaacggactcaacaaaacttcctgttcctagtattataaaggtttgagtttatctaaacctgtggcttatggtcatcctgataatttacttactttagtgcaagcaacttactttagtaagatgctggagaatttttcaaatggctacatctatagaggcttttctacttctagatatagattttatttatctaaggaaaagtttcaactattccagaaaagataaa

SEQ ID NO: 155194 - DNA, 552 bp, Cannabis sativa
  modified_base (33)..(36): a, c, t, g, unknown or other
  modified_base (509)..(521): a, c, t, g, unknown or other
tatgtgagtaattagtaaccgggattagggttnnnnccctaacatgagcggtttaatagcctaaggttattaccctagtgatatatacacggtgttggatgttatgccatgataaatatgttggaataaaggattatgtgtctaagacataattaagctagactcagtaaactagtatcttgagtttaatttttaatgcggtctagggttattaccctagaatattataaaggtaagaaagcaatgatgtatggttatattgctaattaagtgaaggcataagttagggttaataccctcaataagtgttatttcgagcatgccgtaatatgttgtaggaatgattatttagtatgtaaattagggttattaccctaagattctatatgctttggtatttattgaatgcacgcatatatgtcaagagttatgtgcataagacataactgggttatacttagtatattactaagataaaccactgaaagaactgttggaatttattttannnnnnnnnnnnntctactcacaagtatgttgataaacacccta

SEQ ID NO: 155195 - DNA, 639 bp, Cannabis sativa
gataaacatgatcacacatctattcaggtaatcttggaacgtccgattcatataatccatatcaaatatactacgtatccttggcccatcattcaccctgatagtgattcttgtgttacggacattcaagatatgacttgaaggaggatccttcaccttgacggtcatctcaatttccacgatgctttctattactccctgatacttcgaaagcctcagccttctgtttgtaatcagggttgccactttcggtccccttactgacgttaccactagcaggcggattcgatgtcgtgacggtatcctttgcagtctgctcatttattacatattattcagcctcctcaacaattaaggctaactctatcactttcttgtacaaagtgtcatgtgaagtagtaaccttcaagtcccgactgattgtggcattcagtcctctcttcatccactgctcggccttaattatgtcaatacctcccagaaaagtcgaaggttacagcttcacgaaccgctcaaacaaagagttccggtgcggcataacatacatttggttacccaccactggtaaaggagctggtcgtaacccttgattaataggggcagtcggttgccttaatcgtcgcaactcttcttcttgac

SEQ ID NO: 155196 - DNA, 896 bp, Cannabis sativa
cttacatattcttaaaaattttcccctaaactcataatatttgatatttgtgggatatgacacattttataatatccctaaaataccttccatttacattacccctcttttctcctctctttatttcactacactgtcaactatcgggccatatcaaattctattttttttacacatgcaatcgggctccatcgggcccaccatcgggccatatcaaattctatttttttatacatgcatcgggccccattgggtccaccatcgggcccactatcggacctttgtcttcctcaatttttttgtgttaccattggaccggcatcgggcccgacgaaatcaaatcccaaacccaggttttgcccaaatcacatctgacgaaaaaaaaagagagttggtgagggtgagatggtgagagaacaaccgagagagatagaggaagagagagagttgaggtttgaaaatgagaagggtatttttaggtttattgtaaagtggtcatattttttaaattttaaaatgtattagattaggaaaaaaaatttaagatattttatacatattttttcaaattttccttttataatccatattttgcatttttcttaaaatatgcatcatataccttaatattttatctctaaactaatacgtatcaccatcgaaaacatatgactattttttctaaaatccaaaaatacccctctcataactcaaccccatctctctctctcaaccgaaccacacacgacccaaaacccccctcaccaccgcccacaacgtcgacccctcaccaccgtccacaacgctggccccctcccaaatcaaaatcgagcacttctctctcaccacttactgcctacaccgccggcccctttttttgtcattatttttttttg

SEQ ID NO: 155197 - DNA, 690 bp, Cannabis sativa
attgttcttcttcttgcttgcttttctctctcaaaacccaagtaaaaacaatgaatgaaaggagcgagcttggtaaatttttgaaatagtgaagagcggggagaatgattttatgtaaagtctttagttgatggtctttatcttaaacactaatctcaagaaattttctataaataccaacccacaaaaagagatggagagagaaataaaatacatatataaattcttgggaatgggaatcatgtatgtgggttgtgcccactttcaaacttaagtaaaaaataattgttaaaaaagtgatataagtcattaataaactaaacacatatataaatttttaaaaatgggattaggtgaatgagttggagttaaattttaaatttaagtaaaaaataaaataaaaaatctgacatgaaagtaacataaaagtcatcaatccatttttgtaaactttttttatatatagatattatgttaaattaaataggcttactcaaaattttttttttaaaaaaatttatatacagtaaaaatgtagtaatttgtgtgtaacatgggaaaaattaatataaggtgtaaatttcccattaaataaacaagagaaaaaaaatgagcagttaccctaaaaaatggttaaggaagaatagttttagtgtaaacattaaaaaagagaaattataaaaaaggaaa

SEQ ID NO: 155198 - DNA, 665 bp, Cannabis sativa
ggcggaatccgccggtattaattaatgccggcggtctcctctattattaccggcgggtggctccgccggtaataccaaaatttgttgtagtgccaccactgagaatgaatacatagcttgcataaaagtcattaaggaaacactttggctaaaaggattaactagagaacttggtgcaaaccaaagttctatcacagtatttagtgatacacaaagtgcattacactttaaacgaaacatattgatgttaagctacattttataagaaatgtcatagcaaatgggaaggtgaagctggagataatctcaacagcagagaactcatctgatatgcttacaaaatccatgccatcagccaagttcaatcattatctcaagtttctctcagtgaactctaatgactacacttcaactactcatggctcgtaaagattaaaggtgcaagaattatggttcaaggtggaaaattgttaaataggtgtaatccctaattctagatggcatttcaacttgtaccagacagttagtagttagtggtaatcaaagtaaagtttgttagagttgttaactaactgttaaccactctttcttctcttgtttcggttctatccctaaagctatataaatatatatatatatgggtggtgactattcaatggttacat

SEQ ID NO: 155199 - DNA, 534 bp, Cannabis sativa
ccttataataagaaccaatcaattcaatcttatatgatatatgatatatgatatatcttattaaaattatttgtctataaaattcaactctctaaatcttgaaatgccaaagttagttatagactttagaagttatgcataatatatatttgattaatactaatttgtatcactactgcaaaaaactataaaagaaaaaaaaaaaaaaaaagagctttataggctttttttttggcataaggtaagggtttgaaaaaatttgtgaccgacgttgttccataagtcgctaaagggggtgcgagataattgtagccataggatctctacggcgtcaattattatgaaataaccgtagccatatatagtccttatgacgtcgattattatcgaataactgataccattttgtgtaatatttaattttttttttaaatttttacttaaaatctaatttttttttcatatatatgttctcatatctgaattatatatatatttcatatttaattttttttataaatattttttattatt

SEQ ID NO: 155200 - DNA, 650 bp, Cannabis sativa
ccgtgtctgcatatatccgctcttggccagctcagatccacccttcgaatgttcaggcctctctgagcttcctccatgagaatctttggacttcgcagctttcaaagcagaagggtcaacgacagttagctcctcagaaagatcaataacctccttggttggtgccttttccttgaatggggttgcctctccacccttagatctcttggtcggaggagatgaacttgagcttcctccaactctcttcttcagagcatcgagcatcttttgagacatgtctgcacgaaataaaagcaacatgattagaagaaaaaaggcatcaaaagtataaaagcatgataatcaagaagtttaaaaacaagacggagtatcctgtgcttcgtgagaagcatttgttggagcaagactcgaaagttcatcatcacctaacaagtctcttatctctgccaagacggccttcccttttcctagtacgggagaaggtggccgagcaagtgagctgggctccctaattcgaatggcatgttcaacgggcctggctgggccggaactttcttcctccttttgagcggaatcacctgctcttccccagcctcatcttcaggattcaaaggctcatgagcatactgtttggcccttgcacctccctt

SEQ ID NO: 155201 - DNA, 703 bp, Cannabis sativa
tgtgcaggaaaggataaatctatctcagatcatccatgagtgcgagagttgggcgatgtatgtacatgttcgggccacactagaccaagcagattgggtctgctagtgatgaacttttgaaactctaattttgccgcttaggtcagctagtgaaaaggcttgtaatattttgtaaaatatttttgagatcccgagacatgtaatttttgattgtaaagttaagtttattacaacttttattttcactctcttttcaattaaattttaaattacccgcgcttatctttctagtaatcccatttaggggattagggtttcttcatcaccttaggtagtgtgcctatttcttagggcgttatagtttggtatcaaagagccaaggtttttaaattccaggtcctggtcttgttcctgggtcccgatgcgcttccaattttggttccagtttcaagtcacggggtacaagttcgggtcgagtttgggtccaagtttgggttcgggtcctcatttgggtctggggcaaggttcaggtttgggtttcggtctcggttagggtctgaggctgggtccgattccgggttcggtctaggtcccggtcccggtcccattcaaagatcccagtccagttccagtttaagtttcagttttggttcccgagtgtgggtatgggtcttggtatgtgtccgggtcttagtttgagttc

SEQ ID NO: 155202 - DNA, 844 bp, Cannabis sativa
aaggtttttccaagattgcaatgctgttatctaagttaactaaaaagaaccagcagtttatatggtcagataagtgtgagaagagctttcaagagttgaaacaacgattgattacaactcctgttttagccttgccatctgatcaagagaagtttgtggtgtattgcgatgcgtcgaggcagggtttgggctgtgtgctaatgcaggcagattaaggtaagcttattcttcacgacagttgaaagattatgagcagcgctatccaactcatgacctggaacttgctgcagtggtgtttgccttgaaaatttgtcgacactacttatatggtgagtggtgtgagatctatactgaccacaaatgtcttaagtactttttcactcagaaggatctgaacatgagacaaaggaggtaattagagctagtgaaggactatgactgtgaaatcctgtatcatcctggtaaggcaaatgttgtggcagatgccttaagccagaaaggacctgattagattttcaataaggtaatgatttctcctcaattagcctcagagatgtctagggcaaacattgaatttgtgattgagagattgcataatttgacacttcaattagatttgttggaaagaatcaaagtggcacaactagaagatcctgaactgtttaagttcgaaaagatgtcttaacaggcaaagctaaggacttttcaatctctgacagtggaatgctacggttcaaagcaggagtgtgtgcccccgaataacactgagcttaagaaagagattctagatgaagctcacactaccccttactcactgcacccaggaaccaccaaaatgtatcaa

SEQ ID NO: 155203 - DNA, 526 bp, Cannabis sativa
tagtattgaaaatgtataactaattcatgatatcagtatttcttttactaaacttacgtaatcagtagtttgagttaatatgttgtaatgtataattaatatcatggatccctattataatattaatgtgttatgttgttggttaaaaaaaatgtcataaattattattattattattattatattaggtcagtacatttcacctaatggttcactagtgtgtggtcttatcagtagtactatatattctcattttagctaatataacctacaactttatgtattatataactttttgctttactttcaacacaataagaacaaagtgacatgcatgaattgaatagcctttgaatgacattaaagtataaataaaaaataaaataaaaacggtcatattctttgcagaaacaaaatcactttatttaatcactttatataattcttaacatgggcatctatctctcctctaataaatttgtcatgcatagcaaacattgggtcatgctgttggaaattattttac

SEQ ID NO: 155204 - DNA, 624 bp, Cannabis sativa
ttatttattttctaatttctaataatgtaatattatacaatacaatttaatacaatattccaaacaaatcctaataatatattttataaactttttcatgtattatttattttctaatttctaatactttatgtcgcctaataagttaatttttatataataattagttttgtttcttattgttttcattctctagctactttcatgttttgtaaaatgtttggggaaaaattaaaggatacttttttttttttgtatattaatcaaatttatctataaataaaatttaattcaaatatatatacctctttctatgagtattgtactgaaattattctcatatatatcctcacataactaagacacaatggatcaagtataatatagattgtgttctttggtgatagacgtgtatgtttgtgggaaagttggggcaaaattttaattagagaagaataaagactattatgaagtgatgggagtaaaattggaataattgaaacaagagataaatgtaatatattttgaaagatatggtaaaaattaaagacatcaattttaaaaaaatatatgtattgtaattttttcaaatatttgagttatatatatttttagttttgatat

SEQ ID NO: 155205 - DNA, 618 bp, Cannabis sativa
aaggccatctttcacatcttaaaaagtcctaatgcttatttttcaaaaatataggaaaaagtaaaaattaattaataaataacataaaattaaatatatttttaaaaggcacattcttatttcttatttttgtcaaaaaaatagtaagtataaaataccacatagtgtaagagcaaacctcatgtatctcccaagaactatttatgaaatatatatatatagtaaaataatgattaataataataataagtgataaattaactaagaaaattgaagataatgttatttgtctttcactaatcgttgatgttgtactttctatgctttcctttatatatatatagatgacaagtttatataaagtatatggtttgtattatatctgaacaacaaacaatgaaatctctcctatgccaaataatctaataaataggacaatattagtagtgaaaaaggcacccaaacataaaaatgtgcctagagattaaatctgcaaaattttataataataaaaagagtaattagcggcataagtacctaaaattttatgtttgtaagcagcataaactcaatatttatttttagcggcataaatacccaatgtttgtaaaactgtaa

SEQ ID NO: 155206 - DNA, 707 bp, Cannabis sativa
tgactagaaccgatcttggtcaaagttactcgttggttacaaatcatcactatcaggtatcaatcatcgttacaagttcgtttccataatgactaggggcgctttaggatggcacgtgcgatcctttatgcatccccaatcatcccgtcgtgactactagtggattcactatagttgactagaaccgatttcggtcaaagttactcgtcggttacaaatcatcactatcgggtatcaatcgtcattataagttcgtttccataatgattgggggcattttaggaaggtacatgcaatctgttattcatccctgattttcccagcatgactactagtggattcattatagttgactagaaccgatcttggtcaaagttactcgttggttgcaaatcatcactatagggtatcaatcatcattgaaagtccatttccataatgattgggggcgttttagaaaggcatgcgtgatccgttattcatcctactagtggattcactatagttgactagaaccaatcttggtcaaagttattcgttaattacaaatcatcactatcggttatccatcattgttgcaagtgcgttaccataatgactaggggcattttaggaaggcacgtgcgatccattattcatccccgatcatcccggcgagactactagtggattcactatagttcactagaaccgatcttggtcaaagt

SEQ ID NO: 155207 - DNA, 871 bp, Cannabis sativa
  modified_base (668)..(669): a, c, t, g, unknown or other
caggcaaggaagaaagcataccagtaagcaaccccgagctggtacaaacacctcaaccaagtaacagtgaagataagctgacctggaaactacatgtagacgggtcaggtacagatcacctatctggtacaggaattgcccttgtcacgcctggggggcaacacctgcacactacagtcaagtttgggttcaaagcatataataacgaagccgagtatgaacctctaattactggcttgaaactagcccgagagatgaaagccgaacacatggaaatctgcagtgattcacagcttgtggtaaatcatgtatccggagaatgcgaggctcggggagaaaagatgattgcatatctgagcaaaatacatgacctgctcgcacaattcaagagctacggtctcaggcaaattccaagggaagaaaacacaactgtagacacgttagctcaattggcaagcagtaatgtaagtgataaggcgaacttggttcctatccagttccttgaagatcctagcatcaccggcacggaagaagtctaaatgatttatacttccccaaactgtatgacaccgatagccgcctacctcaacactggggaactccccgataatcggaatgaagctcgaaagatgagaaggaaggttgtacggtatatcatagtagagggnnttatgtacagaagaggattctcaatgccattgctaaaatgttttactcaagaagaagctacgcgactcttatctgaggtgcccgacggattttgtggaaatcatgccgccgggcaaagtttatctaagaaaattctaagccaaggttatttttggccaacgatgattgaagattcaaaacctatgttaagaaatgtgacaaa

SEQ ID NO: 155208 - DNA, 624 bp, Cannabis sativa
aagctctgggtcgtaaaacttgaaaacttttctcaaatcgtttatgctctcctagatgtgcctgtattaaattgttaagtattagtgtcttataataactttactaaaatttgatatataaggttaattagattaatgaagagtatacatcattccaaacaacattccctggttgcctatgaagccacacaatgcaacctgctgcaaatcctctccagattatttgatctaggtacgcggtgttatgaatccccccttaggcacatgaattgctattatatcacgtttacctttgaggttcagaaattcaacaaccatccatttcagcgatttagggatcaaatccatgacctttcccgagaataattcatcttcttcatcaagacaaccttgtggagaaaggatgggagctttcccctttgacgcatcacgtcttgaaggcggttgagcgagtggaccctatacaaaacacaccataaaatataaatttgatccaaattctacctttcggaagcataacgcctgtaattgaatgccccctaaaattttaaacatgcctgtataatgacaaataacacatatttaacagttatttattcatccatcccaccgcagcacatatat

SEQ ID NO: 155209 - DNA, 677 bp, Cannabis sativa
agaaattagtttcttttcttccagaatcttagtgactcacgaaatgtaagaattcgtgtttatagagatctaagattagagtactttatgaagcactgagattatggggttatggtaatgtgtggattagagtgttttatgaagcaccgaaggtgagtatttataatgatgtatgttcagggtgttgtatgaaacacagagattgttgattatgaatagctataaatatacttgattatgtaataagtgtgctctcatagacgtcaagttatttatgcaccttgaatgtgtaagacctaatggtatgtatattacattgtaatgaattttgctagcactttctataattttatttagtagcttttcttgttgagtcattgtgactcacgggtgcttcgtggtgcaggtaaggaagttagaagttgtgttcggccatgagtcagaggtctcctagcaaagtacatatcagccgtggggtcttggcttctgggaaacaggattgaattcttttctatgttttgaaatgtaacctattgtaaaaaaattcttataaacaagggatccagtattatggtgtacttagtatataagttttatttcaatttaatcaaggtaaaagtttttaattaaaccatactttttctaaactaatagattagtaagaaataagtttgtaa

SEQ ID NO: 155210 - DNA, 840 bp, Cannabis sativa
  modified_base (34)..(41): a, c, t, g, unknown or other
ttcaatacaactcaaaattggacgattcaagatnnnnnnnnaagctaagaacgagatctaaaactttcatgctaagctccaactccagttctgcttctaaagttgccaaaatttgaaattaagttctgccttgtaaaaccgagctcgccagcttctactattttccaccaaaatatactaataaaaatctactccataagcttaattatcaaactattctccactaatgtaattacacacaatcttaagatcaataggactttataggcttatagtgtaagactagggtgaaatgtagatagagaaggttaatttagactcaaatcataccatatatatcaaataattctcatttgtattccccaatcactttcctcaacaattcaatcttgtatttttttttccttcataaaacttactatttccccacacttaaattgttgcaagtattcatatatttttcaacatatttcttatcgtttttttttaagttttttaaatgaaatacttacaacttacaaagagaatagtaattattatcttcatcatcacataaccatcaatattttttcctcaacagaggtctcacacctttataaatacataaaacttcaatatactatggtgtgaaaaatgatgaataaggattttttttagactcaaaggttattgtatagggttaaaaagaaaaaacaaaaatgtcaacatttatgctcaaattgggtaaaactagagatttcacaaatatgataggcttgaaaagctcaaccgatcccaaaaaaaattgtctatatcatatcttataatcatgtgtaatttatcgatttcgcctcaaatgat

SEQ ID NO: 155211 - DNA, 536 bp, Cannabis sativa
aattgaaaaaatagggtcattttttagtgaaaatgtgttgttcttggttgattttcttttcagacaatttttagttcttttatgtttgtaggtattatatttgttttatattatggaactggttataaatttttaggatatttgacattcaccattataatatgttctttttttatgttttgtatcagcatcagtgttatgttttttcaattaattatatttttttataaaggcgtacaactatagagaaactattatgcaactatatacaaactaatttcagtgttcagcatacttgtaatttaaattgtgtcatgttacctcaatgtatttcttactgttatggaacttctttcttctcattattaatcaacttttataaattcatatccgactttttaaaatttgttatattgaaattcttttcgtaataaaacattaacaagtgtcaaaattgtcatgaaactattatgcaactactattaaactatttaaactttgccaaatcatagcagtatatcaaatataacatatca

SEQ ID NO: 155212 - DNA, 742 bp, Cannabis sativa
  modified_base (645)..(645): a, c, t, g, unknown or other
  modified_base (702)..(715): a, c, t, g, unknown or other
agttaaacatcgttgaagcatctcccattcgaacaaatcatgacgaatggtttgtccaatcgatcaatgaaccatctgcatcgtcctcctcatttttatctgtggggaaccagtcccgataatcttaacttcgatcagcctaaatctgtcgcgaacttatttgttttttttcgggtctgcgtttttcaatttttatttgaaattgtttttttggatgatggagtatttgtatagatcgagaataatctcgagcactaattttgtttgtttcaatattgttcataagtttttatttgtgaagctactggaaacataagaattcaagaattcagttaaggttttttaagaaaaaaaaatagaaataataaatatattttaggtgtcctaaaattaaacccaactttttggatgaacccagatttagaaagtgtggtaaatcgcaagaagatgaaaattaaaatgaaaaaagaattgatttatttttcctatttcttagttttagataatttttatttcttaaattattattttccaagaaaataaattggccaataggacatcaacacgtgtcactctaattaataactaacaacacagcgaagtggataattagatcgacatttaaggcgtttggttgggaggaangaaaatataggaataggaatggaaatgggaataggaataggaatggaataaaatttnnnnnnnnnnnnnnaaattgataaaaaaataattaaatttt

SEQ ID NO: 155213 - DNA, 532 bp, Cannabis sativa
cagaccttcccaattggtggatagtttccctgctcgagactctttgaaattctggaagactttccttagaactagctcccccgagagaaatttcctgggtttaacctttttattgtactgccttgccaccgcaaaacagtagttttgtatccgggataaagcgcattctcttctttcttcgacatcgtcggctgcttgtagcctaaggaaagtgttgtcctcgtcggttagttcggcttgcgaagtgggtacttgcatctccgtcgagataactgcttccatcccgtatactatcgaaaacggggtttcacctgtgctagtgcgtggcgtctttcggttggcccataatactccaggcaattcttgggcccatcttcctttagctttttcaagtcgcttcttaatattatttatgatgactttatttgacgactctgcttgaccattgctttgtggatagcgcggcgtcgagaatatgaatttaattttccattgttcacagaagtttctgaacttgtggctgatgaattgg

SEQ ID NO: 155214 - DNA, 779 bp, Cannabis sativa
  modified_base (161)..(164): a, c, t, g, unknown or other
agtccagacaataattgtgtctttgcaggcggaatgtaccgtttgacagactgtttattaggcccctttgggtttatcggtggctgagttggtggagccaaatgatctgttgaaactttcatctttcctttcatctacatcaaacaattaattacaatttnnnnatataataatattgacagcctaagatgcaattttaaggtttttgtaataaattattagcattgaagagtttagaaaacataaagtcataaatcataatagatttgttttctcccgaggttaaagccttaaaatacttacaaaactagctttgaatagatcatggccacaaaatcttcaccaatcactacaagaaaaccctcttttgcctgcgtatttttgcgctgacaaaggtacactaactgcgccggcaaagcttatctgggaagcttggtcggtaaaagactttttaccggcgcgtagagtaaatgcgccggtaaaacttcctttaccggcgagaaatcacgccggtgaaaaagaagcggtgatgttaaaaaatgcccttgtccgctatgaacctgctttgataagcttttgccggcgcaatactgcaccgacaaagctattggcgccaatctgacggttggcgccaatagttttggccactttttaccggcgcaggaatgcgccgacaaaagtaattattttgttttaaaaaaaattaattaattatatttaattaattacaatattaattaattaaatataattaattaattttttttaaataattataa

SEQ ID NO: 155215 - DNA, 604 bp, Cannabis sativa
cgacaatgtcaattccaacgaatttcccagagtttactgtcggtactgaaaaagtcaccggagtagctgccggtgtattagtcgtcagagttgctaccaacgcagaaaagtcgtcaaaattaccattgtcgtcagaaaaatcaccggaaaaataccaaaaaactagtttctttatcaagaaaccagaaactagtttcttggtaattttttcggcgattatgccaattctgatgacttttttcgaagtttgttgtcagtgccggaaaagtcgtcggagtagctgctagcgtcagaattggcattgtcaacggaaaaattaccaagaaacaggtttcttagaaaccggtttcttagaaaacggtttcttagaaaccggtttcttggtgaagaaaccgatttctttgtaaagaaaccggtttcttggtaattttttcagtgattttttcggagacaatgccaattctgacaaattttccagggccggcagcaattccgacgacttttccggcaccgaccgctactccggcgacttttccggcaccggcggcaaactccgctgactttttcggcatcaatgacaaataaaacttcctaaacaaataaa

SEQ ID NO: 155216 - DNA, 573 bp, Cannabis sativa
aattttattttgaatggtttgtctgatgatttgtatgattattataattttaaaacacttccagttgtcttcaagataaaacaggccacttgcatactgtattagatccccgttgaattgtagagaaccgttgaatacaccctcaaaatatgatatcacagatggagttctttgttttttatttttgaggaaattgtgtttgttttttaggtatgaaaataatgtaattctcctattagttcaatctcattctcgggcagtgtcacgaacgtctaaaagagagcgacctagtttgcgactcaacctaaaaatttcatttggtaatatcgttgcacttttattttcagtagcagtacttacaacaattttaagacattattattgccatgactactatcgatgatgttaacccggaaactttccatggtgacatggacatcaatatttgacacatggcaagaaggatgacacagagttgagtagacctaaatcatagcagttgacctaggaggggaccctagccctgcgcccatattgacttcgagagccccgggatggaagtttggactttaa

SEQ ID NO: 155217 - DNA, 542 bp, Cannabis sativa
cttgccacgtaacatccacctagttttaaaatataaggtgtgtttaaatattaattaatattataaattattcttattaattcaatgttttgaaaatgagtattaattacatgaaaaaatattaataatctaaaaatagtaagattatgtaattatacacaattgtcagactatgaaaattagaaagtataataacaagagtcctgaaatattacctctaattatacgttcaattatatacttaattaaacaaatgcgcctaaccttataattactccaaatcaaataagtacacttaattcgaaataggctttccaatgtaaaaagtaataaaagtaatgtaatagattacaataatgtaaaattgattacattataaattacattaccattaccataacatgggccattccaaatcaaagctcaccaaaatttaagtatttcaaccactatacaaagaaaaactacgtacatttagtgataatcttttagtcacaacataaattttttaggctaattaggattttttccccctgaacttt

SEQ ID NO: 155218 - DNA, 669 bp, Cannabis sativa
  modified_base (275)..(279): a, c, t, g, unknown or other
aatgtaaaagggaaatttacactctatattatttttctaattttattttaattttactgtcactcacgcgttttgttttacttttttactgtccaatttattacactatatgccgattttgaataaaaagttttattattttattttaaggaacgtggcagcatatgtatattataatgcatttttagcatttttaaagttttgtaaaatgtgtaatttgattgctctttcttgttttgtcacttttgtgacaatttctttcttttttttttctnnnnnttttttttaaaaaaaaaattgatgatgaaaaactcatataacttacaatacacgtgtgttaaacttattttcatcccatttctctttctctctctctcctctgtcttttttgtatattgatgatgtatcttttttttttactctcttattcttcaagttctctctctccatctccattaacatacaagtttttttattttttattttttgttcagttattcttttaatcttcttttcatatttttttctttagtttttgaaattttcaatcacatttttggggaagataagagtgtgatttttttgttctgatttttcgagatttgagtttgcaaataacctctattgcatctggtgttgaggctatgcagaagatggttaatttttttt

SEQ ID NO: 155219 - DNA, 715 bp, Cannabis sativa
ttggaaagataaaaaatagatctaaaacttttatgttttgactttgtccaaaatctgatcagaacatagttgaattcagacttaaagtttcagctttatactatttcaaaattttttctattttatagatcactgttttccgaaatttatccaatttatacatcacaagtgtagaaacctaaaatcaaagaaaacaagcataattttattccaaaaataataataaagaagaaaaacaactataaaatgtgacccgaaacttaggctaaaaatagcttaacacaaatagtatactaagaaagaaatatagatatcaatgggaaaaaaaattgtagaaacatactgggagaaggtacactaataatgtgtaagtatcaagtgtactccaacttctaaactttgtgacaagaaactacatattgaccatttgaactattcaaattatgttgatccttccaattagatgtgttcatcaaactattatagctgaatccttgacaatgattatgaccttccttacaactttgttataagttatttatttatttgaaactttttatgccgtactattttttggtgttgcgatgcggtttaagagcatctccaaggagtactttaaatttgatgttacactattatcaaatttagtgttaaaaattatcttctctccaaccataacaccaaaaattacactaaaaaatattttttattatta

SEQ ID NO: 155220 - DNA, 757 bp, Cannabis sativa
aagaagcttcttattgacctctcccagctccatccgaacaaccccaagttgaacccttgcttcatcgacgtccttcctggccaagtccacttctgcccgtctagtgttggaaatggcagcattcttagaggcaaccgacttagctcgagaataagcataagccatctttagaccggtttgtacagagaaagaatattaaaatctaaactaagtgaagaaggacaaaaagaaactatcagaaagggcttacctttgaaagctccttcagaactcctcccatcaccagctctagagaaaggtcattgtctgccccagccagcaactcgttcacctcaggaactgaccgagtcacatagtgagtgagcatttctctgcctcttttggtctctagatgtagtaccggaggtggggcaggggccttgatctactcgaatttgcttctaaccaactcggatccgcccctcgcctgctctggcgtgtttgagcttcctcctcgagaatccttggacttagtcatttttgggacaggagggtctacaatagtttattcctgggagagcttaataaccacttcagctggtgcgttctctctagacggggttgtctcaccgcccttggacttcttagccggaggagataagcacgagcttcctcccactctcttcttcagagcctcacgcattttctgagacttgtctgcatgaaatgaaagtaacatggttagaaaaaagcatgagaaatatgaaggcataataat

SEQ ID NO: 155221 - DNA, 546 bp, Cannabis sativa
cttaccaatccaaaccaagggaaccctgttgattgttacgggcaattatcataagtgattctttagtgtgagtattatcccttgtaaatggtgatctgagttggatcatacatattattaattttatacattttttgtttctccattgaccttttttctttgtctccacaggaatagacataaatcttgtgagcgatcttagaggtcctcctcaggctaagaaggaatcccggaagaaagttggcatgattttggatggatccgggagggaagttggcgtggtttctatcagagaatacagccaactcaagacccaaacttgcaccagaagacttttgtgccaacctctttctggtatcgaggaattccttgaggctgggaataaggtctcagctgtaggaaatgggatcttctgatgaggggaatgaggtctgtgtagaggccaaggctctctacatgtagacggtctttctcgatatacgtatagccggtctttctccaaactatatgatgagtaccgagtgtaggtacgggctcacctgatta

SEQ ID NO: 155222 - DNA, 806 bp, Cannabis sativa
  modified_base (768)..(774): a, c, t, g, unknown or other
attacacaaaattatactaacttctactttggtctatttctcttgctgaatttctaacatgtttcttgtagtactgcttttatctatttcaggtattttgagtgcatgcgccgccaagggcaagcagttgtattgcccgttgatcttgaaatcgagaagacttgtaggagaaacaggaggaacaaaaggcaagagagagtttcagcacttgctgaaacaccagatctcatggctgacaacgctaatgttgtgaataatggaggaaacaacggtaataacggaggtgccgttgaagatcaagctaagggccgtagcttgagagattacatactcccaactcttacgggagttcagtcatatatcaggccaccggcagtggattgtaacaacttcgaaatcaagcctgccatactacaaatggtgcagtcttcagtctagtttggtggactcccttctgaagaccccaatttgcatctgtcaaatttcatggagttatgtcagactttcaaagtcaatggggttagtgatgacgccatccgattgagactgtttccattctcacttagagaaaaagccaagagctggttaatctccttacgaccaaattctattgctacatgggatgatttggctactaaatttctgtctaagttctttccccaagcaaaatctgctaagctgagaggagagattaataatttctgtcaataagagaatgagtctctccatgagtcttgggagaggttcaaggatttaatcagaaagtgnnnnnnncatggtattgagaagtggatgctggttcacaa

SEQ ID NO: 155223 - DNA, 850 bp, Cannabis sativa
agcatctctaccgaaactaagttcaattcatccaagtccttttgcaaggccaatttcgctaaggcatcagtgttggagttttgttctctcggaattttttcgattttaaagtaatcgaatctttccaagttcttccgaactttctttaaatactatgccatttttaaacctttggcctggtattccctgaggacttggttcacgatcagcggcaaatcactatgacaaatgagattattgactttcaatgcctatgctatctttaactcggcgatcaaggcttcatattcagcctcaatattggatgcgtcaaattgtaacctcagagcataatgaaacttaaagccttctggcgatattattattacccctacacccgaaccctgttcgttggatgcgccatccacatataacttccaggtttccacgtctcactgatcaggtggaaattcttctggagttataccttctaccaagaatttagccaaagcttggcctttgatggatgtttgaggatggtatgttatgtcaaactaccccagttcaatcgaccattttatcaatcttccagaagcatctggttttgataaatcttgtgttaagggttgatcggttaacacttttttggggtgagctttgaagtatggccgtagtttacgagacacatggactgggcacaacgcgagtttttctagagggggatatttagattctgcccctagtaaccttttacttacatagtaaacaggttgctggtgcttgccctcttctcgcactatagctgcactaatcgcatctttcgagatggctaatagagaaacaatgtctctctagttattggtttcgccaa

SEQ ID NO: 155224 - DNA, 989 bp, Cannabis sativa
  modified_base (443)..(447): a, c, t, g, unknown or other
ctcaaaaccaattaggtaaaacattaaagatcttacagactgataggagtggagagtatatggatatgtatttcaaagatcatttaattgaacttggaattgaatcgcagtatactgcccctgacactttaaagcaaaatggagttgcaaaaagaagaaatcgcacacttttagaaatggttaggtatatgctgagctattctaccctatcaacgtccttctagggatatgctatttagatggctaatgacattttaaatgttgttccttctaaatcagtccctaagacacccgtagagctatggaatggtcgtatacctagtttacactattatagaatttgggggtgctctgctaatgtcttaagaaagaaataaggcaaactagaagcgcgaactaaagttttcttatttgtcggaaaatctaaagagactaggggtggnnnnntttatagtcacaaggatgataaagtgtttgtttctacaaatgccacattccttgaagatgactatatagaaattcaagtcgaaaagtaaagtagtgttagaagaaattctttcaaatataacttcttctaatgttccatcctcgtgtactcaagtagaggaaaattccactcccttggttgaaccaacgcaagttgttacgactaagaaatttaccacaaatgttcctggttagaaggtcacgactcctcgtcgtagtgggagggtttccacaaaaccagctcgttatggcttggatggtgaaatcaatatggttgttggtgatggtattgatgacgatccattgacctataagcacgcaatggcaagtcccgaacagaaacaatggtcagctggcatggattcagaaatggattccatgaaagagaacaaagtctgagaataagtagatgcacctcatgattatcatccaattggatgtaagtgggtctataagaagaaaagaggtgctagtggcgaagtcaaaacttttaaagctagact

SEQ ID NO: 155225 - DNA, 743 bp, Cannabis sativa
  modified_base (48)..(64): a, c, t, g, unknown or other
tttcattgttttagaaattatattcggatgttaatgaaacatacttgnnnnnnnnnnnnnnnnntggtaaaatatttccaacatacttttgctgacttttccagtttttttcccgacgattgtgattttcctgataacttttctgaggacttttctgacggcaataacttttttggtgacttttccggcaccgatgacttttccggcatcagagactttcccgaccaaacttattattgttttacaaatatgtgatcttcatcttcttttataaaaatattgcataaaaaagtctatataaatctaaaaaataaaaaaaaacctatatcccattttatttttaatgataaaaaaataaactcttataattttcttatatattgtaatttttactttaaaaaattgaatttgtgattggaattggaatcttaaaataaaaaaggaccaaaatatttgaattttttttagattcaacaattaaaaacataaaattattattttcttttttgaaatttttacatcaaaaatacaaaatgcaatctttattacactaatatcactacacggctatatcaactttttttactcttcttctttattttattactattttaccacatgcacacttattccatgcatcgatgcacgtgctgacttatgacccctatcaatcaactatccatcatttctctttctttttttcttttatttttcttttatttttccatttcttttcaattttt

SEQ ID NO: 155226 - DNA, 512 bp, Cannabis sativa
gttacgaaactagtgactctgatacactacacctaacttgattacatactctgtgtcacgggacccctagacaccgacagtgatagtgtaatcaattttttttttatttcacttgtatgacaattgaatcaaataattagtgtattgacaacattaaacttctttttttatctatatttgtataatattaaaaaaattattgtaatctttttttcgacgaaaaatatattactgtaatcctaaaaaattatgctgtcacacatgattttgaattatttttcattattaaaaaaaataattatttaatttattattaaataacatacataatttattattaaataaaatacataatgaaagataattattaatatgaataataattatttcaataataacttttttcgtatgattataagaaataaacatacaaattaagaaatcaataaagagagaaaaaatagtgtatagtgtgtttattcatttggcccacatgtttatttggacataaa

SEQ ID NO: 155227 - DNA, 951 bp, Cannabis sativa
aaaccctttatcataactatcatgaggtctatccaatttactaaaaatttactaaaaattctggctgcttactaaaaattctggctgccacataagaatgagtggccccagagtcaaataacacagagaagtaaaagatgttgatcgagaggtgacctgttacaactgacgggctagctttagcatttgcctaagttaacgcaaacacccttgctgaaggaggtttcgcagcaatcttctgttcttctttcttaagctatggccattctcttttgtagtgccctagcagccaacattggaagcaccctagtcctctacactctcccagatgatgctttttacaactggagcattctgggtaagtgtatcgggttttggagctaccctgatgattgcctcgtccctggtttccttggaacctcttgttctgacttcagccaccagatgcagtaggtgcctttcttttctggtcagtggccgagcaactacctcccttactaaagccttaggtaggaggagtagaagccctaccaacgaccagagtccctcgagactcttgggtgcactccactacgccctcagctcgtaatgcctttcccaccatatcaccataggtggtgttgtcatcagtagtgatcattaggtcatgtctaatcttcgaattaaacccttccaggtatttttctttctaggtcagctgagtaaattcttttctttttgcacttctagttgcttcattatagtactttgcattgaataattcatagaacttttctcaggtcatcgtagtaacatcacaagtcaaggacaccatgtcccactatactagagcgtcttcttgaaattggaacgtggcacaggccactttttcattaccggtgacgcccatgaaattcagaattctggtaataactattagccattgctcggctttcataacatcgggacctc

SEQ ID NO: 155228 - DNA, 624 bp, Cannabis sativa
aaagcgacggcggtattccttgacatgtgtttgctggttataagggaccacgctctcattcgaagggtgggcccgaaagccataaaaaccatcctaaagtgtgtcccccttcttggggacagaaacaagttcgtaaaaatacaaaatcttcgccggactgggagagccccatccccgcgcggagtaaaaaataaacaagcctgaaagcaggcggtaagcttgtggaataagttggtatggcgcaaggccaacaaatacaaggaaattaatgaaataatcttgaaggggaagcatagccccggccatcagatgcgtctagctccaagccccgaagcctccataattcaggttaggcgtctcaacatctcggggcggccggtgatacatcccggacgtcgcgggtttgataccaaccacctccacaatattctccagctggtgggggcaagtcaaagtagagtgaagctcagccacttcccatcccatagcacgaggtctgtacccctcctgagcaacgagacccaccatgacttcttccaaggtggccagacgtttttctcccttcttggaagatttagaaccggatgcagacatttctgattatgaaaaagagttaaaattcca

SEQ ID NO: 155229 - DNA, 564 bp, Cannabis sativa
aagccgtaaaaactgtccttaagtttgtcccccttcttggggactgaaacgagttcataaaaatacaatatctctgccgaactgggggagccccagccccggggagagtaaaaaataaattagcctaaaagcaggcggtaagcttgtggaataagttggtatggcgcaaggccgacaaatacaagaaaattaatgaaataatcctgaaggggaagcatagccccggtcatcaaatgcgtctggctccaagctccgaagcctccgtaattgtggttgggcgtctccacgtcatggggcggccggtggtacgtcctggaagtcgcaggcttgatgccggccactaccacgatgtgctccagctgatgagggtaagttaaggtagagtgaagctcggctgcttcccatcccgtggcccgaggcttatacccctcctgggcgacgggacccatcatcacctcttccagggtggcaaggtgcttccctcctttcttggacgatttggaaccaggtgtagacattttggttctgaaaaagatttaaaattccagcagttaggccccatac

SEQ ID NO: 155230 - DNA, 631 bp, Cannabis sativa
  modified_base (49)..(52): a, c, t, g, unknown or other
aatagaacctaggttaaatgaattatatgcttcattgatttgttgcctnnnntagtctatctccataaatctcaatgctttatctaagttaaacgtaagttttagtaatccaaataaagaatcaagttgtctaaattcagctccaagtttgttggagaagttagttatttctgttatgttcacagtcctcactgttcgggtagttaggttagttagttggtctgtttgttatcttgtaagcctatagataaaggcatgtgagctcattaagagagttagagaaaatcagagagagtaagggactgtttggagagtgaagaaacaaagtgaaaatgcttgagtgaggcactgtccaagttgagtttcttggagtgtctaagtgagagaatcggggatttatcttgtgaaactttgaggctgtgtatcatacatgttatgattgtaactttgatcttgatatgaatgagatgaataccaaagggggtagcaggaagtaggcattgaatttggccgaacctggataaaaattctggtctttatttttctacatttagtttcatgattcttatgttgattatagatttggatttgtgttgttcatgttgaattgatgtgttgttgaattacaaca

SEQ ID NO: 155231 - DNA, 520 bp, Cannabis sativa
  modified_base (368)..(393): a, c, t, g, unknown or other
tttctattcaattatcaataaaaacatagatcaacatgaatcacatacaagtcacacatccatcgttttaaatccatatttcttgaaaataaatcattaccatgactctgatactagttgttggattatattttactagcacctagatttactaacaagtatatctttaatatcctaaatataaatctctaagacaatgaatcttaaacacatataaagtatgagaaaccttacattagttacaacggaattaaagaacttcttccactcagatctctaactcttgttcctttctgtcacagattataatcaagatttgagcccgacactcctttagttgtttgattcttcacagtcttacacactannnnnnnnnnnnnnnnnnnnnnnnnngggcatgcactcaatcactaagacatgaattttaatgtgaagaacactatagaatttggaaaatagaagagagaaaagtagaagaagaagtctcaaactctctagttgtctgacaagatgtaaacta

SEQ ID NO: 155232 - DNA, 544 bp, Cannabis sativa
aagctatgctctcaagcaaattcctagggaagaaaacacaactgctgatgcattagctcgacttacgagtagcaacgtaaatgataaagcaaatctaattcatatccagtttcccaaaaaccctagtatcactagcacgtaagaggttaaaatgattgatacatccccaaactggatgacgccaatagtagcctacctcaacactagagaactcccagacaatagaagcgaagctcgaaaaatgaggagaaaggttgcacggtacatcatggtagagggagttatgtatagaagaggattttccatgccattactcaggtgtgtcatagaagaagaagctgcacgacttttgtcagaagtgcatgatagattttgtggcaaccacgcagccgggcagagtttatccaagaaaattctaaggtagggttatttctggccagcaatgattgaagactccaaggcctacgttaagaaatgtgataaatgccaaagatttttaaagatacctcgtgcaccacccaacgaactaactcagatgcaaagt

SEQ ID NO: 155233 - DNA, 507 bp, Cannabis sativa
aacccaaaacccaaaaaacttaaccgactcacataatatcgctcaaaaatcgcacaaatatcgctcaatatcgcataaaaaaaccaaaacccaaaaaactttacttactcacgtaatatcgctcgaaaatcgtacaaatatcgctcaaaaatctaaaacacacaaaccctatatagactcgtattatatcgcacataaaatcgcacaatatcgcacaatacatacaaaaccagaaaacatctatggcttgaaacccatattcttcccagagttttattgcacaatttatcccaaataacatacaaaatcacaactttcaattcaataacagattcaacaacaaatgtatgcattttaaaggagaaattcaaagaaaaattccaaaaaaaataaacctgggattggtgcgattggggttgttggggttcgagtgggtctcgttggtcgctcaggtcgattgggtaaagagtgttgggttttatgcccttaataaaactcatttcaata

SEQ ID NO: 155234 - DNA, 515 bp, Cannabis sativa
atgtatcaaacaaccacatgaacgattcaacagtttcatcataaagtagtgcagctccaaaaatagtagtttgcttatgatgattcaccccaagaaacatagcgaaaggtcaaccttctttatttttcttctaggtagtgtcacatgaaacaatattgccaaaataagaatatgctaaaatcatttttgcatcaacccaaaaaatatttgttattaactcatctttattgacctgaataacatagaagaagttgggatcttctaattgcttcccctgaaagtactcaagaacactacatgtatctcttaacttcatttgaaatgttcgttttgttcgtaatatttcttataatcaacgtgagtaattctaagacttttatgtcctctagctctctttgtcattagttcctaactttcttttggagcaattcctaaactgacacctaagtctatttctgcaactagagcaggagttagttttctttgtgatatgtgtaaatgactttttgtaggag

SEQ ID NO: 155235 - DNA, 505 bp, Cannabis sativa
tatagcttacagtttataactctcggctatactagctgatagttttaaactgtgggtgacgattttaaactgtaggctatagtttttaccgacgattttaaaccataggctatactatagttgatggttttaatccgtagcctatttttgccaatagctttccactaacgcttattctacgaaattttgcgacggtcaaatagacgatgattataaagactaacaaaaatacattagtcaactatttaaaattgtcacaaaactccaattttttaatagttagggtattttattttgagaattgctatctaaatgtgtcagggctcgtttggtaggtcatatgaaggtcgtataatttattaaataacaagtaacactacatttgaaaaatattacattgtatttgttagagattttataacaatggaagaaaatcaagatttattacaactctattgtaaaataatacaaggactaaaataagagattgattaaatatatgcta

SEQ ID NO: 155236 - DNA, 965 bp, Cannabis sativa
  modified_base (210)..(221): a, c, t, g, unknown or other
  modified_base (248)..(248): a, c, t, g, unknown or other
tctcaatacttcaaggggaatttttaacagccaaaaaagttcaggggccatgatttggtacatgttaaagttcgggaaaaaaaatcctaattaaccatatttttttagctaattaggaattttgcctcctaaactttgacatgtaccgaatcatgctccctgaacttttaaagtcgttaaaaatggcccatgaactattgagattgttgnnnnnnnnnnnntttgtccaattttagtaaaaaagtctnacatggatgaaagttcaggggtatgatttagtatatttgaaagttcgagtggtataatttgatatatatcaaagtttggggagcatgagttactacacaaacaatcaatgaatagtaaaattgaatgaaattagacaaaagtttttaaatccaacaatctcaatagttaaggaggtattttcaacgacctaattcttatattggctgacttaagtaatcctaatatatattttttggctaattaggaattttctcttccgaactttgacatgtactaaattatgtcccctgaatttttaaggtcattaaaaattccccatgaaccattgagattgttgaatttaaggatttttgtccaattttagtaaaaaagtctaacatggatgaaagttcaagggtatgatttagtatatttcaaagttcgagtggtataatttgatatatatcaaagtctgggaagcatggtttagcacacaaacaatcaatgaatagtaaaattgaatgaaattagacaaaaaaatttaaatccaacaatctcaatagttcaggaagtatttttaactccttaaaagttcagggagcatgatttggtatatgtcaaagttcagggggcaaaaattataatttatctatttttttaggctaattagtaaattttcccccccgaactttgacatgtaccaaatcatgcccccttaacttttgtggccgttaaaa

SEQ ID NO: 155237 - DNA, 591 bp, Cannabis sativa
aagttctgtgaatctcttaaatttccaagccttcaaacagatggggttgcatgagaaggatctgcgacctgtaacgtcgagtatatacggttttattggtgacgtcattgcattaaaaaggatgatcaagctcccaattactttgggaaccgccactgtagtagccaagtcgatggctgacttcgcagtaatcgaccaatactcagcatacaatgctgtgattggtaggccaattctgaaagagatgaagattgtgacatcaatctatcatattacaatgaagtttcctactccggctggagtaggttctgtgcgaggaatccagtcaaactcgcgagaatgctacaacaaagcggttaagctcgcagaaaagaattcagacaatgtcctccatctgctagaggcaccaccccctcgccaggaggtcttcaggatagaagaagtgccgcataaagacgaaccagatttggatcctaggatcctcgattatgccacaactgtgcaagtcgcggaagacaccattgaggtacctattgatccagtagatagtaataaagttttgaaaattggttccaaactaacttttcaaca

SEQ ID NO: 155238 - DNA, 575 bp, Cannabis sativa
atcatactttgatacaaagtaggatctatcattactccttgtttatctttagataatttcaagattgtgctcttaggagtattatcatgtttggctctctcaagacaaaacttcttcaccaagttttttgtattcttactctaaaaaacaactgcaaccatgctcattttaaactcttgttgcattttttggaaaaagacctgcacttcagagttagaagtagatccaaaagcaagatcatcaacatatgaaaaaataatatcaaattgaatgtgtgtgatgaactgtgttttaataacatttccttttctataatcatgagtgtaaaaactcagatagacgctcataccaagcacggggtgcttgtttcaagccatacaaagccttgtataaaacatgatcaggaaggtggaaatcccgaaccgctccattttgttgtggagttttaggagcagaaagattatgaaaaataccataagatttacaatatttatcatacacaatattttcaaattcttttccatgattacccttaccactaactatcttaccaatgttgcaatctttttgaactt

SEQ ID NO: 155239 - DNA, 519 bp, Cannabis sativa
  modified_base (186)..(190): a, c, t, g, unknown or other
tttagcttcatccattggcaaactattcacatctaccgggcattccgcataaggatgagggcctccgcatagctcacaaacaacctgagcttgttttgcttgcacaactattagtttttttagggcctctacctgggctatcaatttagtgatggtatctacctcatgcataccagccaccttctnnnnntgacttctttcagttggccactgctaattattcaaggccatctcctctagcaaatcacaggcctcgttttgcacttttcctcataaatgccccaccagctgcagcatctataagtgttctagtattaccaaccaccccgttgtagaaattgtgaaccagtatccacttctcaataccatgatgaggacacttcctgatgagatccttgaacctctcccagggttcatggagagattcattatctagctgacaaaagttattaatttctcctcgcagcttagtagactttgctagaggaaaaaacttagacagaaactttgttgccaagt

SEQ ID NO: 155240 - DNA, 636 bp, Cannabis sativa
cctacagtctcgatgcaacaaagtttagccctcttggctcccattacagatgaagagatcaaaaatgctatgtttgctattcctggttccaaagcaccggaacctgatggctactccagctttttctttcaagataactgggatttacttggaagtgatgtatgtgaagcagtgaggtccttcctccattctggtaagatcctcaaggagatcaattctacggctctcacaatcattcctaaagtgaaatatcccaatacaccaagcaattataggccaattgcatgctgcaatgtgatctataaagtagccacaaaggtactctgctctagactcaaggatatccttcctactattgtggctcaaaaccaagggggatttgtcaaaggaagattcattgcccacaacatcatgatatgccaagacttggtgaggcactatgggaggaaatcatcaaaggctaattgcatgatcaaacttgacttgcaaaaagcttatgacacaatagaatgggatttcattgaggaggtgcaaaggggtctactttttcctgaaaagttcattactcttgtaatgaattgtgtcaaaactccaaaattctctcttttcttcaatggatctcttcatggattcttt

SEQ ID NO: 155241 - DNA, 606 bp, Cannabis sativa
  modified_base (360)..(362): a, c, t, g, unknown or other
  modified_base (462)..(465): a, c, t, g, unknown or other
aagtttataaaaataagaataactttgactctcgctaatcgggacatcgttggattcatttttttaatcgaaaatatcttttaatttcctcttagcttattcatttcaaattagcttaaataatatatcattggatgaatgatttataaatcatttgcttataatgtcattctattttctcttaagaaattgaatggcacacatgattatattccagacattctatcctgaaatgatataaatcctcaatcttaaaaatctcctactggtaaatgcttactataggcaaattatatttagagttagattagtagtggtggtccacgccagaataaaactcattgtatatttggtataaannnaagtctttgactttaaattttagactccaaatagaaattttgtatccagaatacaatacagttcaactttcacaagtgattaatatccattttctatcannnnattcaaactgtatgttaatatggaatgtgagttaaatattctgggaccgaatccacttagactattctaaaaactctttattgtaactagacctaagtcatcaaaagatcacaaccacattcttatataaatctatggcat

SEQ ID NO: 155242 - DNA, 555 bp, Cannabis sativa
acattagacttccaactattgaagtataagtaacccttctcatgtcctctatctcttgaggatcagtgggaaactgttccttagataggcggatactaggtctagaaggcattactgccccttttgtatttgtcattgagaatctctctctatttgagagagagcaagggatctgttcttccaatttttgatgatctgaataccaagaacataagtagcttcacccaaatcctttattttgaattgagtgtcaagccattccttgatgtcagtcattttcttaataccaataatcaaaatatcatcaacataaaggactaggaatactaccacttcattatccattagttggtaaacacaaggttcatcatcattttcgttaaagtcgtaggtcttgatttatttcatcaaaccttttattccaagagctagaagcttgcttatgtccataaaatggacctattaagtttgcaaactttctctcttgccctggaagcacatagccctctggttgctccatatagatggttccttcaagaattccattaaggaaag

SEQ ID NO: 155243 - DNA, 1251 bp, Cannabis sativa
  modified_base (208)..(208): a, c, t, g, unknown or other
  modified_base (997)..(998): a, c, t, g, unknown or other
caccgaagaaatgcctataattttgggatcatatcacagagatatggcaagctgtccaaatcccttaatcagtgtattttgtatttaatgtgtaattttaccaattatatctattgtaaacagaagagaaacttttttcctaaaggtttttagccctataaatagttatccattctcactggccaaagggtcgaaaaacttatctaanaattcatattcagagatattattgtaagagatctaagaagagaaatcattgcattctttgtttttaagtcaatacaaatcaaggggagtaggctattaccgaattgctcggggccgaacctctataaaaactctgtgtctttatttatttcattatattacatctatactatactacttgtcccttacaattaagactcactgtcgttggccaaaagcgaggtaaacttacttaatttaagttagtccaaaattaattaaattaattttcaactaaaatttaattttctacaaatatatataactgaattttgaaatccaatgtatttagaaatacattttcaaaattacattaaaataaaatcaaataaagttggaaaaattattctaattcatgttggtctaaaattaaataaattcatttttaacataaatataattttcatatttaattaaaattttaagaaaaatatcaaatatttaagtgttttgaacaaatcaacttaaatattaattttcttacttaattaaaaatatccagaaaaataccaaaaagtctacctagaaaatatctgtctagataattcataaactaattactgattttctaattaaaatatattttagtttgtttattttaataaattattaatgaaaattacttgatttgagttgatcgaaaatgaatttccaacttgatctaattttcaaaattaaaaaattttaaaatatctgcatttaaataaataaatgcaattcgaaattatgtgggaaaatgattattaaaatnnaataaaatatatattgaaaaatattctaatttaaattgatttgaaattgaaaaatttccaacttaaatgtaattctatttaattaaattcattaaaatagaaataattaagtatcttgaataaaatcaaattaattattaattctaatttaatgtctaggaaaatattcttatttaaattgatctaaaattaattaaataattaatttttaacttaaatatattttctaatttaattaaattttatgaaatag

SEQ ID NO: 155244 - DNA, 673 bp, Cannabis sativa
aagaatttcgaacattatcaccatccttgatccaagacacccgggatctttgctgccagtacacagctctttgtctcaatgcctcgttgagagactctcgagctttcatctcttcagcccaagctctagttcccgccggctgaccttgaattaggttcaggtgtcgttcaagctgagtaattcgagcatctaatttcccaaactggttcctgctccaattactaagcgccattcgagtggctcccacctttttgaaaattcttgccgatggccgactatgagagagagaaccccaggcactttccacaacaagcgtactacgggaatccctcgtccaccaggcttcaaagcggaaaagctttctaggcttggaatcctggtccacagtactgattaccaggggacggtgatccgaattgcaagtatggcaggaatgaactaccgccttcggaaaaaggctcagccactgagcattggacaaagtcttgtcaagggccgatttgacatgagcctcaccatcacgatggttatcccacgttagaaaatcgcctttaacaggcaagtcaattaatcccgaactgttgaccaactcagtaatgaccggcaaaaactgatctcttccccttgagcccatcctttcagagcttttcaaaacaaaattaacgtccccaag

SEQ ID NO: 155245 - DNA, 554 bp, Cannabis sativa
gggtatagagtgcaatttcctctattggatgtggtatccaaaaatctaataaatccaatatccaattgaactaattagtattttcatttagtttgattgagtttttagattctatattgttatacgtaaaatatatataaaaattaacattaaaattttactctttttttttggtttagatggatctattccaatccaatacatactcgacttaaaatattaaatggatccaatccgattcaaaaaatattaggtctaacatatgaaaatattgaataaacctaaattaaacaaataaatatacatgaaataaatctaacgaatagaaccgatccaatccaacatccattggatgactgaaattaattggatcggatcagatggtaaaatctaacatctaatatataattggatcgaatttggataaacctaaaactattggatgtgatccaatgaacacccctaaatttacaaacaatgtcactctaattacatttaatataattattattattatttttaatataaatataaaacttatattaatttgtcat

SEQ ID NO: 155246 - DNA, 796 bp, Cannabis sativa
attagccttatttaaataaataagaggcaagcaaaaaatgggcattcacagttggggttgttcatgtgaaagagggttggctccagtatgtcataatcactactaatggcccctaactctcacacaagttccaaaggagagaaatttaacctttcattaaataactgttattcattgaataagctcaatattaattgagcctaaataaaactatcataaggtagtattttattttagcaacctagtccatttaagaatctagaaataaatggacttcctatatgcatctaagcccaaaagcaaacatctaggtcacataggtcaaattaatttggatgggccctatcatgtttctagatttacatagatgaaagaaatgacaaaatttacctgttacaaatttatttatataccaattgggactatgattaaaatccgatcattcgatctgtcaacaaattaatcatagcaatttcgatcaaataaatatgaggtttgtgaaaaaaaattgaataaacaatttaaataaaacaaacacaatatccatgtaaaaaattgtgaagtaagatattaatataattaaattattatttaactaaccaactaaattttgagaatttagggttgttgaaacaaccttaaatatcttttctaaatttgaaattcaaactaattttaaactatataggtttatttgaattatttttataaaattaaattaaatatctaataagataaatgatttgaaaagaaccaaatagatattttcaaaattattttctaatcttataattta

SEQ ID NO: 155247 - DNA, 590 bp, Cannabis sativa
tttctgataaatataatatttgttctgataaatataatatttttttgtgtatataaagttttagtttttattttcctactgtttacatatttatttattttttttatatattatttagttattttttttactgtaagtttttgctatgatctttgaatagtatgttgattataatttaaataaaaataaatttgaatataaactaattcttaactactgttgtttgaatataaattttgactaatgtaatttgctactgtaatagtgtatatatataacatatgttttactctccatattataattttatttagttactaatactacgtaataatacttctttgatttgagtgaaaaaataaaattgtatcatatgttatgatacatacgtttgtttatggatacattatgtaataatactagttatttggtgtctctttaatctctgtggttgctttgttgttggttttggtatatttatagatgtaatggacaagtatgttgaagaatgtataattttttttataatgattgttttataaattaataattttattttattatgctaatttaatttaaataatttgagt

SEQ ID NO: 155248 - DNA, 534 bp, Cannabis sativa
  modified_base (483)..(484): a, c, t, g, unknown or other
tcataaataaaaaaaaaaaaagacaaaaaaaggaattactaaccaaatattggataccacaccaatatagcattaagtacatgaagagtactaataacaagtacaaaaaatcattttaaaaaaataaaataaaaaaacataaaagataaaaaaaaaatagtaaatggtacaaaaatcattcataaaaaattactagctaattaataattatttaccaaaaacaataataaatagtacaaagatcatccatacaaaagaaaaaaatacaagagacaaaaaaaaaaattacaaaccacttattgagtatcctaccaatatgacattaagtacattaaaaatactaatagtaagtacaaaaaattatttttaaaaaaaaacattaaaacaaatttaaaaaactacaaaaaaatgagaccataccgatatgacattaaacacattaacgataaaccattaaacacattaagagtaccaataataagnnaaaaaaattatttaccaaaaataaataaaaacaaaattcaaaaaaaaaaa

SEQ ID NO: 155249 - DNA, 673 bp, Cannabis sativa
tatatttggttttatactctagatatgcttttcaactttttggatatttgaaattaatcattataatatgttattttcgtaagtttgtatcagcatcagttttatgtttttccaatttttgaagtttttatttatagtcgtacaactatatagaaactattatacaactatatacaaacaatgtgcacttttcagcatacttgtaattttaatggtttatcaatgtattattcactgttttgcaacttttttattatccttattaattatgttttataaatttctatttgactttttgaaaactttaataatgaaattattttcgtagttaacctttaacaagtgtcaaaactgtcataaaacgattttgcaactattagcaaactattaaaatttacgaaataatatcacaagtgtatcgaatataacatatcatcctgtgtgaattctcacagagaattaaacaattcaaataattaatctgtaactattttattgcttgattgttgcatgtcttttgattgtgtccgtgttgaccacatttgctgcacctgttatgtttttttgtatccgaatcaactaaaaatcttcttttccttggtcttcgagatcttattttctgcttggtggcaaaacaatgatatcttttatgttctgtggtacatcccatgtt

SEQ ID NO: 155250 - DNA, 840 bp, Cannabis sativa
ccatccttgccaacttgcttccttttcaaatagtgcaagacttcaaaactaaccatgatattatctgtaattaatcttccagggatgaacgtactttgattcaaagatataatctcagataataattccttcattctattagctagaagtttagtaatgatcttagcaataacattacaaagggatataggacgaagctcactcatcctatcaggtttcttcttcttaggaatgagaacaatattggtgtcattcatcccattcggcatgtactcattacgaaaaaagactcgaacagtattgatcacatcattaccaacaatagactaatatttttgaaagaatttaggattcataccatcagggcctggagacttatcggggtgcatctggaaaactgcatctttgacctcatcatcaccaattggccgaagcaacacttcattatgctcctcacgaacagttggagtaacacaatcaagcacctcctcccatgttgtagactcagcagtaaatagcttagagtaagaatccacaatgacattatccaaaccgctatcccaatggcgcaaattcccctcatcatctttcaagcagaaaatctgattgttgcgtcttctagtactagccttggagtgaaaaaacttgctattttgatctccttccttcaaccaaagttgttttaatctttgcttccaaaatgtttccctttgattgagcactgtaaagagctcttttttggcatcataaaaaagttgctttccctcttcatcccttctactcttataccgcttcaactcacgattacagctcttgatacgagaagcaaaactcccaaaa

SEQ ID NO: 155251 - DNA, 671 bp, Cannabis sativa
gattgtgtttaatatggggtccgacggggtccgatgtgggcttcgatgaggaagaaggaatgggtagaggagagagagaggtgatgtaaatggataggataatttgggaataacattaaagttgacctacattacaaatattggtaaatgtaagcttacgagaaaaatttaaagggaattattccatatacaattttttaacttttttttttcaaatttacgatttgggtttctaaagtggttgcagcgctagctacaataggggtttctatacgatttttgttgcaatttaggttgcagtgctagttactaggggtgtacgtcggttggtttagtcgggttatagcatatttttatcaacacaatataaatatcgagttgtaaatatttaatcgtaacccgcccaatcaaaaattaaagaaagttcaacccgcccaatgatttcgtcggtttggtcgggttaacctgtccaaatcgttcttcactttttttttttataattattattgttagtttctactattcaaataattagacttttaaaaaaaataaaaagatattatttatatttcatgttaaaaaatactatagtttaaattaattttaagaaccttaatataagataaatataattgagtaaacataaaataattgaataaaataattaaaaa

SEQ ID NO: 155252 - DNA, 1091 bp, Cannabis sativa
tttctaatagattctttaattttagattatttttagtctaagttatttttatgattatgtttgtatcacatctaatttttttaaaaaaattaaatagttaattaaatcttatttttagtattatattcaaaattttctagaaaatttacatgtgaaatataatcctatatagctacaacaatgcaataatatatatataaaaaataaataaaaaactttctaattaaatacataaataataaaaaaatctactaaaataattatttaaaaggatatattatagacttaccctacaatatattattgtgtgtttttgtgcctttgagtttgtaaacattgaagaaaaaaaaaagaattaatctaatagttaaaaaaacaaaaatgattttccaagaaagaaaaatttgcaatgaattgttaccaaaaaaaaaaaaataaataaaaaaaaaattatttaggatgttttttcttttgtaaaatttttaaactacaaggataatgctaaagacacaaaaattgcagatagtttttacagaataaaatatagttttagtttttaccgtaaataatttgatatagagactatattatttttaatttatgattaagattaattaaacatgtagataatgtgtgcaatttttgtgtattacaatacaattataattattagaaatagaattcaaaattcttaattctaaaaaaacccaaaattgaaaaatttcttggagattggtaatattttaatggaaagtgaagcttcaaaatattaagaataataaattctttggaggaaagttttgtatgttcccaagctacaaccaagtatcatagtccaaaataatgatattaacatttagagcacctatatatattagactaattatgatttttattttaaaaaaattctacatatattaaatcatgtttcttaaatttttttgactatttaaaattgcatctaaattattaaatttgtttgatttaaggactttattataattacagtcaattttactaattttatgattagttatattctaaattttgatatctactaaattacgtctcttgaactttgacatgtgtca

SEQ ID NO: 155253 - DNA, 595 bp, Cannabis sativa
ttggagttagtgaaagattatgattgtgagattctctatcaccccgggaaggccaatgtagtggctgatgccctgaggaggaagggtctcagacaggtaacgagtatgatcgagatttcacctcagttagcagaggacattgtcagatcaagcatcgagttttttgtaggtaaacttcataacttgacgctacaatttgatctattagaacgaattaaagcggctcagttagctaatccatatttagtgaagatcagggaagaggtttcagttggttaagccagagattttacagtgtcagatagtgggatgttgttgtttaagactggagtttgtgttccatatagtgcggaacttagaaatgaaattcttgaagaggctcataccactccatactccttccatcctggcaccaccaagatgtaccaagatcttaaaccttacttctggtggagtgggatgaagaagagtgtagtagaattcgtatcgcaatgcctaacatttagcagatcaaggctgaacatcagagaccggcaggtttgttgcagcctttgacacttcctgaatggaagtgggaagatatcatgatggactt

SEQ ID NO: 155254 - DNA, 766 bp, Cannabis sativa
  modified_base (320)..(330): a, c, t, g, unknown or other
  modified_base (612)..(623): a, c, t, g, unknown or other
attttaatatatatttatttaattcaaattactaatttagataactctaaatataaattttaatttaatatttataaaattataccctaagaagatatgaaaaaaaataattttctatccttactattaattttccaaaaaatattatgaaaattacttaatttaagttggtccaaaatcaattaaataattaatttttaactcaaattataattttctagaaatatataattgaattcgaaatctaatgtataaaaatacattttcgaaatcacttaaaataatataaaataaaattgaaaaaattattctaatttatnnnnnnnnnnnattaaataaattaattttcaacataaattttattttcctatttaattaaatctcttaagaaaaatatcaaatatttaagtgtctagaataaaatcaacttaaatactaattttcttatttaattaaagatatctagaaaaataccaaaaagtctacttagaaaacaattatttagataattcataaactattttctaattttctaattaaaatataatatattttattctatttattttaattaaatcattaatgaagattacttgatttaagttgatctannnnnnnnnnnnaaattaattttcaactttaatccaatttttaaaattgaaaaatttcgaaatatctacacttaaaataaatgcatttcaaaagtttatatcggaaatgatttattaaataaaataaattatttgaaaattattctaatttaagt

SEQ ID NO: 155255 - DNA, 518 bp, Cannabis sativa
ttgatttgtcttgttttgaaatgttctttgattgtagtttattcatttgaaaaaagagtagaaagttcttttatagtttgtataatgttgttttaactgctggaggacttaatttccagtgatgatgaactttaaaattgatcaaaatagacctgttgttcatttctattcctttggtagaatgaagtgagttgcatatattgaaagtgtacaagaaaatgttttggagtcttttaaagttgaagctactgtacatgaattaatgattgagaaatgtgtttagttttggttgtatgcactgaagaacaatatttttttaagaaactttgcttttatgattttttttaaatatttttttatttaatttcatatgtatcttgcacggaatattgaacattataatttttttttcatttgttcatataatgagaaacaactattattatattttttatttctacatcaagtattggtataattatattttttttttttaaaaaaaaacaatagttgttagt

SEQ ID NO: 155256 - DNA, 635 bp, Cannabis sativa
  modified_base (548)..(551): a, c, t, g, unknown or other
gcactttagatgaacaaaatattttttaacacaaagtacctgcaaattaaagttcacaagtactaaacaaataactactccccctgagtaacacaatcgaaaactaaaaataacaaaataaacatgctaacttttaaaccaaagaagttcacaagtactaaacacaactcccccgggaaaaagggccagagttggtccaaacaagcagttaaaatcaaaatattactccccctttttgtttatctaagggccaaagataacaaataagaaaatatagtaatatgtccaatcaaaagcaaagaaagaaaaagataaaaacttagtctctgtaaagcttgaccaaggtggacagctgctttgacatctcttgctgaatttcctccatggcagcaagacgattgttcaccagctgaacctcattcttgacttcctggatttctacagcagcagaactcgagcttgcagcagcagcagcagcaacaccagctttaggccccttttgaaacactccatcaaaatactccgagggttggaatgttgttccagtnnnngaaggctcaagagtttcatgagattgtgtcacatttttctgagaggataaaaccttaaaaattaaatttggaaacacaagctta

SEQ ID NO: 155257 - DNA, 578 bp, Cannabis sativa
ttacaaagtgttatatcatcttattctatataagatggtcccactgcctctattgtattgacaaaaccaatggggataatacaattatattcttagacagtaagtcacggtatctcgtcgtagtgggagggtttcaaggaactcacgatgttatgaattaggagacatttgtgattaaaatccattgttagcttaaacaagtaatagatagtcagaataagaaaccaagaagaaaagccaagagaactatggttaaaaccattcacatggagtaacctaaagttttcgattacaaggacaagaaaggaaattttgataataagtctattcaatggacttaagaaaactgcctgatcctagtatagtaggtttgagattatctaaacctatgacttatggtatacctggtaatttacttactcaagtgcaaacaattactttagtaagatgctgaagaattctttttcaaatggctaattctaaaggaagtattttagctcctagacttagattttatttgtcaaagaaaaagtttcaactattcctgaaaagattaaagtcatgaaagaattccttag

SEQ ID NO: 155258 - DNA, 530 bp, Cannabis sativa
  modified_base (478)..(493): a, c, t, g, unknown or other
tgcttggaataacatttgccaatcaaagtcaacaggtggtttgggaatcaagaacttagaaatctggaacaaagctgcaatatgtaagtatatttgggctagatcaaacaaacaagaaagcttatagcttcggtgggttcatagtgtgtatattaagaaccaagattggtgggactacacttcttcaatgcatgctagttggtactagaagaagatggtagccctcaaagaccaagttaaaatactgatggaacctgttatatttcaaaagcaaaaatatactatctctgctggttacaacttgtttttgacccccctaactcggctgaaatggtgcaaagtagtttggtcaaggctaaacattcccaaacataatgttatagcttggttggctatgcttgatggattaaaaactcaagaaaggctgttgcggtttggaatacaagtgggagatgtttatgttggaattattttaccnnnnnnnnnnnnnnnntcacaagtatgtttattaacaccttaaatatgaactt

SEQ ID NO: 155259 - DNA, 1120 bp, Cannabis sativa
tattcatattacatattatacacagttcttacctcctttccagattcaagtgagttggccgacttaaacggaaaacctcgtgttggatggatgccctgatgacataacataatcaaataaatcacatgttaaaaccctaatccaggaaacccgaaccctcaattcaaggttctgctatactaattaatagtgactacaatatcctagaaaacaggcaaacacccaactaaggtactgaaatgggcaagaattgagaagacgggttatttggggaaccttccaaaatcggttaaccggttttacaggtactagcaaaccggttaaccgatttgcaccagttttccctaaagaactcccaacttgctcaaaactcatccaaatgctaccacaccttccagagtacctaaaataagcttacacaatattttccaaccaacagaaacttgaaaaatacattgaatcaaaatgtgccattaaagaccaaagtttaagtttcaatactcaaacttgttcaattccatcacaacacatcaaaactagcatccacaacttaaaatcaactcaaataaagctcgaaattcgaaccaaacacaattcaaactctaacgacccctatatctcaaaatcacataatcaaccaaacttaaaagcttcaaaaatacaaaactatggcttcaagaacacatgaatccttagcagaattccagaaaaatactaggttttgaagatgattccttctggttttgctttagccgaaagagagaaagagagagttctctatttttgttttttttctttgatttttgatttttcttaatttcccaacataatgtattcattattcataaaaaagggcagctatcaacatacacaaaagccacctaatccacactttaaaatgactaaaatacccttaaagcttaaacataggctaacttaagcttaggggtagagtggtcaaaaatcataaccccgcttaaactcggtattctattttctccaacatacatcccactaagaaaaaagttctgtacttacccatgtgctaaaaatagacatattcatcgcattttccgttgtcgccgagcaaaaattgtaaaaataacataattcatatata

SEQ ID NO: 155260 - DNA, 514 bp, Cannabis sativa
  modified_base (80)..(84): a, c, t, g, unknown or other
  modified_base (458)..(468): a, c, t, g, unknown or other
gcgaggcatcctgcttggcatgttcattcgaccaggtgctctaagttgatgccatgtgtcaccattcttgtgatgccacnnnnnagtgccaattttgggataacatatattatgttatcttgttagatatttaagtaatttaaattatttaaataaacttgaaaatttgaaaattgattagatattttgaatttaagttagaatataggatatttaggagatttgtttttgttggttttttttttttttaaatttttttcaaatattgtcaaacaacataaattttaaattctagttaagatatttttttaaaattttaaattttaaaaatagaaatatcttaacctacttttcagttgtctgttacatgtttgtttgtaatgtttgataatttatttattcaaattttatttacaaacttattatttatttgatctaaattgttatgattaacttgnnnnnnnnnnnaataatctgattttaatcatagtctaattgtcaatagatcttataa

SEQ ID NO: 155261 - DNA, 620 bp, Cannabis sativa
ccagctttgaatagctttcttgatcttcttgggttgactttctttagcaagaaaccttgctctgataccactgttgggattttacagtcttatccctacacaagtcaactttcacacacaagacacaaggtcaatcttgacctttaacaattcagcaagtggacacaatctgtccacgtatcacacaccaatttttgacaccatgcattcaattgaaaaccaatttaactttaccaaaattaaagcaagaaaggtgatcaagttttcttagcttcgaacaaatagggttagatcaaagttcatgcatgcacagttcaaaattagagagaaaggttatgcagaagtgagttagggaagaagagaatcaaacacagtattttatagaggttccccctgagttgatggggtagtcctcttgagctcgcctcaaaaaaaagctaagcccttgcactatcaaattcagatccagtacaagctttcatgaagcttccagctacaagaacaactggtaagacttcgattctttactgctatgtatttctctctggtttctacttctatctctctctacacacagaattctcactcttttctctctttttctcaactctgagttctta

SEQ ID NO: 155262 - DNA, 589 bp, Cannabis sativa
ttagagtttttccaaaataccctaggtgatttgtgtgactctttagtatgggcaagggcattgtggtgttttcgccttttgagttttgccttttcgtggggatttaatattatgtttaaatctaatttttagaggctatatgctgattattaagcaagtaactcttttcttcttttattgaaaaatcaagaattagacaaaagttgcattttctctcaagtctctctatctctctttcgaacccacctagaggcaggtaagttttggttggttcttcagcatttcaagttggttttagcaagtaattagtgatctcaagttcttggtaagattcttgtagctttctctttatttccttaagttgtaagaaatgaatttttgcatgctttcaagtgttgttgctttagctgctgtagttagttgttgttgtgttctgaggtttagatatgggtttttatgttgatttatgctcaaattaaaggttgttgaagggttagccaagttttgagtttttgaactcaatcttgaagctttaatggtgaaattggtttatgtgaatggatgattgtttcatcacttggaatatgtt

SEQ ID NO: 155263 - DNA, 597 bp, Cannabis sativa
  modified_base (572)..(572): a, c, t, g, unknown or other
aaggaagttgaagatgcaatttttgccatagataagaacaaagctcctgggccagatggatatgggagtgctttcttccaagacaactggaagttagtggggaatgatactgtagaggttgtgttgtcctttctaaactcagggaagattttaaaggagatcaataccactactatcactctgattccaaaaacaaaatgccctagagtgtagtggattttaggcccatttcctgctgcaatgtcatatacaaggctgctactaaagtgatttgcaatcgattaagaagaatcctacctgatcttatagtagaaaatcaaggagggtttgtacatgggaggttcatttctcacaatgtgctagtttgccaagacttggtaagattatatgggaggaagaattgcaaaccaagtagtatgatcaaaattgacctgaggaaggcatatgacacaatcgaatgggacttcattgaagagatgatgagagcactcagattccctagtaagttcataaatctcattatggaatgcatatgtaacgccctaacgctaaggcacgctacagtgcttttncaattatagtgcaatctttgctaat

SEQ ID NO: 155264 - DNA, 531 bp, Cannabis sativa
  modified_base (329)..(337): a, c, t, g, unknown or other
aaaggaacggatattgttggaaacgactcaaaaataatactttttttatttatttaattttgtactttgcgacgtatctccctatatctctctatattaatatgtgtgaatgttctccttttcacttgcttgtaataaaaaaaaaagataaattacggcataaatacttaatgttttcgattttatacacttaaatacttaatgtttattttttgtggcaaaaatacctaatgttacaattctcttacaccattactacaacttccgttattaattcataaatatagacacgtggaggacccaaatgtattacatttatttattttatnnnnnnnnntaatattcttaatataaaaaattaaatattacttatttttttaaaaaaaaaaaataagagagatgcaatactaaactaccatagttgagtgaacgggtgtagtatatggaacatgattatcgaattgaagtgccaatatcatatgaaaattgttaatgagaacacgttttttttaaacaagtagcatttagttt

SEQ ID NO: 155265 - DNA, 642 bp, Cannabis sativa
  modified_base (36)..(56): a, c, t, g, unknown or other
  modified_base (605)..(610): a, c, t, g, unknown or other
agttcatatttatggtgttaataaacatacttgtgnnnnnnnnnnnnnnnnnnnnnaaataatttccaacacatgcatcctacagctgcatggccaaccagcttttgcatggtatgattttggtgcgtagcaacccacgaaaatagagagataatatttatttttaaggggcatttcaatcatttgtattttattaatgtaatatgcaaacaatagcttattttacctatttttaagggattagaagggtgtaagctctcctatatataaaagccttatttaaatcccaaaacactgtgttctaagtgttaagtctgaaatcattaagtctcaaaccctagctctaagtttgataactcacatctctctctctctcacacacacacacccactgctatactcatacttgagatttgcctactctaattcctacattgtaaccttaagagagctacttcagatcccatcactatagtgatttgagtagtattatctctcagtatcaatacaattaaaagaggagtaggtcactacccgctaattaaaagggttgaacctgtaacaccctaactagcataggcgtgttagcgtgatttttaacgtannnnnnagctcgttgctaatcaatgagattaatgaaaa

SEQ ID NO: 155266 - DNA, 634 bp, Cannabis sativa
tttatttattattttatattataaaaataatttaggccaataaaattatgccacttgtacataagtgtacacattggcagttctatttggcatttataacagccaaatttaacgtatgtattaaagtgcaaatagaataaaacttaagggggttttaccaccaaaaataaagattagggggttaagtgtataacaattgaaacataagggggtttagctgcaaatttctcataattaaaatgttcagaaatgctgtactatttcgtagtaaagattctgtaatagcatgactttagagcacttgaagggattttaatcctcatatctttagccgactatgataaggaaaattgtaagtaaagttaaaaatgaaaataaatatattctcatatttggttactaaagagaagttgtattgaaaaaaatttattcaacatgaaaaattgatttttttttttttaattttttaattttttaatttttttcttcaccaaaattcaaatttagaggagaaaaatcgtgtttggtagaaaataagggtgggggtaccaaaaatgtgtagcaaactatataggggaattattttagagtaatttgcggtaaaacccccttaactatcaatttacttgcaaaa

SEQ ID NO: 155267 - DNA, 592 bp, Cannabis sativa
ggtagccaggcatgaagaatgacattgctgagtatgttgctaagtgtcttacctgccagtgaataaatgcggaacatcagaggcctgcacggttattgcagccattgaacatacgagagtggatatgggaagatattgctattgacttcgtggtaggtttgcctagaaccacgggatagtttgaatttgtgtgggtcatagtggaaaggttaacaaagtcagcgcacttcctacttgttcggacgaatttctccattaacaagttggctgagttatatgtcagagaaattattcgtcgttatggtgtctcaaagtctattatttcggatagagattcgagttttacatcaagattctgggagagtctacattgagctattacgactccttactcagttcatccaaggtcaacaaagatgtatcaagacttaaaagtcaagttttgttggctagccatgaagaatgacattgctgagtatgttgccaagtgtcttgcctgccatcgaataaaggttgaacatcagaggcctgcacggttattgcagccattgaacataccagagtggatatgggaagatattggtatggattt

SEQ ID NO: 155268 - DNA, 736 bp, Cannabis sativa
aggataagcaatttgttaatgaatttgcaagacaagattatgtaagtctttgtcacttgatctttatattttcccaatattagtttcatattgttctaattttttgatttcatataggtgcggttgcaagcagttcgagcagctcgttctcagatagattctgattctgggtcatcaactgatcatgttagcatcttcgaagaggcgttgggtcagaggcggggtcacgttcgtggaattggtcgcagagtgaagggtaaatcttcaagtagccgtgaccaatccacccaatcacaagcacctcataagatttggtaaatgacatgagtgtgatgtttactctcttttcatctcaaatggacccatcaaatatggaccctgcaaagctagcaatgtttaatatgcttaagagtaagtattccactccagtgcctcaaccgtctcagacacacatggatcaaggttcccctacacattctcaaaatttagcggcatcatctgacatgcatacatcttcgacatcacaacctcagcatccagtaaagccgctcttgcagcctttgccacaaccatcacaccctccaccgccttacccttacatgtatggaccaccgtatccatacgtgtacggaggaatttcgcagcagcatccttctgctttctttccaggttcgactaatatggctggatcatcacagcaaccttcgtcattacagcaggctcagccagtctaccc

SEQ ID NO: 155269 - DNA, 502 bp, Cannabis sativa
attgcataaaatacaattcaatataatacaatatatacaatacaatacgacctaatacggcgttccaaacgagccctttaaaaatgttaaggagtagtgatcacaaattattattattattgcaactgtaatttacctaaaatttaataattatgtaaagttgacgttaaaacagttaattgcacttattattttgacattaattatttaattattacattctaattaattaattagtattatatgtagctgtaaagctcatgctatgaaaactactgtttgatttttcttgtcaaaattaattcttagtttaattaaatttgctcaatctaaaagtcaatttttttttttaaaagaaaactgttaatattaatattaatgaataagaattaaaaaaaaaattataacaaatttaattaaaaaaaatgttaatatattttaagactattggcagcgaaactctcatatattttatgtaaagaccgcatatgattaatacctt

SEQ ID NO: 155270 - DNA, 721 bp, Cannabis sativa
gcccaaagtctcactatctttgcatcccctgatatttcctttcctattacccctgatcagatgcattatgtgccattttgggtgcaggtgtatgggatcccttttagatgtaaataatatgatttagctaagcttatagctactggggtaggggatttgattcaagtggatagcactaccctcaaggatgggactgggccttatcttagggctaggtatctgttagatgtcaacaagcctattaggaggggaataaacatttgtttcattaaaatgggtagagagttcactaagtggctagactttaaatatgaaagattgcctgactttcgcttctactgtggtaagcttgaccatactaaaaaatattgtcatgcttatttacagaaatgtgatgagtccattgccccaccacattgtccatatgataggttactttgtggtaaagaaaaactgtctgagaaacctctaccatttgaataccctcatgccccagctattactatagctgacctggatattactgattttcctcacgagggccagcctaataaccctttccttgcgcattctgttggctttacctcactgcttaattctcaaatggcttccctttccaatatgagtgcttctgggagatcttctagtgttatgattcctactcctatgaacccaaacctctatgtaagccaacctgttgtcactgactccactattgtca

SEQ ID NO: 155271 - DNA, 599 bp, Cannabis sativa
ccatatttgatggcgcttactttcaccatgccttgaaagacaatccaccatatttgatggtgcttactttcgccatgccttgtatattatatagcttagtaacatcctgctcgagattgcaaaattttcatgctttttcagtgcacaaaatgtctcccatttgtttttcctggtaaaagccctgtttatttgacagttataataattttgtattattatcctttttcttaagtctatgtttgtggttactataaatgcagtttcagaggagacatgcaatgaggtggagagcttggtatttgatctttttgccaatcttggggctacaggtgcggcaattatatcagtagagaaaaaattcttatgctaatcacggtttcaaatttcaaaaaatttaaaaataaactcaataattaaacccaaaaaattaaacaatctttctttaaattaaaaaaatttttgatatttttttttgttattttttttaaattttgtattatttatataatatagaaaccatacagttaaccattataatttttttcattaaaatttaaaaaataaacccaataattaaacccaaaaaatatctatctctt

SEQ ID NO: 155272 - DNA, 789 bp, Cannabis sativa
gtatactcaaatgccttgttggtgcgtggtggtactcggtggtggtggtggagaactcgatagtggtagaggtagtggtgttactcggtggtggtggtggtgaagggttgagagagagagggattaaaaaggttgaagagctgagagtaaaaatagggaaaataggtcggttgggggtatttatacacttattagcggcgaggcttgctgctaatgacccgctgctaatgtaacaccctaactattttaggcatgttaaggtgatttttaacttactgtgcagctcgttgctagtcaacgagattattaaaaatcgtgattaattaacattttgtttaagtaattataaccataaaataacatacataaaaaatttagggatcccatttacaaaagtatttacataagtttcagtgtacaaatacaaaagtctatcgcctagcgactatacaaaataagccctgatgtcccaaagatcatacgctctaggcctaaccgcctcgacatgtacaatctccatctgctcactctcacagctactcagccttagccttgcccttatctacacatggaaatagcaattgtgagtcaacagactcagtaagaaaagcataaacaataacatagtaataacccagattatgatcagacgcccatacccccaatcataaccctatccctgtatacaacacggtgctgagtctagaacattcgtacgacaatactattgaccataatatcatcctatacctggtacgctagttatactctaggcgtactgatgtgata

SEQ ID NO: 155273 - DNA, 501 bp, Cannabis sativa
gttacgattaaatatttgtaacccaatatttatattggtttgataaaaatatgctataacccgactaaaccgaccgacgtacacccctactaagtaccttaagggtaagcaggtttttgactgtgtggttaagagttttgattcttagtttttgagaaatgtggtgcgatctaaagagattttatgaaaaggggcgtgcaagctaatatttgatgggagagagacaagtatttgggatgacccttgggttatccatggtacaaattttaaccctaagcccaattatcgtcaatagctgggtttggagaaagtgtcagatttacttttacttgacgggaattgggacacatctaagctgcacaaccttcttgatcaggaaactattagtaacatcttatgaggcgataatcccaatggccagggaagggatagatgggtctggacaaaagaaccaaatggtctgttttcaacaaagtttgcctatcttattcaagcccttga

SEQ ID NO: 155274 - DNA, 635 bp, Cannabis sativa
ttcttttgccttcttggcctcctcctttgccttctcagcttcctcttttgccttctcggcttccttctttgccttttcagcttcctccttcactttctcggtttcttgcttgaggcgggaattttcctattaagagtcgtcccactgcttactcacaaccttgcattgtgatagtaacttgtcgacctcaccctccaagtactcaagctgctcagagagtaatcggttggaagcaaaagaagcctggagatttacaaatagatggatatgaaagaggtgtaaaaaagaataatataattataataacaaagccaacataccatgaagtgatagccaagctccttgaaagcatctcttttggactcctaagattgagaaaatcccaatcaaggggaagaagagtttgaagtttgcgccagcaggcgactccatatgcctgggcaaattcagacccagcttcccctgctgcgaccgacagggtctcaatggcttggctcgaagaagcagtagcaggggtcccctcaggatgcggagcattggcgttggggacaactggaggaggaactttctcttggatctcgttgtctgaaacctcgagatcgataggctcagccagtgatttcttcttatgggtg

SEQ ID NO: 155275 - DNA, 533 bp, Cannabis sativa
tgagcatattgcttggccctggcaccacccttcaacttagcttcacgcttcagttgaatcaactcattcttcggatgagctcgtttggcctggccagcatcaaatttcctcttcttccccaccacgaacttaggagtaaactactcgggataaagcccgtacctcacaagattatcatcgtaggtcaactggataatatttcggtcttcccccggcaactgagcaagtttttaagctctatccctaagagaaagagtgaggggaggacggtgatatgtcagaatctgctgaaactgagtccgggtaatgctcgtatccttcaccatgaagtactcatcagtaaaatgccctattttgttgatggccttgtcatccatgacaatcaaccacttgaagcctggctgagagaaatagaagtacccctaccttccttgtttgggaatggacttcaaattaaagaaccaggaaacctcgtgaggagaaggagtaccccatccttgggaagggtggaggacgaagagggcagacaaata

SEQ ID NO: 155276 - DNA, 738 bp, Cannabis sativa
  modified_base (152)..(158): a, c, t, g, unknown or other
  modified_base (319)..(320): a, c, t, g, unknown or other
  modified_base (391)..(391): a, c, t, g, unknown or other
ttgtgtgtggcaactggttaaagaagccaaaattgaggtttatgtatatactgacaactcaggttcacatttcaaattctgtaagactatactctcttctctgtcctattaacaaaaatttaacgtacacataatacatgaatatgactttnnnnnnnaaaccaagagatgattaaaaagtagaaatatagcttaagaaattaaaactaaggttataaactggtaaaggttgtgttggaggctagggtttttgcaagtgacccatgaatttctcataaactagtttatttttattaataaactattttatttttaatannaataaaaagtcactcatgaatttctcataaaccaagaattatgttatataggcatactttatatagaatanatatatatatatatacatttaaaaaatccaaatgtaaggaggcggctgggatcgggcgaagaaaagagggaccgagagagagttggagtggaagaaagagagttggggtgttgttatgtgaggattatttttgagtttttgataaaagtttcatatattttttagtttgaaatatattggtttaagaataaaatattaagatttgtaaagtatagtttttcaaatttccctatatacaattcaacatacacaataagtccctttattatttgagatatatctataacatcatagaaaaatggaaatgacaagtcgttcttgtcattttgtggttttttttttttttt

SEQ ID NO: 155277 - DNA, 616 bp, Cannabis sativa
cccggttttcacttgggtgaaagggggcaatgacccgagaagaggaggaagtatgaaaagagctagacttgatcgagggcttgcctcaacggattggagaatcttattcccgcaagcggtcataaaccatcttggggcctctgaatcggaccacaggccattgttacttgatactatgggaggggctagatgcactagacgtcagtttaaatatgaaaatatgtgggcgcgtgatcctcggtgcttttgggtagtaaaggaagcttggaaatctaggatgcatgacaaccctatgaataacttccacatgaaggggaaagccacgggtagaaagcttcagaggtggaacaaatcgcagttcaagcacttatctcagcaaattgacaaggcgaagtcccaactccaagaggcagaaatgaagaacccaatcaatatggaggaaattaataaagctaaacaactgctttctgaagctctacttcgggaagaaatccactggaaacaaaaatctagagtccaatggctaaaggagggggacatgtgttctaagttctttatggcttcgactatagtgcggcgtagaaggaattacatccaatgtatcaaagctactccg

SEQ ID NO: 155278 - DNA, 659 bp, Cannabis sativa
  modified_base (263)..(268): a, c, t, g, unknown or other
aaaaattaattcaagtacatatgaaaatattaaactcttatttataaacaaaaatatctttacaagcttttcaaggcataaaccctaataatctcccacttcacctaaaagtaaattggcatctcctttagtctcatattagttatatgacccataaaagattttgctggtagcgtctttgtgaatggatctgccatgttatgttccgacgcaatcttcacgagtgtcacatcacatctttctactatatctcttagtagatnnnnnntcctctcaatgtgcttgcctctcttgcggattcttggttgcttggagttggccacttcttcactgttgtcatagtagagcacctgtagtttttctacttctggaactacttccagattcgtgtagaacatcttcaatcaaaccgcttccttagctgcttcacaagctgctatatattcgacttccatggttgaatctgtaatactagtttacttaatgtttctctacactacaactccaccaccaagagtgaatactgacacagatgtggactttatattatctttgtctcattgaaaattaaaatccgtatatcagtgtgttgtgatattttgcacacgcaagtgcacgtatcgttacaagtagtaaactcaccaggagtgaggtcgatc

SEQ ID NO: 155279 - DNA, 529 bp, Cannabis sativa
  modified_base (247)..(257): a, c, t, g, unknown or other
  modified_base (419)..(433): a, c, t, g, unknown or other
actgagaaattaatctgacaataaatcaactataaataaacaataaaataataaaaaacaaccttatataaataaattataaaaaaatagattcattgaagaggtattattttaaaaatatttttattttgggagaattacttcgtatactaattttttaactttttttttttcaaatttacggtttgagtttctaaagtagttgcagcgctagttgcaatatgggtttctatacgattttttgttnnnnnnnnnnntgcagcgctagttgcaatatgagtttctacatagaattccataaaaatacaaaaaatattgttttaaagtgtaaaaatgaaaaaacccatttatcttgtcaaagtaataatgatacaaacaatgactcccaaagtaaaaataaaagggtaaatagtggcatnnnnnnnnnnnnnnntaagtttgtaagcggcataaacccaatgattttttttagtggcataagtacccaatgtttataaaactttaattttctttcagtttcatcagtaca

SEQ ID NO: 155280 - DNA, 631 bp, Cannabis sativa
atcatcaataatattcatctcaaagctaaatgagacaattacttgatgaaacttgtgataccattgacgagaagtttgcttgagtccatagatgagtttttttaatttgcaaccatattctttgggtcaccagacacaaagttttctagtttctccagataaattttctcatcgatctctccattgagaaacgctattttaacatccatctgatgtaactcaagatcaaagtgagcaataagtgttattattatcctaaaagagtcttttaataaaactggaaagaaagcatccgcataatcaatgccttatttctgagtatagttttttgctacaagacgtgccttaaatcttatcacattaccatattcatccctcttaattttaaatatctatttataaccaattggttttacaccttctggtaatgagacaacttcccaaatcttattgtattgcatagacttattctcttcattcatggcatcattccacttttgagagttaaaacttttcatggcctgatgcaagttaattggatcatcttccatcattctaatttcattctcatgttcttgacaaaatacaatataatcatcttaaattgcatttattctctctctctctctct

SEQ ID NO: 155281 - DNA, 600 bp, Cannabis sativa
gcctttatttatttatttcattaaatttttgacatgtgttaaaaattgtaatttaatacataataaatataattttttttcaatacattttttctattgatcattaatgataatctttaatatagaataatttttaatcaccacattaatattaataattttttaaacaatttaatttattgatgagatattttattttttttgttataatttgcaacataaaatattatattgtacattgaataatagtaaatatattatttgtttatttttttaccaaatttagtaaatattgtagagatgaatacgagatgggtaataagtggggatgctcttcctgttcctatcccctttaattatttgaagttttttcatttttacactttaaaatagttttttttatttttatttttatttttatttttacaaaattctaaatagaaacccctattgcaactaccactgcaatctaaattgcaaaaaaatatcgtataaaaatccctattgcaactattttagaaacccaaaccgtaaatatatattaaaaaaaagttcaaataaataaaaacgtttataaataaataaaaagagttagacctc

SEQ ID NO: 155282 - DNA, 504 bp, Cannabis sativa
ttataattctataattaaattatttaaaaaatgtaaaactaaaattatgtattattattttttttgttgggtgtgatttaaaaatttaaatatttatatggaacattgacacattgaccgacttagttatattattgtggggctatagccctcgctaataaaaatattgtcttttaaaaaattacatgtaaattttttaatttaataattatgaactaaaatagtagaaaaaccctcataaaattaaataaacctagtaatagtagttataatataagtataaatatttttttatgataaataagacccgacaaagtaaaaattctgggtccatcactgatatggaaatatttaaattttaatatatattttttatataattatctataaaatattgtttaaaaatatataaatataattcgggttgctaaaatttaagtgcaacccgctcaattttttttaaaaaaattgtaaaacgactaacggtttgggcagtttggtcgg

SEQ ID NO: 155283 - DNA, 516 bp, Cannabis sativa
  modified_base (433)..(476): a, c, t, g, unknown or other
ttactcggttattgcagcaaggagaaagtgagaaggaattctggttccatcctcaatgcaagacactgaaaattattaacctttgttttgcagatgatctcattattttctgcaaagctaaaaagggctcagtgacttgtgtaaaacgaatttttgaagagtttagtaacaaaacaggtctcaaagctaatcttgcgaaatctcaggttttctttggtggtatctctaacagagaaagatctgatctactaggcaccttacagattgaggagggggtgtttcccctaaagtatctcgaggttccaatgagaccaacgaagtggaaagcagaggactatggggttattctcaagaagatcaagaaccagttgcactcttgggctagtaggcatctatcttatgcagggagatgttgttggaattattttaccannnnnnnnnnnnnnnnnnnnnnnnnnnnnnnnnnnnnnnnnnnnatgaacttctaaaacgaatataattaaacacatataaagt

SEQ ID NO: 155284 - DNA, 746 bp, Cannabis sativa
tgctcaactgttgctatggtatttatgactttgatgcttggctccgccaggcgttccacaggtaccacccccagtctctcaatctcactgtttgaagctaacttagccaaacagtatgcgtgagcattcttttccgtggggattctttctactttataatccgtgaactcgtggagcagttctcggactattgccacgtatgcagccattttctctctgcgtgcctgatattctcccgacacctggtttactaccagttgcgaatcgctgtagacttctactcttttggcccccacagtttttgccaatcttagtcttgctatcagggttttgtattcagtctcattgttagaagctgtgaattcaaaccgtagggctgcctggagtcgaagtctgctcggggatatcatcgcaacccctgctctggatcccttctcgttggaggcaccatcgacaaataccttccttggtgggacttgcagtgtggatatgttagcattagcttctgcttcgtggcactccgtgatgaagtctggtagcgcctacccttttatggaagtgcgaggaaggtagtgtagatcaaattagcttagatccatggcccatttgagaagtcttccagacacctctagtttttgtaggacttgtcagagcaggtgattagttaatactttgattgggtgagtttggaagtaaggtctcaacttcctcgaggccattaggaggcaaaaaactagtttctcgat

SEQ ID NO: 155285 - DNA, 1256 bp, Cannabis sativa
  modified_base (1007)..(1008): a, c, t, g, unknown or other
ttttcgagaaaattctttgattagtaaagattgcactacaattgaaaaagcactgtagcgtgccttagcatttgggcgttacattatatctcatttgactattcaaactaagtcatgggaacgagaccctccacataatgtagtttcaaatctcggagaccaccacatcatcattggacaaatatatagaattcaattctcgtatatttagtttattcattcttttatttcctttaggttcattctgtttgattaatcatctcatattcttaatattaaatatttatctgttcaaaacagttgttttgaaattgattaatctagaaccctccattagtcacatcttattgattttattgtttatgataattaatgaatttaaaagatcacatgactaatcaagtcagatattagaatgaacatttcatttcacatcctttctcgttttaaatcactaacacacttaagtgattccattatttaagattacataactaataagattatttatttctcgtttcacaaatgatgctgtaatacatatatatattcttaaacttattatctctttaattttaaattataataactcattattaatggattcaaatcttggatgatcttttaaatatactcccagtacatttaatgctctcactcaattagacaattcatttacttgtcctctttctttgatcatttaattaagactattaataaatgattgttatattctaataatcttgggtcacaacttattagctacacagatgcaggatatttatttgatctacataaagccagatctcaaactggttatttgttcacttgtggtgacactgctatttcttggcagtcaacaaagcaaattctggtggctacttcctcaaatcatgctgagatacttgcaattcacaaggcaagtcgagaatgtgtttggttaagatcaatgacacaacatattcaaggaacatatggattaacatccaataaagaagtaccaacanntctctatgaagataatgctgcttgtatcgctcaacttaaaggagggtacattaaaggagatagaactaaacacatttcaccaaaattcttctttacatacaattttcaagaaaatggtgatatcgatgtttaacaaattcgatcaagtgataatcctgtagaattattcacaaagtcattaccaacatcaacttttgaaaagatagttcacaagattggaatgcgtcgattaaaggatctccatgaat

SEQ ID NO: 155286 - DNA, 953 bp, Cannabis sativa
gacgccacctataaaaagtactggacaaaagtggtgcccaatagcaatgttgtttctacaatatgcctatagccgttctctttccttcacttctcacacgaaataaaagtccaataaatgatcaattgtttttccttaatttaggtaaatagaagaaattttaatatttttatgcaatattcaaataataaaaaggtaaacatcatgtcttattttaaggcacgttgtttaccttattttaaggcacgttgtttacctaaattaacacatgttgtttatctaataaaatattacttaccttattttaaggaacgttgtttacctaaattaacagatgttgtttatctaatgaaatattgtttaccttattttaaggcatgttgtttaaaattttgaataaattattatttgttattttaaatgacattgcaaacggttgataatgtaataattatgaacatcaaagtgccaagaaattaagattttctttttttttttttttaaaaaaagtgctttaaaacttattattatacttttctttctcaaacaaaataaatgatatttggaaagttatttgtattttttcttatccatttctttctaatggatttattatgcctttttttttttaacattgtgcatatattttgactttatcttctgcaatattcacaattgtcctaaaatctttataaaatatcatgactttttttagtgacaactcatatacatatatttattttaatctttatatatttattgatttttcataaaagtttagctaattataattaaataataaaatatttaaagttttattgtctagcactctcctcggtatcacacgagaatttttttttaaaagaaatattgctaaccaatcgtgggacgccactatataaaaagtactaggcaaaagtggtgcccaatagcaatgttgtttctacaatatg

SEQ ID NO: 155287 - DNA, 770 bp, Cannabis sativa
  modified_base (449)..(449): a, c, t, g, unknown or other
attgagtataggctgacattatggtcgagagtattttcgtatgaactttctagagtgagtaccgtgtgggacacggggatagggttatgatcaggtgtatgggcaccaagttataacccgggatatagtatgttttatgttatgcctttcttactgaatttgtcgactcacagtgttattctatgtgtaggtaagggcaaggctaaagctgaggagccgtgagaacgagcaggtgaagattgcacatgtcagagcggttaggcctggagcatacgatcattgggacatcaaggcttttgctgaatagtcgctaggtgacaaaacttttgtatatgaatagcaaacttttgtaaatgtattttgtaacgggatctcaggattttataaatatgttactttatgtttttaattaagtaggaaaaatttaattaatcacgtttttcattaanctcgttgattagcaacgagcttcacagtacattaaaaaaaatcacgttaacatgcctaattagttagggtgttacagtattcaatgcccctacttcaatgtgttcttcctacagaagccaatgaaatcattagaaaaattcatgaaggtttctatggggatcatgcgggctggcaaagtctgtctaaaaagattattagaaaaggatactactggccagtgatcaataaggacacacatgagtttgtcaagaaatgtgataagtgtcaaaggttttcatatatacctcgcataccgccaacagaacttagaatgatgacct

SEQ ID NO: 155288 - DNA, 709 bp, Cannabis sativa
gaatcttgattgagctaaaaccttactctgataccacttgttatgatcaatcatcacctctagacaatcaagatcaagtgctcaaagagcagaacacataaacatcaatggcagcagaatgttaataaactagtaaaaaccagggacaaaatcagcaagaacaagttgaaggaactgcattgattttattgataagtggaggaattacattgagagagaaagagagagtaaactgtacaatctcccgtgaaattatttggattggattctatataagcaccaattctatttacaacatctctaaccacgtgtttttacatgaaactcgattgcatatcaaatatttgaatctaaatatttagttttgttagtgggatagaacgggatcatcaccagcctttagtctgtcaataatgataagtttacgaaggcacgtctaggggctaccatctattactctgttaatatccacatcatgatagaattgattttattgtatcttttttatgtattgtatatgtctatattgaatattttaaattaatagttttgttaaatattgtgaatgagaattactaatatactagaaaaatactaacaccttataaaattaaatatataaaaatattaaattacataaaaaattaaaatattacacattatttattattcaatatattaattattatacaaaacataaattaaaaaa

SEQ ID NO: 155289 - DNA, 554 bp, Cannabis sativa
attatgtggtgtcggtgatattgacattgttagagatcgttataaaaaagagacatcataattataacaaactagtaagtattgtaattttttggtatatcttttactttatttgtttttctttttacttattattaaattctattaatttttatgtataggtcgatcacattaaagataactttatggaaaaaattaggtgagatgctcaatccaaatttatataagaaagatggtggtcaattcaccactacaagtcttggttttagaggcagttttaaggcctttcagcgtcaattttagtaaaattcactaccgacgttgatccaaacgacgctataggatcgaacataattgacgctaaagtgtactctatgatgttagttattataatataaatgatgccatatatacactatggcgtcggttatatactaataaccaacgctatatgccctaaaaactaacaacaaaggtttaaataccgacgccaaatccttattaattcaaaattttaatttatttaaatcatatatttatttgtttacaataaa

SEQ ID NO: 155290 - DNA, 521 bp, Cannabis sativa
atttttatacaactttagtcttccttcctggaagtcgaagcttgttacataaaacttcaacattactctcggatgcacattatttttcgtgtaagaaagatcacttggggtaaattacgtcttcaaccctccttccccaacttggaagaattgcttgaagtctctcctacccctcatgatgcttttcccctttttcttttcaagcgaaatctaagcttgaatttttatttaacttcatccttccttcccagaagcctaagcttgatacataaaaattcaacatgactcatgcgtgcactttgtttttcgtgcaagaaagatcattgggagtacgatacgtcttcaaccatccttcctgaattggaaggattgcttgaagtctgtcctactcctcgtcatgtttttccccttggtcttttcaggcaaagtctatgcttaaattttatacaacttcagccttccttctcggaagccaaagcttgttacataaaaattcaacatgactcttgcatgcacattgt

SEQ ID NO: 155291 - DNA, 534 bp, Cannabis sativa
cgtgccataacttgacaccaatacattgcatcgcttaatcaaataaactcgtacctaccggtacttattatatgtcactaacacccgtatctgcacatcgccaggaggaaaccctgcaacggttttattttatgccataacctggcgattttcgtatcactgatgccgtatctacacgttgctaggagtaatcgcctaatcagatgaactcgtacctacgcccggtacttatcatatgtcattgacacccgtatctacacgtcactaggaggaaaccctacaacggtttcattttatgccataatctggcaattttcatatcactaatgtcgtatctacacgtcgccaggagtaatcgcctaatcagacaaactcgtacctatgcctggtacttatcatatgtcattgacacccgtatctaaacgtcgccaagacgaaaccctacaacagtttcattttatgccataacctggcaatttttcatatcactgatgccgtatctacacgtcgcaggagtaatcgcatcacctaatc

SEQ ID NO: 155292 - DNA, 548 bp, Cannabis sativa
  modified_base (141)..(143): a, c, t, g, unknown or other
  modified_base (330)..(332): a, c, t, g, unknown or other
tcttcaacttacacactttatgttcattgtttggtaggaaaaacccctcaggctgttccatatagacctcctcatcaaggtcaccgtttaggaatgtcgtttttatatccatttggtgaacatacaagttgtgtaatgaannnaatgcaaacaacacccttatggtaattgctctagcaataggagcataagtattaaaataatcaataccctccttttgcctaaaacctttagctactaacctagctttagaggtttgaatagagccatcagtgtgatatttcattctaaatatccacttaaacccaattgctttgcatccttgcggannntccacaacatcataggtgtcattgaaaagaattgagtacatctcatcatcagctgcttctctccaaaatgcactatctctagattgcatggcttctagagaagtgttaggatcatcctcaataagaagtattaaaatgaattttccttattacttcttttctagtcccttctaccacgtagaaagaaattagttgagaatctatttcatccttatt

SEQ ID NO: 155293 - DNA, 612 bp, Cannabis sativa
  modified_base (564)..(587): a, c, t, g, unknown or other
aatcaagaaaaataaatgcaagatgaagtactctgcacactggcaggagcattagcccgaataagcacagatggcatcatcatctgaagaatcttcctgctcctccaggacggctttcccctttccttctacaagggttgatggcggagtaggtagatcaggctatctgatctacatagtatgttcgatgggtctatgcttggttgggagggttttcatcttttggagcggcctctcctgcattaaatattcctgagcctccttctcctgctaagaatattcttgagcatattgcttggctccagctccacccttcaacttagcctcaagcttaagttgaataagctccttctcctgctcagaatattcttgagcatgctgcttggcttctgcatcatccttcaacttagcctcacgcttgaggtgaatgggctccttctcttgctcagctccctcagcccagcaagcactggactttttctttcttcgcttcacaggctgaggtataaagtctactggataaagctcgtacttgttggatatgttttaccaggatctagattnnnnnnnnnnnnnnnnnnnnnnnntcctaaatatgaatctctaaaacaa

SEQ ID NO: 155294 - DNA, 526 bp, Cannabis sativa
gtggtacctcactccaagtaaatttagcactcataaacatctcatagggtgccatacgtattgtagccaaccaactgtcgtcgtaagagaatgttatcgacaataaacacttactctaattaactagaaaagtataccatttctaacgtccccgcttgaagcctccattaggtccttacactcacggaatgatggctcttatacacgagtacgttactttagttgccttatgtacaattcttcgactagtttatatgtttagtacgagacttcatctgattccctaaaggtttgtatttgaccttacacttacaaatatactaaaattcaaaaagagcgagatcaccttattcgtgaatgcatgggtcgtgtcaagttcattagttttttatgctctactcttacatactggcatgtaggacgtttaatcatgaatccaatcgccaccttctgcatacttatccatcccttacctaatcattgtaccattttacaactgactcgagatgcatctagtgtggtgtag

SEQ ID NO: 155295 - DNA, 876 bp, Cannabis sativa
tggaatgcaacgtctcataatttggtcggggcagtacttgaaaagatatggatcatcccagtaaaagttacggacctcgaccaaaaatttacgtttatcctgtgcatttcaggaagtaggaatctcaccagtctcaccagtcactaagtaattaacaatatgagcgtaccatggtaacttagtgatggcgtagagattttcatcagggaagtcatctcggatagcagggccatcagcggaatcagaaaactcaagacgagataggtggtctgctaccacaatttcaactcctttcttgtccttaatggtcaagtcaaattcttgtaatagaaggattcacctaattaagcgtgccttagcatcctttttggaaaggaggtacttaagggcagaatggtcggtgaagaccatgataggggaaccgatcagataggaacgaaacttgtcaagtgcaaatactacggcaagcaaatccttctcagtagtagaatagttcatttgagcactattaagagttcttcatgcatagtatacgacaaagggcttcccttcccttcgttgaccaaggacggcccctatagcataattgctagcatcacacatgatttcgaatggcaagttctactccggtggttgaatgataggggcgaaagtgagtttagtgacaaatatttggaaggattcctcacactcgggtgtctagttgaacaccacgtcttttgccaggaggtttgacaagggtcgagctatcgtcgaaaaaattctggatgaacctcctatagaatccagcatgcccaagaaaggatcgaacatccttaacagtcttgggggcgggcagctttgatatgagttcaatcttggattgatcaacctcaa

SEQ ID NO: 155296 - DNA, 784 bp, Cannabis sativa
gaaaaggtttggtcaagaagttataatagttcgatccctctttcgtcaaaaaggttcagtcgagaacctttaaaaagttcaaaaaaaaaattatttttgaagtagtgggtttgcattgtatcatgtatttccagatgaattctggttaatcatacacaaatgccccttaagtaattttaaaaaatgaaactttataattacttaaataataaaaatgattctctttattcataacagaagttaaatattacatcactaatgtgagttacatcatttatttattggtagtagggtcgcaaatgttccacgttctagtagttctttattagcgagctattcagccgagccaatttgtagactccaattctaactactgcttcgattacatatggaccctcccagttcaggttgaacactcctacagatgcatctctcgtgtttacaaatactcgccttagcaccaagtctccaatattgaatagtcttttcttgactcttttgttgaagtatcttgtaactcggtgttgatacgctgcattagtgatttgcgactcagtttgtttttcatcaagtagatccaaggacaattttagaagttcttggttttattctggattataaaactctcgtttgtgagtcaatatgttcacttcaacaggagcattgcttccgagccaaatggtagcgagaagggagtgtgtcctattaccgtcttctcggtaattctgtgagcccagagtacttgaggtagctcatcgacccacctgcctttggcagcgtctaa

SEQ ID NO: 155297 - DNA, 983 bp, Cannabis sativa
  modified_base (597)..(604): a, c, t, g, unknown or other
  modified_base (943)..(956): a, c, t, g, unknown or other
cttcgagcttggcttaatagatgtaaatagaagagctcttatttcagtgatcatattcactgaaatatcattttcaagaagctaagtgttttaaggataaaaaaaacaacgaggagtgaaacggtaaatttatttctactcggtgtaaatcatctataaatgatctttgattattgagattagaacgatggttaaatgttgatagggtatctatatggtggaacatatagagctttctatatcattgagagttcaattccaagttctatgagttgatgcaacaaggaattaataagttagggaatttactcgttaaattctagttcagcttattggaagctcagctatataggcccatggtacaatactagttgagaccatactgcttgtaagactcaaattattgattttaattaatcaattataattctaacattagactacatctagtttatgaattttcactaagcaagggcttaaatgtgaagaaaagagattctaggttttattttttaattggaagactttattatgtctaattaataaaatggcaattttatttgataattaattttacttattaaataattagttttnnnnnnnnaatggttagaattggaaaattggtgtttttgagaaaatgaaaatgaaaattgtcaaaattagaaaaataccaagtggggcccattagtctatggtcgaccacttatgagggtttttccacctaatatttttattattttaatgtctagtaattcctaacctaaacctagtggttacctatgaattaatagtgatggctcacacttaacaagagataaaaaattttaccttcagagaaaattgagccatcttctatgcttctatagccgaaccaccaatgtctctcttttctttttaaactttcgaaaccttgagagatagagtgagtgtccacacacannnnnnnnnnnnnnaatcatagtgtggaagattgtgaagaa

SEQ ID NO: 155298 - DNA, 949 bp, Cannabis sativa
  modified_base (360)..(371): a, c, t, g, unknown or other
  modified_base (829)..(833): a, c, t, g, unknown or other
ccctatgtcaagtaacccctagagttgaattttcaattctttaagctcagttggagccattctataaggagccttggaaaccgattccactccaggtgctaaaataataacaaaatcaatttcccgctgaggtggtaaacctggaagtttttaaagaaaaacatctaaaaattcttgtaccacctgaatgtcttctggccgaatagggttaggccgagtggtgtctactaccatggcccaaaaccctagacatccatcacacaaaaattccttaactgctaaggctgaaatcaccgggatccgagatccctgaaccgaactgacgaaaacaaacggttcttcaccttctggttggaagannnnnnnnnnnntcttacagtcaatactggctgagtatttggataagaaatccattcccagtatgatatcaaaatcttctagactcatttctattaggtcagcactcaactccttatcgtcaatcctgatcggcatagacctaatccaacttttggagataactaactcttcgccaggtaaaaaggttccaaaccctgattcgtaactatcatgtggtcaatcaaatttactaaagattctcgctgccacataagaatgagtggtcccagagtcaaacagtacagagtaaaaagagttgatgaccgagagctgacctgttaccactgaagaacttgcttctgcatcagcttgagtaatggcgaacaccctagctggagtgggtttcgttggagccttcggtgctttggttctgagttgaggacaatccctcttgtaatgccccctgatggtgccttttacaactggggcnnnnngggtaagtgtatcgggtctcagaactaacatggcgaccgcctcaaccctggttcccccgaaacctcttgttctgacctaggccaccggttgcagtggatgctttccttttctgatc

SEQ ID NO: 155299 - DNA, 597 bp, Cannabis sativa
aggctcggtttgcttcccctggtgatactaatgaacctgttgttgcatctgcttctttagaaatggctgaattcaacttgcatttgggaagaatggagacagtgtttgttacaactctgcactcttgttctagggggagttgtcttgcttgtggtttgtgcacttttccgtttaaaaagttgctttgtttgtggtttgtaagcttttctgtacaaaaaaagttattacgttttatgtgttagagtgctttcatgcagggggagtattatctatactcttttgtttttgtttctaacacttgatgtaggttttctccaaataaaatgtttagtcaatcaaagtgccaaagggggagattgttaattccattttggcatatttaattgacaaaaataatttattatttattgtatatttttggctggagtgtttaaattggtgtccatattttgtgtatctaagtttggaaggaaagttgtctagctttagtatttagtgaaattgaggtaaaaatggtaagttttgattacacattgattctttgctaaccagctgttattctgatcttgtgttgagtttcccattttctaagatcag

SEQ ID NO: 155300 - DNA, 590 bp, Cannabis sativa
gttgtgcagaagtttattgcaaaatatttaactataatggatcataaaaatcaaaggcggattccaattattaggtaatatttggttggaaagaatgaaaatttaataaaaataaaaatggaatagaataaaatttaaaatttaaaatttataaaaaaaaattattaaaaaattattaattttttttattgtgtattggaatgatctttttttctattttaaaatagaattgacatttcactagaatagtagaaaggtcatctcattggaatgtcattctaatattttaatatgcaaccaaacaaaataatagaatgaatatcgttttctttccgtttcattttatttcattatctcaaaccaaacgtcaacttaggccaactccaatagaatactaaaatatcaaatttgttaagatttcacactaaattcattccaaccacactgtggatctgaaaaatctcatagttattcaaagttatcatataatatctactttgaatgagatcaacggtaatcgagatctttagattctttttagtgcaaaactttttatctatttattatgcataattttctttgacaaagag

SEQ ID NO: 155301 - DNA, 813 bp, Cannabis sativa
gcaaaaaagttcatgaagcttagaataagcaagatggaagacagacgttacgcagttcggaaacaaatgttatgattgtaaaaactctcgaagacatgataaaggagaatcgcaaaggtttctgggcctagggttccaaaacatttttctagcaaaaagtagagaggatgccagttgacatataaacatgcaaaaataagcataaaagaaaccagagacttactcgaagatcagatgtccgtgtgcgagcaacgtcaatcccacaagcattctttataagagcacttcggcaactttgaagtcaagaatctctcttttcgctctgaagtctacttagcaaagaaaggtgactaaaatgagtgtatgtgccaatgctgcttggaatttataggcaagtcacgaaaagaggtaaccgtctcaaaggaacctcagacgcctcagcttccctcattaaaaacgaatatgggaaatcaaaaataatcaagtgcagtcgtcagccgtggagagagaaaatcagatttcaaaatattaagtgttagagaatttattagcaaaaaaccgaagggacgccgagtcagcatcacatcgagtctcggacggttgagctcgacacgtgtccccatccaaaagcaaaataagctcggataaagtctacacacaactttgaaagtcccgtacagacttggggggcaaatgttatcccaatatttgcactctgacgtggcatcacgtgaatggtgacacatggagtccacttgtaacatgtgctcgggaagtatagtccgagcaggatacttggcatgctcagagcaa

SEQ ID NO: 155302 - DNA, 956 bp, Cannabis sativa
ttttttttttttttttttataagtaatttatcttctctaaattaaaacagacttttatattaataattaaatttcaattaattttttttttttaattttctctcagtagcataacgtatatttgaagattattgaaaatgaatgatgattacaaatgaaatacagagataacatcaactctaaatgtagtaatgattacatgtaagatacggtgataacaattgttttaatattatatgagtttttatatatatatatatatatatagatttatagttttacttttgttttaaatttttattttgtgtgagaattatttagttttaaatttttcttcactataacgtacatttgaatatatttatttgcgtgttttctcttttatataagatattataagatgaatttttattttttttttattttttttagagttctttaaatagaattatcattttttttaaaatacatataaatataagtttaaaattatttaatatgattttattgtacaattaatattcatatttatataatttaaaatttttataaacaatcacacgcaaagcacacacagtatatttattaatctatatatctatctatatatctatataaaggagaagtgtgatccggtgacgtggcggtctaaaatcactctaaaactattattctctcctctccttaattctctcaattttaatattttattaaaacataaattaataaattaatattttactattattttaataaatcaattaaaaacttaaatatctaactttaaatcttctctaatttttaaaaaacatataactctaaacctataaatatatattatacacagggccggccctgactcttagtgggccatagaaaaaaaaaattattttgggcccttatttaaaaaaaaatatggtatttttcaaaatcagtaaaaaaaatggtataatttt

SEQ ID NO: 155303 - DNA, 799 bp, Cannabis sativa
  modified_base (27)..(30): a, c, t, g, unknown or other
  modified_base (134)..(134): a, c, t, g, unknown or other
  modified_base (183)..(193): a, c, t, g, unknown or other
  modified_base (745)..(755): a, c, t, g, unknown or other
actcagaatcgcaaatggaactagaannnnactaggactaggaccaagaccaggaccaaaacctaaaccttaacccagacatagacctaaacccgaaccgagactaggactagaacccgaacctagaccagganccaaacccacacaataactgggtcctggacccagaatcaagatatggannnnnnnnnnnaactaggaccgggacctagtacctgactcgaacttgaacctaggaccaagctcgtgacccgacaccaaaaatggaaccagactgggatcctagattgggatccggatcaagacccaaggcttggacaaaacccgtatttggtgtcttgattcgggagccagccttggaaccgaaccctgacaaggacgtaaacccacacgaagacctgaacccaatcccaaacccaaaagttgacccgaacccgtaccatgtgacccaaaattggaacaaaaatcggaagttgaccgggactggaactaggattctgacttggaatcataaattggacctagatccagaaccgtaaccggaccaggaccggaactccaaatcagacctagacccaaattgggagccggacctggatcccaacccaaaccttgactcgggacccgaacctaaacctgcactcagacccaaacatggaactagactaggcacacagcaccagggtcgggaccggacacgatcgtgtaccagaccgaaattgagacacggacctggacctaaatnnnnnnnnnnntcccaaacacagacttggacgtagatagggatccgaatacgaac

SEQ ID NO: 155304 - DNA, 691 bp, Cannabis sativa
ccaatcccatcttgatagcctcctttacaaacaagaaattctctggaagcagcgctccaaagtccattggctccgtgctggggataagaacaccaagtttttccatcagaaagcttcttccagaaagaaaactaattttattaggaagctcacccttgctgatggaaccatcatctccactcactctgccattgaagctgaaatctgccgttttttctctaatctctttcagtctcaaggcaccagtactgatgctattaaccttctcctctccactatcaattctaggcttactccccaacagttcgccttccttgatgatcctttcactgttgaggaagttaagtctgccttattccaactctctggggacaaagctcctggctctgatgggcttaatgcttacttttatcaaaagaactggagcattgtagggaaggacttaagtgatgcaattctgagtgtccttaataataatgctagcatggactccatcaacaaaactctcatcgtgctcattcccaaaaagcataatgcttctgctttaaaagactaccgtcctattagcctctgtacaaccctttataaaattgtttctaaaactattgctaataggctcaaatctataatggaggatgttatttcccctactcaaagtgcattcctctctgaccgtctcatttttgataac

SEQ ID NO: 155305 - DNA, 1058 bp, Cannabis sativa
  modified_base (765)..(767): a, c, t, g, unknown or other
  modified_base (1027)..(1031): a, c, t, g, unknown or other
ttgtttctgtacttggtcgtctccgagcacgcggtcagcgcagccttagtccgggaagaggagaaaactcagcatcgcgtgtactacagcagcaagcatatgataggggcggagacgcgataccccgtcattgaaaaactagttttctacctcctaatggcctcgagaaagttgagaccctacttccaagctcacccaatcaaggtgttgaccaaccacccacttcggcaagtcctgcaaaagccagagacgtcctgaaagctcctcaaatgggcaatggagttaagtcaatttaacttgcactacattccccgcatttccataaagggtcaagcgcgagcagacttcatcaccgagtgtaatgaagccgaagcaactgcgaacataccgacaccatcggtcccagcatgaaaaatatttgtggatggagcctccaacgagaatggatcgggagcgggggttgcaatgatatctccaagtggactttgactccaagcagccctacggttcgacttttcggcttcaaacaatgaggccgaatacgaagccttgatagcggggctgagactagcaaagaccgtggaggctaaaagagtagaggtatacaacgactaccaactggtagtgaaccaggtgtcaggagagtatcagacgcgcggagaaagaatggtcgcgtacgtagcgatagtccgggaactactccacgagttcacagactataaggtagaaagaatccccagagaaaagaacgctcacgcggactgnnnggctaagttagcttcagatagtgagattgagaaattgggggtagtacctgtggaacgcttggtagagccaagcatcaaagtaaaagaggccataacaacggttgggcaagaacccagctggatggtccccatcattgaatacataacgaaaggtgagttgccccatgaaagggcactgtccagaaaaattcaatatcaggctcagtgttatgtgataatggacaaaattctctaccgaagaggactcagcatgccttatnnnnngtgtgtatcggaccctgaagctaggca

SEQ ID NO: 155306 - DNA, 504 bp, Cannabis sativa
  modified_base (355)..(357): a, c, t, g, unknown or other
aggtggaacaaaaggcccacaaatatcagtgtgaataagctctaacacatctgcgcatatgtcttacttactctttctaaccttgacagtcaactttccttttatacaatcaacacaggaagtgaaatcagagaagtcaagatcctaaagcacaccatctttcaccaatctctccattatatctctagaaatatggcccaaacgtttgtgccaaagcatggaagatttcaaatctgatcttgcacatttagagccaacaacagcattaagagaagaagaagaagaaggacaagagggagaagtgacaggaacaacatcaagtaaatcaagcttatataagtttccacacaaagtnnnatttccaataaacatagagtcacgaaacaaagtcagttttccaattccgaaatgaagactataacctagtctatccaaaatagatatagagatcaaattcctcctaatagagggtaataagcaacatcatgcaactccaaaaaatgc

SEQ ID NO: 155307 - DNA, 598 bp, Cannabis sativa
ttttttataacttaagtccaaacactagtggcgtttaccaattacgggctcgattttagtttttattgcgtaagtatggtagtatgtataatatatatgtgccctataaagtttggggtggtttggacaggtttcggtgtcatttcggtgagtggataaacttaaaaatcacattttacctctgaaaattcggttaacgcggtcaaccggttctagccaatcggtttgccgtttcgggcagcctagggaactcaggaatcgtatttttaccataacttttcactcaggtgttcgttttagacgttctatatgctttttcgaagcttgcaacgagatctactatatggtgtattttttagagccaaaatataaattttattttagtgtatttgaactacggggtttggtaggaaaccctaggttgtcatttgcaactgttaagtagtgttttgggataaacacttattagtctattattgttatgacatcgggcctgggatcatcgattgtactctaagtaggtcggccaacatacctgaatcgaaacttgaggtaagaaaaatatattgtactgcatagtacattatatgtaatacaa

SEQ ID NO: 155308 - DNA, 1078 bp, Cannabis sativa
ataattaagcatgtttatgatatactagtaaaatttatgtgcgatgcacgtatactaaattttgtactaaatattttctcttttatttaaaagtgatacaattgaagaaaaaatgttattagtttttaggtgggattatattattatgtatatttaaaaaaaaaattattagttattaggtgagttgttacgtacaatgtacgtatactttattaaattattaatgtcatttaaaaaaaatattaaatatttaatattaaacataataaaaggaaacaatatatagttataattaaaaaaaaataaagacattttataagatttttaaaatataatgttaaagtatatgatgttgggatggtagattttggtagtgggtgtgaaattctttcttttttgtccccttaaaatcttgtcaacatatactcctaaatatatttatttcaaaacattactacagagaatacaattaattattaattatctaacaagtaacacattactataattattaataaagtcgacctttttattttcattaatccaagtggaaggtttcatatgcctttattaatgtattattcattagtcaaataggacatatgataccataagagataagagacacaaagattgttagaaaatgcttagatattagattactattatgattgccaatcaattaatcgacatgtgcttatatgtataatccaacccatttagatattagattgttcattaatccaacccgtttttccttttctttcttttcttccattttttttaactcacattaaccgatttacatatctatttttcctctctttttattgctcttaatctatatataaatatagttattactcgttctttatccacccctttccctgtgccaaagaaaaattcaaaaatgagtttaaaatctatagctaataggaataagaggaaacgtcctgttgttgaagacgatgactcgaattttgctctcagctgtcaaacgtgatcgtgctcctcctaaaaagaaagcaaaggttgctgccccttaaaaaatttcacatactcctactcaacatagtag

SEQ ID NO: 155309 - DNA, 639 bp, Cannabis sativa
aatttaattatatttttttaaatacataaaattttaatataattttaaatttatctataaaaaattatatttaactaatattattaaacaataaaataaataaatgagtttagatattttaaataatataaaactaattagtttactataaagttattaaagaaggaaaatgaaataatgcaatcactcattgcttgctatgttcagcattgcagagaaacatttattgtgcctatacctgtcactactataaaaagcatatttcccgtcaatttttaattgacattaaaaaaaattttgtcggttcccccaaccgatgtgtatgctgtagacgcaaaaaatatctgtatttgtgtcgattatcaatcgtcattttaaattattttcgtcggttttcaacactcgtaaacaattataaaaataatttttacacttatctcgtttataatagacacactaaatagacacacaaaaaaaaaacttcaaatctgagcctaaataaaccaaatttaagcacaatcaaaaacaaaaataaacacaaatcaaaaccaagacctcaaatattacacaatataaatacaaattgagaggcaatgagagagtgctagcaacgaagataaggagagagagagagagaga

SEQ ID NO: 155310 - DNA, 724 bp, Cannabis sativa
  modified_base (34)..(41): a, c, t, g, unknown or other
aaccctagattgtagtgagagagagagagagagnnnnnnnnagagagagagagagaaacagagagtgcctactgctagtgtgagatggatcttgaagctgtatagttgtgtttgtacagagaagttttcagggaccattgtttggttgtaacttaataattgaatcgatatagagcaataatctgaatccatttttcggagttcagaagaggggaataggctctccaattattgtttgaaaaggcatttttgaggaggcgcgcctcaagttgaggcgtttaaagagtgcagcaaggcgtgcgccttgcagaggagaagagaggcgtacgccttaatgggtgaggcgttgaggcgtaagaggcgtgcgcctcaaattttgaatgtgaaataggttatttgagccccaaaaaaaggcccaaattgttattttaaatttgtttttctgctgcccaacttaataatccttaaaaaaaagtccaataaacattaataaaaaagtccaatgaaaaaatgatggatggaaatgctccttcttgtctaggggagggaggcttactcttattcagtcggtcctatcttccctccctatctactacctctctctctcttcaaagctctaaaaatggtcatcaaggcaatagaaaaaatgatgagagatttcttttgggaaggtggagacttagcagggggtgaccatttagtggcttgggatgaggtatgcaaa

SEQ ID NO: 155311 - DNA, 743 bp, Cannabis sativa
tgtatttttacactataaaatatgtaatattttggcatttaacaagaggcacccctatctgccacagttatgcaagactttctggttgtcgacctgccattaacttacaatatattattgggttgcccagcattgattggactaggggcagttagttcgatcaagcatctatccctaaagtttcaaacaccagagggtgtgggggtggtgcgaggcgatcaaatgctagctcggggttgctattgcatagagctacaacacgaaaaagtcagtcaccagttaatggcggtcttggcagaagaaagcgaaaagaaggatgaagatcttgatcctcgaattcaagatgaaagaaacctgttaaaaccaattgaagaattggaagaagttgttctcgacccaggaaatcccacaaagtgtgtttacgttgggaagaacctggacaagcagttgaaatagcagctaataagtttcttaagggcaaactaggatcagttcacctggaaccgtggagatatgatagggattgaccataatattatctgccatcatttaaatgtcgatctaaactacccagcaaagaggtagaaaatgagacccttggattccgagaggcaaggggcgctaaaataagaagtggataagctgttagtcaatgactttatatgcgagttgttttacccctcgtgaatagctaatcctattctcgacctaaaacctaacgaaacttggagaacttgtattga

SEQ ID NO: 155312 - DNA, 516 bp, Cannabis sativa
atatggctagaagaagatgaaaaaattaatttttatttcatttaatatgtatataatatttttttttgaataatatgaatttattttaattatttttcattttttaaatgaataatttagtgttactatatttacatgtggtactttattgatcaactaatagaacgataaattgagtgttaagtttagaaatttgaggatatcaatagaaactgcaatgatgacattaactttatatgattggaatataaaaataatgcattatgaaaaaaaaaaatcattcataatctcacacctatttctttttctacataatctcacacctgcttttgttttgttcaattcctaataaattttttctataagaaaaaatacttttcctatattcagcaaagtaaatttttttacacatatatatagttatgaatacatatagatatatatatataaatgaataattatttaatttaatattattaatttaatttatatttattagggatattggcagctaaa

SEQ ID NO: 155313 - DNA, 538 bp, Cannabis sativa
cggttcactcaaccaccaattttcaaacttgaagtgtctacgcccctgctctatatttcgaaaatttgtgttcagaatcaaaggtgtatgatccgacggggatacatcatgattgaaaagccttgcaaagttaaacagcgccaaccagtcatcacttatcattaccctatccaaccgagcttcaatccaattggatgtatttcttcctttctcccaagtaaaaggatggccatataactttaagtcttgcaacctacactcaccaacagctgcccgaaaaccatctatgagcctatttggataatgattacccccttttttctcactttggtccatcacattattgaaatctccaattaggcaccacgacaaagaactttcagcttttaactcccttagtagagtccaagtgttagctctaaggctcttatttggctccccataaataccagttagccgaaattgttgaataccttcccaagagatagaagcatctatatggtttcgagaataaccattgattgatacttcatctttg

SEQ ID NO: 155314 - DNA, 625 bp, Cannabis sativa
tatcctaagcctgaggaagtccttcctcgcttctaggagaagaagaagaggcttgatgccttgcttgaggagcgcagggggtctcgtcttccgcctcaagttaattaatctgatccgccatccattacttcaactgctatctcttttttttttcttttttacctttacagtctcttttcccctatttaatacaattttatcttttttctttaaggggagacaattttaaggctcgtccctaggcccttaatgttttacttctttttctttttttttatggcctgttattgggtcaaacatctttatgcttatgcttaaatacataatttgctttgattttgctaattttttggtctgttttacatttgtccgtgtggtatgccttactacccccctgagtggcatgaaaaaattgtttttaagacactcagcttaattcacaaattcagatgttgcatatactgttttggtacaaatttactttacagagcataagtttacattttctggctattggtaatactttcggaggtgatcatcgttctaggccctaggaaccatggttctatccattctttttagcttgtaggtcccggagccaatttcgtccttgatttcatatggt

SEQ ID NO: 155315 - DNA, 632 bp, Cannabis sativa
aacaatcacctagtatatataatataatagaatagctgctttttttttttttttcttttttcagatttgtcactttttatacgcatgtcaaaatttttttaaattctattcaatcaaatcaagtatatattagatagagtgtacacttaaaagatatatacactaacttattcaaaaaaaaaaaaaagatatatacactaagggttaacaaaatgtcctattatttttttttttcttattcacgcgtttatatattacaatcatgttttaattgggactcaaacccaagacctgtgtatacactaagggttaacaaaatttcctatactaagggttgacaaattgtcctatactactactgtataaggacaaaataagagtacttttagtagaattattctatatataaatatagatagtataatataaatagaatataactaaaattaacttgagttaaggcaggttaggtctctaattaaggctcactcaaacacaaggtcaaaaaatcttattcatacatattagggttgttcattcgatccaatcagcacttttttggtcaaacaacattcaatccgcactaagtgcggatttcattttttgaatccaatccaatccgcataataact

SEQ ID NO: 155316 - DNA, 522 bp, Cannabis sativa
  modified_base (433)..(438): a, c, t, g, unknown or other
cattcacagttggggttgttcatgtgagggagagttgggtccagtatgtcatacccactactaatggcccctaactctcacacaaggcccaaagtagatactaattgaataagtccaatactaattgggcctaaataagactatcatatgggtgatattttattttaacaacctagtccatttatctatctagaaataaatgggcttcctatatgcatctgaacccaaaagcaaacatataggcccacacaagtcaaattaatttgtatgggtcctatcatgtttctatgtttacacaaatgaaaaaaaatataaaagttacctgttacaaattatttataagatctattgacaatttgactatgattaaaatcagatcattggatctgtcgacaaataaattatagtaattagatcaaataaataataggtnnnnnnaaaaaaatttgaataaacaatttaaaaaaaacaaacaatatccatgtaacaaattatgaagtaagatatttatataattaaatt

SEQ ID NO: 155317 - DNA, 697 bp, Cannabis sativa
gggccttctacctcggccacgaatattaaggggaatctgggctcgctaaccatcattggatccaatcgaattaacctggctcctggtatttttcctggcgtccatactacttagaacagcctgcgtaaccaagagctagtttggtcagatcgtgatcaaagaacaacttactaatgccgcttatttggaaattggaaaacatgcgcctattctactatcaggctactaacatgctccctaacaagctttttttaaaccatactattaaaattaactactaaagcaataaatgcttactgaaccgtgaaacaaactgactgttgatgatgattgtacatgtcgtgacgatcttcaaaagacaacctggcgtctctgataccaaattgtaacaccctaactaagtaggcatgttaacgtgatttcaaacgtactgtgttgctcgttgctaatcaacgagattaatgaaaacatgattaattaaaattttcttattgttttagaaacttaaagtatttcatttataaaattatgggatcccgttagaaaataaattataaaagtttactatacacataaacaaaagttttgtcgcctagcgacaaatcaacgaaagccttgatgtctcaaagattgtacgctccaggcctaaccaccccgacatgtacaatcttcacctgctcgctctcacggctcctca

SEQ ID NO: 155318 - DNA, 657 bp, Cannabis sativa
aatttaataattttttattaatttcttttatacattttaaattttattccattcctattcctattcttattcccattttcattcttgttcttataattttatttcttccaaccaaacgctaccttagcgtgtagtgtacaaagtgtgtgggttctggtttctattaaaaaaaaataaataagaaaaaatgtatgggttctggtttttaatttttcaattggcactttttggagtagtagattttgtggtggggggactactttgtagtcttcttgactttcatggatgggagacttggtttgtgcctatgacccactctatgaggcccaaaatatagaaaattatttacaaaaatatacatacttttatggtatttttataaattaccaaatttcatgaatataaaaaaaggaaaaaaatttaacatctttacagatttatttattacatttttaggatttttttttaaaaaaaatacaaaatattatttttccattattttcaaaataatgttattttgataaagctgctaggaaaacaacataagttaaaaccgtagaagtataaaagaaaaaggggtaagttgaaaaatacctcttttattaatcaattaatcaaatttatctctaattttatatttatttgaaacatacctct

SEQ ID NO: 155319 - DNA, 965 bp, Cannabis sativa
  modified_base (204)..(206): a, c, t, g, unknown or other
  modified_base (738)..(743): a, c, t, g, unknown or other
  modified_base (897)..(917): a, c, t, g, unknown or other
atatttatttaattaaaattttttatttagaataaaattctaaatataaattttaatttaatattcataaaattatacttagatggatctgaaaataaataaaattactttcgatcttagaaataattttcagtaaatattttgaaaaattattcaatttatgttgtttcaaaattaattaaaaaaattaattttcaactcaannntaattttctataaatatatatttttcataattcaaaaaattaatgtatttaaaataaatataatttttcgaaaatgctatcaaataaaataaaataaatcatgaaaaaatattctaatttatcttggtccaaaattaattaataaattaattttcagcacaaattcaattttcctatttaattaaatattatgaaaattatcaaatatttaagtatcatgatttaagatcaacttaaatattaattttttatttaattaaatataagtacaaaaatacttcaagcaaacagaaaataactatctagattttcactaactaatttctatatttttatttgaaatataatatattttagtctatttattttaattaatcattaatgataaaaatttacttgatttaagttgatctaaaattaattaaaataattagttttcaactttaatctatttttcaataacaattttaaaattatctgcattgattaaatgcaattttgaaatttggtgggaaaaatgattaataaaatnnnnnnaaatatattttgaaaattattcttatttaagttgttctaaaattaaaatttccaacttaaaataatttttctatttaattaaatattttgaaaataacaatttttaagtatcaagaataggttaaccatggcaattgaaccatgggttaaaatnnnnnnnnnnnnnnnnnnnnnaagttaaccatggcaatttagatgaagcaataataggttttataaaac

SEQ ID NO: 155320 - DNA, 640 bp, Cannabis sativa
aatcatgctcagaactcatctaaggctacaaccttgaaaaactcacaaaaactaacaaaacctagcttgagaaacctaggaattcaccaaaaaacatgaggaggaactttcctcaagattctaagttagcttgggttagattcagctctgaaatgagaggcttgctaaagaaaaaaagatccttaagtggctggttcaagcttgcacgagagagagaggaagttgtatttggaggttacttagcttccaagtaacttttatagtaaaagttctactttgctcttctttttctttcttttttttttaaagaatacaatcagcccaataaattaaaggtcaaaatacccaattaacaaaatgactaatttacccttcaaagaaacttaaattctaaaaaaaaaataacctaagggcattttggtaattttactaatctaataaactgacattctaaaattctaaactagtccgaaatattccccaaaataattcttccatcagtgtcgtgacatttctaaccataatgctaaatttgcatagtcgccgggcccgataaaatatttttattttcaaaaatggtatcctcgatacacacatatcccaatataatctccgtaattaataaattacgctttataat

SEQ ID NO: 155321 - DNA, 773 bp, Cannabis sativa
  modified_base (403)..(432): a, c, t, g, unknown or other
agaattaaacacaaagcttaagaaacattcataattttataaactaaaattaaactcaatcaagagtattatcataggaaaaaaaaatatcaccaaaagttttttttttttttttaagatgaatacatatataaaataaagtaaataaatatattttgggttttttttactagaaaaacaataataaacatataattttttttgttttttattaaaaaaaataaaatatataatataactactttagcatccaaataataatttttttaagtgaaaaatactttacacttttcaagcaaatgaaggaaataaccataaggacccaccaccccaaacttaatttatgcattgttctcaatgtatcaaaatataaattataaattgaaagtaaaagagttgagannnnnnnnnnnnnnnnnnnnnnnnnnnnnnatgtcaagagcaacaaaaagataacaaaaataataataataataataataaagataaaaagttgatctaaaatataaataaaaacacacattaccaataattaatgagagcaatcaaagatcatggtagatcggatcatcaagaagtatttccactactacaaaaagacaagagaataaattttgtccaccaatgtactcgtagtagagacaagagaataaattttgttttgcagccttctgtcatggatactagcatgaaatgaataagtgtaacgccctaatgctaagacacgctacaatgctttttttttttttaattatagtgcaatctttgctaat

SEQ ID NO: 155322 - DNA, 604 bp, Cannabis sativa
tacagtttttatattttcgtatatacaactgatatttgcaaaaacacggtttttttaaaatgaataataataataataatgaaatgaaagttatgaaaattgttgcctctgcttttgccaaaaatacgtggaccaaccggaggatgacacgtagatgggaaggatttagcgtttgaataaatcagctaagtctccttaagcgcaggattaaccttagacgtgcctcccggagaaggcatgtaagtctcacatgctcctggagagcaaggctacaacaaagcatctccgagaggtgtcagatcctatctgaacagtcacctcgcatttaatgccgcatgggaggaggcgtattggaactgccatgcgtcttaaagtctgacggcacaaccccctctctacagctactatgctatgattaatgagcctagtgacggctactttatgaggactcacatcagtcaaaaaggataaaggactacacccataaaacccctacaaaagctagggattaaaccatgcattacctatgatatgttcattgggaatgtgtggctttactgatagttacagaaatacatgtatcttaattctagggatcacccca

SEQ ID NO: 155323 - DNA, 623 bp, Cannabis sativa
aatcacaataacatgcctaaactaataaggtgttacaaaaacataccattaaataccaacaatgacagagggagaaactaaacattgggaggtatattgtaagacaattaatttaaggatgtaaaataactatgtatatatattacaaattttgtacatataaaatgtatataattttttttgggacaacccctaatctaagggtgtatgtcggtcagtttaatgctatattttattcaacgcaatagaaagattggattacgaaaatttaagtgcaatctgctcaattaaggaaaagaaaatactagcctacccaatgaattggtcggattaaaccaccatgaaacaatcatagtactttaaactttatatatatatttttaaatatttatataaatatataataaaagcacacacattaaaaaaaacctcttaatcggtttgatcaggttagttcaggttgattgggtgagtagttgatattatttttaacttgcctaatataaagattgaacgagttatatttttatcgaatttttcggttatatattttgttgggttatttcaattttgtttgggtgaattatttgggttgggagatttacaaaaatttaggtgcaacc

SEQ ID NO: 155324 - DNA, 577 bp, Cannabis sativa
  modified_base (536)..(538): a, c, t, g, unknown or other
ataaaaaaaaactaaatttttaaaattttaaaattattaaaattaatatataaatcaacatttaatttgatacacgtgtggagcacgtatgtctcccactagtatagaaaagaaaaaaaaaacataagaagcctacataaaacaataaaaagatatattgaaacacaaactagataggaaattaaaaaaaaaaattaaagtatatcacaagagaattcttaacatataaataaatttaaattactgaaacaacaatccattaaaaagtgaaacagaaataccagttacaaaaagcaagcaaattacgtaaatttgacacattaaaaccattttcctaaaataagaatgaaatttaaacctcaattacgtaaaacaacaattagacacgaaaactagttatctagtataaacaactaaaaaattgaacatacataaaaagatatttttttaaaaaacaaaattaatatacgtcaaaaaaaatacataccaaagatgaatctttaaaatttggatcagatttactttttttttttttnnntgaataaccttccttaaaattttaattttaattagagaa

SEQ ID NO: 155325 - DNA, 631 bp, Cannabis sativa
atttttggtggggttttgagaaagttaatcttggtcttcatctcagagcgtgggacaaactatgtcttcttaaatctcagggtggcctggggtttcggaaatctaaagaaatgaatcaggctttcctggcaaaatgagggtggaaactcttaaatggttgtcaatctctttgctgtcagatttttgaagccaaatatcttaaaggaaaggattttctcaactataattataagagttctgattcctggttttggaagaacgttgtgaaagccaatgccatcttaaggaaagcggcttgtaagatggttgccaatgggagggatacgagcatttggagggatccatggattccttagttaaaaggtttcattccaaaacctattagtaatggtagtccgagtcacatctatgtggccgatctcttgttaacatgtggcagatgggatgttaacaagttaaaaagccttttcgatcatgacactgtctctgctattttaaaatgtggcaatccttcgggtcaaggagaggacaaatggatttgaacattagagagtaatgggcaattctcttgcaaatcggcttatttaactcaagctttggaaagagcgcctcattgtgaggtggctccatc

SEQ ID NO: 155326 - DNA, 558 bp, Cannabis sativa
aatcaagaatccagatggatttgttattctctaaaacacatgattcaaaaactaaagcattggaatcactgcttaactgtttttggattgttcgtattgctagttcaatctgttgttaaggataatctgagtaagtggaatcactttctatttccttctcaactgagcctgaagtagtagaattgtcggaggaattattctcaatatcttcatctttccttttgcccttatctgcatcactggagaaggatctccatgcaagtgacaatgtccgttcataagcacgcaattcagattccaacttttctatgtcaaagagttgtaattattaatcacaaattggttaaactcaggtgataagttgttgagaataaaaatgaactctctgcttttcagataaaaccattcccagattagctgccttctggaatttcatgttcatcatgagcaagtgtgtagtgatattctgaccaggagtcatcttcacactttgaagttcattcctaaaggcatattctagatgaggattggggtgtgggttgtacatttttgacacta

SEQ ID NO: 155327 - DNA, 534 bp, Cannabis sativa
tttaataataaatttattttaaaaagtaaaattaataattaaaaattttattaattttattaatttttaatattaattattattatttttttctaaagctaatttgaattgtttttatgtaggtatttattttcaaaaaataattttacttacaaattttgttatcaattttttttcttcacgttaatagttaattataacaaaattgattacttctttcactatcaatttgtttacatacatagttctaccataattatcttttaaattaatttttttaatatttttataaaattatgtattaatatttttatttgaatattttattattttcttatcaagaaagataatttctattaatcaaatcgagtcaattacattcacaaagggattccccttcaaaagagaaacttacaactcttttacataattaagaataattttatctgtgctagaccacttcattttctgtacaagattaagtctacttttgagcctctctttagttctactatctatacaactcggattcat

SEQ ID NO: 155328 - DNA, 984 bp, Cannabis sativa
tattcgtttttaaagcgggaagctaaggcgtctgagctttctttgagacaattacctcttttcgtgacgtgcccatcaatatccacagcattggcacataaactcattttatcacccttctttgctaagtaagctcgagagcgaaaagaaaatttcttggcttcaaagtcaccgaagtgccttcgtacaactaatggttggatagacgttgcacgaaccctgacactcgaatcttgagtaagtttctgatttcctttatgcttattttttcacgtttacatttcgaatgcaacttccactgtgttgtagaaaaatgcttaggaaaccctagggtgagaaacttctgcaattcttctttatcatgccttcatgtgggtttacagccataatgattgtttctgaaatttatagcatccgtctttcatcttgcttattctaagcttcatgaactttttttccctaactcaagaaaattttgtgacttcttgagttctgacttttctttaaacatagctgttctttaatatgttgagtactcctagtcggcatatttgcttgcttattgttcgatattgcgacaaacactcatctcgtgtgctgtcttttgtagatgaacacaggtgagtcttcggaactcgaacatcggatcgactaggatttacttcaacttctgcatgaggatcaccctcgtcttcgttccagtcgtccttcttctagtgaaggacattcttctggccctgtacctagccataggataattgctcgtacaaagaaaaccacgcgtctcgctgacgcaactgatcctcaagtggctcagcttgccactttgcccagcgccgaacaggattcagccgtccatatggaggaggatagtgacagggacactgaggtccaagaggctgaggagctggataatgcgcatcccggcagtccctccgaggcagagggagaggaagtgttggaatttattttactaggatctta

SEQ ID NO: 155329 - DNA, 629 bp, Cannabis sativa
ttcgatatccaatataatactaaatttactgatacagctattataaggtaatctaacaggcttaactaacatgtaagcatgtatgcatatcattatactagtcttaaatcatttccaaattccaaattcaggtgtgtcggccaacatgagtggaacaactgctcgacgatttacaggcccttaaatcacattattcgtaaaactgatgagtgaaacactaaatcacttttcagggacttaaacttgaaactaaaagttttcctatcgatggataacatgaaaataccctaaatatcgcaaaaatatgaaaaactagggttccctaaaatgccgtaaccggtagaccggttccccaactagaattctgattttgtggagttttcctggggaccaaccggtcgaccagttcttacaggtccccatgaaccggaattccggttcattgcaggaaacacaaaaatccccccatacatttcaatttagtcccaaacgtcaccaaactttccagacctcttatttacaccataataagtgttgggttttgtgccctaaataaaactccacttcaatgtaatccatttcattcaacatcaataaagaaacagaagtatttctcattcatttgtgta

SEQ ID NO: 155330 - DNA, 827 bp, Cannabis sativa
  modified_base (194)..(198): a, c, t, g, unknown or other
caaggctatgattttccttcgccatcatctccatgaggggttaaaatctgaatatttaacagtaaaagattctcttgtgctttgaaaaaatttgaaagaaagatatgactaccaaaaaactgtcatattcccaaaggctaagaataattagttgcaccttaggtagcaagattttaaatcagtaagtgattatnnnnntgcaatgtttaatatcacttctaaattaatgttgtgtggataaaaagttactgactatgaaatgttagaaaaaaacatatgctacttttcatgcctctaatgtgctcctgcagcagcaatatagagagcaaaattttaaaaaatattcagaattgattttatgccttctagtagctgaacaaaataatgaaagtttgatgaaaaatcatgaatctcgcccaactgggtctgctctattccctgaagtgaatgcgataatttttgacaatcatactcatagtcgtgatcgtgatcatgatcaaagtaatagacgtggtcgtgaccataatcaaacttgcggtcgcggtcgtggttgaagcaatgtttggcatcgtaatggccagaataaaaattcgtatactccaatgaaaagcacaactactgagaacaaggaaaaaggtcctcaacatagtaatggtagaaattctaaaaatttatatttcagatgtggaataaaaggacactgggcacgtgactgtcgtatggaaaaacaccttgttgatctttatcaagcatctgtgaaaggaaaggagaaaatagaagcaaattttacctatcaagatgatggttttctcaaagagcctttggat

SEQ ID NO: 155331 - DNA, 624 bp, Cannabis sativa
gctagcatactcacgaacggaagggacatagtgtatcattaaaggagacttaccagaacctgaagtgctggcatcgggagcccccatattcggcactgagaccacagccgttggtctgggggtccttcgctctgccggacccccaatacgaaagggccttccggcggccacctgggccttattataagcccgctcatgttccttcttgaagaggtatttctggtacttatcctccgccgtagcgatgatatcatcccagaataccttctctgcgaccggagccctcacattcgggcaggcgaccttggaaaggttggattcatccaccgactgatgccccaaaatcagcttggccttccgacagtgctccgtcgtcaccaactcccccacatcaaggtcctccttgtcatacgtggcgaagatcttggctcgttggaggaaaagttgggtaggctcggtccgcatataaggagggagcctaacccactccgtgagaagctccggatgctctatagcctggaaccaagaggagaagaataagcggtgacggtattccttcacatgcttctgatgattaaaagggaccgggccctcattaaaaggatgggcccggaggccgtaaaa

SEQ ID NO: 155332 - DNA, 524 bp, Cannabis sativa
caatcatttttagatctgaaatcacaaataccacaaaccaaaatacaaaactgatcgagaaatgacgtcaggattcgcgagggggaaggaacctttgagttccgtgagttctcaggttgtatcgcctgaggtggtggtggtggtgacgctgtgatagcgagagcaccgagagggagaaagggaagttgggttcggggtttcgggttctgggttttgagaaaaaggaacggaggtccatctgaggtgagaagggagggttgatggtgctccttcctagaacgtcgccgacgccgcaagcagagggaaagaagaaaagaaaaagagaaaaaaagagtaaagaaaaaagaggaaaaaaattaatttttttttctaattttgaaatttgttaaatattttaaattatttttttattattattaaaattaagtataccaaaaaaatttcatcatgtgtatacttgtgtgtatgatagttcattttggacaatggtagaggtgggaaaatataactaaggtaaattgcgg

SEQ ID NO: 155333 - DNA, 568 bp, Cannabis sativa
aattgttatattttattgtatacaaaaattataaaattaaaaaaaaaaaaacaaagtgtataagatttcccataataataagtttaattaataaactatcacaaaaatttaaattgtttactttgtcaatatatatacatacatattgatcaagcatatatcgactcttcaatataagcatccaacaagcttctttaccaagttgttgtgtccctaccgaccagacgacaacttgcccttaagggaaatacttctctgtacaatcttaatgtatcgacaaggtataattttatgataacctgtcttgctacatgttacaattttgattgcatgtgtcatacaatccaaaatttgggataacaattatattgtgcaattgttgatcttaaaatataagggtagcaattcgatcattctgtacatctgaaaaatctcatagttattcaaagttatcacatactatctaatttgaatgcgatcagcggtaatcgagatcatttagattctttttagtgcaaaactttttatctatttattatgcataattttctttgacaaagagccataa

SEQ ID NO: 155334 - DNA, 599 bp, Cannabis sativa
aaaagattatagttttcattttttttttcggttactactattcttcttcattcttcatacaattatcaccacaaccatttcaccgaaccattaccatcaaaaacaccattacacaccgccaccgtaacttattttccaaattcaaatcacacgcacacacaaaaaattaaggaatttttgtatatactaaagcggcaaaaaatattacgcaaatacattaggctgaccctataaacatttatacagcccaataacaaaaatttacaaaaatatctcttgctctatccattcagccttactaaccactttcttcaaacttccagcaacccgacacaaccgaaacgaaatccaactagaaagagaaccatcattaatcccggtgacttcacttgagaaaatgaccggaatcaatcaaaacatgagctatttcaaaatcataaaaaaaaaagtgcagaaaaattattacaaaactaaaattcaacgagaaattcagtttaattcgcataaaactaatgtcctggcttaaatttccaaatccatgaaatgcttatatcaaaaagttgatatggagttcccaaacaatccaactcaggtataat

SEQ ID NO: 155335 - DNA, 589 bp, Cannabis sativa
  modified_base (35)..(43): a, c, t, g, unknown or other
aaaattataccattttttttactgattttgaaaannnnnnnnnttttttctaaataagggcccaaaacaattttttttttctatagcccactcaaattcagggccggccctgggtagagaaaatggtgcatcaaattagagtttggaatttaaagaaattttcttaggtcgtaggggtgtacatcggtcgatttggtcggattatagtatatttttaccgactcaatataaatgtcgggttgcaaatatctaattgtaacccgtccaatgaaaaaataaaaaaagtgtaacccgcccaataatttttgtcggtttggtcgggttaacccgtttaaaccgatctttattttttttttcttcattattgttagttttggtgttcaaataattgatttgaaaaaaaaaatgtatagtatatgtctttcaaaattaaaatagttatagtttaaattaatgttaaaaaagaaacataataaacattaaagtattaaacaatatttttcaaaaaataaaataaaaaaatatactcagtaaattttaaatttcaacttcaatattcaaatattatcaaaattatcaactataaatt

SEQ ID NO: 155336 - DNA, 592 bp, Cannabis sativa
taaaattcaaatattcagatagagctcaaaaagagctttccaacggtatatagaactcccaaatcggagtccggatcacaaagttatggctatttgaagttggaaaaaatgatttgcgcagaaagaaatgagcgcgccgcggcatgctaaataccatgccgcggcatctgggttcaaaacccacaaaatagtagcaagaacacgaattttcagcctccaatcaacaccaaatcatcccaaatcacaaccaaacttccaaatcatcaaatagggttgctagcaaacaatagatgctcaaataaacatatttcatgcatcaattcccataataaatcttcaatttcagcttgtaaaaatcaacttaaaacatgcttaaaactcacaacttcaagctctcaaactttgagcttcaacccacatatcaacaataaaaacccagcagcataacactattaaaatatgaaaatccaacctagaaaacactataacatctctgcccaaactcatcaaagaagcatacaacaacaacaagctcaattaaccaagatcaagcatcaaatctaacaatatgcataatcaagaacaccacatc

SEQ ID NO: 155337 - DNA, 585 bp, Cannabis sativa
cgaccacggggattctggggaatttgatttccctgaccgcctccggtcttaaccacattaccccgacttcttgtatttcgctgggcgtccattttataggacttagccttcgaacccataagccaagctggttagacagtgatcataaaacttaataccgctcatatggatttaagggcaacacacttaaaataaataatcataatctaatatacttcctaacatactttaatattaaaataaatactaaacaagtacgagcttactgaaccgtgagccgagctttctcttatgaagattgttgtacatgtcttggcaagcttcgctagtcatttacatagtcatttccaaacaccaaaatcccgtttctaaacttttatacaaaatatgccaaaatacataaccaagtcgcacaacgactataaaataatatcccaagatgtcccgagaccaaccactccaggtcgcgctaccacgacatgtataacctcatctcagtcaggttcactcctgttcagctttcacctttcctttacctacacatagaagcagaactgtgagtcgacagactcagtaagaaaagca

SEQ ID NO: 155338 - DNA, 719 bp, Cannabis sativa
  modified_base (307)..(307): a, c, t, g, unknown or other
caatacacactaaaaaattatatttgggtgtaagtaagatagtataaaaataatttcaagttataataaagaaaacaattagcactaaaaaattaaatagtgtttactcgatatttcagggaataaataacatttagtgtggttgttatttgtcgatgataactaaagagccaatcattttgatgcattctaaaaagactcattgtgctcttcatcgttgataccattcactgcgagaagctctagatcgtaaaacttgaagattcttctcaaattaaattattaaatattagtgttttataataanttcactagaatttgatatataaggttaattagactaaagaagagtatgcatcatttcaaaaagtattctttggttgccgatgaagtcacacaacaccacatactacaaatcttctccaaataacgcgatctgggtacgaggtgctatgaatcctcggggtacttgaattgggattatatcacgtttacctttgactcttactccttaaacctgtgcaagttgtgcaattgcacagggcccaaccttgcacagggcccaactaaataaaagctaaaatatttatcattttttaaatttaaatccttttcaattttattttaatttgtttttttaattaatggcccacttccttataccgagaatctctcacaatttatgttagtttactattcatttttttcaatctttaata

SEQ ID NO: 155339 - DNA, 512 bp, Cannabis sativa
aacataattggtcacttaattttttatcacactttataatagcatatacattatacatatgtgcccacaataggattttaatccaacagaaatcccttacaaaattatttttctcaacaagccatgatttcctattgagccaagaattttttatggcacttgctttgttcatgatgttcgtccacagataagtaaattagatcccaagtgattgaagtgtgtatttcttggttattctcgtctttagaaagggtataggtattattgtcccagtcttaacaaatatcttgtttctatcgatgttacttttgtagaaaatacaccttattttttgtcttcacccgctcctacttctcaaggggaggatgatgatttgttggtatattctatgacatcctctgcgcctgatcaatgttctaacgagtctcttgttccttcacctgcctcggtcatagctctcacaatgcctatacctccaccacctccaccacttcctaggcctcctatagtgt

SEQ ID NO: 155340 - DNA, 587 bp, Cannabis sativa
tcctcaaaaattccttcttttatcaaatataaatcaataggtcaaaagaccattttgcccctaaggctaaaaatcaagctcacatatacacaagggaaatttagtaattccatgcataattaaatccaactaaatttcagattatcaccattaaatgaaaatgccaattacttcaatccaaattgcatttcgggcccgaacccggttcggcccgaaatacccggttgtgattataccgcgtcaacctgtcagaacacacatgaaaaagataacacaggcatactatataataatatagtcccataagcaggttaataaattaatttcacaattttacccttttcgggtcaaaattactaaatgcccctagctcaccaatggggttttaacataacataactcatataaattctcatatattaaattatataataatacaattttctcaattatacaaaattatctagttagggttttgctaatccacttcttaaatctagggtattacaattaccacctccttatagaaatttcgtcccgaaatttatctgaaatttccagatatttctgctgcatatccgtctcga

SEQ ID NO: 155341 - DNA, 782 bp, Cannabis sativa
cttgacaaactcatatgtgtccttgttgattgttggcaagtaatatccttatctaatgattttttagactgactttgccaacccgcatgatccccacagaagccttcatgaatttctctaatgattttgtttgcttctgcatacacaccaaagtaggggcattgaataccctcttctatatagtttgccttcgatcattgtgtagcgaggcactgtatacaatagttttcgcgtctcgtttttgtcatttggaagttgcccgtcgagttaatatttgataataggtgtcatccacgtaggagagctatctatcatcttgatgtcttcggtttcacagatactaggctcgctcagaatctctaccgaaactagattgagttcatccggtcattctgcgaggccagttttgctaaggcatctgcattggagttttgttctctcagaatttgtacgattttaaagtaatcgaatctttccaagttcttctgaactttctctaaatacctcgccattttaagcctctggcgtggtattccccaaggacctggttcaatatcagctgcgaatcactatgacaaatgagatttttaactttcagtgcctctgctatctttaagccgacaatcaaggcctcatattcagcctcgttattagatgcatcaaattggaatctcagagcatagtgaaacttaaagccttctggcaatatttatattaccccggcacccaaaccctgttcgttggatgcgccatccacatataacttccaggtttccgcgtct

SEQ ID NO: 155342 - DNA, 539 bp, Cannabis sativa
  modified_base (278)..(280): a, c, t, g, unknown or other
  modified_base (377)..(380): a, c, t, g, unknown or other
cattttttaatttgaattattattctttttaagttaactttcatgtaaatcttgacagtttcggtaccaatattattggtgttctaattttttttctcactcgatatattaaactggtgtgttcccttttttttttccttttattttttttccttattttttgttgggaaatttctttttcttttattcatcaataaattttagggttttttttattaagtcatttttttttatcaattttgactattatattacgttgtattattattattattatnnntattattattattatgacaaagtgatttggatcatttaagaatttacaaaaaaaacatcaacagttggagtgggaacctctatttttctttcatttnnnngattaataaattttatgggtttctagattagcatctttttttttcattgtcggagtaatgttgaaaaagtcgtcggagctactgctggtaggggtgttcatcaaaccgcttaaaccgttcaaaccgcctgcaccgcaaaaaaaaatgcggtttgaaatt

SEQ ID NO: 155343 - DNA, 667 bp, Cannabis sativa
aaaattacaaggatgacttaaaagatacaatcaaaccaaaaaaaaaaaaaccacctaaatcactctcctaatcatgcatcatttaatattttgcctcaaatagcaagcaagtaagttctagaattttcaaacaactttctatatttcacaattaacatatataaactaattcaattgctaggaaattacttattatgattccatgttcttttaaatcacaaaattacaattagtcaaggatgtaatatcaccaagcacactgatttttcaaaaaaaaaaaaataaatgaaattttcaaatcatgctatgtacctactttcaaattgactcaaaaacaaagaaacaactaaaaactaaaaatttaaaaaccaactaaaaataaaaatttaagttcactccccaaactaaagtgacacattgtccccaatgtgacattaaaaagaaagaaaagggaacttacctgagcgccacatcaacaagcagttgacgcccataataagcatcatgcaagacaacttgaaagttgttgttgtaatttccttcaagcttggcatgcgatgagtttgaaccaaaagcaacgctaacaacacaagactttagatgatgagcttggggagaagcctttcgcagctcgtagaggatttaatatggtggggatggtgttgat

SEQ ID NO: 155344 - DNA, 655 bp, Cannabis sativa
tatcgtttagtgattttgttacgaaattggtgtctctgattcaatacacctaactttattacagactgtacacctaacgagtgcacatcgatatcactaagtagaaccctagttcggtatcggttagtgggtgactctaatacactacacctaacttgattacagactttgtgtcacaggacccttaaacacctataatgatagtgtcaatactgcgattgtacatcgacacaactaagtagaaccctatttcgatatcggttagtgatttcaatacgaaattggtgactctgatacactagacctaacttgattacatactttgtgtcactggacccctaatcatctacagtgatagtgtccctgttgcgagtgtaaatcggcaccgctatgttgaaccctatttgtttatcaattagtgattgttttacaaaactggtgactcttatactctacacctaacttgattacgtactttgtgtcacgagtcttctaaacatctacagtgattgtgtgactacggcgagtgtacatcggcaccactaagtagaaccctattttggtatcgattaatgatttcgttacaaatctggtgactccaataccatacacctaatttgattacatactttttgtcaaaggacccctaaacatc

SEQ ID NO: 155345 - DNA, 741 bp, Cannabis sativa
tgaaatagttgtattatttgattactctttttagttgtaatttaaaaaaaaaaatctcaagttttattttatattattaacatataaaatgtattagtagtatgatgttataaatttatttttattgcttttttttttgttttttttttttttaaaaaaaaactgttagtttagtttatagttaattagtgtttatgtaattaattagttacaatatgctaaatgttaattggtttagcactattttaaaatatattatttggtatctatatttaataggttaggtgtcagaattttttttagacttaatactattttaataatttaatacttttattgggtacatgtaaatgtatattagttaatgtgcatactcaaaagtcatatacattaaggactaagaaaatgttcctatgctatgagaacaaaataagggtatgtaccatagaattattctatatatataaacaattaattaattagtaattttgatatagagtaatttacggcataaatacttaagtttaacatccaattgcaaataaatatctaagtataatttttggcggtaataatacctaagttataattttgaaacttctgtaggtatctgtttaagtaaattgccacctggcaatccctaattggtccaagtcattaaatttttattatttaaaaaaattagttcaaatatactaataagaaaatgatacgtggatttaattgttggaaattatttta

SEQ ID NO: 155346 - DNA, 759 bp, Cannabis sativa
attctcatccaacttcaaccactttaaacaacttcaaccactttaaatctagcattctaactctgtcagacaactagtagatgagagactcatttcatagtgatttcgcccctcttgtagttcttcattatattattcgagatagagtaccatgcccaatcatagcatgtcaagtgtaacgccctaatcaatagggataccacgtgcgtgatttcataaactagtttaatactaatagattaattaattattaaaaactgtgataatattaaaaacttgactataataaaagactaaaaatggacattataatagcataaaaagcgtgttcgggggatccttgttataaaaagttttacaaaagaactataaacgacgatgcctcaaaaacataaaaccaaaatacataatagatacagcccaaaacaactcctggcaacctaacacgcaggccgacgtggtcagtatgcacattgctggagaaaactatcacattaatggcatcaccttgtagcaataaatgcctttctcggtttggaagctggtgtgtttctcattcgcaacgtgcattttaatttgattatacccataatagatatccatgaaggtgagcaacttgtacccggacatggcatctaccatttgatttatctgtgggagcaaaaagtaatctttcgggaaagccttatttaggtcgataaagttgatacacattatccacgggacattgggtttagaaaccaattctgggtttgcgag

SEQ ID NO: 155347 - DNA, 1318 bp, Cannabis sativa
  modified_base (308)..(312): a, c, t, g, unknown or other
ttgaaatccctggacagctgctccaaggaaattattgaatgatgagtaaacttgttaaaccatctactcactgctccaacaaacgaggtggggaacaaagtacagcgttaattgttcgtcacgttcctcgctcgcattatcgtgttaaagttattcaaatgcgagaccgaatttgtggttctgtcataggacgagacatgcgggttttttcaatcccaaaggaaaaggggtattcataatatctgggtgatacggctcaagctcctcatcggagtcgtatccagataatttccctaattcccccactnnnnntctcctgaacttgtcctccagctcgtttatccgtaattggattggatcctcttgctttggaccaagctgctggcaaaggtcgggtttcttccgattcaagtgctctcgcagatctggttgggagtaattgctcgcagatctcatcttactcatagaccgcgtcctactcatagactttgtctttgagtggctcgcgggtttattggtttccatactttctcaatcattagctcgttgaatactttttcctcttcgagttgatcggctatgggttctgaattgcctcgaagtcacacttgcttcttcacgctctgttctttcctcctgagagcggtttgtcgtatttccctcatcaaggtacgtacgagtccttactctatcagtttgggaataacgttggtgatttctagcaggtgatctttgttctcccggttgagtcccaagatcctcctcattttcaggagggatttctctttcatcagtttccggctgtctcctttctggctgttcatcctaattctcagggggtgtctcattttcccctggttgttcttcccaggccttttcctgtctcctggttcgtgagtcacgagacctacctcgtggtcttctcactccaggttcaagttgattttgagcgttagtcccctgtgccaccctaaccgcggctgcatcacgctctaattcagcgttccgccgctgtgcctcttctagatggagcctaaggcgacaattttccatttcatacgtatcttctcccataggctcggtacctccacgattgggctcttcatccctcattctaaagttctcgtccttcccacgctgagttctcctcgagcgcattgttcgcgttctatgaccaatgtcaggttgggtcctccgagaacgtgtggtccgagagctggcgccacccttaggttgagtcctcttggaacggttggtccgtttggactgtgggttggtaaaccttctggagcccatgggctctttcccaggatgatga

SEQ ID NO: 155348 - DNA, 1041 bp, Cannabis sativa
gagagagagagagagaggcttttgagttattgaggctcgctttgagaaaagttaaaatatgatatttgattttttttaacaaaaatatggcataggaaagtccataaaaatgtaaaaaataccaaaaatctataacctacatgcattagaaaattatgcacaaaaagtaaacacttaaaattttattataatttgtgtaatcattttaatttaaagcatgtttagtttttattttattatatataaaggtcatatataattttgttaatatcatatatacaattttttttaatgatattataattattttattttggtttttattataggtatatatgttttgttgtatagtatataatttttattgtctatagtatatcatttatttaagatgatatttatttctattttattatatataaagtttttagtatgtatacatattataatagcagtatatataatggtacatatattttttgagtattaatttaatattgttattatttttttgtggtacacaattttattactacagtatattaatttttcaataatataatatatcaattactgttgtatatatttaatggtctaatgtatttattttttttgttataatataataatactaaaaaaattatataacttaatttaattattaatatatttttaaaaaaataatatgtagtaaatatatatatttttataatttttattaactaatttattatattttatcgttttcttatttttttttaaataataaatatttactaacttaatttttaaatttaaaaccatattgtatctcagcgctatatatcttattgaattaagttttgagcttcttttcattagaatacaataaaattaaacaaaaatattgtaataagaccatatattttaagggatctaacgattatataccactagatagaaataaatacaagttttttatgtataaaatactatatctaatttgattataatactattgttgactgaggttttcgacaaccaataaaatgttataagatt

SEQ ID NO: 155349 - DNA, 546 bp, Cannabis sativa
aagtaactagttttttttattattgcaactagttttcatatttattatttctttaaacacatatatatatactagattattgttacgtgcattacacttatacttaattatatttttagtttttatttttattatgtgtatttttaaaattttataaattaaagaaaactatttattatttatttttttaatttttttaaaaaataatatttaaagttttaaaattttttaaaaaataaatataaaatttaagaatattaaacaatattaaaaataaatataataacaaaataataatatattaatatttatatatttaaattaatttaaaataaataatatcagtatttatatatatttatacaataaacactatttataatactgttaaatttaatagaatattcttatatttttaaaatgtttagttaaaccaataaaaaatatattttataaccacatgttatatgtaaaaaaatatataaatatatgggatataaatacaaaaaatcttacttttagtcacaataaaacttgtgattaaaa

SEQ ID NO: 155350 - DNA, 535 bp, Cannabis sativa
cctcctcaaaataaatggccactatggcgcatctcacagtatgtaaactaatttatctttccttgtttttttttttttttttgaataattagcaaactttacctgtgcattttcgacaatactgattttgtctcctaaaatataccacttgataagaattcccctgaacttttacttctacagaaatttagtcctactattaggcgcgtcctattattttgtttaaatgatgacgtgtctttgtaaattagcaattttgccccctaaactttaacaactatcaaatcgtaccccctcaaaataaacatgagaaagatttgacacattttttttgtaaatcttaaaaaattaatttagatcttaagaaaaaaatattttgaatgattaaaaaaattaaaaaataaattaaaattttaaaactaaataaacaatttaaaaaattacttatttttattaaaaaaattcatttagatattaaaaatttaatttttgtaaaaactaaattttaccagaacaaacttaagtatattttatt

SEQ ID NO: 155351 - DNA, 562 bp, Cannabis sativa
gtataataactctaatagaaattacataaaattttaaaagtaaatagtattttggacctaaaagtcatagattaaattttttatttcgttaaataaaaatttagattttgagtttttcaaaatagtacaaaatacttttaactcaatttttgttattttttttttcaatataatcaacctaaaattagtttttagcacgggcaaatgcaaaataaataaataataagccaattgtaaattgttgcatcattaattcaggtgtgattttattcaccacgtcgaaaaaagaaatataagcctaggatctataatataagcagaggtattcacgaattggtttgatccgaattttcatattttttagatcaaaccagtataacagtttttcgaatattagaaaccaatccagactaatgaatttctcaaatcaaactaaattcctaaccattaagaaaggtttggtttaagtaattgtactatttttactaagtttttaattttatttttcaaaatatatatttaacatgataagtaatagatatataacatataaataacaaca

SEQ ID NO: 155352 - DNA, 884 bp, Cannabis sativa
gcggcccgcttgcgtggacagatttcatgttgaacttgttttgttcataacttttgacgcgagactctatttgggacgttctttatatcgttggaaagctcgttccgagctctatatgtttatctgtattttgaatgccaattttatattatgtgaaagtagatttagggattaaccctatacttgtaaatcttacaaattatgactagaattaccggcacttggtcaggagcacccggggatttggaatctccacgtttgcgggacatcaggtaagacagtagtttgcacgtagagttaagcgtgatggcactcatgttttatattatgattgtgattaattgagaaccaggattagggttattaccgtaaaatgagcgattatatggtctagggttattaccctagtaattaaaagattttgagtgttatgccatgcaaatatgttagaataaagaattatgcgcctaaggcataattaagctagactcgataaactagtaccttgagtatagttaaatgcggtctagggttattaccctagaatattatgaaggtaagaaaatgatgatgtatggtaaaattgttaatcaagtgaagacatgagttagggttattaccctcaataggtgttattttgagcatgttgtaatatgttgtatgagtgattatttagtatggaagttagggttattaccctaagattctatatgttatagtatatgttaagtgcacgcatttatgttaagagttatgtgtataagacataattggattagacctgatatatatcactaggataaactactgaaagaacgtaatgtatggattacgtatatgcatgaatagggttatgcaagcaaggcataactaggttagactcg

SEQ ID NO: 155353 - DNA, 643 bp, Cannabis sativa
cggccaggggtggctggccagcttttgggagtgagctagtctatcacttgatccctatttgagtgtcaaggtctttgttggctcggatgctgagttgacctttcttctagtgagttgtactaccacggggcataggttttttccatgaaagcatgccacatcatgaggagaaaaattgggataacattttcccccaagtccctgtatagacatctgtacggatagggactttaccagcaatattgatgttgtcgggactattatcacctttgctgaataaaatgtggtgcgtgtgttgaagcattttgtcttgacagtctgatttcattgcaatagagaaataattcttttatgtaccgttacgatgagttggtgaagtgagaaaaagggtggcccacatgtactacataagtgagttttgggggaaaaccccttttttcacttttattttttacgtttactttctcgcactagaatttggctcttgaaaaagctcctccttctctctaggtggcctaacctataggctccattctccttgggatttgtgctttattttaacaatctaatcttcccatcttcatcttcattggaatcttgttgcgggtaagctttctatttcctctctttcacttgatttgaa

SEQ ID NO: 155354 - DNA, 579 bp, Cannabis sativa
attatctcttgacttcttatgtaccattatatcaatgtgaacagttaatctataacttattatagattcagatctaattgttagcactcccagaattaataagagaactaatattcgatctgctaggaaagtttggattccattattgcataacatgtttccaaccactcatgttattaagctcccaaaatagaagttgtaacaatcatcttctctgagaaactttaatgagtgaatcaaataactcaatgaacacaaataggagttcatgtatacttaggattcaaactgatctactgtgatcatcagtgtgatatgaataactctttcatggtaaatgaattaatgaaagattatattacatatcggtccagtcatgcataattgaattatacgcaacacctttactacatgtctatctacatatgtgatccaaattaaaattacacacacacacacacacacacacacacactatagatgtatattgtatagtaaaccgaacttagttgttccatattaaagattcctattactttaatacactctggcttgttttatttatatcgtataatctta

SEQ ID NO: 155355 - DNA, 553 bp, Cannabis sativa
gtgtggtaatagagtttattttttattattttgaaggttattttgtggagggcctacaataacagggaatttactcataacttttaattttatataataattttttgattttgattttcaacaatttatatttgggtattagtatgttgttactagccaaaaggtaatacctttagctagttattcttagtaattttgttatttttttagtaatgttgaactagtgatatgagttgcgtgttaatttcttagtttgtatatttattttattttgaagattgtcattctaatataactgtatttggtttggtgttgctttgtttttcagtttcgctagctctggagacaaatattaataatgggaaggtgctttttcaatgtgatgtggtgctgtttagaagacatagcttgattgtctaaatttccgggggcagctttgtcccatgtggctcaatataagaattctacagcacatagtttggcaaagcatgcccttcgtttagacgatgagctatcctggttcgaggaggtgtctccgccgattgtggattgc

SEQ ID NO: 155356 - DNA, 1091 bp, Cannabis sativa
  modified_base (739)..(740): a, c, t, g, unknown or other
caaggttgactttttttatttttcgaaaatcgagcataacataaaattattacacacataaccttaattaacaaaaaaaatggtaagaatgacctctaattaggggtaattttattttcaatacctttaattgtcaaattagtgtgtcagtctcaaattcaaattatttagttttaaaaaaaaataatttcaaatgtaataacaattataaaattaaagactaaacaatttttgctcatcgttgaaatcatctttatcaatctatagattgtaaaaaattaccaaagtaaattatcaattaattgacattattgcttctttttcacaagtatacataacaataagaaaatagcaagcaaatcactaaaacaaaagagaaatctagctgtagctagtgaattggagggatgaatttgtgggacaaatgtaagagattgtatcaaagtgaaaaattcatatgatgttaggctgggacagacagaaaccctaatttttttaaattgtggattttatttatctatttatttttataagggaggaagatgagtcaagcggttgtcgaaaaaaataattagatgtcatttcaaaaaaataattaattattcaaaaatttattttacagctggtgaaagtctatttttgtaaaaaaaaaaatagaatttattacaaatattacagttaaatgatttaactgttaaaaaaattaaaataaagacttaaatataaaaataaaattatnnataaatattaattgctaaaaaggtcttattaaatagttaaattaaaaattgattattttaatgaaatagattagtattaagaaatttttgcactaaaaatacaaaatacacactttattacatatatatcttcacacgtttaaatcaacatttatacacattaactttattttattacacttttacctcttgcacacacaatccatgcatgcagccacacacgtcattgattgatgacttatatcaatcacaccttacatcattgtcttatctttttttcttcttcttttctttttattattttcaatttctttttcatttttttttaaaataaaacctccatagttgaac

SEQ ID NO: 155357 - DNA, 534 bp, Cannabis sativa
  modified_base (425)..(440): a, c, t, g, unknown or other
attttgttttgacaaatggtaatatgtgttttttgtttttaaataatcacgaatttatagttgaaagttaaatgatacattaattatttaagtctaattagtatttttttctccttaactttcacatgtatcaaatcatggttcctaatttttttggcgttaaaaattctcctgaactattgagatggttagatttaaagatttttgtctaattttagtaaaaaaaattctaacggatgaaagtttagacgacatgatttagtacatattaaagtttgagggggcataatttggtagatatcaaagtctgtggtagtacataaagaatcactgaaacaataaaaaattgaatgaaattagacaaaagtccttaaatataacaatctcaataattcagggagaatttttaaccaccaaaaaagttnnnnnnnnnnnnnnnngtatatgtcaaagttcgggaggaaaaaatcctaattagtcgttattaaatactaagtaaattcttccaattaagaaatcttaattttttttttt

SEQ ID NO: 155358 - DNA, 524 bp, Cannabis sativa
gtattggcatctcggcaccaagcaaccttagattcttccaagaatttatatgcacttttaaccgaataattcccacaagtctcaagttgccaactccaaccatcattcgcggccgaatcactaagctgaatggacaaaataaggtcctgatcacaggcaacaaacaggtccctcaaaacatcctcatcccacgcgcgagtaccgacttgaaagaggcagctgaccgacttattcacaagagcagggtgccgtgagacaacatagttgtttgaattatgtggaagccatgattcattaagaatggatatattttccccattagcaattgttcgttgagcacagacgtggataagatcttttgcttcaagaatactacgccaaatgaaactaggattgtctcaaatacagcagaaaacagatttccaataacataatatttagccttataaagcctactaaccaaagaattagcattaaccaacaatcgccaatattgcttccccaaaagagccaaattaaagtct

SEQ ID NO: 155359 - DNA, 573 bp, Cannabis sativa
aaatatatcatgaaaaatatgaaaaaaactgttaggtgtacaaccaaagtctcacattggctaaaaataggaaagatcttgggtatataagaatgaacactatttctattagaatgaggtcttttgggaaggtgcccaaaaacaaatccgtaagggcttaggcccaaagctgacaatatcataccaatagagaaatagatggtgtctgacgattcttacaagtggtatcagagccaaataaagatgaacactatctccattggaatgagaccttttgagaaggtacccaaaaacaaaactgtaagaatttaggctcaaaacgtacaatataatactaattaaaagataaatggtgtctgataatccttacagaaacaatttattgatgtattgaaaaccaatcattatttgaagaggtgatatttaatctctcaggactataagcatgccaaaaaatccttgctatcaaataaaaataaaagacagatttcttacaaacaagtatcttgatcttgagccagcacacaatacctctaagaactaaaattcataaccatgaaagtaaaataatcg

SEQ ID NO: 155360 - DNA, 550 bp, Cannabis sativa
  modified_base (74)..(86): a, c, t, g, unknown or other
  modified_base (182)..(184): a, c, t, g, unknown or other
gggttcaccccattggaataaacatctcattcactttctttttctctcctcatcttcttctttcttctcatctnnnnnnnnnnnnnttatattattttataacaattatatatttatcatgtatttatatacatgatgccatgtggatttttatatgtactaatattggaatatatatttcnnnagaaggtagtgagatgactatttagcttgtttttctggaactggatggttatttattgagcttgtattttttggagttgttgttgctatagtattattttctaattagcattcatattaaattaaagcactattttttaaaaaaagaagataaatatatattatttttctagtagttatgttcaacaaaatacattcatatatatagagagagaatttagttagtgataaaaaaatatgtgagttatgatttttaaaattatgtgctcctttatttttattctatataaagtgtggctatacaacaaaattcttggtttatgagaaattattgggtgactttttttttttaagttttctattcaaa

SEQ ID NO: 155361 - DNA, 519 bp, Cannabis sativa
aatgacataataacttgacatttaatggtcaggttgaataattttatcttgtttgtaacataaatattaaagtttaaaatattcatttcaacccaatgaatccaactcaacccactcctatattattgtactaagtagagttgggttgtacagtaaaaaaaattgaatggtttatagcttatccaaaccgcaatcattaggttggcctattaaaataccactaacccagcccatgtgcacccctttggtggcgacattgaagttctacaaataattttatcaatttaaagtataggtttaaaattatttaatcaaattaatttaaaagataattatagtaaagctatgtatgcaaataaattggtggcgaaagtatttaagtaatcaattttattaaaatatactattagtataaaaaaaaataatagcaaaattcgtaaataaaactattttttgaaaatatatacctatataaaaacaattcaaattaactttataaaaaataataataatttaaaa

SEQ ID NO: 155362 - DNA, 676 bp, Cannabis sativa
gattggatccaaaatatgaaagccgcacttagtgcggattggatgttgtttgaccaaaaaagtacggattgaatcggatgaacacccctaactgttattcaagcacaattgtgccaatatgccctttagtgcctttgagaaccataaaattaacacgtgaatatcacacgtgggttgccattcagaattgtcagaagatctcatccccatgttactccgcttcattttgacattttcgatcttcgaagattgctaaatgcattgtttttctttccttcttaatttagtgcattctttttttattactaaatatttataataatttttaaatgcaaactatttaaataatactcacattaggggtgagtatcctattcaattcaacttttttttcctcatccaatccagtctaattagtaattggattgtaaaaattatcattcgatccaattaaattcaattactaattggattagatcgattttttaatttgatatccaattacaaacctaaactttaatattaatataaaaatatgaagaaaaatacgtaaaaattaaatatcaccttttatttaaatttaatactccataaacatatcatcattataatataatgcaactaaaaattttaaataattaaaacaacaacatttttaagtaataaaataaaacaa

SEQ ID NO: 155363 - DNA, 501 bp, Cannabis sativa
  modified_base (43)..(46): a, c, t, g, unknown or other
ttttttataacaaattaaaggttattcttgaatagagtattcnnnnatagaggttctactgtaatacataatcaggtctataggctggctgcacactaaaattaaaataggatttttacatcagagattgaaatttgtaatttttttacttttttattgtagggtaaattttttttcaaaaatactgtgtactgtgtaaagtttttacggttgttttagttgttccattgttgttttaattgttttattttgttgtttaaggttgttttataaaaagacagtatctttgtaaaatattctgtgtgacagtaaaattgtaaacttttgtccaaaatctagtatttttataaaaaccccagttcaattttatgaaaatattattgtaattttaaaataagtaattggtaacaaaatttccttatgtttaaatttttatacattgaatccccttattttgttttttttttcttttttttttttttttttttttaaaatcttttt

SEQ ID NO: 155364 - DNA, 734 bp, Cannabis sativa
  modified_base (546)..(547): a, c, t, g, unknown or other
aacccgccacaggctgcccaagttactcaggaagctcaaaaatgggaaaacaggtttgcagaaatgcaagccagaatcgaggaacaagataatgaaatccaccgattaagacagcagggtgctcctgcagtgcctgttccagaaattccagtggcacatgcgcctgttgtccaggctaaacttgtgattgtagtgaaccggatggaacctctgtatgaaaggttccgtaagcaggcacctctagtttttctggaaggtccggacgttataaaagtcgagcagtggctaacagtgattacaaagatattgaatttcatgggcgtcactggaattgatagagtggtctgtgccacttttaagtttcaggaagatgccttagtttggtgggacatggtgtcaatgattcacgacgttactactatgacctgggagaaattccaggagttgtttaatgccaagtactataatgaggccgttagaagtgccaaaagaaaacagttcactcacttgaatcagaaggaaaacatgagtgttacagagtatacnncccagtttgatcgcttggcgaggttggcctcgggaatcgtgccaaccgatttcagtaaaaaggaaaagtatctggatggattgaatgcgaacaatagacatgatctaatgattactacgggcgacaaaaccacctatgctgaaatggttgaaaaggcactgcgagctgagggcgcagttgggtgcat

SEQ ID NO: 155365 - DNA, 583 bp, Cannabis sativa
  modified_base (146)..(147): a, c, t, g, unknown or other
  modified_base (370)..(384): a, c, t, g, unknown or other
ctcatgttcaaatctttttgagtaaagaagtatttgagacttttgtggtgagtataaatttcacacctttctccataaatgtaatgccgccaaatgttcaacgcaaaaactacaccggccaattctaggtcatgagtcgggtatcnntgttcataatcctttaactgatgggaggcataagcgataacccgaccgacttgcatcagtacacaccccaaaccctgtcttgatgcatcgcaataaaccacaaacttttccttgtcagaaggcaaagctagcactggggctgtaatcaacctctgttttagctctgaaaggtagcctcacatttatttgaccatggaaaccgctgattctttttagtaagctnnnnnnnnnnnnnnnagattttagaaaacccttctacaaatcgacaataataacccgctagacccaaaaagcttctaatttctgtcactgtcttcggtctaggccaatcctaacgaattcaattttccctggatccaccttaatcccatctttgctaactctgccctaagaaagacacctgagatagccaaaattcacattacttgaatttggc

SEQ ID NO: 155366 - DNA, 583 bp, Cannabis sativa
aataattttaatataattattgattttttttttttttgaaaaagctcttcaataacgacattgtcgtcattgataataatatcaatacgacaatgtcgtcgttaatgcactcagtttttttttttaaaaaaaaatattattcccaacgataatgtcgttgttgataatttttattcccaacgacataaaaagtcgttgttgataattgtttttcccaacgaagtattcccaacgactttttaccaacaaaatgtcctcattgatgcgcaatactgacgaaaacagggcttttaccaacgaaatttgtcctcattaatgctcatttttcttatagtgattatttatattagtttatataataaaagcaataaaaaatatattatttatatttttatggtcttttttgttgaatttgtaacacttgtaacgatgataattgtacggagtattaaatttaaataaatggtgatatttaattttacgtatttttctttatatttctaagttaatattaaaatttaggcgtgtaattaaatatctaattaaaaaactgattcaatccaattagtaattggatcagatt

SEQ ID NO: 155367 - DNA, 616 bp, Cannabis sativa
  modified_base (53)..(68): a, c, t, g, unknown or other
ctggacttaacagattttgtgtattaacacaataaacatattaaaccataagnnnnnnnnnnnnnnnnaaacataaatcacttcaaatttgttatattgctaactaaccagattgtaaaaggttttatttagggcacaaaacccaataaatactttgacagagaatccatcccaagtataatgtcaaactttgttaattccaactcgataaggttagcactcaactctctatcttcgatcgtaactagcgtggacctaatacgtctattggagataaccaactccctgctaggtaatagggttccaaaccctttcaataaaattacatggcctacctaagagatcgattatccgtgtagccacatatgagtgtgtagctctcgaatcaaataacacaatataaaagtagttgttgataggaagctgacctgtaaccacagaaggaatggctgcagcatcagcttgagtgatggcaaacacccaagaaggtacgggttttgcctctggcttctgttcttctttctttgcctaagagcaatctttctcaaaaagccccaccatgccgcactaaaagcatgtcttccggttgcattctccgggatgatgtttcttacaa

SEQ ID NO: 155368 - DNA, 869 bp, Cannabis sativa
taccacatgcactcagtactaccatcgtactagtgtaggtagggtatggaccgcaccttgagtactgttaagtgttgtaccacatacaccttgtaccttctcatactagtgttggtaacaccttgatgtactcttcagacatcatacactttaccaatgcactctgtaccgctaccgtacaagtgttgttagtgtatgaatcacaacaagcatgcatatatattaacacatacatacatttgcatattcatatcaaacattataaccagttcttacctcctttccaaattcaagtgagttggccgacctgaacggaaagtctcttgctggatggatgctctaatcacatattaaaactgggtaaatcaaatgtccgaaaccctaatccaggaaacccgagtctacaactctaggctcggttataaccactaggaactacactatctcaggaaacagggaaacacccaactaaggcactgaaatggacgagaattgagaaaaccagttttttggggaacctgccaaaaccggttaactagttttacaggtactggtaaaccagtttctaccgggatcctgattttaaacttttatacaaaatacacaaaatacataaccaggtcgcacaacgactacaaaataataaccccagatgtcccgagaccgaacagtccaggtttcgccgccatgacatgtacaacctcatctctgtcctggctcactcctgttcagctttttcctttcctttacctatacatagaagcagaattgtgactcgacaaactcagtaagaaaaacatataacatatcatataatatcgacttgtatctaggcgcccatacacctatttataagacttaacagatga

SEQ ID NO: 155369 - DNA, 611 bp, Cannabis sativa
tatctaggcgcccatatacctatccacaaggcttattagataagtaagagcctttttaacagttggcactattggccatgatatcacccactaccagcactatgatcgcacaacgggattgacactatgttcgtactgctatgatagcatcaatagtacccaaaagtataatttgccttatatcactcttaaccaatactatgcatgtactggcgaatcgacacaatggttgtgccgccatgatagcctcaattaatactttatgggttgaatatcactcttaaccagtatggagcctgtactgccgaatcgacacaatttttgtgccgttatgatatcacctaaaacatatataatcacagacacaacatgcatatataatatgttttatgccagtcttacctcatttccaaattcaagcgtgccagttgccctgaatggaaaattacgcactgaatggaggccctatgtcacaacataaaattgataagtgtttagtctagaacacttctctaatgcctgaacagaacctagagtttttctacttaacattgtcgttaagacaccctaaaataaaataaagaatttggctctagctgatataccatatt

SEQ ID NO: 155370 - DNA, 666 bp, Cannabis sativa
aatttttctttctactttttccttcaaataaaagtaaaagaggagtggtactaataatctcctattataattttttagtcaatttttgtgtttaaaagtacgagctgaaatatttgttttttaattttttttttgtggtagcatccgttatagtaataatattaatcttgtaaatttttgaaaattttcaaatagtttacagtgccaaaattaagttttttaaacacgcgtggtagactgaaatatgagattatttatcttcgatactataaagtatttagaatttttcaaaaatttacaaggatgatattgtaactataatgaatatcgcttaaaaaaatttgaaaaaaaaatatttcgatatgtgattttgggcatagaaatagactaaaaaattatgacaggaagttgtaattatcacttctcaatatacaaataaaataaagtattgctataattgtcgtgttccataataaattttaattatttaaatttaattttttttgagagaaaattattaaaatttaattgttgtatggaaattagataaaatatgatattttaattaggttaattagaaatttttctccccgaacgttgacatgtactaaatcatgccccctgaactttttgggccgttaaaaattccccatgaactattaagat

SEQ ID NO: 155371 - DNA, 754 bp, Cannabis sativa
  modified_base (31)..(32): a, c, t, g, unknown or other
taaccatcttaggattaagatcttttgatcnnagatcaaccagtgatattgacttggaaagatacagcagtaagattacgatatctttactaatatcaatagtagtaattgtgaattacaatatgttctagatttaacaaaaattgtataataaaccataaatatgaaaaatacatgtaacataaatgacttttctaatcttctattaataacgaataagattatattgtaatgggttttatttaggacaaaattcccaacaaaaatttgtcaagacaatatttgttgagaagaaagttatcaggacaaaagacataatcattgtcctaaacaagactaggtagtgcctatgccctatgaaatttatctttttagattaattaattatttaattattcaattcgataaatatttgaatttaaaaagtggttgaagatatttcaaagttgttgagatattctctccagtagttgagagattccctcatacatatcagtaaccaaattcgattgtcgatatttatttatttaaataattagatatgaatgaattaaagggttttaacaactataaatagaagcctaattcaaaaaattgaacttttattttttgtaaatcagcaagtgtattagatcaaacaaataatttatacaacgaaagagcaccctcataaaaggcctcaagaaaaaactataatctttacaatgagttgaaccaactctcttcactactagttacatttttaggccatata

SEQ ID NO: 155372 - DNA, 723 bp, Cannabis sativa
aggtaaacatattatatattatttaatttctctctctctcattcttttaattattattttttttataactttttgttatttttttggtttaattaataaaatatatgtaaatatataatattttaatgatgtagagaaaaatatagaaaagttgatgtatgatgtaatgtaaaaaaagaaaaagtaaaataaataaaataaaattttgttatatagtattttaaagaatagagtaaaaaaagtggtggaaatactcacatctttcatattacttattaaagtaaagggtaagagtttttcattcaaaaaaaaaaaaaggtaagagttgtatttttattatttttttttttaaatctagacctttgaatttggatgcaaacaagtgggccctaagtccacaatacatcctcttttgacatccaatgaaattttttagttcaatttttcttaatcgtatatgttataaattttagaatttttttgaatatttatactgctaaagataagggtcaaatagttatttactatgcgtgtaagagaaattagttacatgtattgtaaaatatttaaaacttttatttttagaactgtaaactatttcattttttttaaaaaaaattgacaattgtactataacgtatacaattataaaaaaaaaaaaaaaataaacaaatttttttaatatattgaaatagataaatgatgtaatagaacacgcctttt

SEQ ID NO: 155373 - DNA, 606 bp, Cannabis sativa
aggttttaactttgcatcttgtagtcccattttcttcaatgtatccttataaagaatgttcactgaacttccattatccaccaacacccactttattcttttgttggcgagcaggattgtaatcacgagcgggtccacatgagggtacctcacatgttttctgtcttccttagagagcacaattggaggaacctaagtcttagctttctttgacgattctggagcaaagactgactgctcgttcttaatttccttgatatatctcttttgggcattattactttctacagcgagatgtggtcctcctaagataaccaaaatgtcctctccttcaaggggaggaggttgtaatctttggttgcctgggttattgggcggatttggatggttttgtccattgccttgtcgcttcacatactgctgaaagtaaccacgcgagataagactttctatctcgtctttcaattgacgacattcatccattgtttgctcaatgaccttgtaaaatctatagaattttgttgcatcctgtttatgcctcgcatgtatcatgggcccaggcttgcgaaatgcaaccctgtgctcatgtgcgagaaagatattttc

SEQ ID NO: 155374 - DNA, 633 bp, Cannabis sativa
  modified_base (166)..(171): a, c, t, g, unknown or other
gcagcctccattgtcgaggatccttggtaaggtggggggcaagcttcggacacgcccttgactgaaggggttttgcccgagcgagccgcacgaaacacgattgtgtccctaggcatccgcgcgcgtgtgtgcatcaagttgtgatattttcattcaaattcaaaannnnnntaactaattcataaaaaaatcaaattaagttctataaaagcctaaatttattaatttttcatctactttgtataaaaaatacttttagaatgaaactaaaaatatttatcatcgtaaaattttaatctccatacaatcatcaaataagcacataaactaatatgaacacatccaaatcagcccaatcattgttttaaattcataattcatgaaagtaaatcaataccatgattctgaggtcaatttttgggaattattttaccaggatctagatttactaccatttatgttgtttaacatcctaaatatgaatttctaaaacaaaggaatttgaacacatataaaattcatgaaaccttatgatacgaaccacaccaacagttgtgatgaaacccgataccaattatggtagcttctaagaattctcgaaatttggatgtggaaccgcgacccaatgcttag

SEQ ID NO: 155375 - DNA, 588 bp, Cannabis sativa
ttatgccattaaacacctaaacttgagtttcaaagctcaagcttgctcaactcaacctccatagctcaaattcaataaccagaactaataatcaacttaaaattaacataaaatcagaaccctaagcattaccaaccctagcagcccctctttcacaaaatcattacatgaaaccaaattcgaagcttaaaaacactaagaacaaagaactagggattacctcaacctcaagaactcttgaattcctagctgaattccagaaaatcacagatgagaagcttggttcctcttgctttgggtttggccgaaaaagagaaagagaaagaaaattttctatttttttgctttttcctttaactttgattttttttcttcaaatgggaaaggatttcctaactaatcctagctgaaattactagtgctaggtgtcactaacctagggcagccatgtatccttcactaaaggaaatgactaaaatgccctcaaagttataacataggtatttttcaaaacaaggggtaaaatggtcaaattccataaccacgcttaaccccgttattttattttctctaaaatatttcccacta

SEQ ID NO: 155376 - DNA, 568 bp, Cannabis sativa
tgtcttctttgaagaagaaaatttcgagtagcccttctcttgattttcctcgttggttgaccaaatcaggtcttaacatagttttgccaatatttcgtgaagtgtcttttcgagattgttatatgaatttatttctttattatgcaaccaaatgagtcttactttatttatcatttattattttgtacatgtgtcatgcgattaaagtcgtttatttaagtgcttcgaaaaatttgtatgacactaatactattcgtaaggcaccacctcatgatagtattagacagtagtgcactcttatgaggtggcatattactactagtacaatttatataggtctcttattttattttaataataattataataaattgctagtcatttatagagtatcacctgatttggtgttagacactattgtacctagtagttttggtcaatataaaatagaatattactatgggacactaaggtacctagcactattatgaggtgacactttataattgattaatgattttttataatctttattaaagcaaaataagtaggatctaatattgaatcc

SEQ ID NO: 155377 - DNA, 558 bp, Cannabis sativa
  modified_base (61)..(70): a, c, t, g, unknown or other
  modified_base (276)..(278): a, c, t, g, unknown or other
cacatggatcttatgggtccaattgaagttgaaagtctaaatggtaagtgatatatttttnnnnnnnnnnatgatttctctcgttttacttgagtagattttttaagagaaaaggctgacacttttgatgcttttaaaactctttgtttgagattaagagttgaaaaaggatagaatattgggaaaattgttcgaattcagagtgattatggtaaggagtttgagaactcaatttatgatgacttttgtaagtctacaggtatagctcatgaattnnnttctcccaaaactcctcaacaaaagtgagttgttgagaggtagaatcaaacattgcaggagatggcaagagtgatgttaaatagcaagaagctgacaaagcgattgtgggcagaagctattaacacagcttggtatataataaacactggttattcgtccaggtacctcaaaaacatcctatcagatttggaaaggtaagtgttgaccgaggttttcggcaaccaataaaataatagaagattaaagagctctaagaaattaagagaaggatttttacgt

SEQ ID NO: 155378 - DNA, 505 bp, Cannabis sativa
tttatgaattttcactaagctagtgcttaattgtgaagaaaagagattctagggtttttttgtttattgagagactttgttaagtctaattaataaatatgttaaatgacaaatttatttcataattaattttaaatattaaataaatggttttggcatttgagtggttgaattggaaaatatggcatttttgagaaaaataagataaatagttgagaaatggcaaaattgcaagtggtgggcccacatcctataggccggccacgtgtgcatgattttaccatttgttttatcaattttttaatgccaaataattcaaacctaaacctagatggattcctataaatagatagtgatggtctcaaattgaatgatgatggactaaagcgtttcagtcaaaatttgagccttctctcttctctctcatattcaaatccttctctctctctttctctcttcaattttcgaaccctatagtgatagagtacatgcccacacatagcaa

SEQ ID NO: 155379 - DNA, 740 bp, Cannabis sativa
atgaaaaccaaaagttaaactcaagaaaataagaaaacaaaacaaaacaaagccaaacttggccaaaaaaaatcttgtgcatggtctgtaacgcgcccatgtgtgcatagggttgtggcatccaccgaatccacaggcaacggaaaaattggggcttgcaatgccacataggattttttggatgaaaaccataagttaaactcaataaaacaagaaaacataataaaacaaagccatacttggtcaaaaaagaacttttgcatggaccgttggtgtccatgtgtgcatagggtcatggtatccaccgagtctacaagcaacgaaaaaccgtgcgttgcatggccacataggatttatttggatgaaaacctaaaattaaactcaagaaaagaagaaaaagaataaaacaaagcctaactttgtcaaaaaaaaaaaatcttctgtatggtttgtaggcgcccatgtgtgcatagggtcgtggcatccatcgagtccacaggcaacggaaaattgtggcttgcatgggcacattggattttttggatgaaaaccaaaagttaaactcaagaaaacaaaaaaacataacaaaacaaagtagaacttggtaaaaaaaaaatctcccccatggtctgtaggcgctcatgtgtgcatagggtcgtgacatccaccgagtccacaagcaacgaaaaatcaaggcttgcattgccacataggatttttttggatgcataccaaaagtt

SEQ ID NO: 155380 - DNA, 575 bp, Cannabis sativa
  modified_base (283)..(285): a, c, t, g, unknown or other
  modified_base (462)..(467): a, c, t, g, unknown or other
  modified_base (540)..(542): a, c, t, g, unknown or other
acatggtgagttccttgaaactctcccactacgacaaggtaccgtgatttttgtctaagaatctaaatggtattgtcctcatcagttgtgttaaaacaatagaggctttgggatcatcttgtctcgaataagatgatagaacacttatggaatcaagaaaattatctcctttactttgctactttgtttttagacttagtcattttcgtagaaaagtagtatttgcttaaacaaacactttcttatctaatgactatgagatgatccacccctaatcacttannntagctaacaaacatgcaaaccttagttaacagttctaggctttcttaagattacgattatgtcatccatgaatctattaatggtttatactaggtacacaaccatttcatcattctaaaattttcttatcactatagtatatccctagaaggagttaggcaacgactagtaactaannnnnnatatgcaaatcgaatttctggggaggtaaatttagatataatataatccaaaaaatcaacttaatgatctttnnnctgcatatgtaccaaatatttctccacccctat

SEQ ID NO: 155381 - DNA, 612 bp, Cannabis sativa
  modified_base (309)..(332): a, c, t, g, unknown or other
aataggtttgttaaaaaaaaaaaattgaataaacaatttaaataaaacaaacattatccatgtaacaatatgtgaaataaatatttattacttatattattaatatattatttaactaactaactaaattttgaaaatttagggttgttgaaacaaccttaaatatcttttcaaaatttaaaattcaaactaattttaaaatctctagatttatttgaattattttatcaaattagattaaatatctaatgatataaatgatttgaaaataacaaaattagatattctcaatatcattttctaatcttnnnnnnnnnnnnnnnnnnnnnnnnaaaataaaccaattttaaaatatagatatggttaggaaattattattttaagaataaaataataaacaaatgataattatccaaattataagttaaaatatctcaaattaaatattttttaaatttctataaaaatatctaggttatttaaaatattttttataaatgtctgataagtaaaatgatataagataaccataaatactatttttctaacttataatttataaacaatcaaatatttcacaaaataacgaatttatgaatttgaaaatattat

SEQ ID NO: 155382 - DNA, 872 bp, Cannabis sativa
tttcactgctggcagaaaatgagctgattttggaaatttatccactatgacccatattgaatcaaacattcctattcttccaggcaatccagttacaaagtccattgcgatgtcctcccatttccactcaggaaggactaaaggttgcaataaccctcccggcctttggtgttccgccttgacttgcttgcaggttaagcatttggacacatagtccaccacatctcttttcatcccataccaccaaaagtagggttttagatcctgatacattttggtggttcccagatgcaatgaataaggtgtggtgtgagcctcatgaagtatctctttcttaagctcgtccatacgaggaacacaaactcgagctttataaaacaacattccattattcgagactgaaaagtctcttggccgaccagccattacttcatctcgaactttagctaactcaggatcttctagttgtgcaactttccaacaaaaaactcaatccctgcactaaccatctcaaaggctagttcaagggcgattaaaaccgtggtgcaaacttgcccgggacctcttctactcaaaacatcagccacaacattggctttcccagggtgatacataatcccacagtcgtagtctttaaccaattccagccacctcctctgcctcatattctttctgggtgaaaaagtatttgagacttttatgatcagtataaatctcacatttctcaccatgaagataatgtcgccatatttttagagggaaaaccacagcggcaagctctaggtcatgagttgggtaatgttgttcataatctttcagttgacgagaggcataaggtatgactctatcagcttgcatcagaacacatccca

SEQ ID NO: 155383 - DNA, 681 bp, Cannabis sativa
ataagcacaatatttgtttcttttaaatgatcaggaaattcaccaaaagtaaagaagtgttgaactaacggaatgatatccttactaacgatatcccagaacttatgataaaactcaggattaaagccatcaggaccaggagatttatcaggatgcatttgaaagagtgttttctgaacctcctcagcgtcaaccggaatagtaagagactcattcatagcagtcaatacccgattatgcacacaagccgtgaccctaccccaatcaatctctgaagctgtgaacaactctctaaaataatcttcaacgacacccggtaagccattttcccaatccacccaaatcccacttctattttttaaagacaaaatctgattatttttccgcttagtactcgcacaagtatgaaagtacttagtgttttggtcaccaaattgcaaccacaattgtttggatctctacttccagaagacctccttctgggcgaggacttcgaataaacgatttcgagcctccttgtacctgttaaccgaatcaacatcccttctatttttcaaaagcttcagaattttataacaactgtttatttgctgcttgaaattaccagtgatatccttcccccatttggctaaagcagtactacaatatttgatttttgagctcaaagaattcgactcatga

SEQ ID NO: 155384 - DNA, 624 bp, Cannabis sativa
agatctacatttttttagattttgattttgctggttttggaagaaaaatggttgagaatgggtttggggttggacggctgggtcacgcagaaggatgcggctgctgggttgagaatgtaggtttccgttttctctgccggtatttttgtaattaccaactttttagtttccacttttgtttattttcttttttggggtcataaatgtaaatttcatctatttttggtttattatagaaaaaatctcttaatagttttagtgtcatgtactataattagtttatgtacgaaaattttagaaaattattgtagaattaaaatttaatttaaatttagttaaagtggaagcatttatatataccgttaattattatttaattggtttatgtacgaaagttagtgcattttattttattttattattatactagggaacaaagccgcccttcgcgcgggttcgaccctagttttgcaagctttattttaatccttctccttaagttactcgagacactgcgacatataattggccatgagtgaatatttgcttagggagatacaatccgacatatttaagcgattgttcttgacttttattgactgttatggtaaaacatagtgccaa

SEQ ID NO: 155385 - DNA, 569 bp, Cannabis sativa
acattttgtgaagctattaatatacttgtgccagattttgatactcatacattgcaagaggaaaggcccgtcgccaacaagatggcatgacattgaagcattattacaaagttgatatttacaatgcagtgatagactctcaattgcaagaaataagcaacaaatttgatgataatgcaatggaattactcattcttagttcaactttagatccaagagagatgcgtgtatcattcaaaattgatgacatatgtaagttggtatgaaagtattactcacaagactttgaagaatatgacatgatacaattaaggatgcaatttcaacattttgatcatgtgcggcaacttcttgattttgcgaatttggaaactatttctgatttatgccaatggatggtaaagacaagacgagaaaaagcctatccacttgtatatcgagtggtaactcttattcctacaattccagtttctacagctactacagaacgatctttttcggctatgaatatagtgaagactacacttcgcaacaagatggaagatgaatttttgactgattgtttgcta

SEQ ID NO: 155386 - DNA, 543 bp, Cannabis sativa
ttgggcacgagtacgggatttgctaaccagttcggatagaacgactcccttatgaagccgcatgccaaaaggcggtctacttcttccttcagagcatggtacctcacggggttcattttgtggcgcttttgtcggacacctcgcacttcagggtcaatgttcaattggtgacacatgacctgcggagatattccgaccatgtctgaatgtttccaggcgaaaacgtccaggttttgcttaagaaaagtgacaagcttttctcgctgttgaaaagttagtttagaaccaattttcaatactttattattatctattggatcaataggtacctcgatagtgtcttccgcggcctgggcggttgcggcatagtcgaggattctaggatctaaatccggttcatccttatgcggtatttcctctattctgaatacttcctgtcgaggaggcggtgcctctagcaagtaaatgacgttaactgacttcttttctgcaagttttactgctgtgttgtagcattctcgcgagtccgattggactcctcgc

SEQ ID NO: 155387 - DNA, 504 bp, Cannabis sativa
cctgtccactatgacccacatagagtcaaattgtcccgtggttctaggcaaacctaccacgaagtccatagcaatatcttcccatttccactttggtatgttcaatggctgcagcaacattgcaggcctctgatgtttagcgtttacttgttgacaagttagacacttagcagcatactcagcaaagtcattcttcatgcctggccaccagaacatagcctttaaatcccgatacatcttcgttgaccctggatgaactaaataaggagtcgtatgagactcatccatgatctctcttttgatactctcatccataggcacacaaacacgatttttgaattgcaacattctcgtttcatccactgaaaaatcactacccttccaatccaaaacccttgctcgggtttttaccaactcttgatcttgcatttgtacttctttgattagctctaaaagagtagattgcagggtaatattagctaactgccctacaaccaactcaat

SEQ ID NO: 155388 - DNA, 729 bp, Cannabis sativa
tttgtcaaggatgtaagttgggttgttttttcgattttttttttagttttcttcttgttgttttgtttttcgtttgctgttttgtgtttcaatttatttctccataatgctttaggttctctccgatgttgactttaaggatgaagtttctgatttggaagtgaagcctaaagttaaacacaagggttgtttaccttgaattttttcattttttaagttgaaagttttaatcaactgttatttttcattttgtttttgttctcatttttgttcttttattttttttttatttttttttttgattttgttactgctattaaatagttttcagcatcatttaaccgaactaccctatttttctttttgtcagtttgagttttcttattagttgtttttaagttttaaatatgtttttcagggtttattgttgtttttgttctcattttttgtacgaaggttttggtgttttcataacattttttccttgtttttaattggttgtttgattgttcttttagtgttctattggccttttctaaacaattgttttaatgtttatttttagtagttttagtgttgtttaattttatttcacagtgaacaattttttttagtaatttcatgttttgctgattgttattaatatgttttttcccggttgttcatcttttaggctgtttatgtctgggtgtttttaaaatgttgttttgtggttgctttctggttttt

SEQ ID NO: 155389 - DNA, 773 bp, Cannabis sativa
  modified_base (30)..(32): a, c, t, g, unknown or other
agtatgatacttgagagagagagagagagnnngagagagagagagagaggctttcacgtgtagcttaggccttcttatgcaagtggagtgaattggaatgacttagtctgacttataaagacttagggaatgagagagacctaatgccctttatatagtgtagggcttacaaaagatctaattcaaacaggtagagatatcccttttagatagggatatttacatccttttatataatatttaagttacaaaaaaggataactaaatccctagaaaataggactaatatctcgagagaaaacccctattttgtgggttgttgggcctatctcgtaactttgctcagctggttggagttatatatgtagaagtttttcgaccaaccctattttgtagggtttggtcggcatatgcactcatatggctagccaggtattattcctgcagcctgaggaagtgtctgccagctttctatgtgtcttccagcttttccatgtgcttgtcaactttggtatgtgcctgccatccttggtatgtgctaggcagccttagtatgtagtggccaaccttagtatgtgttggtcggccttggtatgtgctggccagccttagtatgtgttggtcggccttggtatgtgctggtcagtcttagtatgtgctggctagcctttctagcttctttgtatatctttctatgcgaaggtcaagcttccttggtcgtacaagccctttttggtctgacagtcacctcattggctggccagcttattctc

SEQ ID NO: 155390 - DNA, 692 bp, Cannabis sativa
aagaaatgccgttagatagacacttttaatatataaagataagggatattggcggctaaactaccctaacttttaagtttataacagttaaccacaaaaattgaaattttggcggcataactctctaaactctggttccgttttgctctgtacccatctgtccaaaaatcacagttaagtgccatggtggactgtccacgtgtacactcttgtacacgtggcaaatttttagtggtccatgtaattttaattttaaaaaataattataaataatttaaaaattataaaaaaacaatttataaaaaaatcttttatttttcatttttttctttttctttttctttttcattcttctcgacagaaccccctaacccttcttcttcttcttcttcttcttccattcttcttcttcttcttcttcttctcgacagaacccccctaacccttcttcttcttcttcttctaccattactaccatcagaaccccaaaacccctaaaaccacccctgaaaccaccatcaccactgaaaccacctgcaatcgccatcaccatcgtcgagatcgacaaaccccccactcaatgcccagaaaaccctaccctgattcaaccgcgcacatgagacatgaatggtcctattcaggtcatatctcaagatccaaataccaccttttccaccttcttcagtactttt

SEQ ID NO: 155391 - DNA, 845 bp, Cannabis sativa
  modified_base (135)..(141): a, c, t, g, unknown or other
  modified_base (513)..(525): a, c, t, g, unknown or other
agtatataaataaatttatataatgcattcaaaattattacttcttaactacttcttggtatatatgtcacctaaatctttatacactttttgtatctagtatataaatttaattgtataactacttgttggtannnnnnnattatattagtatataaattcaactatatactatctacttgttggtgtttaatttttttctaaaataactacttgttagtatgtatttcacccaatttattatatcaacaaaataagtaataattatatatatatccataaaaaattgcatacattaatttaaattatttggttaaaataaaaatctttttctaatatatgctaataaaaataataaaagaaaacctaatacatattaatatatataatgaaagataacacgtcatggtatataatgatagtcatgtaatatcaggttgtcatttaatacctcaaagtataaatatatgctatatactcaattgaaatttatattaaaataataataataannnnnnnnnnnnnaataataataataataaatacctccaagtataaattccaaccaagctctttccattttataattttttttagtcatagtaactattaataatgatcatatatttaaatgtaacatttagtttgttattaagattctttagtttgttagttacaaatctttttgaataaatttgatagagaatgtaagttacaaatctgaaagattaggtatattcataataattatgttataatattttttctaagatgattttataattaagtagatattgttgtataattgtgttaaatccccttattttttttttggaataattaca

SEQ ID NO: 155392 - DNA, 526 bp, Cannabis sativa
tggttaaatccacacctaactaatttctgtaactaacaaattaaacacatgcagaaataaaacagggaaccctagatctatatatacctgcactcaaaactcagatcaataaggttgagtgagttcttcaagatctagggtgagaagacttgaagaaggaagaatccaagctcgtacatgcacagaaacacaaaagaaagttagatctgtagagagagagagagattaaacaccaaataaatgtattaaatagagattaccagtctaaaattgttacctgtgacttggaatcttcattgttgtatgtctaaaacatttttgatagtggaatcgagctctcaaattcgaggagcagctcaaacggagacgtagccaattttattggtgaacttcgggaaaatctggtattttctaaccctaaaagctttctgtttgtgtgtgtatgtgagtagagatcagatcattgtagatctgatcttgttgctgggtttgtgtttgggatttctgggtttctagggtttggctt

SEQ ID NO: 155393 - DNA, 1120 bp, Cannabis sativa
ttgttttagcactttgaatgcgaaggcggatgcaaagttcgtaaccaaattaaccaatcgtgttcaattcttttatttgatcatgcctgcaaattgaactgatttcattatctacagtattatatgaagtagtattataagtttatgatatgtgtacccagatattatacaataacatggtataattttttataagtttcattttagaaaagctgtaattggttaaagactgtcaaatcacttgtctgttaaatttgtgtgcatattttaggtgcatatattttaataaccatatatccttagcaagcagaccaatttcctaaaagaaacatctagatactttaaaataaatttataacaaattccaaatcaatgtcaattcaagattctatcacaatgttcgcacaacaaaacccaaatatccaaactaaatcttaactaatcgcagcaccatccccctgctagacatcatctgaacattcacactttaattaatttatatggttacactaatcccaaccttctaataccttacaatcaactctctgatctaggctctagctcatcaaaagcagattcgtaaataagatatagtaataagtcatcaacaaaatgatgaaccaagaaattgaagactacctgttcttcaaccttcatatgctttgagaatagcttcagtgcatggcattctttagtaagtaaccgaagacccctacagaaacacaataaatacttagtcaaaagcaatactactctgattggctgctaagaaagattaagaaaacttgagaaataaagttggattttggaaccgatggagaaagctttggctgatgagattagaatcaagttgaaatttcttcatttgaacagaaaaagaaaactttttaggaagagtcgattgttgtggctgccatgtatcttctttataaccacacctccacatggttcgacaatgtttctgcacttacaagaattcaatcaatttcagaaacaaaaatcaaaatgacaaactgatgggagtgatatttaaagttagaatggacatgtaaagtccttttttggcaagttagttaacaaaatattttttcttttatggtaagattgttttgcattcata

SEQ ID NO: 155394 - DNA, 554 bp, Cannabis sativa
aaataacataaaatttgaaaagtttgttagaattttttgaatagatatttaggtttgttgaaaacctaatttttcaaatttataggtttaattttgaaattaattatttaatttaattttctaattttcgaaaataataatttattatttagattttttgaaaataatttaattatttaattaatttaaattaagtaaatcatatatccaactatccaatttattgcatgtgtgtgttttatatattgtttaattattaaaacttgctttttttttttattataaaacttattattgtttgatctaaattgccatggtttacttgttgacagatccaatgatctgattttaactagtggttcaattgttaataggtcaataaataatttgtaacagaaaaattttacaatcttctttcatctatgtataaacctagtaacatgataaggttcattcaaatcagtgtgtgcctgtgcctatatgtttgctttgggcttagatgcatatagggagcctatttaatttttttgtaattaaaatagactaggttgcta

SEQ ID NO: 155395 - DNA, 862 bp, Cannabis sativa
  modified_base (63)..(73): a, c, t, g, unknown or other
  modified_base (490)..(497): a, c, t, g, unknown or other
  modified_base (609)..(609): a, c, t, g, unknown or other
acgtatgcgtcttctaaatctgcgggttgactgttcatattctggtgataaactcgcgggatnnnnnnnnnnntttaggatgtctgcgtccttaggtagtcgccttttgtggacatcgcacgacgggctgataggacctagacctgcaagtctaaattaatttatcaagggtggagggttcttaggaccaactcgcatttacagagagtcgttctcctggtttatacacggacacggggaggatactcgcatatagttcgatatatgcgagctactctcttgtctcgaatgagattagacttcggtcatgctcgctacctctcgctgattctatcttaagcggggtttaaaacttcgaggagtccctcagggacatctcagctttctttgggaaatctgagtatacgtgtcctctaaataggggtctggtctcgaatttctaggtgagagaaatctcactataacagaatggttgtgtacttagtgtaannnnnnnntagattcatggatgacctaatcgcaatcttaagaaaagctagaactgttaaccaaggtttgcatgtttgttagctattctaagtgatttggggtggaccatcccatagtcantagataagaaagtgtttgttcttacaaatactacttttctaagaaagtgactaagtctgaaaacaaagtagcaaataaaggagataatttttcttgattccaaaagtgttctatcatcttattcgaaatatgatgatcccactgcctcagttgttgttgacacaaccgacaaggacaataccatttagtattcttagacaaaattcacggtatcttgtcgtagtgggagagtttcaaggaactcaccctatta

SEQ ID NO: 155396 - DNA, 528 bp, Cannabis sativa
atcaagaatccattcatttgtgattctttgatctgaaaccatgtacaagtcaccatcagaggagcaatgatctgagtcttctacatttgaagcagaaacatgcttcttttttctatcttctttgagtttattcttaaactcaatgcagaacctcttaatgtggtctactttcccacagaaataacattttctgtccttgtgatattttgccctggactttgatcttgactgagatatgtgttggcctttgaaatgatccttcttgtagtgatgtctacccctgttattgtctcttcctctggccaggtaagcttcatccttgacattgtctttttctttggccatttcttgttctttggatttcaaggctccaagaacatcatcaagggtgagagtatctcttccatatttggtctcagccttcaattcctggtatgcagttggcaatgatctgagaagaatgacagcttggctttcttcatcaacattgtacttcaagttaggcaatcctataataatttgattaaa

SEQ ID NO: 155397 - DNA, 713 bp, Cannabis sativa
tctgggtctgggtcttggtctatgatcgagttctagtacgggaatgggttctggtccaagtctcgggtcacgggtcctaggtcccaggtcctggcgcaattcttggtcctcgttcgggcctgggtccttgtattgatcccagtctgggtccgggtctgtgttcaggttcgagtcttgatgcggtttttgatcaaggtccaattcctgttccaaggtccttattctggttcttgttcctatttcaggtctcggggtccgagtttgggtttgggtccctgtctagaaattgttccaggttcgggtcttggtacgattgcaagatctagacaccaactacggggtgggtccaagccgcaggtcgtgggtcaagatccgaatcgcaatcttgggtcctggtctcattttccattcggatcttgggtcctagtctatgtccgtgtttgggtcagggtctgagactgggttgggtctttggtctcagtcctagtcctgagtcttgattctggttcgaattttgagttttggtccccaatctaggtctgggtcctgggtgcaggtttgagtctcccatcccggtccaggtcctgggttcgagtctaggtccaagtccgtgtctcggttcgagttcgtgtcctaatccgggtccgcattctaatctgggtctgggtcagggtcctagtcatattctagttctcggattcaaacccagactc

SEQ ID NO: 155398 - DNA, 502 bp, Cannabis sativa
tactataaatttattttgtctctcttacagttatttaacaactatttcattaccgccaatctaacgagcgggtgtggcttagaagtttagtcgagattttgagtcaacacacagtgttgtaaagtagtctttttgttaaatcttgtcacacatggatcactttacaaaagaaaatcactttataatattgtaaatagtttgagaattatttttaacggattggaaaatacagaagacacgttatagtttacgggacaaagtcatgaatagcctattctaaaattacttttataacaaggatttatggactgaaattagtctttgctattagttcaaatattaatcattaaaaaaacatagatgagaaattctatacaattaatatgtatggagcatgtttatgtttgggaaaatttgattttctatacttattaaacttaaaaaaaaaaaaataaataattaaaccaatacattttaaactataaaaaatatgccaattttt

SEQ ID NO: 155399 - DNA, 582 bp, Cannabis sativa
tgttattggacattctgaaaggttatgctccaagctgtttggaatgccggttgaagaaattctaaaaccttatggtactttcatgagggctcaaccccagaggaggtacaacttggttggatcgcagtggttgcgtgatggtgaagaatcggaggtggcgtttgttggtcggagtaatagttcgtcggtggcactgggggcccagtctccggcttggccaactaatggggttgttggagtggatcgagggcttgggcgtatggcgaggatggagtctccaagtaaggtttcagctcttacaaagaaggagcaaactatggggattgttggtaaggtagattttgcattagataatgatactttatatatgttggatgagttggaagatggggttgatagtctacttgtgctggataccaagcgacgccgtatggtggaagcaaatgtaggtcgtacccaattggatgggtctaatgtggtggatgttgatagtgggatggaggttggtgatgtggttgttgtgcatgatttttcgggctcgaaaagtggcctttcggtgggtgctggttcccaggcccaccg

SEQ ID NO: 155400 - DNA, 722 bp, Cannabis sativa
cgtccaacagccaagtgacttttttctcgtgacgaacgaccaacgaagttcagatctaggctccacatcctctgaaacatccaagtattgttccatcacgttctttattttttttggaaaaataaatttgtactttgtatattctggatctctatcattctctcgtttcttaggtggacggaagttggaagtttgtggcagttcgttaaacacggtgcttctgagtttgtggcatcgacggcggttcgtggtgattgttgatggtgattcgtggttgttgagtgtctgtggtttttattgtactcatatttattttgggttttattatactaatttgtatgttatatacaaaaaaaaaattgtaaagtaatggattttttctatctgaaaaacatatgtataaattttgtaaaacaatggattgataataagattttaggtctgattattttttgttatatttttttttatcttattttttgacatttagtcccggtttttacataaaaatcgggataaaaaacctccttttatgtaaaaatcgggataaaaagaagccttttatatcagtttttatataaaaattagaataaaaaaatatctttttatcccggtttttataaggctttttatcccactgacatatatatctcggtttttattttagcgaaaaccgggataaaatgcccctaaaaatcgggataaaaagtcttttttgttgt

SEQ ID NO: 155401 - DNA, 520 bp, Cannabis sativa
  modified_base (40)..(42): a, c, t, g, unknown or other
tgatgtttcttacaatgtgggcactcagggtaagagtaannntggcgtccacctctgccttggtttccatgaaatcgcttactttgccttgagccaccaaatgcctcgataactttcctcttcttatcagtggtggaatcaccaccatccctaccataaacaggagtaggaagggtgggggtcctaccaacactcggagtcactcggggctcctgaaggaactttatcgcgcccgcggctctcacggctttctcaactgttttcgcataagttgtttcttcgttggttgtgatcaccaaatcatgcctaatcttcacattcaaaccagccaggtacttttctttcttactaaaatctgttggcacaatacccacgtcgagtttggccaaacaaccgaacttagtggtgtactaagtaactgacattctctcagtctgcactaactcagtgaattccttccgcttagcactgcggaaggcttcattataatatttgaaattaaacagctctcggaactctt

SEQ ID NO: 155402 - DNA, 602 bp, Cannabis sativa
aaataatttcataattaatcaagattaactgctaatttccaaattaaactaaacggtctttacatatactaacataaaataaattaaataattaaattgaaataataaaaaaaaaaaactattttaatagctaagaattttaagaaaaatagctatattataatcctcaaaaaattaaaaaaaaaatataattaagcttttaatacaatttttttattggaaagagtatatactgaagataagtttttacaactttgttattattatttttatttaatgtatgtttttttcttaaacaaaataaatttgttcatcaatgacttcaaaacatctatacatggaaaatgtaagttgagtcgtaaagtagagaagcaatttaggtcacaatacacagatttgacatgaacacgacttgagattttatgagtttgacacgacgacatgaaaattttgctacttgtatttgtgttttatcaattttttatattacaggtcgtgtttgtgtctgtcgtataaaataattttcaaaattcaacataacacgaacatggcatgatgacattaaaatcaacaatttagtttacaacccgccaacacgatat

SEQ ID NO: 155403 - DNA, 670 bp, Cannabis sativa
acaaagctttctaaaaagcttgcatctaggattgatggtatggtgagggacttctggtggggctgtgaacaaggtaatagaggcatctgtcttaaggcctgggaccagttatgccttcccaagtctagaggggggcttggctttagaaagactgtggagatgaaccaggcattgctggccaagtggggttgggctctgcttactgaggaaaagtcgttatgctgtaatgttctcagatctaagtaccttaagggtaaacaattttttgactgtgaggttaagagctccgattcttggttttagagaaatgtggtgcgatcaaaagagattttaagaaaaggggcgtgcaagctaatatccgatgggagagagacaagaatttgggatgacccttgggttatccatggtacgaatttttaccctaagtccaactttcgtcaacaggagggctttgagaaagtgtcggatttacttctacctgacggaaattgggacacacccaagctacacaacctttccgaccaagaaattgttagtaacatcttaagaggtggtaatccgagtggccaaggaatagatgggtttggacaaaagaatctaatggtctgttttcaaccaagtctgcctatcttattcaagcccttgatcgggctcctttgtgcaacattgc

SEQ ID NO: 155404 - DNA, 925 bp, Cannabis sativa
cttatttcaactccagctgcttaaacttggattgctatcctagcgagttgagtcggatggttggacaaaagggtggagattgtccaagtgaagatgaagctagaatcttctttaatttttgatttaattttttcagtttatgaacaatttaatttcaaatattggtttgggattttattccttatttcatatttatgtagataattcatttaacaatttttagattattaataaaattttctcattaagatattttgttatgaattgcttttatgaaattgagcttcaattttctttaacttatatgccaatacctattatatttttatgtttatcatgtttgtatgtgtttgtattttattattgatgcaaaatcttgttatattattctctgcaaagagatataccacataaacacttagaatttcaaattcgatgtttatgaataattattaattcttaagcaattattaagattttgtttaataaaaggatcttttgatctgatagtggtggaaaaagttaaaaagtaatatatgcagttcaatgatcttttatatcttttgaactctagattatattcctaactccacagtatctctataacacttaggggtggaagaagctattgacatatgtaattcattttcaactctagactatactcaatacaccatagtacctctatggcactcatattttgattagacatggatgtaatataatgaacaaattagcaaattattagaacttattcttgatcctgtattttgttccaattaacatgttatagtagtaatagaaattgataccaataaagttattggacataatatcacagtagcttatttgagtgggagaattttaaaattctaagcccatctttatttggatgacacttgtgatagcttactatgttatgatc

SEQ ID NO: 155405 - DNA, 540 bp, Cannabis sativa
cctgataaaatatttccaacatttttttgagtaaaattattatttttgaattaattcaataattttatcctattttttaataatttttattgaattaatagaatattataattgctttaaaaaagatagaatgttataatttttaaaattatttttttttaataaaaggcggcaaaattttatattagtcaaagtttaaggggtaaaaatactaatttttaacagtaaaagaaacagaacctaacagaattaggggcataattatgtaactgttatattttagagaaaatttttaacaagtcgtataagaaagtaaaatagataatactgaaaattcaggagacaaaaatattaattattcattaaaataataatagtaataccactgttttaattaacctttaaatttttcgactttttgttataaatttattcaaaaagaaaataacttgttttattagatatagtttagtaatagtgaaacatataaataaatatagaacacttcttaatgggtattacccatgaattattactaaa

SEQ ID NO: 155406 - DNA, 693 bp, Cannabis sativa
attaagtggtcggccactagtgtgtatttttgcctattatttcattcttttttaatccatataattcaatcctaaaccctagttgaaatactatcaaagatatgtgatgctctcttctcatccaacttaaaactttcaacctactaaatctagttttctaactctgtcagacaactagtagatgagagactcctttgttagtgatttcgcatcttatcattattcttcatcaattgagccaactgatagagtaccatgcgcccacatagcaagtcaagtactcaatcctagtgtggaagacggtggtaaccaaaaccgaaggagagaaggagatccaggctcagatcttgttattactctgcgagagaaaggaacaagggctagagatctgagcagaaggagtcatattattctgctgccattaatttcctcatttttgatgaagacaaagaagatgcacgagttggatttttgatctgatgcttggaagtgcccagattgatagattgtcaacctcggcgctagggtgatcgggcactgggtatctgggtgctcaataatgaaatttttctgaatttgattttgatgtctcaaatatgttcacgctatgtctagttcatgtcacaatgcaaaatttgacccatttgcactaagatggtctcaaaaattgaaaccttagatgaggatgtcaac

SEQ ID NO: 155407 - DNA, 547 bp, Cannabis sativa
acttataaaacaactatagaacataaaaacaacaacatgaaaacaactagaaaatataacaaaaagacagctataaattaacagaaaaataataaaacatcaattttgttaaaatatgtaaatcattcatatctaaaaactacaaaacattcaaaaaaaaaacatataccattttttattaatcatgttaaaaataaaaaaatataggatacgatgagttctttttatttttttgtaagagagagaaagagtttttaaaaaagtatgagaaaaataatgaaagtaaaagaatcatattttagtaaaggttaaaaaaaattaattaattttttttttataaaatgtgattaattaaagaaaataagtttacaatagctagaatgagaatagtaagaaaataaaaagggttaaaagaaatagaataagtgtttatattttatttttttaaaaaaaataatataaaatttgtgaattcgaaagagtgtaaaagtgttaaaaaaatgagatatataaatgtacctttcttatatacatttatatatatata

SEQ ID NO: 155408 - DNA, 582 bp, Cannabis sativa
accatcatcatcatatttcatatgttgagcacccctaacattgggctcttcattccctgcttctgggttatggtaattttcactctgagtcctccatgaacatgtggaccgtgtattttagccaccttcaggttgggtccttcttgaacgagtggaccgtgtagatcgtgaattgggaggcctctgttagcccattggctcttttccaagacggtgagtggtctcttcaggatgagtatcaacattttctctgttatcaaccatggagaaagatttttcttttgattaggagggtttttctgagcttttttcacataggctctcaatgaaagcaccaaattgttaatgcagattttttttacgatgttaaagcttatttcgcgattgatttgcacagaaataatagtagtaaaagaagaagaaataacacaaagctatttacgtggttttggagttaaaatgttgcatagtccacgagtctttcttataagatttctctgatacaaactagggttcttttgctaaaggatttttcgtccctttttcagtgtattctgccccctatttatagttacataggaa

SEQ ID NO: 155409 - DNA, 554 bp, Cannabis sativa
gactctcccctacggtgactaccttgaaataaatttacaaatatatatgaaatggtacaagctcataaaataagaataaccttgactctcgcctaccgggacaacgttgggttcttattttgatcgaataaaaggttgctaaaatagtgtctattttagatgacctgactactctattcaacttatgttatctttgactctcgcctaccgagacactgtatatcattttgttggaaaccttggaaaataatttaatatattttattttggtattttttggaaacagattttgtttacttgttattttttgaatttgaaccaagtaatttatttctatttattgatgttggtagtgtcaaaaagatgtttaacaatcctcaccccgatcctcaactagtatatgcctttgaaaatgaactccaaattccgaagatgactcctggttagagtattacttcacacttgctcatgatgaacttgaaattctagaaagcaactatgctgggtattttcatatcatgggagcaaagagttcaatttgttctcaacagctt

SEQ ID NO: 155410 - DNA, 526 bp, Cannabis sativa
aaattgagaaagttatgaatttttgaagtttcgggttgaatggggtgtcgagtaggggcatcgaatgcaccaggcactcggacaaggaaccccatcaacgcgcgtccttcagacaagaattgtctgaagccttagtcactaagcccagcaccctgcacgtccgcccgtccctccctgtaggcaccgaagaatgccgcccaagcaccctgctgtccgtcatttccgcgcgcgtcctgggatgtttgcagcctcctgggcaggcacctcacccaacccgaattttgtgggatttttttcccaatttctattttttccaattttcaaaccctacaattaaaataaagtattatttttatcatttaaacctaaatatcaatattctaaattaataatacttattttttaatagatcattattattttttcgacattttgatgtttaaattttaaaattgattattttcatttttaaattatgatcagatttaaaaatttgttaatttctttactatttatatattattta

SEQ ID NO: 155411 - DNA, 661 bp, Cannabis sativa
atggattgagcttcacaaaataagaaaaaatttaaatattatatgtgaactccccattagaggaaaagggtaactatgtatgacatctattactttataaatacatattgaatccttcatgtaaagagttggaatttcttgacttacatgctcaagaagagaatagagtgctcatactcattgtaattccttaggtttttctagcatatctaataataatactgacttgtagactaagccttattaatgtcttaatcacgtaaaaactctgagtgtcttcttcatttatcgatattttaattgtagttttttagctctattgttaaataattagttcgcggaatttcccactaaacaaaaataaatatgaacaataaaaatttttatgagaatagatataaaaatttatgtaaagataaacgaaatataattaataaggttaaaaataaaatatatattatggaaaaactaaaaaagaaataaatttataattggaaaattgaaaaaatacgaatcatatagggtccatgttcctttgcctctctacataacactgtatatctagggaaatttgattttctatgcttagaaaatcaaaaaatttgatttctaaaccaataattaaaaccctaaaaaaactataccttttttttcaaaaccc

SEQ ID NO: 155412 - DNA, 591 bp, Cannabis sativa
  modified_base (387)..(395): a, c, t, g, unknown or other
tctcttcccgaagcatctaatacctttcactgctgaaacccgcagaaaaaaatgttccattgcctaaaatgtgacatatctgcacttcgaatcaacctaacttttctgcctactttgagaagcaagcatccgagccttaatcttatctatagcttcattggtcctctagactgactccggacctaagtacttcctttttctagtttcgtcccaatggataggggagcaaaatttcctaccatacatcatctcatagggagccatccctattgtactctggtagcttttgttgtcggagaattcagctagaggcaagtacttactccatgaaccctcaaagtccatgacacacgcttgcagtaaatcttccagtatttgaattgttcnnnnnnnnngcccatcagtctgagggttgaaagctgtgctaaactttagctttgtacccatagctctctgaagacccacaaaaaacattgatgtaaactttggatctctgtctgaaacaatggatttaggagctccatggagacgaactatctcctttacatacagttcagcatactgatccattgcataagtgactttcactgg

SEQ ID NO: 155413 - DNA, 562 bp, Cannabis sativa
acatgtgcttcagttcttagtctcggaagcatactattaatgcaatttttcgtgaacttaatctaagaaaattattaattcaagaataaattcaagtaaaaaagaaacaaaaataataaatgaataccttatatttttacgtggttttgtagttaaatatacatactccacgagtcaatattatttatgagttttggttgtgtttacaatttggtaaagtttctgtaaatcaaaattgcctcttcccattttcctttgagtgaacccctatttataggaatagaatggtagttactcaatcttatcttagtaaaaagttacaattgatgggtagttaatgcccattttcacatttaactgaacatttagataaatataaatatctgtttatatttaaaatactacaagtggtctttgacttaatcaaaccatgtaattttgagcagatgcattgttgtgtgtaatacgagatgatacatcattgagtgtgtaatacgaggagatgcattgttgagcatgtattacgagaatgtgcattattgttgtgtattacgaggtgatt

SEQ ID NO: 155414 - DNA, 636 bp, Cannabis sativa
cgtcggtagcgaatttcgcgaaaaccgacgctcaaagggcttaaaaaccgcctctaaagggggtttttgtagtagtgattgtaataggaagttgatcataatactctcctaagacaatattaatttgcacgcataaccctaattatcaaactattttttgttagaaaaaaaaaagaaccatattcctgtaattagatcaattttttttatggaaaattattgctattatgtgtagttagtttacaataatagagtaaataagtgagtgtatatcaaatcaaaaaattctctcttcatcaaactttagagcatgttttactaagccaataataaccttattagcacttctgactgtgacataaaaaataaccatgtaaatctaaaatttaattgcggaagcaaaacaaatttgatgtgacagaatatgttgagctagcatagactgaaaaactactttttaaatttaaaataataattaatgctactaatgtatatgggttaagacagtactaaaaaaaagacctttaatgaaaatttctagtcataacataatttttttgtgactaaatgcgacttttagctataacaaaaagttacttgtgataatatttgaatacaagttgtcactaatttagt

SEQ ID NO: 155415 - DNA, 1028 bp, Cannabis sativa
tattttcaccttaatgcaatattatattatatttttacaacgtgcaaatataaatatttttcagaaaaaaaaactaaaaaatcaacataaaaaaaaaaattcaaaaatatatataattttaaatactttgtaccaattttttattttccttttccagcaaaaatatattattaattgtaacatttggcatacgaatcttattgaaaaatgtgtacgattcatttttctagcaatctggctaaaaacaaaaagaaagaaacatcgtaggagatatcaccaaaagaagaaaaggataaaagagtacgtattttacacaaagacactgaaacctaaggataatgatagtgaattccatgacagtgagtagtaaattttccccaaacccaaactacttatgagaattcttatacttctgatttagcacaagatcattaatggatttattgtttgttgacattgactatggcagtgggttttaacaacatggacggatgatgaatgcaaattaatcatggagaattgtttcaaggcactcccagaaggaggtaagttgatagcttgtgaaccggtattgccaaatgaaaccgatgacagtcaccgaactcgggctctcctagaaggagacatcttcgtcatgacaatctatagggccaaaggaaagcacaggacagaagatgagttccgaaagctcggcctcgctgccggtttccctaatttccgagctttctatattgattatttctacactgtcttagagtttcagaagtagtagtagagaagtaatgaatgataacttatttagaaataatggtagagggaataaaatgtaactttctctagaaattcataacaaaattataaagattgtgatttttgttacatttgaatttggaatttgttttgccacacttaaagtcataatttattatgtactttcaggtcataaatttgtgtacttgagtttacggttaattaaaaaactatttaaaattaggctgtttgtctgtgttttcagtttttagttttca

SEQ ID NO: 155416 - DNA, 811 bp, Cannabis sativa
ttgaccgtgctgaaggcttcatcaagctcgaagaagctattcaacgagcagaatgtgagaaaaagcctagcaagtctaaagctccttccattagaacgtccgaccagctcccacattacccaaacaatccgagctcaaatggtaaacgttctaacaacaacaataggcaagggaatgggaagaagggaaagttcaccagcaaaaccgaacaggctcctcagaagaatcaagctacactacatttaccatcttaactgaagatatagaaagtgtctacatggccactcagtcgctagccccgtataagaagcctgggcccatgaagaaagatgtcagcaagagagacatgacgaagttttgtcgattccacggagactacgaccacgacactaacgaatgcaacaatctgaagcgggaaattgaattcttcataaggaaaaataatccagacttatagaagtatgtcaggaccgatcagaattagaggaacgacaataaccaagacttgctacctcccccggtagacggacatctgcaagtcatcattggaggcccacacatagcaggagatttgggcaaagctcaagagaggtatgcctgaacagcatagcacgagcaagaagaagtgatcctgaccgtagaagaaaggaagcctaaaattccacaggcaggagggccaaccatcacctttaacgatgaagatgttatcaaaatcaggtttccacacaacgacccgttggttgtggaggtccagatagctaacaaaatggtgtccagaaccatgattgatgatggagcctcttccaatatc

SEQ ID NO: 155417 - DNA, 799 bp, Cannabis sativa
tgctattaattatgtaaaatccaagctccattttgattcgggcttagaaatgcctagggttggtagaagcgagggcttgcttttgttatgggctaatgatgtaaacgttactctatgttctcaatctattagtcatttcgattgctatgtgtcatgtgccttttctaatgtttcgttccatcttacttgtttttacggttctcctgttgactctctcaaacctcacacttgggaaattctgagaaggataggccggaacaatccccgagacccttggcttctcattggggattttaacgctttccttttctcccatgataagcaagggggtaaccccgacaggggcccttctctggacttcagacagttactggacaccttcaacctctccccaattgaccccgaggggcctttgctcacctggaacaatagtgtggcccatcctaaaaatattcaagaacggctggactggggattaatcaacagtccctgggaaaatcttttccccgatgccactcttgcccacctgggtttttttgggtctgatcacagagctttggaacttgccacatccccggccccggggaatcggccaagggaccgtagcaagaggttcctttttgagaacgtgtggttacaagacccaaattgggatagaatcttcaaccactcttggacaaatctctcgacctcggaggaagctatccccaggcttattgctacccaatcctcgtgcgctcaaaagcttaacaattggaaccacaaaaaaaattttcagttcaaaaagcaaatcagtaag

SEQ ID NO: 155418 - DNA, 512 bp, Cannabis sativa
aaagattaaaactcaaaaaaatacccaaagatcaagtattatttcctttaaaatttacagataggtgaattgcttgatctagttgaattacctttaactttgaatttttccagttatattcaaagtcaaacatattaaaactcagaaaaacataattaaaacattgcctatctacatctgcatcctatatctaagaaaaagatattatacagagcaactaattgaaaaaaaaaaaaaaatggggggggaacctcctaacaggcaaccaatctttatgctgtcgtattcttgaagccaaatatctgaagggtaagtcctttctagattgtgttccgaaggcttcagactcgtggttttggaaaaatgtgactaattaaggctagaactatcatttgtaagggtgtcggtaagcgtgtggctgatggtcaggagacgaacatatggtctgacccttggattgcacacctaaagggatttacccccatttttaatgggcggattatgaataggga

SEQ ID NO: 155419 - DNA, 917 bp, Cannabis sativa
ataaaattttcgaaattgaaaaatataactctagtgcccacttttaataatgggacccacaataataaattcacaaataactataaagatatcaataattagtgctaatttgcggtcattacagtgtaggtatgagactacacaattgaagaggacttacataaattgattggtaccaactatatcaacaaggtgtatcttattttttggtagctcatgacgaaacaactccacacttaagcgtgcttgacctagggtaattttaggatgggtgacctcttgggaaattttctcaggaagtgtgcgagtgaggacaaagcacgctagaaacactcttgttgatttgtagggtcagtcgtcattccaagaagtagtcagagtgacatactcgtgtataagagtcatcattccatgggtgtaaggacccaatagaggcttgaagcgaagacgtaacagtcagagtctcgtgatttaaaggggaaagaccaaaagctgtgcaatcccacattgcctaggaatgaccaagtgtggtgattttgagattatgtaggtatgggactatataattgaagagggcttaaatggattaattgataccacctatatcaacaaggtacatcttgttttctggtaccatcatgaaagaactacacaattaagcgtgcttgacctgggtaatttcaagatgggtgacttttaggaaattttcccaagaagtgagtgagtgaggacaaaacacgctggaaatactcgtgttattttttatatttttaaatatttaaattataaataaaaaatttaatgacatggaccaatgaacgagtgacactttgacattgacttatcacataatggttaggtacttacggaagttccacactagtgacggaatatatttttaccgcaaaaaatacgac

SEQ ID NO: 155420 - DNA, 620 bp, Cannabis sativa
tgcaaaaacataagaaaatgttaacaggatcacactaagagtttagtgtcctactctgataccaattgaaaaattgaatttttgtaaatatcaataataaatacgaaattacaatatatatataaaactgtatacgtctgcagcagcataatgtaattctgttactgcagaaaccagtgttgcagaaataaaccagaactgacagaatataaaaataattgtagaaaaataaatcacttgacacaagagatttgtacgtggtatcagcgttctttcaaaccctactagtccacggggacacacccagagaatgaaatcaattagtaaagtatcaaagattataaaagtaattgacataaacaaatttagactccgtctagtgatttgccacaaccctttgtaatccaccttgctaatctgatctctaaaacacaccaagtagtgaactcccttcagctattggtgtgtgcttacttcctctcgaagtaaggcttaaacaaatcttctcccaaagatatatgctcacttcctccccaaatgagacttggaaaagtcttctaccgaagaccaacatttgttcaaagcttctcttcaacctattctatgaatagtatgagatc

SEQ ID NO: 155421 - DNA, 807 bp, Cannabis sativa
tggatgagggtgcttatgaccttaaaaggtacatacctatcgtcgatttggaaaattgccatctcaggcgccgcctggaggaggcaaactggcagaatgctgaattggagtgtgaggcagccgcagccagggcgacatcggggaacaatactcaaaatcaacttgaccctggagtgggaaggccacgaggcaggcctcgtggctcacaaactaaaagacaggaaactactcgagagaacctcaaaatgctcaggaagaagaacctacggaaaatgaggttcctcccgaaaacccaaatgatcagccagaaccatctcatagaaatgagaatggcaggcgaccaaaaactagggaacaggaaattcctcatggaaacgaggaaaatcctgggacacaacctggggaacggaggaaccaccagcattcttcccggatccatagggaaggggctcgtacaaatcccactgggggaaacacaacgaaccacgcccaagggggaagaacggggcgtgaagaagcaagtgtgacctcggggcgctcaaggacccacagttgatcaactcgaagaggagaaggtactcgtcgcaataatgatcaagaaagcactggaaccagtatgactgcaagtcactcaaggacgaggtccatgagcaaggcgaggtctgttagtagggtgcaatctgtgagtagaacgaggtcctctagtaactataaccaaccatatttgcgagagcaattgaaccagaaaaaacctgatcttcgccaacaactaggtccaaagcaagatgatcctatccaattgtgaat

SEQ ID NO: 155422 - DNA, 645 bp, Cannabis sativa
  modified_base (281)..(287): a, c, t, g, unknown or other
  modified_base (443)..(443): a, c, t, g, unknown or other
tctaataagataatataatataatatcttaatttaaaatttagatatttctaatcttataatttaataaattaaatataactaaaataaacagaaaaataagatatttgatggttaagatattatcaattttatttaataattaaataaaataaaatatcctaagtttaaaaattttatggttaccaaactctaaaatttctattcaaactaaaattaacaaacttttcgaaatttcatgttattttgccaaaaataaaattttaattaaaataaatatcnnnnnnnataaaatgttaaaactaacattttttctaatcttataatttaatttaataaaataaatttcaaaaaataataaattttgaaaatctgatatgattagccaatttgaaactttaactagattatttataaaatttattaatattttaatatcaaaanaagatcatttcaaattttaataattaaataaataatattttatcttataattgaaataaataaaataaacaaaaataatcaaaattttcaaaattagccataagtatagtttgtggaaaaattaaattttcaaattcaaaggctactaatatctaaaactaattataattaattttattctgataattaaatttttatttga

SEQ ID NO: 155423 - DNA, 510 bp, Cannabis sativa
aataatgatcattattaacaaaagtatcaacttttaaccgcagttaaaaattgttgtttataatcataatatcaatgattgctatcacatagttttattgtattaaaattaaaataattagtatttctactttttaaattttaaatattatttaattttgtcccttaaaatatacatcttattaaaaatttctcctgaacttttacatttatagaaatttagtcaatgtgttacatttcggcacattattcgttttaaatattgacgtgtctttgtaaattagtaatttttccctttaaactttgacaactatccaaataaaaatgagaaagattcaacattttatttttgaaaaatcttaaaaaaaacatcattttgaatgattaagacaattaaaaaaaaattaaaatttaaaagttaattgagccatttaaaaataaattatttttattaagaaatccatttagatataaaaaaaattaaattttacgggaataagtttgagtatat

SEQ ID NO: 155424 - DNA, 921 bp, Cannabis sativa
  modified_base (416)..(425): a, c, t, g, unknown or other
gttttatctcccggtccacagacaaatgctttcccttcttcaacatcttgaagaagtgtcagaaatttgaatggtccgacgagtgcgaggaggcattcaaaaaactaaaataacacatggtcaagccaccaatcctatcaaagcccgttctcggagaagacttgttcctatacttggccgtttccgagaatgcagtcagcgcgaccttagttcgggaagaggagaaaactcagcatcctgtgtactatgtcagcaagcgcatgataggggtggagacgcgatacccagtaattgaaaaactagttttttgtctcctgatggcctcgagaaagttaagaccctacttccaagctcacccaattaaggtattgaccaaccacccactccggcaagtcctacaaaagccagaggcgtcnnnnnnnnnnctcaaatgggcaatggagttaagctagttcgatatacactactttccttgcatttccataaaagggcaagcgctaggcttcatcacagagtgcactgaagccaaagctaccgcaaacatacccacaccatcagtcccagcgtggaaagtatttgtagatagggcctccaacgagaatggatccagagcgggagttgcaatgatatctccaagtggacttcgactccaagcagccctacggttcgacttctcagcttccaacaatgaggtcgaatacgaagccttcatagcagggctgagattagcaaaaaccgtgggggctaaaagagtaaaagtctacagcgattcccaactggtagtgaaccaggtgtcgggagagtatcagacgcgcggagaaagaatggccgcatatgtagcaatagtccgggaattgctccacgagtttgcgaactacaaggtggaaagaatccccaaagaaaagaatgctcacgcggact

SEQ ID NO: 155425 - DNA, 598 bp, Cannabis sativa
tcatcatcaataccgtcaccaatgaccatattaattaaattataaaattttaagtttaaaaataagataaaataatcaaattttaaaaacaagataaccaactaagcaaaattatagattttatctattttcaagttcaaaactactaatatcttaaattaattaaaaaaattaattaatttaaatatgataattagatttaaaatatgaaaaataaaaatctaaatacaaaattacacaaaaaattcgaaattaattccataaaaaagcatgaaaaagtgaaaaaattggaaaaaattgtatttggtgcggatcgtatacagtgcataccatccgcgtgcccagggatggtgttctgggcgaggattgtcgcagacagaggctacatgcagcttgtctgcacgcgtagggaggggccttcagacatcttgggcgtgttccttcgaacatgccctgtctgaatgcgcatgacaccgagtgatcactctagtccgcgcgtgcatgaaggtgacacgccttttgattttttttcccgattttcaaaaattcataactaattcaaatagaatcaaaattgagttctgtaaaaaagtgaatt

SEQ ID NO: 155426 - DNA, 674 bp, Cannabis sativa
agagagagagagagaggttgaattcctaatttcctttgattttctctattttttctaagtagataaacctttgttttaatttatcatatgctgaaataaaattggctaggtgtcaagccctaaaacagccacctaatcctctcccttaccaaatgactaaaatgcctttggtgcttaaacccaagctaattcaagcctaggggtaaaatggtcaaaaaccataaccccactcaaactcggtattatatttatctctaatattaatctcactaagaaaaggttctagtcgtacccacgtgactcaaatggccatccatcacattttccgtcatcgccgagcaaaaattataaaaatagcataattcatatataacataaataatacccctagagtttaataaaatattcaaaattgagaaattataactctaatacccattttaataatgggaaccaaatcataataaaatcatgcattactataaaaatgtcaataattaatgctaattgcctttgctaatccatattctaaaatgcggtcattacaattatccccccgttaaaaggatttcgtcccgaaaatctaatctgcatagctctggatattgagtcctcattccagattcaaattctcaggtggcttcctccaccttgctgttcttccagagcacctt

SEQ ID NO: 155427 - DNA, 833 bp, Cannabis sativa
aaaaattaagcataaaaactcaaaattttctaattttacccatttatgggtaatacccattaagagtgcacccatcaattaatatatctctttttagaaatttaggtgaaaattattaaatttttaatgattgtattatcaccaaatttcatatgttgtagaaaatattatttcttttggttggctatatgtgtaattacttgcccaaatatagtatttacataaatatattagtttacattccatgaagtgagtcaatattaaatatttatattttaattatttacctaaataataatttaaatatatatttattattgttttttttgcttgaatttatatatattctttaataaatttatttgtccaaaggtaataagttcttaattaatatgtatttttttctttattgttaacttcatgaaggtaaatcatgtgttttatattctcttcccaaaagagagtttataatgaccaattgactctgcaatattttttaattgcattgctcatatagcttgatcaagtttttttttttttttttttgaatttttcgatctcttttctgtgaacaataataacgtttccatccaaattttgaatgctccaactttaagacatagaaacgagatgtgaaaattactttagacataatgaatttggacttatgcctatgagaagaaaaatgtactaatcttactaatatcagcactgttgcctagaaaacttgtcatgcacaatgagaaaagtcaaaacgtcttagcctcactgctatgaaaaaaatccattcctgaacatctattgagtggtttgccagacactacaaatgccaa

SEQ ID NO: 155428 - DNA, 559 bp, Cannabis sativa
actgtagcgtgccttagcattagggcgttacagttgtgcataagatgtttagttttttttttaatcttttttttgtttttttatttgttttagtgttgttttaccgttgttttgccatgattatttatttttctctgcttttgttcaacctcaccagaattaatgattatttttcaggtgtgttcgtgtttttatagtagttctgtgcgtgggtatagaagatggatgcattattcttgatattcggtgtctatagtataaaagaaaaaaaaaaaggttcaggacagtataaaagtaattttcaccgtgtaatagtaaaattataaacatttatttaaaacccagtatttttgtaagtttcccatatttaatatattttaccccaatagtgggttttttttttttcagaaatcctagatggatcatgggtatgcccatgcttgtactttagcctataaataccactttattttcacataaaagggaggatcgaaaaaggtgatgggcgaagctctgtgaaaatctctccaagctttcttcttcttcaagagaaaccaag

SEQ ID NO: 155429 - DNA, 527 bp, Cannabis sativa
ttctgtgttgaattatcatcgtgatgctcaaatttggttaacaaaaatcttcgttaacaactagtaactaagtatagtatactaaattactaactagtaattagtgctaattctaccaaaatttcagcagcataacgactataattgaacattctcaaaaatttaaaactattaataacaataaaacacaatctaaaacaatcacaataatatttagcaatataaaaatttaccatccatccgaccgcagtatatgtatttgcagaacctattaaactatgaatatgaatatgtaagatattcaaactcatctaacatgcatattattctacccatctgaccgtagtacaatatatcgcagaacctactttactatggttaaatatttaagatattcaaactctactaagcattcctgagtagttaataataaaagttagtaaatgtgtacctagagctagctagaaaccaatcaacaccaaataagttagatccttgcaaattgacctcacaacctacaatgtaaa

SEQ ID NO: 155430 - DNA, 508 bp, Cannabis sativa
  modified_base (37)..(38): a, c, t, g, unknown or other
attaattttcaactaaaatatatttttctaattaatnnaatattagaaaatataatttagttactagaaataactatcttaaatatattttattaaactaagcgtgtctttttaattaattttaaaataatctaatgaaatattaatttcattatttattttaaaattgattatgttgctaatcaattttagttaggttaaactaatataattatcctaatataattatttaaataagggaaatggaccttcataattagggtgattcatgtgagggagggctgggtttagtatgtcatacccaatactatggcctcctaactctcacaaaaggcccaaatgagaagaatttaagcattaattaaataattgttattcattgaataagctcaatactaattaagcctaaataaaactatcaatttgatatttttattttagcaacctagtatatataaataatcaaacttaaatgggcttcctatatgcatctaagcccaaaagcaaa

SEQ ID NO: 155431 - DNA, 774 bp, Cannabis sativa
ttagtgtgtgtgggtggaaaaaaagaaaaaaaattatatatattgaatagtaatataaataaaaagtgaggaatcaaattagttagtttaaaattcaaaatttaaattaaattagcatgatttttacctgattagttagatttttattttgaaatttaaacctattatacgataactatacgtgtatactctagaaccctagcagtcagatagtatcgtattctcaccatctctcaaaaaatttatcctctctattgcactaaatcaattgttctaatcttaagagcttcagggtcagcaatcaaccactcttatctgatcatcgttctgtgtcttcgaaatcttcacgtaaaattcgtatttgtatttttatttttgtttttagagaaataggctttcataaaactaccatatctctctctctatataggtctgttttcagtgatcgaagtaccgttttaaagataatttaatgatctatattttttatgaagaaactctttcctaattctgattatttcgatgtcaaaaaaatcatgttttcatgctggctatcgaattacagtttttaaaatttctttccgatattacctcagtaaaagtgcgatatctctctcgatatctattcttttccagcgattctagtaccgttagaaagataattcaataatacatattttctttgaagaaacctttccctaattcggagttcgtacccatcaaaagtcagtatcttcactcggttaggatatctcgttttaagttttgtttcag

SEQ ID NO: 155432 - DNA, 506 bp, Cannabis sativa
tttggcctatgtaataaattttatagaacattattaaccaattctaagatactattttgtagtagtgctaaacactactagtattttataagagaaataataaagggtactagtggtgcctagcactctcttatttgtcaatatcgttattggtctaattaagtatcgggtctcatacaatttaatataatagcttttaaagagtatcactagccaatcacaacgcgacatgtcgagaaagtgttaagcatcactggtgcctaataacaatgctcattttataataacatttcttttaattatatagttgagattaattgtacattattttgtaaaacaaatatgtataatataaatgtacagtacttattattctaaactaaaaccagcttctaatattttctgatattagacactagtggtgcttaacattatttaaaaatttattttatgattgattaacaatattttttaaaaattattagtattaaccctaataataataa

SEQ ID NO: 155433 - DNA, 611 bp, Cannabis sativa
aacacagggtccaattggtaacttttgtaaaatagagggtctaaaatggtatttaccctaattattttgttagatatattgattgattattgaagttttgtaaaatcatttgaggaatcaaattataatgaaaactcataaaaccaaatccacatggatgagaaaaaaatataaaagcaatactatgcttacgaaccaaatgaaaggagaaacctgcaaataagagaaacaaaaaccttcacatgaaagggatccaatcaaatcagacaaactcctctcccacggttaaccctatttaaatttaatttttttttaagtaaaataagattaaagattcaatgtgatgaggcacacaaaatatagtgcacatacatattacaaccaattgccttttgatatttagggtgtctaccgataagcccaattttaaggtgtctattgtagaattacccaaaaataaatatagctgcctaaaagaatattcaatatgtaaatattaaatttttaatttagcaattataaatttagggatttgattttgtttcgttattgtactttcacggattgtaatccgtgatgtacggcagccgtcagatgagggggttatttga

SEQ ID NO: 155434 - DNA, 1123 bp, Cannabis sativa
atttgaatatgagacaaaggcgttggtttgagttagttaaggattacgattgtgagattctttaccacccttgaatggccaatgtagtggtcggtgccctgaggaggaggggtcccgggcaagtagctagtatgattcggatttcacctcagttagtagaggacatggtcagatctagcatttagtttgttgtaggcaagcttcattacttgacgctgcaatctgatctgttagaacgaattaaattcgctcagatgactgatccagagctagtaaagatcagagaagagatatcagctggtcaagccagagactttacattgtcagacagtgggatgttattgtttaaaaccagggtttgtgttcctaataatatggaacttagaaatgaaatttttgaagaggctcataccactcaatattccctacaccccgacaccaccaagatgtatcgggatcttaaaccttatttctggtggagcggaatgaagaagaatgttgtagaattcgaatcgagatgccaaacctgtcagcaaatcaaggctgatcattcgagaacggcagggttgttacagcctttaactctacctgagtggaaatgggaggataccacaatggacattgtggttgcgttacctagaaccacgggtttgtttgattctatttgggttgtgatagatcgattcacgaagtctgcacattttctaccagttaaaacaacctttttagtggatcagtacgcagatttatacgtcaaagaaatagtaagactggatggtgtaccaaaatccatagttttggatagcttacctctctgagtaggcaaaagagttatgcagatccaaaacgcagagatgttcagttccaagtaggggatcacgtgtttttacaagtatctccaatgaaggggatcaagtgtttttggaaaagaggcaagttatgccttagatttacaggacctttcgacattctcgagaaggttggacaagtggcatattgattagccgtgcctccaactctgtcagcagttcacaacgtatttcatgtctctatgttgagaagatacgtttcagaccctgctcatgtacttagctatgaaaatcttgagctgcagccagacatg

SEQ ID NO: 155435 - DNA, 664 bp, Cannabis sativa
  modified_base (35)..(49): a, c, t, g, unknown or other
  modified_base (627)..(632): a, c, t, g, unknown or other
tcttctttcttctttcctcttcttcttcttcttcnnnnnnnnnnnnnnntttcttctttcttcttcttttttcagcagaaaccctcccacgccaaactaaccccaaaacataaccaccgacgctcactatagtctctccgaataactcttggtgttccttgcttcaaaacccactatttccacttctcatcctcctcctcctccacccccgccatctccgccagcgcagcctcgccagagggtacgggcaatccttgttcaagaattgaatccagtagtgcacaaggtgaggtcgtcgccgtcgccatcttcttctccttccacatttaagatccaattattgtcggggagtctttcgccggttatggatttcacgaccgcttcacctactcccaccggtatgacgacctccgtaaatgggaatggctactcgggtcaccacgattcgtttccctcaagctttagcaaatttaattcggtgcttacggctgggctattaaatatatagtcatttatatatatattattttttaaaaactgaatatatatttatttatgtatatatttaggaaagagggtgggagggtttctgcaaaaaaagaagaagaaagaagaaagaaaaagaannnnnnaaaaaaaagtaaaaaaaattaattttttaatt

SEQ ID NO: 155436 - DNA, 534 bp, Cannabis sativa
  modified_base (457)..(457): a, c, t, g, unknown or other
catataaagtttagaaaaccttatattgatggcatcagaataatatgtctccttctactcagatctttaacccttgttcctttttgtcgcagagtagtaacaagatttgagcctggatctccttctctttcattttggttaaccaccgtcttccgcactatgattgagtacttgacttgctatgtgagggcatggtactaaaggcttgaattgatagaagaacatcaagaaggattcgaaatcactatagaaggagtccctcatctactagttgtctaacagagttagaaaactaggtttagattggttgtaggttggatgagaatgagagcatcatgttcctttgatagtattgcaactagggtttaggatttaattatatggattaaaaaagataaaataatgggcaaaaatacactaagtggatggtcgcacatgtgggcctcactagttacanttttgccactttatttcaactatttatcttttctttcaataatgccatattttttaatttcaatcctataaatgtca

SEQ ID NO: 155437 - DNA, 887 bp, Cannabis sativa
gtggatgggtcggctacagatcaattatttggtgcagggatttcccttgtcacgcctgggggcaacacctgcacgctgcagtcaggttcggattcaaatcacctaacaacgaagccgaatacgaacctctaatcgttggggtaaaactagcccgggagatgaaggccgaacacattgaaatctacagtgattcacagccggtggtaaatcatgtatccggagaatacgaggcttagggagaaaagatgatagcatatctgagcaaaatacacaatcttcttgcacaattcaaaagctacggtctcagacatattccaagagaagaaaatacaactgcagaccattagctcgattggcaagcaacaatgtaagtgacaaggcaaacttggttcctatccaattcctcgaagagcctatcatcattggcaaggaagaaatcggaatgattgatacatccccaaactggatgacaccaatagcagcctacctcaactcagggaactcccagataactgaaatgaagctcggaaaatgagaaggaaagctgcacggtatatcatagttgagtgagccatgtacagaagaggattctcgatgacattgctcagatgtgtcactcaagacgaagctgcacgactcctatttgaagttcacgacggattctttggaaatcatgccgccggacagagcttatcctagaaaattctaaggcaaggttacttttggccaacgatgattgaagattcgagagcctatgttaagaactgcggcaaatgccagagattctcaaagataccaagagctccgcccaacgagttaacacagatgcaaagtccgtggccctttaccatttgggggattggcctgatcggacaattacctaaagg

SEQ ID NO: 155438 - DNA, 588 bp, Cannabis sativa
tcttacgttccccttacgaatcacaggactactgactctcacaaaaggtgccttgcctatggtcaatacgagctcgattatgccaaggctggcgatgctatctctggtgaatccgcagagattcaccatagaaggccttaacttggccttttcaagccccattttctttagagtctccttataaatgatatttaccgagctcccattattgattaacactctcttgatcctcttattggcgagttagatggttatgaccagcggatcaatgtgagggtatctcaagttattctcgtcctcctctatgaacgtaatggggggttcctcggttttcaccttttttgaagttttgggggcaaaaaccgactgctctttctttatttctttcacatataagcgttattgctttcccctataatatgcggccctcctgaaataaccaagaggtcctctccttccacaggaagaggttgtaacccctggttgtttaggttattaggctcacggggctggttgtatccatagccctgtcttttcacatacgacttaaaatggcctcgagcaatgagactctctatctcatctttc

SEQ ID NO: 155439 - DNA, 734 bp, Cannabis sativa
gaggtcatgaagggtcccatggcccaggaaaaatttacttcccgtgccaacggttgggaggcggacgagctccactccaccttaacacttgcccatcagctcaagaagatcgtaacggtggtaggcatcaagtcatcaacttctgggaccttccatcgtctgcctcgggatgaggagacgcccaattataactacggggggttcggagcctggagccagacccacctcatgtctggggctatgctcccttttcaggattactttgttaattttctagtttttgttggcctcgcgccgtatcagttaattccccaagcataccgcctgctttcaggcttatttatcttgtacgctgcctggagctggggttcgcccagtccaactgagattttatatttttacgaactcgtttccgtctctaaaaagggggacaaatttaaagatggtttttatggacttcggtcccatcctttgaatgagggctcggtccgttataattttcagaagcatgtgaaggagtaccgccaccgcttcttcttttcctccggcttccaagccatggaccacccggagcttcttacagagtgggtcaagatccctccctacctacagactgcgcctactcagctgttcctccaacgagccaagaccttctctacctatgacaagaaggccctcaacgttggggacttggtcacgacggagaactatcagaaggccaagctgatatccga

SEQ ID NO: 155440 - DNA, 635 bp, Cannabis sativa
ttcatttgatgcttctcaactccagtttcactctctcacatccacagatcaaccaaaccgtagtctcactgtcaatccttctggtgtaaaagctgaagcaaacacttgttcgaattgtactctcaataacttctctattttttcagtgtggcataacagacttggacacccttcttctagggttgttcaatttgttctgaataaatgtaacatgtccttcaataatactgagagtaataaagtttgcactgcctgttgtttaggcaaaattcacaaacttcccttcccaaaagtatctgaaaccgagtacaccgagccacttcaattagttgtctctgatttatgggggccctcccacactctctcttctagtggttataagtattacattcattttatggatgtatactcgcgattcacttgctgaaaataaatctgatgcctttaaagtgtttcaaaattctaaagctgaaagtgaattacaatttggcactaaactaaaggctcatcaaacagattggggtggggaatatcaaagctttacaccttttcttaataaacttagagttttacatagacatccttgtcctactacccatgaacaaaatggtttggctgaaagaaaacatagacat

SEQ ID NO: 155441 - DNA, 520 bp, Cannabis sativa
actaaaaaatttaatttttctggatgccgaaacaaggtaaggatatattagtacaattagtacatcccttttaaggggtgcattgtagaattacccattatatttatatattttaggatacttttataatacactcccttaatctacttaatctattttggcatctagaaataaaaaaatttagttaattttttttcatagtcgtatacgttaggagtgttcatcaaatcgcccacactactttgtaccgcaaaaaaaaatgtagtttgaaattctttatcgtgcggtcgcagtttgaatttttcttaaaccgtacggtgcgatttgcagttttaaattactaatatgcagttcaaatcgtaccgcaccacatattataaaaatattaatttttatatttatataggtccaatatgtgaaagcctaacccaagcctactaattattgtattgttgaaatttgaaacttttttttcatatttattttcaagtcttaaagtatttttgacaagtgttgctca

SEQ ID NO: 155442 - DNA, 853 bp, Cannabis sativa
  modified_base (796)..(798): a, c, t, g, unknown or other
taagaggtattttagtaaataaaagaggattaaagataaaaaatattatccaagccttgtgggggtataagtgtaataaaatgatcattttgtattttttttatgtaaatttttttatattttatagttgattatgtagtattataattttaataatttttaaattgtatatatatttattgattatttaaattttacattaacgatagtaaaatttcatgagttcgccgcaaaacataaattaaaaataaattttgaaatataatttactttgatagtttattaaaaataaaatatatattattatttaagcgttttaatttgttcttttcttcttcttattttgacatatttaaaaaaatatatatttatttaatttgataatatattaatataaaactatttaaaattaatacaaaaataaataaataaataaaatatcatcatttaagaatgagtactttatgttttcaataaaaatttggtgaccaatttgccaaaaaataaaatttaaaaactaccttaccaaaacatgtatagtttaaagacttacagtatcaataaatttaaaaaatattgataattatttttttaaaaaaatattcttatttattttaataattcattatattttatgctgaaaattttaggccgttttatttgttttatttattttagacatggagtcataagctctcttatatacaaaagtgtgtaattaactcattaaattgatttttttatgcataacaaacctattcaaatgctaatgattgttatattattttatataatnnnatatttagattaaataattaagttgtaaataattaagtgtgacaaagtattaatt

SEQ ID NO: 155443 - DNA, 722 bp, Cannabis sativa
ccgagtgggctcttacccgacttagtaatcaactacacccagaacttggctacaacagaaaacgaacccagaacttgctcctttctcggttcaaaaaccaagaaaaatgaactcagcaatctcacaacctctcggttcacacaacccagaaaactcacatctcaaactcaagaacacaagaacacgaacccagaaatttctagctcacaaaacaaaacccaaaaaaattcttgcaaactctcgggcaaacttaccacaccaaacccaagaccaagaacagcaatattcaaacacaatatcagaaatcactaagaaaagaaatatgaatttttaagtaattactaactccagctccccggacttgtacatcgtcacgcaaatcaccggcagtagctccaagctcattcttctacgccacccacctgaatcgctgcctagctgaagaaatcccagctccatacttgtcgggcgtgcgaagaggcaatgctagatctgcaactctggttttgaccttactcggagtcttatcaaccttactctgaccattgcccatttcttgttcttgcgttgggtttaggttagggtttttttttagcagagaagaagaagaagatgatgaagaaggagggcgtcagggattgggatagggaattaggatttttttaatttttatttttttaaattgtttttttattatgtttaaaataattaattttttattt

SEQ ID NO: 155444 - DNA, 643 bp, Cannabis sativa
  modified_base (383)..(383): a, c, t, g, unknown or other
tgtttgggtatgagttcaggttcaggttcgcgtcccaagtccaggtttgggttgggatccgggtccggctcccaattcgtgtcttagtgtgatttggagtccgggtccgggtccggttacggttctggatctaggtccaatttctgttatgattccatgtccaagtcctagttccagtcccgatccacttccggttttggttaaaattttgggtcataggttacgggttcgggtcgacttttgggtttgggactgggttcaggtctgggtgtgggttcgggtccttgtcaggattcgggtccaaggctgggtcccaaatccagacatcgactacgggttttgtccaagccctggatttaaatccggatcccaatctcgggtcncaatctggttccatttctggtgccaggtcgcgacctcgtcctaggttcaagttctgttctgagtcgggtactaggtcccggtcctagttctttttcccaggtccctattctgattcttggtcaaggtcccagttattgtgttgatttgggtccggtctaggttagggttcgaatcctagtctcgattcgggtttaggtctttgtcttggttttgatctgggttcgggtttgggtttaggtccttgtcctggtcctagtcc

SEQ ID NO: 155445 - DNA, 536 bp, Cannabis sativa
  modified_base (361)..(362): a, c, t, g, unknown or other
tgaatgcaatccttgtgtaactaactggacacttgctttgtatataaaggagtgatccaacatgaaatgagactgacgaaactcttgcaacagtaaattaagtagaccgtgatctgactgaaccactatcatcctttgtcttcttgatatttccagtttttactaagcatttacgttccctgttcgagtactcgccattttaggttgatactcgcaattgttcatcatattttctctccttatttttattattattcatttttggtgttgcaaaatttgctcgacaacatttggcgtcatctgtgggaacgaagaagtacattcttgttaatatagaaagaaaatcatcatggctggaaannaagcaaacggaggttttaacaacgaatccatcaacatcggaatgatgaacgttccattgtctgggggtagagcaccacctgtggatgtcatcaatgttggagtaggtcgaggtaatctcaaacctctcaacctattccctgaaactactagccctcatgccggggaaacatcta

SEQ ID NO: 155446 - DNA, 532 bp, Cannabis sativa
  modified_base (71)..(81): a, c, t, g, unknown or other
ggtttagttattaattgagagactttattgagtctaattaataaataatataaatgacaattttatttgannnnnnnnnnnaattattaaataaataattttggtatttataggaataaaattaaaacaaatggcatttgtgaaataaagataaatggttaaaaaaatggtaaaattataactagtgggacccatctatatggccaactacttagtgtataattaccattatttttcaattttttattccatataatttaatactcaccctaagtgaaatagtataaaaggagtaggatggtctcattatccaataatttattctaaactctcataacctagtttacaatctatcagacaactagagagatttgagaccacattctttccttcttctatttcgaacattgttcttcattaaatttgagcgtatagtgagtgagtgcatgccctcccatcataagtctattactcaatcatagtgtgtaagactgtgaagaatctaataacctaaaggagtatcgggctcaga

SEQ ID NO: 155447 - DNA, 698 bp, Cannabis sativa
  modified_base (505)..(509): a, c, t, g, unknown or other
gggatcccggatcccagtgatttcactattaacaactagagaattgttacaagacgaatgtttagggtttctggccgtagtattggataccacacggcctgagatcgttcagccaaaagtcattagggtggttcgagaatttttggatgtttttcctgatgaacttttgggtttaccaccgcaaagagaaattaattttattattgatttggcacctggagcataaccgctttctgaggcaccttacacaatggctccaacaaaacttaaagaattgaaaattcagcttcaggtgttgcttgacctaaggttttcgcgacctagtgtgtcaccctgcgaagctcccgtattatttgtcaagaagaaagatggatctttgagtatgtgcattttctaccgagaattgaataaactaattgtcaagaacaagtatcatttacctaggatcgatgatctttttgatcagcttgaagggaagacgatcttctcaaagattgatctccgnnnnngctatcatcagttgagaatccaagaggaggacattccaaagacggctttctgcactaggtatgggcattatgaatttctggttatgtcttttggattaacccatgcttccgcagctttatggatcttatcaatagggtattcaaagatttcctcgatatttgtgttattgtatttatcgacgacatcct

SEQ ID NO: 155448 - DNA, 509 bp, Cannabis sativa
tgagcctaattgaaacattttattaatttcccttcccttgaattttaccatgagtatatggatgaataattggggaataaagtgtaatgtgatggattgtgagtgttggtaatgtaatttaatgatgaagagtaaaaaaaaaaaaataagatagagaattgttcaaaaaaaaaaaatagctacactcttgttatgcatagataaaaataagtttggaggaatgtagtttgaaaaaaaaaaattattattatatggtcgtataaaataatattttctcaatattgaaaacaagtgacacaaatggttatttcttggatgcattatttggtttattgttagtttgtaaagtttatatgcttatggtaattctgagcctaaattacaatttcatctaccttgcctaagcctaacattatagcccgtgaaagttcttttgatttcagaacatgtgttattgacattattggagaaagttaaatgatgcaagtatattaaaaattggcttgtgg

SEQ ID NO: 155449 - DNA, 615 bp, Cannabis sativa
taaatcactagggtaataaccctaggccatataaccgctcactttagggtaataaccctaatcctggttcttaattaatcacaaccataatatacaacaagaggccactgcgcttaactctacgtgcaaactattgtcttacctaatgtcccgcaaacgtggagattccaaatccccaagtgctcctgaccaaatgtcggtaattctagtcacaatttctaggattcacaagtagagggttaatccctaaatccaatttcacatactataaaattggcattcgaaataaagataaacacataaagctcggaatgagctttccaacgatataaagagcgtccaaaatagagtcacgagtcaaaagttatggccaaaacaaaattcagcttttccccgatacagttcaaccggaattccggttggaacaactttgaaccaatcgaaattccggttgtctgggcagaaacaacacgaaaaatctcaatttttaagcccccataacctactcaaatcttccggaatcaccaccaaactttccagagcatcaacataataaacatattttacagctcatgttgtcgagtgaatttcgcaacaccaaattatgtaatatta

SEQ ID NO: 155450 - DNA, 677 bp, Cannabis sativa
tatataagtctttggtcaccaaaatagcatatatagaatatatacatatattcatatatatatataagaaaaagattatatatacgtatattcatatatatatatataagaaaaagattatatatacgtatattcatatatatacaaaataaatatatatatatctatatatacgagagaagtgttgaatgatgtcaacgttcaatactaataaaaagtgttcgggttgttcacttactgactattcaagtggttgtcaaaggatttatatatatataatttctaaagccaaattggtacaaagttatgaaaggagaaagtcttgttcactcatagccccaaaacacaatctgttcatagataattacgatcacagataaatttgcttgtagataattgtgctcgtagataactacaatcatagataaatctgctcgtagataactatgctcatagataactgtgctcgtagataattatgcttgtaataactatgatcacaaataaatcttctcataaataactatgctcgtagataattgtgcttaaagatagctatccttgtaaataactatgctcgtatataactacgatcatagataaatttgctcgtagataactgtgctcgtaaataactgtgctcatagataactacgatcacagataaatctgctcgt

SEQ ID NO: 155451 - DNA, 1045 bp, Cannabis sativa
aaaaaaaatatcatctacgtcaataattctccactcccacaagcaaaaaatatctacggtcaattgtcactcccacaaggaaaaaatatctacggtcagttctcactcccataagcaaaaaacatctacggtcaattcccaccccaatgtatggctagcatctatagtcaactttacaagtaaggtatagctagcattcaattttacaaagatagcatcaataacatattacttacaattaatttctactagcactcaacttactagaaaacaaagctaccaatttatcaaaatcatttatatattgatactaggcccacaaacaggcccatgaggtcaatacaaaatcaaattagattgtaaagttaaactttatccaagcttaaagaacaaactcaaaatttaacttgggaaaaacatcaacaattcaaataatgaacaagaacttctcaaatgtcaaatcttcaatgaaatatgtgtatgcatatacacataaacaactaagtttgtgtttatccatccataattttttgaaagaaacactcactatatatataatctctaaaatctagctaaatctccaaagagcattgtgtcttagacaaattaaaggatagttttatgcaaggaatacaaaattcccttctaaaattcacatctttctagatttctccaatatatgaatacatatcaatatacacaaacatacacaagtttggaaatacatatagcaccttgtaacgcccgtattttataataataaactcgaaaatttattttaataatttatatattaataaccatatggatcgggatcccgagtatcaaaattaagttaaaagtaccttactattacatatatatatttttttaaagatttgcggacatgcatcttcaaaatacagactcaaaataataaaagaccgaaaccctccgggtcgcactgccgcgatatgtacaatcattgccgagccgagcctcactgttcctccagctttgcttttcctttacctacaccaggtagcaaactgatgagtcaacagac

SEQ ID NO: 155452 - DNA, 783 bp, Cannabis sativa
  modified_base (91)..(91): a, c, t, g, unknown or other
  modified_base (705)..(706): a, c, t, g, unknown or other
actaatcagattgtaaagagttttatttagggcataaaatccaacaatggtatggtgataaaatagtgattttttttagtaagaaaaaatntaaaaatagttttaaaaaatttgtgccaaacaccattaaatttttaaaatgacaaaaaactgttttctatttttatttttaaaaatacaattcaaaaaactgaaaacacaaccaaacagaaaatcctgaaattttcatgtatttagtagagtttcaattttttttacattttcttgaatatttcatactaattagtaataggaatgatatatataataaacttagtagttagttatttaattaagaaatgatgcatatatatatataaagtctaataaataaagatgtaatccaactactttgtgcaccaaagccaaaaattacacgagttataaaataagaggagtgctaatcacactctattttacactctcttttgcactctttttatattttaaagacaagtgtcattttttaagtaatgcttacttctacctaataattagtcttaacactgtaatttaataacatttgtgcgattctaattaaattgtctattattctactaaattagcaatttgttatttataggagaataaatatattttcaattgtttagtttttttatcatttaaacaaaaattatgattaattatgtattcttgtaaattatnntttttataaagtttgcatatcatttgtaggagagttataacacgagtacatgtaatttttttcttaatgttttatat

SEQ ID NO: 155453 - DNA, 663 bp, Cannabis sativa
  modified_base (596)..(616): a, c, t, g, unknown or other
cccctcttcctcatcatccaaactgatctgagcatactgctcattcagatcaaacaccggttgactacttgaagccattcaaacgaatacaatagttagagtagacttagaacgttgagataataccttcaaaacatgtcatacgacaagacttgacctaacctcatttcgaaactattatgttattaattcctcttatcttaagattgattaattaaatatcctataattgtacatgtactgttaattatatataatatacaatattttttttcttcagtaattaataacacatttacatatatttatgtaatgcagctcatcaagaagcactaaagaggaaaatagagagactggggcaactatatcaccaacaaaatataaaaataataatgttggtcaatcaccatcatcaatgggggacactactaaatctccaattgataaaaatgatcagcagcttcttaatgtttcttcctaactgcattattattaggctaattagtaattttctcccccgaattttgacatgtactaaaccgtactccctgaatttttttggctgttaaagtttctccttgaactattgagattgnnnnnnnnnnnnnnnnnnnnntaattttagtaaaaaaattctagcatagatgaaagttcaaggggcat

SEQ ID NO: 155454 - DNA, 542 bp, Cannabis sativa
  modified_base (166)..(172): a, c, t, g, unknown or other
  modified_base (439)..(445): a, c, t, g, unknown or other
gtgtttttcaacttgaacttaaccatagtgtaatcatcacaaattttattgaaaatttggttgacaaagcattgaaccaacttttcttcataataaaacgatgatgacacacacacacatttgctaggttcacccaagacctcatgtctcgctttgcaccgttaannnnnnngtgcacattccattcattgaccttcttaagaaaatatactccctctttctcgtttaaggcggcaccacccttaagtcaatataggaagaattcttacagtatttgttacaaaaatacttattttccaaactgaattctattaaagacttttaaaagtctaaccctcaaatccgtaactcactaagtacatcgcagctttgtaggatgggacatatactacttatcatatttgttcactcatagattttttcttacctattgaacctnnnnnnngtaaagttactagtattaagataggttactctcaattgtgaaccgatttagggagttttagtcccatccctttagaagtcttttccactaaatctct

SEQ ID NO: 155455 - DNA, 645 bp, Cannabis sativa
tttgagttctaaactcaaaactttgttaaactactcaacaatcactaaaacatgctcaaatcaacataaccaaacataaacaagcttctgaaaacaaacccacacacaaatagcagctacataactcaatcctaaaaacatgcaaaattcaaaacttcaaactcaagaaaactatgagggagttactagaatcttacccaaagcttgaaaccaccaacaccttgctgaattaagcttgaaatgaagaagaaaattgacaaaccctagctgcctctaggtggattcgaaagagagagagagagtttgagaggaaatgtaatttttttgtctaaattttgatttttcataaaatgaattaacaaaaggttggttttatctaaaataatcagccaagaattaaataaaattcagattactaaatgtaactaagtccactacaaaatacataggaagaaaatgaccattttgcccctcccacactaaaacaacataaaagggtactaagggtattttggggaaaattctatattcccgactatcctcgacattcccaatgtctaactataacgccccgctatacaaaaaatactaagatgtgattcaaatagccaaacaccgcgttccaatgttgtcgggcactgaaca

SEQ ID NO: 155456 - DNA, 759 bp, Cannabis sativa
tacaaagctaggagactaaatgggaaactactaattacaaaataggaaactactaaatacaagttaccctaacttttttacaactaatattctaacaatgtgtaaagggaggactaaacctagtgtgccaaagtgcaaaaaggattgggcttctatttttagggtgtgaattttgtaccctaaggacccaacaacaaagaagaaaagagaggacgtataccttcttcatgaacatgaaagcagctgccatatttttttgaagaagagtaaatacagaaagtacagagaggaagaacgagaaggaggacccaagtgcaaaagaagagaaggacacaagctttttttgtttgcatttctcttccctctcctttaatattttgttcttttctttcttatctttaaatatcaaaaacttgataagttgtaaaaagggcaacagccatgtatgaacaaattcaaatttggattgcaatttttgtgttgaacatgagctaattttcttaaggcttgaatggctatgaactcctatgttggttatgattaattttaaagtttattttagtatttttgcctttgttcattcaagtgagttctcatttatatttgattgttgtttcttggccattaatagcaatttgctaagctagatcttgtttcgaaagggctagaactagtagttcaacttgaatagggcaggagaaatcctagatttaggttttttctttgtaagtggaataggaatatttcatttaccttgca

SEQ ID NO: 155457 - DNA, 648 bp, Cannabis sativa
aaattatatgtgacaatgaccgatatgaataaacttttctttatcaaacttatcatttactataaagatctaattcatatcataatgatgatcaatagtagatcagcttaaagatattgagtaattatgaactcatgttcatgttattagtgaaattgattctttcgtgaaagtttctcatagaagatattcttacagcttctactttaatctaagtctaataatgtggatggttaggaacatgatagaatgttggttccctttaagtattaattttagaattaaaaaattgtgcacaaatttatattggatataaattatactttcactggaattgattatatcaatggactaaaactcagtaaatataattttataattaataagagttcaattccatatatatatatatatatatatatagtaaagtattcatgggattaataaatacgattatttaataaaattcaataaataatttaatttattgaagcttagaattataggtccatgtgcctggattgccaccttgaaacactgttaatgggtgtgataaagttggggaaaatctattttgaagccacctatattttgttttatttttttaggttaattaatttaatatataaatatttgaatttaaaaagt

SEQ ID NO: 155458 - DNA, 624 bp, Cannabis sativa
caagttatttatttttctgcaaatattttatattctgcctgttctgttttgctgtagcagaattactttctgtttcggcagacgcatactgttttatattttcttatatataattgacaattgcaaaaacacggtttttcatcgcttaatcttcgtacaagattaaagcatgaattttttggatgggacctaaactctcttattgtattcctcattgatggaacatatattaacactagtaaaaatataatcttaagttcaatagttaataacaagtcaatagagtgaatttgggactcaaattgtcccatttataaatgagtacatatggtgaaaattaaaggttaaaatcgaaagattttttaatggagtttaaccttagaagtgtataaagaatagtgagacactaaaattctacccatacagactagaggcggtgcctcctcttttaagaattggaagtattctctaaagagttcatgaattagaattttgcacatggatattaacagtacaagagtgagacatgcggtctcaagtgagcattagcaagggtgtgggttattgccaatttgtactaaaagaatagtgatttaatgttacgacaactaaaaatttattaaa

SEQ ID NO: 155459 - DNA, 547 bp, Cannabis sativa
aataaatattgttctgtagttaaattctacataatctacaagtccttattagtgatatttattgagtacaaaatacaatattaggatttgaataataatagttctctctcaattttgccttccattttccatggaatcttcccctatttataggaatataggttggcagttacccttttttaggattgattcaaatgtaactgttcatgaaaagtagataatcttcttgtttcatttaatcacatgtgggatagtacctaataactgtccaactgctctttgtatttatcctttagacaattattgttgacttggaaagttacatctcgcttgatatgagttatcctccttgtccatcttaataaggaaaaatgctaagtgttgagaagtagttcgtctcgtcatattatttattggcattagtagtgcgaggggatcctctcgctatgtgtaatgtgaggcagttatgttgttacatttattctgctcagtgggtgaatatctccttcttgtctgtatattccgaggtaggcatatgtctcgtcaa

SEQ ID NO: 155460 - DNA, 879 bp, Cannabis sativa
aaggttaaacttaatatgaataaaagcttttaatagaattgaatggtatttttcaaaacaccacgcatcaaaaaaataaattaagatttctgttaaaaattggtgtcccatattatgttaaatctatcaaagtttgatacatcaactaatctatttaatttttttttatagcaataatactggtagtgaggtacgggattctatctgtgctatgctggaaatttatgaggcagatgaaaatagctattacctaggccttccttgtttggttgggaggaataagaatgctatccttggctttcttaaagataagcttcataagagaattaaagggttgggaagggcgtattttgtctcgtgcaggaaaggatgtattgctgaaatctattgctcaagcattgtcgaattatgctatgaatattttttttttttatatttagacacttgtaaggagttagagcagcttatggctaagttttggtggcattcggcttcgagcagtggtaaaggtattaattggatgagttgggagcggttgtgttgtcataaacatgcaggaggattgagttttcgaagcttgagagactttaatttagcttttctgaggaaacaatattggcggttgttggttaatgatgactctttggttagtaggctctataaggcaaaatattatgctcatgataacttgttttctgtagaattgggagataatcctagtttcatctggcgaagtattcttgaagctaaagatctagtacattcttgtgcacagagaacaattgctgatggggaaaatgtatccattcttgcagatccttgactcacatagttctaacagctatgtcgttacaaggcaccttgctcttgtgaacaaat

SEQ ID NO: 155461 - DNA, 901 bp, Cannabis sativa
taataccatacgaaggtgttgttcatgagcttcttccgattcagaatagactagaatgtcatcaataaacacaatcacacagttatcaaggatgtccttaaatatctaattcgttaagtccataaatgttcctggtgcattagtcaagccaaaggacatcactaaaaactcgtagtacccatatcgagtacaaaaagaagttttgggaatatccttgtcctgaaacctcaattggtgataactagatcgaaggtcaatctgggagaagatggtctttccctctaactgatcaaacaaatcatctatccttggcaaaggatatttgttctttattttcaatttgctcaattctcgataatcaatgcacatatgtaatgacccgtccttcttcttaacaaacaaaagtagtgcacccaaggagaggtacttggcctcgtgaatcgtagattaagtaggttctgtaattggactttcaattccttcaattttgttagcgccattttatacggggcctttgaaactagctaagcccctagtactaattcaatttcgaggagaatctctctctttggtggtaatcctggtaactcttctaggaatacatctggaaattcacatactactcgaaccttttctggtccctcaagtatatctttcgtggtatccaacacactagcccggtatcccatacatccttctcgcaattattccctggtcttaagtgccgatatcaatggaacacgagatccctgctttcttataaaagcaaattagatctcatcctctggttcaaaagtcattatctttctcttacaatctatagtagcattgtacttagtcaaccaatctatagtaggattgcatcaaaatcttctaggtctaattcaatcagatctactga

SEQ ID NO: 155462 - DNA, 563 bp, Cannabis sativa
aaaaaaaaactgttttgaagtgtttatttattaatgtttctataaagtctttttttttaatttctttgtattttttattaatttttttcttagctgacttttttttttctaatgtaagttcactatttttcttcttctctctctatttatttattttttatattttatttccaattctctttctctccgccctaatttttttatattttttttcaaacactttttcactcttttataaaattttattttattattttttttaaaaaaatacacacttattatatttttttttttttgctcatttacatttttttactattcacactcaagctattttatactatttttttttaattaatcacattttatataaaaaaaataatctttattaatgtcttataacctttactaaaatgtgattcttttactttcacacttttttatcatatttttttaacactctttctctatcttaaaaaaaaaaaataataacacccctataaacacccctatatctttctctcttttacatgattaataaaagaagtttttttttttttttt

SEQ ID NO: 155463 - DNA, 588 bp, Cannabis sativa
agacactagtgatagtgataatgaaaataatgtagatgttaatgatgatgatgattacgatgacttgtagacttttaagtattgtaatatagacaccacttttgatttaatgaaatacatgcctctttcgtcaatagtatgattaattaattattcgtagcttgtatttgtagaatgcctgatgcaggttcaagtggtggtaagaaaaagggagttaagggaaagtataagggaaataatattgaacaagaactggccaagctgccaccaggtcaaaaatttaaatttagatttcatatgccgactggggcccctatagatgactatggcaacaagtttaacaattacataaagtttcttgttcgcaatactattcctatgaataagtttgagttcgaggacgttgaggctacactcattcaaactatatgggatagaatagcaataatattttaattttttaaataatacgtcaaacgaaatcattatctaaaaaatacaatatatatgactttggtattttttttttcagaccaagtttgagttgccaactaataatcctatgttcgtggattacgtcaccaaatc

SEQ ID NO: 155464 - DNA, 684 bp, Cannabis sativa
  modified_base (652)..(659): a, c, t, g, unknown or other
ttattattttatattttttaatatgttaatattttaaattaattattacttttgtgataagtttttatttgaggactaaaatataaaattatttttaaaaataaattaaaatagaagttagaatgaatagaaaattacaagtatagattcaaattccaacatattaatgacatatattttgatgcatactaatttggggcataatttaagtaaaatgatgtaaaaatagtgtaccattagtagggttgtgcataaaattttgtaaaccgtcagacctgaataatctgctcaaaacaaatcgagataaatcgacgaaaaatataaactaaaaaactcgacgaatatataatccgtccaatctttatattgagcggattaaaataatatcaacacgcctaatcaatctgaacaacctgattaagatgttttttttatatacatatttttatcatatataatataatttatatacatatttataaaaaaaatagaaaattcaaactattatatttctttcataatacttgatttaaactttgaatttaatctatatatttatcttattgattgtgaaaaaaatattagtgctcggtttgtgttgcgaaaattattaatcactacgcaagtatacgtaatcaagtagtaaactcannnnnnnnaggtcgaaccacagggaattggact

SEQ ID NO: 155465 - DNA, 676 bp, Cannabis sativa
  modified_base (586)..(591): a, c, t, g, unknown or other
ggagttaccccctgtatgattgccacaaattcccccatgtacctcacgtagtatgtagtcgcaatcttcaccgtcgatgcatttgagttacgattgactaaaacttctgcgatataaccttttgtcttacatgacatatcgggctgctcgctgtcgcaacttccttgcttctaccttgtcatcaggtaaaacgcccttttccaggtatgtgactatgggagtcatccatgtgacttctttagtggtatctatttctatgatcacctcttgatttatagttgggtgagccaatacatctaccagaattacatcgagcaattcggcttctctagttgaggctgaacggaccaatgcatctgcatgtgaatttcgagcctgcggtactcgagacacaattactttcttgaatttctgcatgagctcgcctacaatggctaagtacttaaccaatctcccgcctctggccagatattctccatttacttggcacaccacgatttgggaatcgctaaaagcttgtagatactcgattttcatatcgagagcgagcttcaatcctgagattaaagcctcatactcggcttcnnnnnnagatgcagaaaattcaaaacgtaaagcagcgtgtaccttaaaattgttgggactgattaataagatcccgccacctgagccttcg

SEQ ID NO: 155466 - DNA, 602 bp, Cannabis sativa
ttttgagggaaagggagcccactaaagagaaagaaaaactcgaagatcacaggggtcatcgccaatccaaattgcagcttcatctaacccggcagcccagtgagcaagtttgtcagcaaaagtgtttgcagacagaggaacatgaaagacttgggtagcagggagaagagataaatcgtccttaatttgcttcagagtgtctccaaaaacggagatgttttcacgggaatagcttagcgcatctgtaattgtcttgcagtctgtctcgatctcatgcacatggaaatgctcctcaatgcaccattgcaacatccgaagaagagattttgcttcaagagaagccacggtcccgcctcctagataaggagaggccaaagcagctacaacaaggccttcactatttctgatcacaccgttgaaacctgctttcaagcgatcctttgttgttgatgcatccacattgagcttgagacatccttgcgctggaggtgtccacgaggtaggatgtgagagtctgctgggtggggctctgggagattgccttgatgatgggagattgtagtcgtccaggaaattgcgcgccagagtcagaatggcatggg

SEQ ID NO: 155467 - DNA, 525 bp, Cannabis sativa
  modified_base (391)..(394): a, c, t, g, unknown or other
  modified_base (493)..(498): a, c, t, g, unknown or other
gccgttggattgggcgactctaggccttcccattgccacgtgtcgcgatcccaattaatatgtgaatctattatttggtaagaaaaaaattgtaatattaaattgtagaaaaaaaaatatgtgcaattaaatatatagaataagaattggtgtgaaaattgaatgattattatagtgaatatttataaaaaaaattctaagcttccaactcaaaaaattaatattatatatttatgattttatgttactgtttattgaagggtaaataatattttagattttgtgttttgtaaaagttactaattggaccatttgttttgttaaatgacaaaatagaccctgtatttttttaaaaatatacaaatataggatcctaaactgattttttgtnnnnataaaacttaataataatatgatcattagagatgttatgacaaagctggttacatttttctgtatctgttcgtattagaaattatcttaaagttggttnnnnnnaaaaataaaattattaaaaattgaact

SEQ ID NO: 155468 - DNA, 581 bp, Cannabis sativa
  modified_base (305)..(321): a, c, t, g, unknown or other
  modified_base (522)..(534): a, c, t, g, unknown or other
tacattggatttcgaaaatcagttatatatatttattaaaaattaaattttacttgaaaattaattatttaattctggaccaacttaaattaagtaattttcataatattttggaccaactaaagatggaaaataatttatttttatgtttgagatcttccaaaagtataattttattaatattaaattaaattttttatttagacttatctaaattagtaattttaattaaataaatatatgtgaaaataaatagattaaaataagtatcaaatgaaagtacaactctttaaaataatgagctnnnnnnnnnnnnnnnnncgatctccattgttggttctacactgttcttattttagtgagtaatcatccctaatggattaacattcattagaaatttaacgccgtagaatctcgaaagataagtattatttgtaagtattttattcttagtaacgtccaccccaatagtggctgctaggagtcttaagtatgaatcaatggtggaagctcataagatannnnnnnnnnnnntctcgcctaaacgagacaacgctgaattctcatcttgatcgaataaa

SEQ ID NO: 155469 - DNA, 600 bp, Cannabis sativa
ctgcgggtaaggctgagagagagagggagaacgagaagagaaagagaaaaagaaaaaattttatttttttattttttattttttaaataattatttttattttaactttaaatatttattacgtggaccaataaaattgtgccacgtgtacactgtgtacaagtggacattccgccatggcagttaacagccaaaaatggacgggaggggctaagtgctaacagaacttgggtttaggaggttttaccaccaaaattttagaattagaggttagttgcaaaaacctgcccactttaggaggttatgccgcaaaataactctaataacgtggactgttgtttaattaagaaaaaaatattaagaggtatcttaaggtgccaaacactacaagacgttgcataatgctattgatgcattttaatattaggtcttacaaattttaatttaataaatgatgggaaaccaacaactaattataagacaatacaatagtatggcgttgggttctttaaaataccaaataacaataactaattttatattttttatatatattattacataaaaattatttatatatataattagctgataataaat

SEQ ID NO: 155470 - DNA, 790 bp, Cannabis sativa
ctttgagttttgtttagtgaagaaattagtaaaagtaaatttgtaagggatacttagccttatttataggcagagtggtgaaaaaggaaatcatttcaaaatgccttcatacgcatcagttcccccccaaaaagaaaatattgggaaatcaaatgtaatcaagtgtaaccgtcaaacgtgatgaggaaaaatcgggtttcgaggcactaattaagttagagcattaattagcagaaaattgaagagatgcctggtcagcttcacatagaatcgcgaaccgacgcgcctaacacgtgtcacccattcaaatgcaaaggcagccgggtgaagtctattagcaacttcgaaagtcctgtatagacttggggggcaaatgttatcctaatttttgcactctagcgtggcatcacacgatggtgacacgtggaatcaactttgtatagctactcgtaagagatatgctgagccgagtaccttatgtattcgcacggacgaagtctgcttaaccgagcagtgagcaatccgaacagtacaccaacacttagcagtttcaactttcgcattgtgagtcacagaaggaatccctataattttggaatcatatcacggagatatggcaagctgtacgaatccctagattagtgtattctgtatttaatatgcaatcattccaattatatcaattgtaatcatgagggaaattcttccctcaaagcttatagccctataaatagagattcattctcactgggcagagggtcgaaaaactcatctaagaattcatattcag

SEQ ID NO: 155471 - DNA, 1171 bp, Cannabis sativa
atttatatgtgttaattccatgatattgttgtgagtttattgttgattattggatgagattgttgagggtttttctaagttaaggtttatgtgttaattgtgatatgctgctggaaattaatttgagttggtttggagctcaaatccttgagcttgagttcttgttgattaaagcatgattttgtgctattatgcaatctgaatttttcagagtttagtatggattttgatgtttgagtatgtattttaaactctctgtatgattgttaaagacctatttgagggtttggaagtttggtagtgatttgggaaggtttagttgagttttgggggctgattttcgtgttttgctgctgatttcctgggttttgaacccaggtgctgcgacatggtatttagcataccgcggcgcacccttttctttcttgccagatccttaggcaaacttcaaatagccataactttatgatccggactccgatttgggagttctatataccgttgaaaagctcttttcgacctctatgtgaatatctgaattttaaatgccatgtgaatattttatgaatttgaaatcaggggttaaccctatttgtgaaaatctcggaatttgtgactaggattaccgacacctggtaaggagcacctagggatttggaatctctactacgctagacatcaggtaagacagtagtatgcacgtagagttaagtgcagtggtgctcacattgtatgttgtgattgtgattaattcagaatcaggattagggttattacccaaaaatgagcagttatttagtctagggttattaccctagtagttaaaataaaatgttgaatgttattccatgttgaatatgttggaataaagagttatgcgtataaggcataattaagctaaattcggtaaactagtacattgactttaattttaatgtgatcttgggttttcaccctagagcattatgaaggtaagaaagcgttaatacaaggtaatgttattaatccagtgaaaatatgagttagggttattaccctaagattttatatgatgtggtaaatattgagtacatgcgggtgtgttaagaattatgtgtataagacataacttggttagacctggtatatatcactaggataaaccaccgaaagaacataatacatggattac

SEQ ID NO: 155472 - DNA, 538 bp, Cannabis sativa
ataaattataaaaaataatttaaaaattataaaaataaataaattattttattttcttatttttctttctttctttttctttctcttttttttttttctttttcttttcctgactggaaccatcaacaccctcttcttcttcctatcttcttcttactttaatctgccattatcaccatgaaattcatctccctctctcacgatctccctctcgctctactgccctctcttaaatctgaatatatatatacatgtatgtaagagagataaagaaaagtttatgagtttaggtttagatctgaactcgcaatgcaagaagcgaggtcgacgcatatggtgcttggatggaggaagatgcagatggttcttcgactaggattcccgttgtcactctctctcgctttctctcgtcatcgtcgcagatggtgctgggatggagtcgtttgggcaaagatttgttaaaggtgtggtgtgatggtagtggtggtgtggtggttatggtttcaagagagaagattatagatctaattgggatttt

SEQ ID NO: 155473 - DNA, 1239 bp, Cannabis sativa
  modified_base (41)..(49): a, c, t, g, unknown or other
atataatggtaagtttatgatatcttatctaagttcaatannnnnnnnntccaatgtatacttcatacatccgataatagtatactttattaattccttggaaaggacataacacttatccaaggtgtaagtaaactttattgttgattatttcttcagtgtaaatccagtgcactgatgaatcatgggacataatctttgaagcatataatcacaattaccttccattgtgatgacatcactgtaattgtgaataattatatattttggatttattagaaattgtatattaaaccataatcatgaaaatcacatgttaacttaaatgacttctaatcttctattgataactaataaatattgaaatatgttttatttagggcataaaatcctaacaaactcccacttacactaacataaaactagaagtgcattacaatcaatctattaccttgatatccatatcaagtgtagtgtgtttgacaataccaaataacaggaactgtaaggttgtagtaagcaatagctttctccataattacttcttttgtgttcataaaacattatgcaacatcactttttcttatatgcattactcttctagggatactgaattatttactgtttgataagtgcatctgtatgtacagaagacacaactctaattctatccaaaatggaataaagataaaatagtcaataactttcttccatttaataactttctagcgccttttaaaagcaactaagtcatttagcttcactagtggaactaaataattatagatagatttttacacccttctagaataattcgtccacccctagagtaaccaccatctctgacattaaattttgagctgatgtagatttaaggactctaatatacacccctatcatctaacatataggtcactttcagagattatttcttgattgtctcccaatatttcttgtttgattacatctttgatggcttccactcaatagtaagagtcttgtttaatgcatacacaagtgtgtatttaatcctcttactattggtacttaaggacatcttgttgtgagattttatcttaatcagaaacattaagttccttctagactaagtcatcaatatatcattctagtactaacattaatataaagtacatgcttgagattaagtaatcactagagataccataaaatatttcataaggaccaggaattgtgcttaagtcattcgaatagacattg

SEQ ID NO: 155474 - DNA, 628 bp, Cannabis sativa
gcttgcactgctcaaaaggaagaccgcgagcttggcgacgatgttctgggccccttggaacttctgaccttcgaaggtcaacatggacgtgtcctagtatagggtaccctgatttgcacggctggtatcgaaggtggagaagaagtgctccacgaatgcctttgaaactgcgtctggatccatttctgattctgacttcgtcgcctccgatcaacacctgcccaccgctgaaagcatttcgtttttcgctttggtttttattcaataaagggcattttattttaatttatttctttttcgttatttaaaaaataaataaataattaaaaaaaaaagagtcaattacaattttcaccttcactcttatgccacattagcaaataaaagggtatctgttaaaaaatttaacagaaggaggacattaatgtagtagtaatatattaaggagattttttaacaacccgtatattttaggggccacaagtcggtagtgacataagttcagagagcaaatttgctaattattcttgtttttaaaagggtaaaggtaaggaatagggatcctatgaatgttatgaagtatattgctataatttagttgttactagccaaagggtactccctttgg

SEQ ID NO: 155475 - DNA, 848 bp, Cannabis sativa
tatgtttgttagtgatttttctaacttattgttcaaaaccggtttacatattttgagagttctgtaatggggttgctctattttatgatgttatcacaaattttttattttaagttactttttcattattttgtttcaatgttcgaaatttacacttatattttgtttttaaattattggtatacattgtgtattgttttgattatatttgtgattagtattctttttgtatttttgtgtgtgtttttcttttttttattttttatttgattgtctaatgaaacttgtttcagttaactttattaatatttaacatttatattttgttacgattttttatagcgtcaaaaatggtttcacaggatcgaaactggtttcacatgttttaactattctgtaatggggttgctccatgtatattttttagtttgtataaaatcagttttattattgtatgatatttgaacaataatttctgatttattttattaatcagtttgtgacacacatattattttattgttttcataactggtttttttaagtaactagttttcataattggtttttttattgttattcataattgagttttaagtttcaatttttttatttgattattttaggaaactcgtttttatctgtttgtttttattttggttgtttactacttggtttcacattctactagtgtttttttttggttattttttatggtttttattgtatttttatctctttaattttttatgtctcttttcttttttctctttgattttaatttctgattctctttgttatattagctggatattgtaagcttaaatcaactctgattttttagcaag

SEQ ID NO: 155476 - DNA, 681 bp, Cannabis sativa
atgagtccatatttatcttataaatatgattaatttatttattaatattcttaaattgattctttaaattattgattagtgtaaattttgtttgttaggctattttaaagactatacatgcattaagagtcttttggagagattttagcatattttggtagaatataatggaagccgacgagctcagttttacaaggcggagcttaattgtaaattttaatgttcttacaagcagaactggacttggagcttaacataaaagttttagatctcgttcttagctttctggaacatcttgaattgtctaattctgagcaatatcgagaaagttatggccaaaatactatcaatcgtcgcagcaagaaatttttggaaaaaaaaaaaaaagattaaaagatagcttttcaagtagagttgcgatttttatttttatttaagtttaaattttaaacctttttaatatctttagataactttgttagcctacataaacacattattattagtgtttttaggaggttttgagagctaaaaaaaaaatcagaaacacgtaattagcagaggaccctagagctaccaaatagagatagaaacttagagagagagcaaggaagagacggagattgcagcttcaaagtgttcttcattctagttcttatccttcaactcttactaaatatt

SEQ ID NO: 155477 - DNA, 848 bp, Cannabis sativa
atgttgtttgataacaatctcgcgccatcttttgggctccccaaatctccttcactccccacttagttagaaaacgaataatttgatggtatgttgatggtacgactttcatagtatggatccaaggacggcctgggatggcattgtaggctgagggtgagtcgattaccaggaatccggtttggaggttgactccttacgcatatacgtgttggaatatattttaccaggacctaaatttactaactagtatgtttttaacatctatgaatttataaaacaatgaaacttaaacacatataaagtatgagaaaccttacattggttatagcgaaatcaaatgaatccttccactaagatctctaaccctaattcctttctgtcacagagtataatcaagatctgagcccgacactccttcagttgtttgcattcttcacagtcttacacactataattgatgattaacttgctatgggtgggcatgcactcaatcactaaggctcaaaattttatgtgatgaacaatcttaaatttcgaaattagtaagaagaagaagaaaaagaagaaatctcaaaacactctagttgtttgacaagatgtaaactaggtttagagtcattagttggattatgagactattcttttggttttatactaattcacttagggttaggattgaattatatagaataaaaaataataaaataatagcaaaaataaggctatagtggccgagcatatgtgagccctacactaattatattttcgctatttttctcaactatatatttattattttgcaaatgccatattttttaattctaatcctataaatgccaaaacta

SEQ ID NO: 155478 - DNA, 695 bp, Cannabis sativa
gggtcgggtctcagatccctatccaagttctaaggcccaagttctagtcctagtttgggggcccaattcccaagtcagggtcccccatctatgttcagttcttaggtcccagtccgggtccaagttcgttttcgggtttgggtacgggtccagtccgagtccaaatcttggtttgggttcgggtccgagtttgggtcccagtcccagtctggtccgggtttcgggtcctaggattgagtcaagttcttgggtcctggctttggccctagtttttgggtcttggttttggtctgtatctaggtcccggtcttggtttaggtcctaggtcacaggtcgcgttctgggtccaagtcctggtatgggttctggtctaagtttgggtttaggttttggccctgttatggtccaatatctgggttttagtcccagtcctagtctgattcgagtttcgggtccgagatcaggtcagacttgaacctgggacccgatcccagacccaaactcggacctagacatggatcttgatacgaacctagacttgaacctagacccagacccatacccactggggatcgaaacttgggagttggattcggaccgagacctaaacccaaagctggacccgtacccaagacttggactggggcctggacccaaacccagatccagaccgggatctggacttggaccaagac

SEQ ID NO: 155479 - DNA, 553 bp, Cannabis sativa
atatataaaaaagaaaatacattcttatcttaaagtttttacttatatagtcctacttttttgatagcaattcctataacaataaaaatattacttctccttctttcacctcagctgctcttgagatcacttcccacaagcaacttagatggcaatttactattagagcatcttcaataaaaggcaatatttatagttgtcaaaatacacacattatcttaaaataatttttttttattttatttctcatccacataagatttgatacatttttctacaaaaattacttcaattgtagacaactccaaaagttacttaccatattcccacatactactttttaattaaatttcataattatatataggaaaattactttatatattattatttttatataaatttacggtttgggttgctctggtagtttctatgtgggttgctatacggattttagttgcgatttaggttgctccattagttattgtaagaatttctgtatagaattctgtagaaatataaaaaaaaaaaaaaaaaaaactttttttaaggg

SEQ ID NO: 155480 - DNA, 625 bp, Cannabis sativa
gttgaacaacatgatgttaaaactgcctttcgaacaacttcttggataaagagatctacatgaagcaacctcttgagtttcaggtggaagcaaaatgagttgaattggtatgcaagctcaacaagtctttatatggttttgaacagtctgtaaggtaatagaataaaatatcatatagttatatgcaacaaatcaggctcaaacgagttgcatatgatcaccgtcgatacttcaagaatttggagaaatctacagctgtgttcttattactctatgttgacaatatgctcattatgagcaaagaaaaatctgttatcaaagatatcaaagccaagatcaagagtgaatttgagatgaaggaacttggacaagttcaaaagatacttagtattgaagtttcgaggaacaagaaggaagggacaatgagcttaaagtagtttgggtacattaagaaagttattcaaaaatttaacatggaagatgcaaagagtacatccgaaccattgcgtggacagttttttgtgcgaaggaacagtgtttgaacagtgcaaaagagaaagaagaaatgaaggatgtaccctatgcaatagttttaggatgcttaatgtatgtaatggtgagcacc

SEQ ID NO: 155481 - DNA, 650 bp, Cannabis sativa
tcactatttttgctaaagtgccacggtatttatcttcaagagtggtggaacaaaaggcccacaaatatcattattcgtaagctctaatacatttgcgcatttttctgacttactctttctaaccttgacaatcaacttccctttatacaatcaacacaggtaatcaaatcatagaaatcaagatcctaaagtacaccatatttcaccaatgtctccattctatctctagaagtatatcctaaacgtttagctaaagcatggaagaaagcatggaagatttcagaagatttcaaatctaatcttgcacgtttagaaccaacaacaactttaagagacgaagaaggacaagaggaagaagtaacaggtacaacatcatgtaaatcaagtttatataagtttccacataaagcttcatttccatccaactaagagtcacgatacaaagtcaattttctagatctaaaataaagactataacctagtctatcaaaaatagatatagagatcaaattcctcctaatagaggataaataagcagtatcatgaaactccaaaaatgcatagtattcaatttcagtctaacaatcccaaaaacttcaactctgactttagtatcgtctcccatgtatacatactcctccaacctactc

SEQ ID NO: 155482 - DNA, 696 bp, Cannabis sativa
  modified_base (45)..(45): a, c, t, g, unknown or other
agggggaatttttaacggccaacaaaattcagggggcatgatttngtacatgttaaagtttagggaataaaaatcttaattagcctatttataaatagaacccaataatttttgtttatttaatataatgcataaaaatatatgatgtaaaacaacatagtttaattttccatatttctagtagaggtatttttcaaaccgtctacaccttacaaatcgtcaatcatcaccaaattatacaaaaagtattgtttgaaatctttttcgatatgtttcgtggttttaaatttgataattgtgatttaaaccctacttcagtatatactacaaatttactaatttttacatatgatattattttttcaaatattttcatatatgaacaaatgagtaatgttaggtacacatttattacatacaataatgtgtaataaatattagtcatttatatttttaagtgggaccatattacttttaattatattatatgattaagattaattacataccattatgtgtgacaagtgtgtgtaatttaagagaagtgctagggaaactctttttagcactctcttttatactctcttcctaatcgagtgacatgtgtaaccttctaaattatgtttaaagttagttacaactatgccctcatttagtttttattaatgataattaaaatgagtcatctcatttact

SEQ ID NO: 155483 - DNA, 581 bp, Cannabis sativa
  modified_base (26)..(52): a, c, t, g, unknown or other
cttgatttttttataacaaattagannnnnnnnnnnnnnnnnnnnnnnnnnnatagaggttctactgtatcatgaaaattacttttttcaggggtaaatttgatctggcatcggatgcaacatgttgacacgtgtcaaagacacagaagttgtttttatgaaaactcttgaattgaatgaagtaatgtcaatgattggagggagagaagagaggagagttttgataggcattacgatgaccgacacattacacgtaagataataattttttcgtaatttttttacaaagatagtttctggtcgtttactactactagggcccctacctgctacatgatgttagtataaaattggataaaaaaataaaagaaaattttacaatgcactcctttaaaataattgtatcgatgcactcttatctatttcggcatctaaaaaaatatttaatctaatttcttttatgatcgtatatagattatagttatttaagaaatctgacaaaattttgagaaattcggaaaaatttaacacgtcaaaaacagtatttaaagagtctgttgcacgcgtgactttttttattt

SEQ ID NO: 155484 - DNA, 512 bp, Cannabis sativa
  modified_base (245)..(246): a, c, t, g, unknown or other
ggttaattttttaggataaagtattcaatcgacacaaactatagaacaaattcggtacatatttttgtgtgtaatacagggtcgtctcaagtttttataggatatttgatacaaatttttaaaaataaagttcaattttaaaaaataaaataaaattcaataaactttttaacaaatatttttattaaaaaattatttgcggccttataaactaattaatgttttttttttgaaggaaaatggtnnactttattagaatgaactttcaaccattacagtagataaaaaatcagctggagcatcactctcactgaaaatacaatctgaatacaaacaagagctacgagcaagacagtgtgcagctttgtttacagaacgtttaacaaaattaatcgtgactaaagatctaaaaaaaattaagagagatggagccacccaatacacaagacaaaaaattaatctcattttttcgtatttctttctcattttttcaaaaaattaatattaattgt

SEQ ID NO: 155485 - DNA, 660 bp, Cannabis sativa
ccctccctgcctttcttccgtttgaacgaatggataatctcttgaacaataacattattatcttgaatgtttcttcccagaacgaaagccgcttggtttgattctattggcaattattttggatatgaccttataaataacattgcaaagagaaatgggtctgaattgacttggtctcttcggattctggaccttagggataagaactacattcgtagtatttatacctttatgcatataaccattcctgaagaaatcagaaactgcgtcacagaaatcatctcccacagactcccaataatgtttgaagaagagtactgacattccatccggtcccggagccttatgactattcatagcaaacaaagtattctttatttcatcccgagaggggcagagaagagacccctcttggtcctcaagggaaatcctttcctgaaacaacctcctgcaatccaggctctggtcagtgtctgatccctcaaagatactcttgaaaaactcggtaaattctagaccaatggcgtctctatctgtgatccagacatttttcttgttcaaaatactttcaatggcatttctccttcctcttattgcagccgagaggaaaaagaatttcgagcatctatcaccttccttgagccaagtgatcctagctcg

SEQ ID NO: 155486 - DNA, 634 bp, Cannabis sativa
ctctctctctctctctcttacaccataacaggtgtgtgaggctgaacaaccctgtctcagttacagtgttacatgagttgaatacacactgtaatacctaaattaatccatccaaataagatataataactcactctattcctgggtgttgaggttggcttggaagattaaagtgtgaattcttcaacaaaattggattagatgatcgttaattgtactaaaagatagcaagaatacccttataggcttcaagaggtattgttttcttttcattactctagatttaatctatatacattatgatgagatccttgggcttatggttcatattggataaaaaaactatttttatcaaatctgctttcgcttttctaactctgatatggaccataaaaactaacagccatctcctccatttctgtgattttctctggcttactctcagccagtaacttttcatctctgagtacctttgccaccttctggtgcatgagtatacccttcaaactctcttgtcatagtgcgaaattagttgaaccatcaatcttctctagttcgaacatagccattgaaatcttccttcaatctgtgctcttgaaaaattccttgataaattcttaatgagttcttggtg

SEQ ID NO: 155487 - DNA, 1012 bp, Cannabis sativa
  modified_base (784)..(787): a, c, t, g, unknown or other
  modified_base (874)..(879): a, c, t, g, unknown or other
gacccaaattcatccaacaaggaataacgccaaggcgtgagattcatcaatgacatcccaaaggagcccacgtgaaattatgggcacccaagttgacatttcagctcggacactgattttatttcgtcgagtaacacttgtgctaatttgatggaactaaaatatgtggagtacttttcaccaaaagaatattgatgtaatgacctactagtttaggcgctacaatattttcttaattattgtacacacatttgctaataaaaggatttatcgaaaatcgtgattaatttaaactcttaaataaacttaaacttaaataaataaacataatttacatagtcctgaaatcccattaaaatcttacaattatttctaaaatatgttttatacaaaagctgtcgcccagcggctaacaaaatgtgagcataaactgtcccaaagacccgaacactccaagtctaacctgttaggattttatgccttaaataaaactattttcaatatatttttattttttatcaatcgaatagcatgttattttcatgattatgctttaatatacaatttttaataaatccataacatattgttattcacaattacagtgatgttaacacaatggaaggtaattgtgattataagcttatgacctatgatgcatcaatgcactggatttacactgatgtgataatctgcgataaaatttacttacacctcggataagggtcatgtccttttcatggtattagtaaagtatgctagtgtcgaatgtatggagtatacnnnngactggaccgatattgaacttggtgaagatattgtaaacttaccattgtatctttctaagtcaacttaatcctgatatggttaggtnnnnnntcaagagtgttatttatgttcttacaaatattcgttatagcttactaattggttcgggccaagacatacatcttgggaacatgatagtgtaattgagtgagagtgctaatcataaatatagaatctatagctt

SEQ ID NO: 155488 - DNA, 515 bp, Cannabis sativa
  modified_base (121)..(144): a, c, t, g, unknown or other
  modified_base (209)..(235): a, c, t, g, unknown or other
aaattaataattttttcacaaaataatattaataatttaaaataaaccaaattatataatatttaattttttttaaataaatcactacaaaaaaactattacttttagtgacaattttttnnnnnnnnnnnnnnnnnnnnnnnnctaaatatgacttttagtcacaatgaaaacttacttgtgactaaaacataatatttagatataannnnnnnnnnnnnnnnnnnnnnnnnnnacaagtattatgattaaaaatacattttgtcacaataaattgtaattttgtgactaatacctttagttaggatcttttagtcacaacataagaataataatttataattagtcataacttttttactttaagtcacaagttttgttatcactaaaattaaattttttgtactgaatatagatccatgtgcaacgttgataaacatgaagtacaaataatattaaattgagtaaattctattttggaccccgtgatttgcaaaagttacagattggaccct

SEQ ID NO: 155489 - DNA, 857 bp, Cannabis sativa
  modified_base (192)..(223): a, c, t, g, unknown or other
  modified_base (472)..(481): a, c, t, g, unknown or other
aatctagatcttggtaaaataatccccaacactacagggcatggataatcttcaccatacactctcctagagaatggccagccagcccctatcccttcagaagcaaaaacctccgcaaggaggaccagtcaataaaaaccccccacagcaacagattcttctgtgtaagcacaattggaccaactcagggannnnnnnnnnnnnnnnnnnnnnnnnnnnnnnnaacaccctaactaattaggcatgttagcgtaaattttaacgtactgtgcagctcgctgctaatcaacgagattaacaaaagacgtgattaattaaaatttacttatttaattagaaacataaagtaatatatttataaaatctcgggctcccgttaacaaaatacatttacaaaagtttaatattcatatacaaaagtttgtcgcctagcgactatacagcaaaagccctgatgtcccaaagatcgtannnnnnnnnnctaaccgccccgacatgtacaaccgctatctactctctctcacggctgctcagccttagtcttgccctagcctacacatggaaatagcactgtgagtcaaaagactaaaaaaaacagcataacggataacataataatatcccaagttataatcaggcccccatacacctaaccataactctatcctcgtgtcgcacacggtactgagtctagaacattcatacgacaatactatcgaccatagtgtcaacttatactcaacatgctagtcatactctagccatgttatgtgatagcgtcgggtgttcattggatcacatccaatgtttttaagcctatccagatccgatccaatcatatattggatgttagattt

SEQ ID NO: 155490 - DNA, 529 bp, Cannabis sativa
atcttaccataaaaaggaaaaattattttgtcacctaacttgccaaaaaaagactttacactagtaatccttaccaggatttgataggaatcggctaacaactccaattgcatgagcaatatctggccttgtacagaccatagcctttatcaaactacctattaaagacgagtaaggtattgaagccatttcttgtttatcattttcatttgtaggacactgtttggaacttagcttgaaatgggctgcaagtggagaacaaactgcttttagctttgctcatgttaaatctttaagaactttttcaacataagctcttgagatagccaaagtttctcattcttccggtcatgagaaatcttcattccaagtatttatttcaccgatcctaagtccttcaatacctttcttttgatcgaacccttttacaaccaattgtgccttgtaccgttgtgagccattgttttcagtcttatgcctgtaaacccatttgttcttgagagctttcttccctttaggcacccttacc

SEQ ID NO: 155491 - DNA, 930 bp, Cannabis sativa
tatcctcaaagggcaaaaatctcaaagaaaatcctccctccatttcatctttagattctaaacctgaagaagagactaaagatgttgatcaagaatcagagggtgagtctaattctagtgaagaatttgttcccaaagaacaaccatctcctgatgattctgggtctgaaagtgaagtgcctgaagatgatcctatcagtgcagaaccagttgttgtccctgctacagttccaaagaaggacaaaggaaaaatacccatggttactctgtaacgccctaatactaaggcacgctatagagattttcaattgaagtgttatctttgctaatcaaagaattttcttgaagatcgtgttaaattaaaactttaaaattaactatgaaactttataaactttatatataaatatttacaagtgtcgggatctcattgttaaagtttttacaaaatattccaaatacaaaagttaggtcgcacaacgacttcaaaatgaaaaccccagatgtcccaagactgaacactccaggtcacgctgccatgacatgtacaacatcaccctagctcgaggctcactcctgttcagccttcacctttcctttacctacacatgaaagtagaactctgagtcgacagactcaataagaaaagcatataacatatcacataatatcaacttgtatctaggcgcccatgcacctatttacaaggcttaacaaatgagtaagaatgttccatactagggtacaaccactgtaccacatacacttcgtaccaacatagtatgagtgttggtaggattttctttgtaccctgagtaccactaagcattatacaacacacacccagtactttcctgtactattgctggtaacaccgtcatgtactctttaaacaatatgcactataccaatgcactctgtaccatttcc

SEQ ID NO: 155492 - DNA, 733 bp, Cannabis sativa
attctactacttcattagcttgataaaataatttctgactattcttatgagtttgatcttttcatcagggacaaagacaagcggacattgtaaattttaggtgcaaaaatatcaaggttactttatttttctgtcttttaataaaaaaaaacaaaaaaacaaaaaattataaaaaaaaaattgtgaccgatttagtcaattgagctttcttaaaaattcttgtatttttcttgttatgtttcattattttcttaggcactattattttcgctctttagtattgattggtgttttatgtgtcatttagtgttgtcttgttcattctttacacatctttttggggggcatttttttgaaaaaaagtaaagaaaaagggagcataattttctattctttggcattttttttcttttatttttttttatttatggaaacatgttttaattgtattctttatattgtgtttcctttatttttagagatttggtcttatttttggagatttggtcttattttggtgtttttaggaaacttgttctaaaataattaattatttttggtttcctttttggtggcaatttcggatttggttggagttttaataattagattttgtgggaatactttgttttttttttccatttaaggaaacattgaccattttttgaaaaatatttttggtttcctcttttctctccacacgtgtatcaaggtaaggaagttacattccttt

SEQ ID NO: 155493 - DNA, 760 bp, Cannabis sativa
aaaaacaatcttaatgggttggagaggagttatatgtgacttgagctttataagatggagattcttgtgttgttgttcttgatggataacaatgcttgatagattctatatatatataaatatatatatatatatctttgtatcataatagattaaaaatttacaaaaatatgcacagaaaattttttattttttgcttttttgaaattttttatttataaaaatatttcatcagtatcaactgtttttttaattattttatagtttatttatagttattttataattgatttcatgtaattttttagttgtttttttactttttgccgaacaaagtgtagttttataattttgaaagtttacaagagtatttttgtaattaaaatttatagaccgtaaaattgtaaataaaatataaaagaatggtatttttgaaaattcttctttaataaaaagtgaaagggtaattctatcaccctcctaaaatggatgcatcaatacattttaatctgtttcggtatttagaagaattttttattctaatttttttccagtcgtgtacgttataattatgtaacacattttgtaaaattgtgagaaatttgaaataatttacaatataaaaaataatgttgaaacaatgtattttacacacttaaaataaaggggatttatcccatatactattttttaaacttttttttcaaatttacggtttgagtttctaaagtggttgcagcactaattgcaataggggttt

SEQ ID NO: 155494 - DNA, 508 bp, Cannabis sativa
  modified_base (27)..(51): a, c, t, g, unknown or other
aaaattacccatgaatttctcataaannnnnnnnnnnnnnnnnnnnnnnnnctttatatagaatagatattaaatcaagttatttattttattcttcttctttttatggggatcagtcaagttatttaattttttctaataaataatattttttaaaataaattactttatatattattttttttaatttttctttaaaaatttacggcttgaattactttgttagtttctctaatacattttatatgggttgctatctagattttagttacaatttaagttattccctatattaattttcgtaaaaatataaaataaaaactactttaaaatataaaaataaaaaaatcttaattaaattgggtggaatccgtttaatattttttttttcaatattttatttatttattttgctttattaaagcatattaattaaatccacaaaggttgaggtcatttaatttgttgcgcggaaaatagtttggctccattcgattacacaaaggtg

SEQ ID NO: 155495 - DNA, 511 bp, Cannabis sativa
tctgaattgcatcataatattttggccaaaaataaaatgtatgtcgataattctcgacaaatctaaaaccatgatcattgctatttcatgttagtttattacatatgtaaacattcaacatttattgtcgacaaaaattttattatatgatattttcctcctatatttacataacttataaagaactctttaaaatatatatttttcaaatatatttatcatttataggtacctatatagaatcacttcaaggtttcaattataattaaatgtaatatgtctaacttctctagggagtctcttctagagtactgttttcatcacagtaatcatttttaaattattaataggctaattatgattttttccctcgaactttgacatgtaccaaatcatgccccctgaaattttttggttgtcaaaaattccccctgaagtattgagattattagatttaaggaaatttgtctaatttcattaaattttacagtttcagtgattgtttatgtac

SEQ ID NO: 155496 - DNA, 634 bp, Cannabis sativa
cttgaaaataggtaaaaatctaatatttttttttgcttaattaattatcttattttttaaaatttggttattttatcttatttaaaaattgaaggtcagacatttaatatcttaaataatttatttatttatttttttaataaaatgaccttatttgaaattttaaataagattattttaatcatgaaattttaaattgaaataagatattttgctaacttttaaatttgttatttttttatttaaattaaattgtaaaatcagagaaatgatataaaattatcattttattttattgaaaatttaatttaattttaaataacatgaaatttgaaaagttagcattttttttttaaaaaaagatatttaggttagttgaaacttaatttttcaaatttataggtttaaattttaaattaatttttttaatttattttttattttgttttcgaaaaaaaagtatttatttttatttatttttttttaaaattaataaattaattaattaatttaaatttaaataaatctcatatccaactatccaatgtgttacctgtgtgtgttttatattgtttgattattaaaacaagtttaataaaacctattattgtttgatctaaattgccatggttaa

SEQ ID NO: 155497 - DNA, 518 bp, Cannabis sativa
gctcggcaacagaaggagattgataaattaaaagccaaaatccaatcccttaaacagaagaaaagcactgccgaataagaggaagaaggagaggtggatgatcaggagtatgttccacaataatacgctcatgaggatgagggtccaccataaatctatgccaaggagtttgtttccctcaacgagccacctctcctatacaattttgattaccagagggcctttgatcagcaagtgtatctctactctgacaatattgaaaacattgcggcccgagcgtatctgtacgagcatgagggttcaatcactgttcactgcaaggactacgatgattcacatgcccgggttttaatttcagaaatgctattagaggatgctaaaatcccaatctcaattgaagggtggagatatgttagggaagtagcacacatgttccttccttggcctaaaaacctaattgcaatactcgaggtaacttttgttataaattaattattaatgattagtaaagtttgaat

SEQ ID NO: 155498 - DNA, 904 bp, Cannabis sativa
  modified_base (847)..(847): a, c, t, g, unknown or other
tatcatcttttaatacaaatatatattgtaactaattaaaatacatatatatttttttcccaattttttttttcaggggcacaatatgggtccgcccctgtatatatatatctataataaaaaagtatgaggcggtgacataacattttaaaatcactttaaaattatttttctcttttcttcttaattctctcaattttaatattttattaaagcataaatctacaaattgatattttactattattttaataacttttctataaaaaaccataaatctacaaattaatattttactattattttaatttctaaaaaaaaatataaaatatttaaaaaataaataaatttttttaaaaaaatattaaaacttaaatcaaatattattaattgtaaatttggtttatatacatacatgaaatattaatcaatatatatatatatatgtataaatctatatttatatatataaagtagagacataaagcggtgacatggtactctaaaatttctttaaagctatttttcttttctctctttaattttttcattgttttaatttttaatttatataaaattactctgaaactatttttcttttttctccttaattttttcacttttttaattttaattttataaaaaaaaatacagatttaaatccataaaaactcaaattatagtaataataataaaatatacaaccttaatatttttgacttttattaaaaaaaaatgtataataatactaataaatgtaatataaaaataataagtgggtacatttttggttttctataaaagtcaataagatataataattataataattaataataataataanaataatggaagagatttcaatggttacatttttattgtaaccatcatagttacattt

SEQ ID NO: 155499 - DNA, 539 bp, Cannabis sativa
  modified_base (327)..(327): a, c, t, g, unknown or other
acagtccaccgtggcacttaattgtgatttttggacggaggtgtgcagagcaaaacggaaccacgatttaggtagtttggctgccaaaaatttagtttttgtggttaagtgttggaaaccgtaaagtttaggaggtttagctgccaatatcccttttttttttggttttcagaaaagaatcaccatagcccaaaaagagattaaaaaggccaagaacacacttgataattttgaagagtctctccaacgaaaaaggaaaatgtaggctaatttagataggctcctttataaggaggaaactattagaaatattttactaggatctanatttactaacaagtatgttgattagcatcctaaatattaatatctctaaaataataaatttaaacacgtaagagtttagaaaactttatatttattacaacagaatataatgttgcgaatattttaccaggatctagaattattaacaagtatgttgaattaactgttgggttttgtgccccaaataaaactcatttcaatataatctgatt

SEQ ID NO: 155500 - DNA, 706 bp, Cannabis sativa
  modified_base (656)..(669): a, c, t, g, unknown or other
tctcactacttttgcttaataatcctcttcatctttagagaagagatctgaataaatcctctttgtagttcccttgtacaggtcttcaaggctacaaggtagcctattcacaatcaaagatgcataattcctaggggcaccatggttcatggagccactgccaccacctccacctccacctccttcccaaaacgatccaaatatgtcatccctgaaaatcccacttgaaaaccttgaacccctcatacctcctcctccaccacccatccctcccaagcctccaaacggtcccgaggacccaaaaaactccgcaaaaatataatctacatttcgaggattaaattgaaacgtcgtgggttcatctccgatcgagaagtataaagctccacctggtcctctggcgtctggtggtggcatttgacccttaagcccttcctcaccgtactgatcatacactgcttttttttgtggatcactcagagcctccaaaaatgaaattaaccataaattgacagctaattaaaaagcttcatattagtaaagttctatattttggatagaaaaggaggggtgggttttggctaaagagacatacctcataagctttcgagatttgcttgaatttggcttctgcttcctttttattatttgggttnnnnnnnnnnnnnnaaagaaagaaaagaaaaaaaatatttaattttttatt

SEQ ID NO: 155501 - DNA, 712 bp, Cannabis sativa
ttgaattagaagtcctactgttcataaagtttttagttaattgaaagacctttctaacagtataaagatcatcaaaatcagagtaataacctaggagttatgcataatttattaaaacaatttctttaaaatcctggatcataccgatttctcaatatagcccaaaaataaaaattttgaaaatagttacaccccgattcacacaacactttcttcatacaaaatgtatctattttctgaatctttaaaactagataaatatcttttgaaatagatcaaaattgagagagatattgaatttttactaaagacattgtttctgaaacaaaacttaaaacgagatatcctaaccgagtgaagataccaacttttggtaggtaataactaaaagtttcttcaaagaaaatatgtattattgaattatctttccaacggtaccagaaccgctggaaaataataaatatcgagagagatatcgcacttttactgaagcaatattggaaagaaatttgaaaaactataattcgacagccagcatgaaaacatgaattttttgacatcaaaataatcagaattaaggaagagtctcttcatgaaaaatatatatcattaaattatcttgaaaaaggtacatagatcactaaaaacggacctatggagagagagatatggtagttttataaaagtctatttctctgaaaacgaaaataaa

SEQ ID NO: 155502 - DNA, 1245 bp, Cannabis sativa
  modified_base (632)..(637): a, c, t, g, unknown or other
tgaacaaaaagacgaagatcttgagccccgagtttaagatgaaagaaacgtgctaaaaccaatcaaagaattggaagaggttatctcgacccaggaaattccataaaatgtgtatacattgggaagaacctggacgagcaactcaaatagcaactaataagctttttgaaggcgaaccgggatcagtttgcctgcagccataatgatatgatagggatcgaccctaatattatctgccatcatttaaatgttgatcaaagtttcccagcgaagagacgaaaacagagacccttggatttcgatagccaatccagttctcgtcccaaagcctaacgaaacttggagaactttcatcgacttctctgatctgaataaggcgtgtccaaaagattgtttcccacttcccaggatcgaccagtttgtggatgcaactgctgggcacgagcttatgtcatttatggacgcatattctagatataactagataaaaatgtatgttccagatcaagaacatagaagcttcgtaaccaacatgggactctattattataaagtcatgttgttcggactgaagaacgctgaggcaacgtatcagcgattgttcgcaaaccaaatagggcaaaacatggagnnnnnntcgatgatatgttggtgaaatcaataaaaagtaaggatcatacctctgaccttgcagaatgctttaagatattaaagaagtataacatgaagctaaacccgaaaaaatgttcctttggagtttcctcaggaaatttattggaattcatagttacgcgaggggtattgaggaaaatcttaaaaaaaaatcaaggcattaatagacatgccatcaccaacgaagcctaaggaagtacaagctctgacaggaataatggctgcacttaacatattcatttcgaagtcaattgataagtgtgtgccattcttcaacatattgcgaggcaacaaaaagttcgagtggacaaaaaagtgcgaagaggcctttcagaacataaaaaggcatctagtaacgcctccagttttggcaaaactaataaatggagagacattgtttctctatttagccatctcgaaagatgcgattagtgcagctatagtgcgagaagagggcaagcactagcaacctaattgctatgtaagtaaaaggttaataggggcagaatcccgatatccccctctagaaaaactcgcgctatgcctagtccatgcatctcgcaaactacgacc

SEQ ID NO: 155503 - DNA, 539 bp, Cannabis sativa
  modified_base (206)..(211): a, c, t, g, unknown or other
tttcatgaatgtaatgtttgttctttagtaatgtaatatatatttatgttattgcaatataatatttttatttatcgagttttgttgattttatagtattattatttttaatttaattagtaagtttatttaaattattagttaaatataataattgtggtcatttttgttaattaatatgatagttttttttttattttattaannnnnnaatataataataagaaatattttttaatgtaatttttggtgttgtaataattacagtagaaatactttttgatgctaaatttgatggtattgaggccaactccaatggaacactaaaatgctaaatttgttaaaattttagactaaaatattcattcccaaccatactctaaaacttatcctatatataagattgtctatagtgtcccactaatattagtgtactagactacactaaatatatttttagggatatgattttgtcccatgatgtacttttacggaatgtattccgtggtacattagatgggtctcagagtacattaaat

SEQ ID NO: 155504 - DNA, 754 bp, Cannabis sativa
atatctttaaaggatttttttttttacactaaaaaactttttttttttgtattttttatagaattccacataaaaacctctatgacaattaacagagaaacttaatcataactaaaatccatatagtaaaaactaccgaagaaattctaactgtaaattaaaaaaaatatatatatataaagtaatttccctatctttaatattataaatatatatccattcctatgagttgcttcaagcttactaagaagttttgtgatcagttggaaagtatgatggccaatttttggtggggtagtaatcaaaatggcaccaaaattcattggaagagatggaaatctctttgtaagtcaaaatatgaaggaggtatgggttttagatctttatctacttcaatcaagcacttttggctaaacaagcatggaggattttcgatatgccagattctttgttgagtagactgctcaagcataggtacttctccaattgctctattcttgatgcaaacataggtcactcaccctctttaacttggcaaagtatttgttggggaaaggaactgcttctcaaaggacttcggtttaaaattggagatggaaatcatgttgactgtgggaaagatccatggataccaagccacaatgagttcaaaccagttagcttttcgggttctaactcaatgccagtctcaaacttcatcactgccgatcgggtctggaatgttcaattattgagctgctattttcagcagata

SEQ ID NO: 155505 - DNA, 526 bp, Cannabis sativa
gtttctcgttaatgtacgaggcaacaatttgtatatttttatctcgtgtaagacctaacaatcagcaagttgtaaacatactctggcagttccgcatttaatgagttatcattttcaaatataaatatcattatatttgttggttagtattctcccagtttgacacgtgtcctcctctgaagtgctagcagaatttcgggtataacaatattagtcatgttattatacattgttattacttacaatatttatattagaaattattacatgtgatgtatattaaagatcaaattttgcatacatcttgaagattatgcaaaaattttattcatatattttttgaaatattgtaaaagaaattgctaaataatttcttatatttttatggatgaacaattaataaaatttccaagaaatttataatgatgttttacttgttcaacgtcattctctaaagtcaatgcaataattttaaataatcaatgtcattgttgactactcaaatatttccagaagaaattagaaa

SEQ ID NO: 155506 - DNA, 562 bp, Cannabis sativa
accaaacttttcagagtacctaaacaatgcatagacaatattttccaaccagaatttcacagaaaaacccaatgaatcaatttatgttgttagagttcaaagctttgaactcaaagcttaaacttgcacaaaactaaaaccaaacatcgaaaccagttgctcaatgctatactcaactcaaatgaacctagaaaatcaaaccttaaacaaacctaaccctaatagcccctatttcacaaaattcacacattcaacctaaagaaaaagcttcaaaacatgctcaagggctctagggttttacctttgcttgaatcctcctccaaccttgctgaaaataccaatttcagcaagaaatcccccctagtttgcttcagtcgaaagagagaaaaagagaaagagatagctttcttgaatttttgacttttttcttattcctctattttcttcaaacgataaagcgataatccccaattaattacttgctgaataaaatggacaggtgtccacaccctaggcagccaccaaatcacctatttagcaaattacaaaaatacccttaagc

SEQ ID NO: 155507 - DNA, 703 bp, Cannabis sativa
tggaggcaatcttcccatccttaacctcgactgtgctcattcaaaggaaaatttaacaaaaataattaatagatatattttatctaaaaaaaattaataattagtaatctcaataattgtgtctgacaacaattcaaacaagacttagctaagaaaaatttggtgtcgtagtttcataaattcataactcgcattatagttataatagatattttattcgttgttttaatattctgaataattttttgtctcgaaagtagatttcaattaatcagttttattcagaattttctcaaaaacatgtgaaatgtttgtttcgattacaacacacaatattatatgtataaaaaattaagatataatttctctagttaccgaaaataaaaagtgttcctaactaagattcttcccatatttatgtatagaagagtgctattatcaatattttattacaatctcttaattaatctttgtgccttaaaacacgtgtcagaatagttttttcaattattttccctagcggtattcgttatattcacaacatcattcctataaatttttgaaaattttcaaatagtttatagtgttgaaaataggttttaagtttttaaacacgagtggtaaactgaaatataagaaactctgtttttgaaactttaaattattcaaaaaatttaaaaaatttacaaggatgatattgtaa

SEQ ID NO: 155508 - DNA, 760 bp, Cannabis sativa
ttttcggtatatatatgtatatatatttatatatgtattatatatacgttttattgcataatattgattataatactctccttcatatttataatattttaggtaatatatacattatataagtatatttataaacatgtggaaattttagttttttcggtcgtgtttgttccgattttaattttcgtttttagtatttatttcaatttctatgcatcactacattcatatagtattggtaagcatgaaaacctattttggaaaacaaagaaatatcaaaaaaaaaaaatctgaaaacaccatttggacccgaaaatttttagtatttttaaagtcattgttttccgtgttttcgatgcatgaaatctatatggatgccttatttttgcatttagattcattgggaattgatttgggatcttttggtcgccggaaacaaaatttaagatcgggtttaggtcgggtccgtcggactcacatgcagaaaatcgggtccaaatgacccgggttggctatagtagacgactccgtacgacatgtcgtttatcttatgttaaaatcgacatgtcatttttaagtagagagttttggccactccgtacgacgtgtcgtttttcccttatgtaatttttaaacccaaggtcgtacgacttgtcgttttctcttatgtgaaaaacaacatgtcgttttccagcatgaattttttgagtccgactccatacgacgttcgttttttagggcagatttttttttaaaaaaa

SEQ ID NO: 155509 - DNA, 509 bp, Cannabis sativa
tatatatattcttgaattttcaatctgattttttgtatatgatcttgggtgattttctcagcaagaagtactgtgttactcaagaatcatggtgaataattttaggttgttccctgatcagcaacagaagaagttacgtcttcaagagcttacaagaatgataactgaatcaatggttgctatagatgattccattgagaaaataaatctgaaattgaatcctaataaccctgttgatgttagagctcaatcttggaatgcagaggaaaaaatgaagatatacacgtaaagaatggtttttatttctttttcaaatattattagtataaatttcttttttctttaataatttcttttatttgttgtatacgtatagaatggtttacaccattctcagctccaatgaggtaaagggctttctttctttcgcaatagatgagtattatgataaatttgggaggacactgaggcaaaggatttcaaaatatgtaagcttaattataatttga

SEQ ID NO: 155510 - DNA, 883 bp, Cannabis sativa
catgtaaacataaatgacttttaatcttctattgataacaaatcaggttatattgaaatagattttatttagggcataaaatctcaacatatcaatagttattttttttttaagatagtaacgattacaagtgagatacagtgatgataactttaaatatagtgacaggtgagatacatagatgacaacaattttaaatttgatgagtttcctatagatttatcaattgttatattttttttcccctaattctattttatatataaatttaattacacaaaaataaaatttatccaattactaaaattctataatctaatttaatttatggaaaatatatatatttaaaaactgactttatagacatatatgtatattaagttgattaataattattatttattgagttcaaaataattaaaaaaatgaagactctaaaatattaatttatttttcttttattattaagaattaaaaggaggtaagttccgagccaaactcttttataacatgcatgtggaagctaaggaagagaaacatagtagagctgtctggaataagctcattgttccaaaacacaggtttattctttggcaggctagcaatgctcaactccttacccgagatcaattgagcaagtttctgagtttactctcgaacctttgctcggtttgtgagagtgacatagaaacacactcccatctcttctttgaccgtgtgttagccaggaaaacttttgctaaaataagaagatggttgggatttgtggattggccgattgatgctgagcacattcagcaatggtgtatccggggcccccttgatttcaagaaccgagtgataaacactgtttttgcaacagcgatttacttgttgtggaaaa

SEQ ID NO: 155511 - DNA, 552 bp, Cannabis sativa
aaaataataaagagtcattttctgtctatcccaatgtgtacaattcacagttttacttgcacaaactgttactgatgtttatgtttggcacaccaaacttggacacccagcacctaatactctaagaaaaatcctcacaaaagccaatattgcttgttctcttaaagatcttaagttctgcaaagcatgtcaattaggcaaaaatcatagattgccttttcctttatcttagtctcaagcaactcaaccccttgctcttgtgcacactgatttgtggggtccctctcacatgccatctaaagaaaactatagatattatattgttttcatagatgattatagtaggttttcttggatttttcctctttcactcaaatctcaagcttttgaaacttttatcaaatttaagagccttgttgaaaaacaatttaatcttcccatcaaagctatccaagctgatggtggttgagaatttagaccttttgagagatttctagctgaccaaggcattctgtttcaacaaccatgtccccatacccatgaccaaaatgg

SEQ ID NO: 155512 - DNA, 1020 bp, Cannabis sativa
gcctgtacggctgggctggcctgctcggcattttggtcaatttgaattacaacagcatctttttgagcgggaatttgagtacgaattttgggctgcgagattgtcgtaacattctgatcgtatactccccctcttctatttagatcattccttaggtcatgggttgtgcccaacctttcgaacacagaagtgcttggctgcctcagcgattgattcactaggttgacgggtggaatggcaccatttatctggttggaaccatcaggtattacttctctcgatgaattactagacaaggtctgcctgcctaccgcttggcccacgagtgcaactcgtgaccagggattgggcggttgaccatttacggtctgagaagcattcatcgctggatcttcgtctgtttcacccaggggaatgatgttcggcgactgctgacctacagttttgtagcctttttgtatcagcacggtagcctgccgactacgattttcaatctctgcatggtgagcccttaatgcctacatctctctctatctctccattcggtgaacatacgcctttcttcgtcgaacgtgagatttactgcaacgcgcagttcgtcctgatcatgatgtagggtattgttaggaccctacatgagtccgagagagtcaagaagattttgcaattcagtggcatctctgatggtcgtctgggcatttgttccaggagaaacagttgtgttatgaatgccctgattggttgcagaattgttattcccagtctcttgcacaccaggcgcgatttcatctataggaactgtcacaccattccccacgttcgcctgctgtccaagattaacagctggcggaactcttgtgtttcttgggttctacgatgcgggatccagtgtctgtgaattagctggatcatttgggcctctacgagtttgcaccatcgtatttgcgattggatgttgaataaagagcgattcgtgatccttctctcaatgaaagtaccaaaatgttaacctcgctttta

SEQ ID NO: 155513 - DNA, 511 bp, Cannabis sativa
aaacttttatttaagtttttaagaaataattgttaatgtaattttatgttggtataagaaattaagaataatgaataaataagaaagtggtaattttttatgaatttgttatataaagataaattggtaaatttaggaattaagtatataattagtttaaattttaataaataatataaattttaaaataataataatttattttaaaaaataattattttatatttatttaaatctagaaaataagttttttttatataaattaataaataacttaaaaattaaaatttaaaaattaaaaagttaataatttaatgaataaaatttttatttaaatatgtgtctaattcataaaatattcataagattttataataatagttaataataaatgcttgaaaagaatatatgaatgctttggtatacttataaatatataccataactttgttatatttaaaaatatatcatagcttttgtataattgtaaataaagtctagaacaaaattg

SEQ ID NO: 155514 - DNA, 665 bp, Cannabis sativa
agtggtataatcatagtcagagactgcctggtcatactgctttttcccattctccttctcgacctccaagtcacgagacatctcctcgaccttcatctgagacctcttggctttgagctcgacttgctccttagccttgcgaagttcttcgagctctttgtccttggtagtcacatcttgcttcagcttcttgatgtcctcctgaaggtgaacattctgtcttctcacaagttcgacttccttggatccagtgacaaatgccctcgaaaacatagcaataaactgcgaagccaattccgtagaacgaggcagcagctcttcagcaggggccctgtcgacctttgatataaactcatcacccacgaacatctcttgaagagtaaagatgttgcgagctcggatgggcgaatcgatcacgactttcttccccttgtcttgcgtgcccttagttggcttcttagaggaatccgcgataggggtgaccaccacatcgctctttctcttctgagcaacgataggagatgtcgtcactgtttcagtttttggcttgcggttgaggatcggtgtggacttcagaaaagtcatctctgcgaggacaaataaagataagtataaataacgataaggcactagtttataacatgcgatatgttacctgacgttgg

SEQ ID NO: 155515 - DNA, 590 bp, Cannabis sativa
  modified_base (527)..(530): a, c, t, g, unknown or other
ttatttttcttcaaaaattcaagaacacaccaagaaggtttcacgaaccatacctccttagcttgagatcactaccaacaaggtgaaataataagaattacataacaaaatcccagccctagcagccccaattccaaccgaaaagagagagagagagagagagagctcttgagagaaaatgaaaaattgtttcttttctttgatttttttcttatgtttgcaaaatgaataataaaatagtttttacatactttttactcatcataaaataactaataaaatcagatttataaaatttaaataaaattcataaatgacaaagcacatatggcaaaatgacatttttgccctcacacaataaaatgacataaaagggtactaaggggtattttgagaaaactctaaattctcgactaatctcaacattcccaatgtctaaataaaccgtcccacaatactactaaattttgatttaactgagtcataccccgcgttccatgttgtcgggcaccgaaaatgcaaaattnnnnaatttcactatatgacataaaatgcattctgaattcaaaaataacaacataaataattat

SEQ ID NO: 155516 - DNA, 643 bp, Cannabis sativa
cctataatagaattgaagtaataagaataaccggatgacaccatctaatattaaattataccaacatggatagatatctcttgtatgtcctagcaatactaaaaacaaaattaaacaatttttattttgggattatttcacatatacacaaaaacaataaaataaaataaaaaaaacggttatataaaattttaaatatttttacgattttattcatataaaatacgatcttttgatatatttttatattgtattcttattaatttgttgttaatttttattatttatatgttattttttgttgttcttttgatgttgtcttcttgttacttttatgtagttttcttattattttcgtgttgtttttgcagaataccgtgaaaagtgtaataaaaaatctttaaacgtaaaaatataaaatttttataaaaattagtgtattatgtaattacctcttttatttttggagttttacaaaaatactagattttaggtaaaagtttataattttactgtcacacggaattttttacaaacttacagtcttttaattttataaaacaaccgtaaaacaacaaagtagaacagttaaaacaacagtagaataactaaaaacaactgtgaaacaacagtaaaaacttaa

SEQ ID NO: 155517 - DNA, 866 bp, Cannabis sativa
gatacttcatcactttgtataaagtggtcttaacttaagttattctgatactacttaacattcctaaaataaatacaatgcaaagtcgtattcagactctcaggcatacattaggtttctaaaatagaagtaaatgaatattactaatttattctcattctagatcaatttttagatgctgttttgagtttaatgtatcacacttaaagataaaaataacatgagatgaattatatataattttatttaatcagagatgttgtggctactctctaattaattaaagttatatatattatttatattctttatctcaaagtaatgatttgagatataaattatttcaccttatatagaaaacttctatcattatttgcaagtaacatattgtctatatataaatcattggataaatggtttataaatcatttgcttatgatgccatcctattttttatgaaattgaatggtgtaaatgactatattccagatattctatcccgaaatgatataaattctcgattttaaaaatctcctacttgtatatgcttactatagacaactttaacttagggttagattagtagtggtggtccaagctaaaataaaactcaagaaatatttggtataatttaagtcttagactttaaattttagattctaaatagatttttctttttcagtttcctagaatacattggacaatacagtatgactttcacaagttgttaacatccattttctgtcaatagatccaaactgttattaatgtatggatattgagttttatattctgtgacgagaacccacttggactattctaagaattctttattgtaactatacctaagtcatcaaaagaccaca

SEQ ID NO: 155518 - DNA, 552 bp, Cannabis sativa
ggaattcatgcttctcttttcgtaacataatctcaattttatcactttatagcttgttattacccattgaacctatttcttaggatctccaatcaataagtcgggttgccattatgagtgattcttaaatccaagggtaatagtcccattcctttagatgttttaaggattttctctctagctaaacctttcgtcaaaggatcagctaggttatcatcagtgcgtacatgatccactctaacacctcttgttgagagaaactctctaatagtattgtgcttacgacgtatttgtcgtctcttaccgttataataacaattctaaaattttacaatagtcggggtactaacgcaatggatcaacacagctggaataggtctttctcataaaggagtctcagctagcaggcttctcagccaacctacttcttcactagcagtagctagtgcaatcatttcagactccattgtagattgagccaaaatggtgtatttcttagacttccatgaaatagctccaccagttctgctaaaaatatagccactagttgcc

SEQ ID NO: 155519 - DNA, 506 bp, Cannabis sativa
ttcggaaacttgtatgttcttggtctggtggatgcattttgatttgattgtagcctgaataagcatccatgaagcttaatatttcatgccctcctgtatcatctacgagctgatcgatccttggtagtggaaaacagtctttggggcatgctttgttgaggtctgtgaaatcaatacggactcgccatttcttgtttggcttgggcaccaatacggaatttgcgacccaagctgggtagaaagcttcaattataaaattgttgttgcgtagcttttctacttcttcctttagggctaatgctcgctctttgtccaatagccttcgcttttgttgtactggccgaaagttgggatcaatattcagaacatgggaaatgatagaaggatcaattcgaaccatatccgcatgtgatgaggcaaaaacgtctaggtttgttctcagaaattttatcaattctgattttacttcgagcaacaaaccctttttgatctttagctttctggtc

SEQ ID NO: 155520 - DNA, 900 bp, Cannabis sativa
atgtgaacaacctaagcgagcgaccggagaagttgttcaggagagagtgcgatgacatcacattcatggaaagtgatgcgagatgggtccaccacccgcattctgatgcattagacattgttgccaatattggcggagataacgtccaccgtatactcgtggacaatggaagttcagtgaatctcttaaacttccaagcctttaaacagatggggatgcatgagaaggatctgtgacctgtaacgtcgagtatatacggttttaccggcgacgtcattacattgaaaaggatgatcaagctcccgagtactttaggaactgcacctgtagtagccaagtcgatggctaacttcgcagtaatcgaccaatactcagcatacaatgccgtaattggtcggccaattctgaaagagatgaagatcgtgatgtcaatatatcatctcacaatgaagtttcctactcctgctagagtaggttctgtgcgaggaatccaatcagactcacgagaatgctacaacgcagcagttaagctcgcagaaaataagttagtcaatgtcatatatctgttagaggcaccaccccctcgccaagaagtctttaggatagaagaagtgccgcatgaagacggaccggatttggatcctaggatcctcgattatgctgcaaccgcctaagccacggaagacaccattgaggtacctattgatccagtagatagtaataaagtttagaaaattggttccaaactaacttttcaacagcgagaaaagctaacgacatttctcaaataaaaaccttgatgttttcgcatggaaacattcagatatggtcggaatatctccgcaggtcatgtgtcatcgattgaacattgaccccgaagtgcgaggtgtccgacagaag

SEQ ID NO: 155521 - DNA, 501 bp, Cannabis sativa
gacatatactcagccaaagtatttgccctttcgctttgcatctctccccataacaaggagccaactgtgtgtaacgcccgtatttgaaaatttgctaaacaaaattaatcttatcatattataattatatagccatataggtcgggattatgagtttacaacaaaattaaaaattacatttacaatatatagttacataataattttttttcttcacaaaatacagggcaactcaaaatattataaaaccgaaaccctccaggttgcactgccacgatatgtacaaccattgccaagctcaaactcactgctcctccagcttagcctttcccttacctacacaagatagcaaattgatgagtcaacagactcagtaagatatgcataacatatataacagtaatgttgcaccgactttatgcttaagtcgttctgagctcaataatcgagcccaccaaatggttaagaacgttcttaatggaagtacgaccactgtaccat

SEQ ID NO: 155522 - DNA, 595 bp, Cannabis sativa
gacttcaactctcaaaaaatacttgagcgcctctaaattcttcgtgtgaaactgggtatgactgaaagatttaagggatgagatgcctctagtatcatttctagtaataataatgttatccacatacacaactaacaaaatgatacaagcaacagttgatattttattgaacacaaaatggtttgactttctttacaacatacaaaatttctaaacagtctgaataaatttaccaaaccaagcacgagaattttgtttcaaatcatataaaagatttgtgaagtagacaaactcgtcctgactcccccttgagcaacaaacccaggaggttgctccatatacacctcttcttgaagatcttcatgaaggagacatttttaatgtcaagctgatgtaaaggtcaatgatgagtagcggccatggaaataaacagtcgaatataagtcagttaagcaatgagagaaaaagtatcacggtagtccactccataggtttgagcataacccttggcaacaagacgggcctttaagcgagcaactgtgccgtctggattgaatttaaccgtgaacacccatttacacccgatggcctgttt

SEQ ID NO: 155523 - DNA, 867 bp, Cannabis sativa
  modified_base (356)..(363): a, c, t, g, unknown or other
ctaaaaatataataatggcaagaatacactagtttaatatcgagtgagaaaaaaaattagagcaacaataatattaatgcaaaaaaactgtgaggatttacgtatgagagaatttaaaaatataataataatttaaattaaaaattaataattttttaattattaatgttattttgtttttaaaataaatatataattaaatattttataatatgtataaagttttaattatgtgtaagcagtcctattgtaagagtatacacctatatcttaatagtcacatgatctaaaatcaatgatcaaaaaagttttcctaccggtaagaaacttatgctaagtcctaccatagtcttgcnnnnnnnntatatatatatatttatattactaaaagtgacagttcttgaatttatgtttggtttcattttttggttaacttaattgaatataagttttttttttaattaacattgttttttttttttaattttatgcatatatatttttagctatattatattttaggttgtcatgtataatttttgcttgattgtattcaaatttttataatttttttatttactagttttatttttgttttgatcacaaccattttcttttattattttttttctgaaaaaatcttgcctcattatcatcacaactttttaattgtcttattttacaactccatcatgaattctattataaaaattaatatattattattattcaaaacatcaatattattattcaaaagatcattaatattctttttaatatatctattctatataaaatgtgactatataacagaattcttagtttatgaaaaattattgggtcactttttttttaaataaaaaaaat

SEQ ID NO: 155524 - DNA, 619 bp, Cannabis sativa
  modified_base (478)..(481): a, c, t, g, unknown or other
gtaaaataatttccaacactcatgacctagagcttgctgttgtggcttttgctctaaaaatgtgggatttatactcatcataagagtctcaagtactttttcaccaagaaagatttgaacatgagggagaggaggtggctggaatttgttaaagactgcgattgtgagattttgtatcatccaggaaaagccaatgttgtggctgatgcctcgagtagaaaaggtcccgggcaggtttgcaccatgattttgatagcccatcaactagcctgtgaaatgaatagtgcagggattgagtttatagttggaaagttgcacaacttaacacttcaatctgatttgttggaaagaattagaaaagctcaactagaagatcttgagttagtcaaggttcgagatgaggtgatggctagtcgtcctaaagaccttttagtctcgagtaatagaatgttgttgtataaagctcgagtttgtgttnnnngtattgacgagcttaagaaagagatacctcatgaagctcacaccagaccttactcactttatctgggaaccactaaaatgtatcaggatttaaaaccctacttcttgtggtatgggatggaaagagatgtggtggact

SEQ ID NO: 155525 - DNA, 577 bp, Cannabis sativa
tgctgagtttgagggtggacaagattccatggtagatgaaaggtggttgaggcggataaagaaaattttcaacacaataggaacacttgaggaataccaagttatttttgttgtgtccaagtaagaggatggtgtagtagattggtgggagaccttgtccaggacaacgaaaactgatgggatgacttggtgagattttgataaagttttcagggagcaatattttagtctatctcacatgagggctctaattagagtattatatgatttaagacaaggggatatgactgtgaatgagtttcacatgaagtttgtagagttatctcctcttatgcatatcctgtgttgttgaccaacccttggtgattgaacagttcatgcgtcgtttaaggcctgcgatacgtggttcaatagcccctttgacctttaacaacctaactgagtgtgtgacaacagccttgcgaactgaggctcatttagaagggaatgagaagaagaacacaagcagaggaaaaggaaatgaccgaaagatgaccaagaagaatcaagggcagtggtcccaaggacaacaatttag

SEQ ID NO: 155526 - DNA, 715 bp, Cannabis sativa
atttttatgggttttaaggtataaatttataaaaatatagattattatcaaaaaagtttttttacgaaaataaaataaaataaaaagttaaaaaatatgagaagacagtattaaggtaactagttactctaaggatacccaacctagttctccatgtcattgttttaacaataaaaattaaccgtttgtaattgcaacaaaatataaacattatgtattagtaccaaaaaaatttttaaatataacactgcaacaattgaaaagatataaatatccctaaaaaaagtttatataagtaaaaataagcaatcctaaattaatagcatcatgaattaaaaaattattacattaatttcactaaagagtcacactactacaaaataaacctttagagacggttttttttcaacaaattaataaaatttcaataaaaacacatacggagtcggttattttgtaataacaggctccgtaagtaataattttttttttttaataaaaaaatactacggagtcaatattttgtaataactgactccgtaagtgtttttttttaattttaataaaaaatacatatggcatcatttattttgtaataatcgactccatatgtttttatataaacctctccaactatcgtcttcctcaaaccctaaaataaccagcagccattcttcctctcaaacccaagaaaccctcacccaaccaccccttt

SEQ ID NO: 155527 - DNA, 504 bp, Cannabis sativa
tcaacaaattatgggggcattgctgttgggcaccttgtgtgcagctcattttataagtgacgcttgattagtgatatttttaaaaactattttttaaaattatataagacctgatactaaaggcaataaaggtacttagacaccagtaatacttattaacaattttccaaattataatagcagtgttttattttagaataaattaatgttttacctcccaaattgaaattttgtaaggaaaatttgaaattctatacttaattaaccttaaaattatcttcctaaacataaatgttttaaaattgcccatatatgaccacttttctactatgcccaaaataccctctttatttacttcaccccctccctctcacttcttctctctttccttctcttttcttttctctgtgcccgtagctacaccacaaagggaagctcaaatttttgctcttctctattctcattcttttcacctcactacactagcagctactacactacaag

SEQ ID NO: 155528 - DNA, 587 bp, Cannabis sativa
aaacatctagaaattcccgaaccaccttgatttcttttggcagaacagagtcaggctgagtggtatctaataccatggccagaaaccctagacatccctctcgtaacaattccctggctgttagtactgaaattaccaggatccgagatccctgaaccgatccgacaaaaacaaacggttcttcgccttttggttggaaggtcaccatcttccttttacaatcattattggctgagtacttgaacaagatatccattcccagtataatatcaaaatccactaaattcatttctattaaatcatcactcaactctatatcctctattctgatcggtataaatgttacgaaaattgtaaatagtacgcaagtgcacgtaatcaagtagtaaactcacacaagtgaggtcgaacgacagggaactggattgaatttggaaaaccaataggttttataaatagaaactcaataataattcaagaaacttaagcaaacagataaagattaatcaaaatgagaaaatagggaagagaatcctgttgatttgcttctccaattgttaataactaattgctatcctttttcttga

SEQ ID NO: 155529 - DNA, 529 bp, Cannabis sativa
  modified_base (311)..(329): a, c, t, g, unknown or other
cactcacttttgaggacaacaagctattagaatcacatcctagtatttttagtatagcgggacaatagtttagacattgagaatgtcgggaatagtaaggatgttagagttttccaaaataccccttagtgccattttatgacttttagtgtgggaggggcaaaatggtcattttgccacatttgtcctttgtcttttgtgagttgggatttaagtttattaatcatatttttattacttttattagctgatttttaattcaaatacaaccaatttttaataatcattttacaaaaaaaaaaaagaagaannnnnnnnnnnnnnnnnnnaagaagaagaagaagaaaggctttcccttttgcatctctctctttctctctctcgaaaatcctagggcagctagggttctttattttcttcatcaatttcctgtgattttcagcagctcttagtgaattcaagctaagataagcttctagacaactttcctttggttttcttgaacttcaagttatgaaattatgcatgt

SEQ ID NO: 155530 - DNA, 602 bp, Cannabis sativa
attgcagttaatttcccttcttcacttaactgtgcaaccttcattgcctccgtcatgaatttgctgatataagctcggataggttctcctggccttcgttttacttcgaccaggtcttctaaatgcaatgagagttggcgagcagaagagaattgtgcatggaattctgaggagaaagccttccaagagttgaacctttccggtgtcaacttgaaataccattgctgggcggcttccgagattgtagcaggaaaaagtctgcaacatacatctcctcgtactccttgtaggtccatttgcatttcaaaatatttgagatgtgataagggatcttctttcccagtatacatcttccatgtcggcatcttaaacttgtgaggcaactctataacattgttctctggagaaaaaggggatccacgtgctcggtccaactccaggtcattgtttttctgaccggccagaccttggaacatgttttttagttcatccaactgtgcttgcacggatggattagcttgttcgccctcttggtcgaccagggtcacgccaggatctctttgagctagattttgagcacgggccccaggctgagtggctgg

SEQ ID NO: 155531 - DNA, 687 bp, Cannabis sativa
ctctaacattctatttttaatttggttgatttaaataattggtttttcagttatagtttaaactagataactattgtaactggtttcagtgtgtcgaattccaacgtccaacaccagtgataactctaatgtctaactccggtgacttttcgataatgaagacaactctgatgaatttttttgatgatttttttacgacgataacaacttcggcaaatattctcattctattttttacttcttttttgcaactaatattttattttagtggatatataatgactatttttagtagtgtagtgggttgatggttaagtcttagagcttttaagaagtttgtaactagttttattttggtattgtattcgatttgttccatatttcatatagtatatagaatacaagcatgtataatttatttataatttttggtatctgtaattggttttttttttttcattaagataacaactctagtgaatatactcttattatattttctacttcttttgcggttaatattatactttagtgaatagtgaatgttttggtagcgggttgatggtctagtagtagtagattttctaagaaatttgtaactggttttaatatgtatagttggatttttcattaagaaaatggttttgattatataaaagatattgttacttaatttattgccttaac

SEQ ID NO: 155532 - DNA, 624 bp, Cannabis sativa
  modified_base (373)..(374): a, c, t, g, unknown or other
caaaaagaatacgtatcaaagtaaacatatgtatttaaaacatcctgacccaaagggcaggtccaaaaaaaaaaatatatgtaacatacaaagggcctgggggcggaccataataattgtctccacttagaaaataaacagctaaataattaagattgtctcaaagaaaagaaaaatggctgtaaataataataagaaaaagaagagatatgataacaaagaaatgggttggactcagcagcctaatcaatgcgaggaggaagacgagggccccgacgtgcttcaagcatagcatcaagccttttcttcttctcccggaatttggcaagagcctcttcaagcttgggatagaagtcaagcttaatactttggnnatttgactgccaggccatgtagacaccgtcgtcgaagcacttaacgcactgcttgcaggagacgggggttatgagctcatctcttttagccttcttcaaggcctggtctctgaagtctctcagctccttcaactccactgtcaagttggccttagactgtaagtccgcatggtgcaactcctctaaggacttcaccttagcagccatttcgtccatggcttccctggcctcccgaagctcgcgcctagcc

SEQ ID NO: 155533 - DNA, 696 bp, Cannabis sativa
atttatttaattcaaattactaatttatataactctaaatataaattttaatttaatattaataaaattataccctaggaagatctaaaaaatagaaatttattttccacctttagtataaattttctaacaaatattatgaaaattacttaatttaagttggtctaaaattaataaataattaactttcaactcaaactaaattttctataaatatatgtatgatagaatttgaaatctaatgtatttaaataatacattttcgaaatcttattaaaataaaaaaaaatgaaaaaattattctaatttatgttggtctaaaattaactaataaattaattttcaacataaatattattttcctatttaattaaatctctaagaaaaatatcaaatatttaagtggcttgaacaaaatcaaattaaaaattaattttctatttaattaaatatatcttgaaaataccaaaagtctacctaaaaaagatctatatagatatttcataaactaaatacttatttttttaagtaaaatataatatattttagtctatatattttattaaatcattaataaaaactacttgatttaagtttatctaaaattaattaacaaattaattttctactttaaacaaatgtcaaaattgaaaaatttcaaaatacctacatttaaaaataaatgtatttcaaaat

SEQ ID NO: 155534 - DNA, 552 bp, Cannabis sativa
aataaaataagagagaaaaaaaaagaggcaagtttaaggctaagtttggggtgtaccattcctaaccaaagaaaaatgttgttgttttttttctctttctctctttatctagttgatttgaaaaaatataatacatatatatatagtacatacatataggaagagagtgggaactagatgtagtgaacattttgggttgaaaatgaatttttgggtgagcgcttgagagaagaagaagtccttaacaaattgaggtagttaggtcatgagcctaaaaatatcatcctttaccaaacccgaacctaaacctcacatttcaagcctgttaaattccttttgatctaagttgtaaagctaagctacattagtggagaggatttcactagctcaacttatggaagcatactttttaaacttgaggatcgaggggtagttgttatagaaattcaaggtgtgggtgggaagtatttacacactttattgattgaattactcttggtaagttttaaggtcatagatagcatgcaaaattctgttgaaacacacaagtca

SEQ ID NO: 155535 - DNA, 602 bp, Cannabis sativa
ttctaatgatcaaactattaataaatttaatttctattatatcttggtgtgtttttacatttttgtgctttgattacttgtttgtattgcttgttcttctttgctatcattttgtggtgttacattacatgtaatttcttctattttttgaaaaataaataaatgtgtgctaataattgaattattgaactgtcaaatatgttatagagttaagtatgcaacttgaattaattttatattccaattgttcaattgaattggtggaatatagtcattatatgatttcatttttaatcatcaataattttacaattaattaatttgtaattaatattagagaaattgcgcataaatacctaagtttaacttttttataaataaataactaagagtatttccaatatagagttataaatatagtgtattgctatttttttagaatattttgctaaaatttaactccaataattatataaaatgtgtgtcgaacttgacccaagctaaaaattatgtcaaattttacacaaaaataagatgagccaaattttagctcaataagtactatattttttaattactttttgtcattcattgatgaaaaa

SEQ ID NO: 155536 - DNA, 514 bp, Cannabis sativa
tggtaaaataatttccaataggtccaagtccaggtccaagtccttgtttcggtcccgttctcggggctcgatctacttgtggtttcagttccaattttgggacacatggtacgggttcgggtccatgtttgtgtctaggactgggtttgggtccgggtctgagtttggttcctgctctaggttcaggtccggggctgggtcctagatccaaacatcaactacgggctcggtctagttccatttcgggtgcttggtcacgagctgggtcctatgttcaagtccgggtctggggtcggctcttgggtcccggtcctagttctgtttcctaggtctctatcccgattctgagtccacgtctcggttctggtctgggattgggtcccaatctaggtttgggtcgaggtcctaattacagtttgggttttggtctcgttatgtgtatttttttgggtttgggtcctggtccgtgtcctggtcctagtcctagtcaggttccaattccaattgtgattcc

SEQ ID NO: 155537 - DNA, 611 bp, Cannabis sativa
ctaaagggaaagcgggggcaaaagagaagtgatttgaattcaagaaaattactctatgtttatcttttgttgtttagctaggatatgatataatacattgatattttgttgtaggcttctctatgtgtttggtttttttttttttatgttgtttagccagaacttaaagcagttgttggtgtattgcttatggctatttttatgttttttttttatgtgttgttagcctaaattacacaacaatgttggttcattactgaatctttatattctatataatgttgatattatatacaggtgtgatattgattttattattattattatttttctttgtatttcaaatgattattaacattttttatacaatggtaagacaaaagaatcaacatgtacatctgttttcaaatgtatttttatacatcaaccaatttctatatgttttaatagtttacaactttacttttgccattctatgaaattcaaaactaaacatttcagtatcaaatcgattcagttaaaatgtattcctgagttcatttattcaatataaaccaaattcaaagctaatcatctcaatagcaatcattgtttaaaattccttatttttt

SEQ ID NO: 155538 - DNA, 519 bp, Cannabis sativa
  modified_base (462)..(487): a, c, t, g, unknown or other
tcaagattcggatcccaatcttgggtctcggtctcgttctgattcggatactgggtcctagtccgtgtctgtgtacgtgtccgtgtccgggtctgggtccgggtcgcggactgaaaccggggtcgggtcttgggtcccaatcccactcctgggtcccgattttggttctaatttcaagtttggttccccaatctagggttgggacttgggtccaagtctgagtctccaatcccggtccgggttgtgcgtctgggtttgggtccaagtccgtgtttgggtttcggtttgtgtcctgagtcccgatctgagttttaattcggctccgtgtcccggtccaggtctgggtcttggtcctagtcagattctagttccgggaatgagactgggtcccagtccctcggtcttgttcccgggttcgggtacgcttacaattccgcatccagtttcgggtcacggggtacnnnnnnnnnnnnnnnnnnnnnnnnnngttcaggtttaggtctgagtctgggtctgggt

SEQ ID NO: 155539 - DNA, 703 bp, Cannabis sativa
  modified_base (513)..(518): a, c, t, g, unknown or other
tattaaagtaatctagataattttggaaaataaccagataatttatcaactttcaaaaattagttattttatttaaattaaattataaaattagataaatgatgttaatttatcattttattttattggatatttaattttattttcttttaaaaataaaataaattttgaaaggttagttataattttgaatagatatttaggtttgttataaacgtattttttaaatttataggtttaattttaaaatttaataatttaatttatttttaaaaaataatatttatttatttagatttttcgaaaaattaatttaatttaattatttaaattaagttaaataaatcctataaccaactatccaatgttgttgcatgtgtattttatttattgtttctattcaaacttattttataaaatctattattgtttgatctaaattgctacggttaacttgttcacagatctaatgatataattttaaccatagtccaattgtcaatagatcaaatnnnnnntttgtaacaagtaaattttgtaatctttttttcatctgtgcataaacctagtaacatgataggatccatccaaatcagtatgtgcatgtgcctatatgtttactttgggcctagatgcatatagggagggagcccatttaattttgataattaaaattgactaggttgctaaaataaaattgtca

SEQ ID NO: 155540 - DNA, 596 bp, Cannabis sativa
agtcaggccattaggctttcagaatgacatctcatctaggcaaagaatagtccagtgaagagaaaatcagtttaccttcaagtgatacttctgaaaaggtaattaataggcctctagatgtcaagcctgaatcaacactcatttaatattgaatcccaccatattaggactttgtctacaaaatcaagccaaagatcatgcatctttgtctacaaaatcaagccaaagatcatgcattccataaaagaaaaatatggtttttgtcaatcagtcattaaattatctttactatatgcaaagatggcacacgtttcttacttgccatcatcaagcagattccacatgtacaaataactattgtctcgtgggttgggcctcaccaaatcggtcacatgtcaatatattatttgtatttacctcattagtggaccatgtatacatacaaaccctagtttataaatataacgataattcttcatgcaaaagattcgagatttacttcttacaagctaaggctaaaattagggttcataaactagacaagaatacttgtgtaatactcaaaggcttttctagccaaataatattgacttgtg

SEQ ID NO: 155541 - DNA, 838 bp, Cannabis sativa
  modified_base (660)..(661): a, c, t, g, unknown or other
ttcctctcttccacggccaggatgacttcttcttgctcgtgccaagctgtccgggcatacctctcccgagctttgcccgaatccccggtattgtgtgggcctccaataattacttgtaagtgtccatctacaggtggaggtagcaaatcttggttgttttgaccttggttggtcttgacatacttctgtaggtgcggattgtttttctttattagaaattcaatttcttgctttgaattgtaacattcgttggtgtcatggtcgtagtctccgtggaaccgacaaaattttgtcatgtcccttttgttgatgtctttcttcatgggctcgggcttcttgtacgaaattaacaactgagttgccatatatacactctctatatcttcagttagaatagtgaatgtagtgtgtttagcatgatcatggggagtctgtccggacttatcggtgaactttcctttcttctcatttccttgcttgtggttattgcttgaacgcttgccacttgaattgttcgaataggtgggaagttgggcggatgttctagtggaaggagctttcgttttgcttgtcttttgctcaccttttgctcattgaatggcctcttcgagcttgatgaagccttcggctcggtcaaggaaatcactcattgagtctacnngccagttcttccttatatccttccaaagttcaccaaggacttcaatgccccctagtatcgcggataactttccatcctcggttacctgcgaaacattgctcactcccgtcatgaatctgctgatgtatgcccggagtggctcgcttggtcattgctttacttcgaccaaatctccca

SEQ ID NO: 155542 - DNA, 530 bp, Cannabis sativa
  modified_base (102)..(103): a, c, t, g, unknown or other
gattttttaggattttcctcaatgcccctcccgttaactatgaatcccaacaattttcctgaggtgactccaaaggaacattttttagggtttagcttcatnntatacttttttaatattttaaagcattctgtgaggtttgaggtatgatccttactctttgttgatttaaccaacatattgtcgacgtaaacttccatgttttgccctatttgatttgcgaacatttcatttactagtcgctgatatgttgccccagcgttcttcagcctgaacggcatgactttataacaatagagtcccatgttggttacaaagcttttatgttcttgatttgggacatacatttttatctggttatatccagaatatgcgtccataaaagacataagctcgagcctagcagttgcatccactaactattcgatcctgggaagtggaaaagagtctttcgggcaccccttattcagagtagagaaatcaatacaagctctccaagttccgttaggtttcgggacgagaataggatt

SEQ ID NO: 155543 - DNA, 500 bp, Cannabis sativa
aattctaccaaaaattggctttttgtttcaatgaaaaacgaatttttgaatcaaaagttatgaagaaaataaaattggtgcaattgcatacccctgcgcgcgcggaatcaagggacggccgatctttgaggctgcatgaagccttcttgaccgagggagctcggtgagactcatcttcagacagcccgtgtctgagtttcctcggtcaggctgtctgaaaccgcgtggaaatgccgagatatccctttgtgcgcgcgtgtgtgcaacctgatttcaaatattttcattcaacttcaaaaaatcataactaattcataaaatatccaaattaggttctgtaaaaacctaaatttattaatttttcgtgtactttccagaaaaaataattccagagcaaaataaaaaaaatcctagaattcctgaacttaattttcaattcaaaagatattcaaatttaagttgataagaaaaattagttagtaataactaatttataactt

SEQ ID NO: 155544 - DNA, 626 bp, Cannabis sativa
tttattttttttttttttgtttgttttagtgttgttttccataatttatttttttttaatgtcgatttcactgttcttgttctactttgctggaattaatgattgttttctgggtgttctcgtggtgctgtggtggttctatctgtgggtgtggaagatagaggctataaaatatatttcttcttccttctctatggttattttatggttattttttattttagttctcctaaaaatacatttaacgagctcactagaaaaaaaaagttttaaggtgtgtggttcttttatgtttttctaagtgattatatctccttatttttttacatttgtttttgtgttgttttagtagtttttttgttctgattttttaagagtgagcttgcaaatataactattattgcatttggtatagaggttgtgcaaaacatttttttagttttttttaatcatgtttttctttcttttgtttgatttgtttaagtgttgttttacagttatttttgccatgattatttatttgacgttgatttcacttttttttttctcactcatcagaattaatggttgttttctgattgttatagtgttcctgtggtggctctgtccgtgggtgtggaagatgg

SEQ ID NO: 155545 - DNA, 596 bp, Cannabis sativa
tggatgaatagaggctatatctcaatgtgtgtgaaagccatctttgagtaagttggaactatgtaattgggagttatgtggaagatacgctaccattcaaaagggctaccattgaggtagtgtgacaacgtctcctatggttacaatttattagaaaaagtctttttgacaatttgggcaatgttctttgcttacactttcacacacttatgctttacacagtttgtggtaaaagtttcatttcttcgaaaatagtgttataaagctgttacatactgcttgatttgctttaatattcttggtgattgagtttattttttcttgcataaccggtatgacgtcattctactatttcttagcttgataaaataatttctgactattcttgtgagtttgattttttcatcagggacaaagacaagcggacattgtgaactttagttgcaaaaatatcaaggttattttaattttctatcttttaaaaaaaacaattgtgaccaattctgtcaattgagctttgttaaaaattcttgtaatttttcttgttctgtttcattattttcttagacacgatatttgctcttaagtgttgattg

SEQ ID NO: 155546 - DNA, 621 bp, Cannabis sativa
attaaaataaaaaactaaaatattaaataaaactaacactacgtggcttggcacgtaacaatcacctagtagatatataaatatagatagatacggatatatacatagataaatatatagatagatagataactatagatataaatataaagtgaaaataattatactctagttacaaattttataggtataaaaccagcaaagtcatcctagctaacacatattatggtagaacgttaaatagaatgtaagagtcttaagaattaaatgataaattcaaactctgttatataaaatctttaagttattataatggttaaaaaaatcataatgattaagttatggaagtgtaagagttttatggattaattgtcaaaataattttcataatataaaaaattaaagcacattaaaacagaaaatataataaaaactaatgaaataatatgaaaaaatgagagagctaaaattaggaaaaaagatcatatagattgtcacctcaactccttaattctttcctttatacatatactagggaacaaagccgcgcttcgcgcgggttcgaccctagttttgcaaactttattttaatccttctcctgaagttactcgagacactgc

SEQ ID NO: 155547 - DNA, 619 bp, Cannabis sativa
cttaaagataagatgctcaagcgagtacagagttgggaaggtcgtatattatcaaaggctggtcgtgaggttttgctcaaaacggtggcttaagcgttgccaacttatgcattgtctgtgtttcttcttccggttaagactgtttcacaccttgagagcttaatgtcaaagtattggtgggggtcctctaataatagaacaaaacatgtcagttggtttagttggcgtcgactttgtagaagcaagaattcaggtggtattggctttcgtaatttccaggattataatctttccttgttaggaaagcagggatggcgccttcttttgtatgaagattctcttgtgggacgtatttacaaggcccgatactttcctaatggtaattttcttactgcggagataggtccgaacccaagttttatttggcggagtgtgtttgaatcacaacgactggttcgtgatggtgctagaaggagaatcgggtctggtgtatctacccatgtgcttaatgtcccttggctgtttctgatgagaacccttgtgtcatttctagtcatcctaggttggcccatagtacggtttcgcagttgatgcacatcgatcgtaagcaatgggatct

SEQ ID NO: 155548 - DNA, 604 bp, Cannabis sativa
agtgcatgtggtatttttgtaaatatttgtatgtagactagataaatgtttaatgggtcagcccatagtatttttgtaatttttgttgagaaaattacctctacaagagaactttttcaaatatttacaaagatacatcctaatgtcttaatactaaccatttaacgaatttcttgtcaataaaatggtacacctgtaccgagaatcttcttactcttttcttgttctttttgtcaactttgactattttttttctttctaacatcatctcacttcattaatttgcttctttttttcttttatttatttatttattttattttctcaaaagcttataaaatttgtaaaaatctatctaaaccaaaaaaaaaaaaaaaattcaagattcactagtaataatttaaactaaaaaaattataccattataatttacttttttaaggtaattattatgatatgcagaaagtataaattgtttcaacattttctcgaaaacatgattgatataaaaataacttattagtttctttttctttttaatttaattaactaaattttaaaatcaacaaaattagatatgtcaattgttaattccatttttagc

SEQ ID NO: 155549 - DNA, 557 bp, Cannabis sativa
tactgtatgcttagtacactaggctgagtttgcctgagtgacatcgtaagtcgcaggaggcacttttgttgaaaaggaagcttgttggcaagggtgtggaagtattacaagggctgtcagatctttgttagtcacgacagtggtcgagagttgatgaccgagattgttcaaagtggggcaaacatggaatgctttagttgctatatggtgtgtcaagagggacgcacatggagaccaaggggggagaggccgcaattgtcagatgattattgtatttggaggtattcgcatgtgacttttatttgatccatatggaagcgctgagacaattgagtggaatgtgttggcttgtaaaagcgacagagggcgcaagtcacacaaaggcatcaatggagatgcgaagttgtggaatgaatgcatctaagaagccagcatggctgagttgatcgagcgcaagcgtttagatggcactagagtttgtgtgttgaccagagggccgtgccagtgagacttagtagtcatgtgagcctgcgaaggtcgagaagggtgctagagtt

SEQ ID NO: 155550 - DNA, 531 bp, Cannabis sativa
tgtaaaatgtaggagtctctcaacgctaagaattttttattaataagaaggttgtataaaaattgttgattcttttaattttttgtcagttattttacacttaatgagtcatataataagttttttatattattatttcttttatttttctatttgtcaatcatattatagtgaatgtgaaatatgatttattttacatgaaatctaatgtactacaaaaaaaaactttaatttataagtttaagaaccaatagagtaatggttctttgtacagtacaaaatttaaaaattgttgcaaccacatgtaaatatagaccactttcaatgaatataaaatgttattttgcccgcaacttcagtgaagagattagaagaaaaaatagttaatattccattgaatggctttcaaccaggggtgcaaaaagtcatccaatcaaattacaaccgatcaatccaatctcaaccgatctaatagaatcgaatatccaatcataattagatcacattatatgtaaattttaaaaatctaat

SEQ ID NO: 155551 - DNA, 523 bp, Cannabis sativa
  modified_base (480)..(498): a, c, t, g, unknown or other
gtgagctccccagggtgacacacttagccgtgaaaaccctaggtcaagcatcccctgaagttaaatcttcaattctttgagtttggccggagccattctgtaggtgctttagaaactggttctgttctgggtgctaaattgataacaaaattgatttcccgctgcgatggtaaacttgaatgtttatcaggaaagatatctaaaaattcctgaacaaccctgatatcctttggtcgaactgtctcaggccgtgtggtatccaataccactactagaaatcctagacatctatcttgtaacagttctctagctttcagtactgagattattggaattcaggatccccaaacagatcccacaaatacaaacagctcctcaatctcgggttggaaaatcaccatcttccgtttacaatcaataattgctgagtacattgataagaaatccattccaactataatatcaaaatccactaaaccnnnnnnnnnnnnnnnnnnntcaactccctatcctcaattctgat

SEQ ID NO: 155552 - DNA, 801 bp, Cannabis sativa
ttcttactgttttaatttgaaattgttgctgaaatggaagtggataaataggtctttgagctttgaatgttcttgagatgcatgtatgttgatattagtgtaatttatgatcctctatgcttgattgtgttaaagattgatgtgagatgctttatgctatgttttgagaggaattttgagtttagattggttctctaattaatttgtgcagctctgaatttatagttgagttttttgttcttgtgtttaagctcttgaagttgggattttggtgaatcttgcttaatttttggagcctagtttttgtgttgttaaatctaaatttagagggtctatattgctggattttgatgcatgaaatttgtgttttaactctatgttatgttagttatattatgtgggaaatgattttgagatatatgcatgtttggggtgagtttgggtgagtttttgtacatttttcgagctgttgaaatagagtttctgggtttttaacccaggcgtcgcggcctgctcgcgtggacagattgcatgttgaacttgttttgttcataacttttgactcgggactccgtttgggacattctttatatcgttgctcgttccgagctctatatgtttatctgcattttgaatgccaattttatattatgtgaaagtgtatttagggattaaccctatacttgtgaatcctataattgtgactaggattacgggcacttggtcaggagcacccagggatttggaatctccacatttgcgggacatcaggtaagatagtagttagcacgtagagttatg

SEQ ID NO: 155553 - DNA, 666 bp, Cannabis sativa
tcatgtggtttatgtgttatttgatgaatgtatgtgttgtacaaaacctttttccataaaaaaaaatattttttctgttttttcaaataatttatttggattccttgtgaaaaattaagcaatttatgtttttacggaacttaattccgataaaaaacgaagaagttatgaattttgaaaaatcgggtgtccatgggtgcttaatcgcacatcaggctttggacaaggaagccgtgcgggcgcgtgcttcagacaattccttgtctgaacccgtgcgtctcgccccagcagcctgcatccgccaatacgactccctgcaggcgccgagttttctcggctgggatcttgctgtccgcgcgcgctcaaggctgcgtgcagccttccagggctccatgtgcagcctactgggcagcgaacccaattttgcaattttcatgggatttttcccaaaaaatcaaatttttctaattttcaaaccccaaatttaaactaaaatattatttttaaatatatttgaactgaaatatgatatttgaaattaataatatttatttttcaataaaatattattaattttgatattttgaggtttaaatttaaaaagcgatgattttattttttaaactatggtgagatttaaaaatttgttaatttctttaatattta

SEQ ID NO: 155554 - DNA, 572 bp, Cannabis sativa
  modified_base (298)..(310): a, c, t, g, unknown or other
aattatttcggatactaaaacagaaagagatgtatcggtatatcccttttaaaagtgtgcattatagaatttcccaaatatttattctatttataaatttggaaaattctacaatgcaccccttaaaattgatatatagatgtactcttatctgttttagcacttaaaataatttttagttaatttttttttcatggtcatgtacgttataattatttaagacatcttgcaaaattttaagaaatttagaaaagtttaacatgccgaaaaatatgttcaaacagtgtgttgcacgcgnnnnnnnnnnnnnttatacgcgtgtaaaatagacagtttgaacattgttttctatattgtaaattatactgaatttctcaaaattttgtaggttatcttcaatagctataacgtacatgaatataaaaaaaaaattagactaaaaaattcttctggatgccgaaacaaatcaagcatgtatcaatacattctttttaagggggtgcattgtagaattactataactaagattttatattgcatatatataaatgctaggggggccatggccacta

SEQ ID NO: 155555 - DNA, 550 bp, Cannabis sativa
cagccaataaaccaaagaaaaactcattcaaccaatacatgccattaaagatcaaagctttgaattgaaagctcaaagttgcataaaacctattccaaccatccaaacctgctacaaggagctaatacttactcaattgaaccctataatttgaaacctaagcataactaaacctaatagccactaaatccttaaatcataaactcaaaccaagcaaaaacttaaaaaactaaagaaggattcttctagggcttaccttagcctacttctcccaaggtttccttgctgaaatcaccagaaatcagcagctccttcccttgatcttgccggtttcgaagagagagagagaagaaacagagctttctcttgaattttttggtattttccttctaatttcactaaatgaaatgaaatgaataataggaaaaagaaataattttcttgttgaaaagttaaacttgctaggagtcatcctcaaaatcagccacctatcccaccattaaaattactaaaataccccttaaacaaaaaactagggtatttctaaagc

SEQ ID NO: 155556 - DNA, 560 bp, Cannabis sativa
tgtatgcctcgattgttgttgatattatttggaggacgcgcaatgagaaggtccataataactgttctcctgattttaaaaaatgtattgataatatttgtacttcttatgcagatatacatgtttctttgcttcctagtcccactccagatctaaaagaagcttggtcccctcctcctcaggattggattaagctaaattgtgatgtcaaggtgggatttaatagtatgtgcattgctgttgttgcaagggatcattttggcagagtcattagaattcagacggctcgggaagacttctcggatgtcctctatggagaagctgcagcttgttgcttggctgtctcggtagccttagatattggttctaaatttgtgattgtggagaacgactcgagtgtggttatcaatgctatcaatgggaatgactctcgttgggcgcttgaaaactacatctcattttgtactaagtcttctccctgttttattagttgtaactttgcttatattagtagatcttgtaactttgccgctcacaatgtggctagatgggcgtttgct

SEQ ID NO: 155557 - DNA, 681 bp, Cannabis sativa
  modified_base (392)..(393): a, c, t, g, unknown or other
gctatgttaaaagtttcatccaaattgtaaaattgttaaatttaagaatttttgtttagttttattaacataagtttatagtttggtatatgttaaaatttgggagacacgatgtggtagtatcaaaatttggggcatgatttagtacatgatcaattgttatgttagtaaaatttaatggaattagataagagtttttgaatctaataattttaatagtttataagaaattaaaaagatcggggcatctgtagatccgtatgtgcattcgggtcaccctgagttacaagacaaaacagttcacagtctctttcgtttggatggtaaggagtgggacatggaaatcataaatgacttgttctctgcccgagacagggctcttattacatctnnacagctgagctcaaacaatcatagtgattgctagtcttggaggttcgagaagagtggtctatttactgtaaaaagtgtgtatcggttcttggaaaatctcaagtatgattgggtgggtgatacaacactagtttttggaggaaaatgtggacattaaagattccccaaaggttagtaattttgcttggccagcagtttcgggtaccctcccaacctgtttgcaacttctcaagcgtcatgtggttattagtcccatttgtccgatatgtcaggaggctgaggaatcta

SEQ ID NO: 155558 - DNA, 554 bp, Cannabis sativa
  modified_base (58)..(65): a, c, t, g, unknown or other
gggaatgggaatggcaatggcaacgggaatggagatggggatgggaatgggaatgggnnnnnnnntgggaatgggaataagaatgggaattggaatgggaatgcctagaggaatgggaatcggaatgggaattggggtttgtggtttagggtttggggtttggggtttaggtttagggtttaggatttagggttgttgttagggttggggtttgggggttagaggttagggtttggggtagggttgggggtaggggtagggtaggggtttgggatcaggggttcatgggttagggttcttggtttagggtttagtgtttaggggaatgggaatgagaattgaataaaataaaatttaaaaagcataaaaaaggttataaaaatcattaaatgttttctcatgttagtctggaatggtatttccttctattataccttgaaatccggatggcactataaaggatgacgcatgttaaccttagagaatacgtatcaacgaatgtaatggcagatattaatttgtactctaagacttgaatatgaagattggttttg

SEQ ID NO: 155559 - DNA, 646 bp, Cannabis sativa
aatagcaggtaataagtttcttaagggcgaatcaggatcagttcgcctggagccatggagatatggtggggattggccctagtattatttgccatcatttaactgtcgatccaaactagccagcaaaaaggcagaaaaggagacccttggattccgagaggcaaggggcactaaaacaggaagtggacaggttattggtcaataactttatatgcgaggtgttttatccctcgtggatagccaatcctattcttgtcccgaaacctaacagaacttggagaacttttattgatttttctgatctgaataaggcatgcccaaaagactgtttcccactacccaggatcgacaagttggtggatgcaactgttgggcacgagcttatgtcatttatggatgcatactctggatataagcagataaaaatgtaagccccagatcaagaacatacgagcttcataactaacatgggactctactggtacaaagtcatgtcgtttgggttgaagaacgctggggcaacatatcaacgattggtgaacgggatgtttacaaattagattggaaggaacatggaggtgtacgtcgataatatgttagtaaagttagtaaaaagtgggagtcataccacagacctcgcggaatg

SEQ ID NO: 155560 - DNA, 587 bp, Cannabis sativa
aggtggaggccttgaagaagattctgcgggaggagcatcagaacactctaaatgaggacgccttccaaaatctgtgggacttgaacatggatctgctaacagactagttcaatcgcttcctcgggcccaccttggctccctttgcctcggagattactagcgagttcatctcccatctgactcagttcccgcctaagaggtatgccgcttgtgcctcccaaaactccatctaccaggttcacgacatcagctctgccatggctgcggtaggtgcttgtgatttattccttcccttgatattttgtctaaggcatccgatctcactttggtctccttttttagattactgcggagaccagccgcctttgcaagaccttaattaactagggcttcgtcatgtccgaatttgggggcatagacgaggccgtgaggatcctgcgggacttgtctgccgaaaggcgagcgatccaggaggaggctgaacgaaaggaggccttcgtggaggcgaagctcaaggaggaagctaaacaaagggaagcccaagcggagggaggctgagatggaggcgaggcaccgggaggcgctga

SEQ ID NO: 155561 - DNA, 658 bp, Cannabis sativa
  modified_base (597)..(618): a, c, t, g, unknown or other
ataggccaaccaggttcacctcccactgagatgaacttggctctaataccaactgtcacgggctcaccttttcaagcagcgaaatgcccgtacggcaccttaacttctctaagtcaatgtcagccttccaaccatccgagtaacaatgggctcatttttcgcgtgaccgtgtgcctcgtgaacacttctgtcgctcgaacaactcccgccgagtcatgcacgcaagcatccatgagtgcatccatgcatcgaggctctctagccaagatactcgcactgtgcataggttcccactatgataaggcaaatcccaacattgacgctcaccttgtcactcgtgaccaaggtagaatgtgtggcaagatgccaacaccaagccgacgtgcccccacttctatcatgccccattcgatactatctgaacagtctcgctcgtcgcccaaggactcccatacatccatggaccaatcctcaaggccccatgcctccacgcatgttggcagaccctcgagacaagccaccaaactagttgcatacactagacctctgtccctttctacttttctagcatcgtgttgggttttctgccctaaatannnnnnnnnnnnnnnnnnnnnnatttactagttaataaagatcaaaaataacattttatgtt

SEQ ID NO: 155562 - DNA, 537 bp, Cannabis sativa
catctcactattcaaggacacgaatttcattctgagagaacacacgagagaaacctagattcaagagtaaaatactctgttgacgcagtttttcgtcaacagatctaagaagatcgtaaaacgagcaagatgaacacaagatgaacataagaattttatagtggttcaccccctttcagcggtaatagactagtccacttagagtgttattgatctcaatgcttgaggagagttctccagagttatgttatccaagagttcactcctcaagtgaatttggtagaatttgagaatgggagctcaagaatatgatttcgtgagtatcaagtttagggtccctttacaagtgatttcacccctcttatatagattttcatctaggatttaaaatcccttattcataggtgtaccttctcataactatagttgggttaggttcaagatacaaaataataataaaataattatttaaaaaataaatatctcttcacttatcattttttgactattttcgggatagctttaagagcacgtgtc

SEQ ID NO: 155563 - DNA, 808 bp, Cannabis sativa
  modified_base (321)..(324): a, c, t, g, unknown or other
gtggagaaatatttggttatgcagttcaaagatcattaagttgaactttgaattgtattcaaacttaccttcccaaaaactttgattgcatattgatgaaagtataaggtctatgattagttactagcagctgcttgattccttctagggaaataccctagtgataggaaaacttcagaatgatagaatgattatgtacttagtatacaccaatactagattcagggatgtcctgatcatgaacttaagaaaggctagaactgtcaactaaggtttacaagtttgatagttattctaaaatgattaggggtggaccatccnnnngtcattaagataagaaagtgtttatttcaacaaatactatttttctaagaatatgactaaatcttagaacaaagtagcaaagtagaggagatattttttttattccaaaatgctctatcatcttaatctatataagatggtcccattgcctttattgtcttgatacaattgatggggataataccattagtgttcctaaatagcaagtcacagtaccttgtcgtagtgggagggtttcaaagaacccaccctgttatgacttggaagattattctcaaagttattcttctctggtgcctcgctattctttttcggccacatatggtttctcgttaatactctaagtactagttcgtacattgattcctcgcataagtctttacaggcaacgggttacaaatatactctagtacttactcaattaatgagttattccataaaaagatacgacaccgattcgcattctctttatcttgacacgtgt

SEQ ID NO: 155564 - DNA, 859 bp, Cannabis sativa
  modified_base (800)..(804): a, c, t, g, unknown or other
tttttttttttttttttttggccataacttttgactcgaaactctgtttgggacgttctttatatcgttggaaagctcgttccgagatctatgtgaatatctgaaatttcaattctagttttataatttgtggaaatagatttagggattaactctatacttgtgtatcttgggtttgtgactaggattaccgacacttggttaggagcccccgagaattcggaatctccatattttgtcggacatcaggtaataaagtagttatcacgtagagttaggcgcgatggcgcttacatggaatatgatatatatgaataactagaaaccgagattagagttattactctaaagtgagcgatttattagcctagggttattaccctcgtgaattttttataagtattgatatgccatgatatatgtatatatatttgagattatgaattgtgcggctaaggcataaatatgctagacttggtaaactagtagcttgagttttattaaatgcggtctagggttattaccctatgcgagcaaggcattaccgaattagactcggtaactataaccgagataaactctactaacaaccttattgtaaatagacgtttgagtgtaacacgtaggtctatgccacatagacataaatagacatgtgagcgtaacacgtaggtctatgccatatagacataaatagatgtgtgagcgtaacacgtagatctatgccacatagacataaataggcgtgtgagtattacacctgggtctgtgtcatacaaacaaatatgaaatggcattannnnntatgtgatgtattaattatgattattgataattatactttcttgctgggcttggc

SEQ ID NO: 155565 - DNA, 720 bp, Cannabis sativa
gtttatggcacttgtactatcacaaaaaatggtcagtgtgtgttgtgggtgtccataatcagtgagcattttgttcagccagattaattgagtgcagcagctaccatctgcaatatattctccttccgcagtagaaagtgagatcgactgttgttttttgctataccacgagataagattattccgaatgtaaaaacatccctctgacatgcttttcctatcatctagacatcctacccaatcagaatcactatatcctaccaaagttgtattcgtgtcacaactataccaaagacaatagttaaatgtcccagccagaaatttgaaaattcttttgaccgcagagagatgggactatttaggattggcttgatacctggcacataagcctatgctgaaggatatatcaggtcgactagctgtgagatacagtaatccacctatcatacttctgtatagagtggagtctacagggtgggcagactcatctcgtgacagtttggttgtagtgcctattggtgtatgtgcatacttgacatgtgaaaacccaaacttatctaacatagacttgacatatttggactgtgatatgatgtgccatgatctaattgttttatttgtagtcctagaaagaaattaaggtcacctatcaaactcatttcaaactcactagtgattaaggtgacaaatgtatgtacttcactttcacaagttgagcca

SEQ ID NO: 155566 - DNA, 522 bp, Cannabis sativa
tattattataatattatttataatataagttaacgtaagttattaagtttatatatatatattaagttattagtgaacagaacgaacgaaagaatgaaggaaaccctcgttctccctccttcgataaaaccttctccctttatatccatttttttcgattttcaattcaaaatttagcgatctaagctccggtagtatcaggatagcaaatccttaaagagggaaagcttaaggtatgatttaatttcattttaagtttaaaaataattggtttcgtataaggattttgtcaattagaacagttatgaaagttctgaccttatagaattgttcttgagtagtcatgggactagttccgatattttcttattgaatttgatgtaattttgaattataaatcgagattggaactttttaaagcttagtccgaacgttaatggcgtttttcatttaaggggtcgatttttatttctgttacgtaaggatggtagtatttatggcatacatgcaccctgtgaagtt

SEQ ID NO: 155567 - DNA, 607 bp, Cannabis sativa
tatgtcatctatgatggaagattatatcgcagaagcttcagtcagccgctactcaaatgtattgacggggaagattgcgactgcatactccgcgaggtgcacggatctgtgggaatcatactggtggtaattcccttgccttaaaaatcatgcgacaggggtattactggcctaccctgcgacaagaggctttcaacttcgcaaagaaatgcgacaaatgttagcgaatagccacgtatgccctttgcagtgtggggcatcgacttgataggtgaactaccaagaggaaaaggcggagtcaagtacgttgtagtcgcagtcgactattttacaaaatgggctgaggcaaaagcactaacaaccatcacagcggctaaattgcgcgagtttgtctacaactccataatctgtcgatttggcatcccttacaagctcatttcagataacagaaagcaatttgactgtaaggagatgcgacaattatgcgaagacttgggaatcaaaaaagcattttcagcaatcgcctatccgcagagtaacgggcaaactgaagcagtcaacaagataataaagcacaccatcaaaggaaaactcgaagagcgtaagg

SEQ ID NO: 155568 - DNA, 556 bp, Cannabis sativa
aaaaaaatatatattaaaccaaaaattattttacatgtcgaaacagataagagaatggacgatcgtgatgtacaagaatatttttcctattattatatagcaaatactaggaaaagataaattacatccaaagataattattttctcatgttataaccttgaaattgattgttctgcaattaataaattaaaaatttacatcaattatgtttttttgttctttatatttccaaaagaaactatatttattgtgttattttcttttaacttactcaatgtaataagaacccatgtgggcaatgaccaaaatcatcttcccaatcctaatccacaacatgatagcttctcatttccatgtgcctaagatgagaaatcatagtctaccaaacattataaataaatacatgaaaaaaatattgacttgtgtattcttttttctattttgtctcatattttttatagtgccatattcattttttaattaaagcaatttacgtgtaaatatttaaaattaattttcagttacaaataaatacttatttttaatttttaatta

SEQ ID NO: 155569 - DNA, 708 bp, Cannabis sativa
gaatagaagcaaatccaaacaagatccaagcccctttggacatgaagtcgcccacaatcatcaaggaaatacaaagcctgactggatgcattgctgcactaagcaaatctgtgtccaagtctacttacaagtgtttacccttcttccaaattcacaaaggcaataaaatatttgagtggacagaggaatgtgaaaaagccttccaagagctaaaaaaaagttggctcaaccacctgtgtttccaaaacccctagatagtgaagagctaggcgtgtacctagcagtcacaaaacatgatgcgagtgtagtcctaacaagagaagaaggcgaagtacaacaccctgtatactacattagcaaaagactaatcgatgttgaaattcggtacccactcatggagaagcttacctacagcttgctcttggcatccagaaagctgaggccatacttccaagcacacctaataaagatttacattgattaaccattgcgaaaagtttcatagaaacctgaagcatctggatgactactcaagtgggccattaaacttggccaatttgacatcatatattaaccaagaatggccataaagggttaagcccttctagacttcgtggacaagagtacaaacacacctcttgaaatctctcaagattcaagagaaaagtaagagccagagaagaagcgagagcaagaacagcaacaaaa

SEQ ID NO: 155570 - DNA, 668 bp, Cannabis sativa
tctatatttattctatataaagtgtggctatgtaacataatttttgatttaacgatgttttttaaatttttatgttaactttaatagaatatcctattaattaacaaaaaaaatctttattaattttataatattattatatatatttaaaaatcaaaattatatagatgttttatataaagaaattgttatttaaatttaaaataattaaaatattatagatatttttaattatatttttaaatttattagtttaacttagaattaaaaaaaattatataaatattttatatacataaatttaaatttaaaatattataaatatttttaaccatattttaacttttttttatttatattttaaattgaaatagttgtactaaggaattgattgctttctattttagttatggtaaactgattcacacaccatatttttcgtaaagtttaggagtaaaaaaatctttatatcaaatttacgaatccaatctatatataaacacactcaaatttgattatgtgagtttttgttaagaatatagtacattacaatatatgaattattagatacgttactgaattaagaaaattttaaaaatacgtatatataatcatatccaaatgacactccaatgtagcaatagctattttttttttcttaaagatca

SEQ ID NO: 155571 - DNA, 669 bp, Cannabis sativa
cttttgcttccaatcgactactctttgagcggctcgaatacttggagggtgaggtccacacgttattatcccaatgcaaggttgtgagtaagcaccgggataacgcccaacaagaaaacaaccgccttaggcaagaagctgagaaagtaaaggaggatgttgaaaaggcaaagaaggaagccaagaaggcaaaagaggaagtcgagaaggaaaaagaagaagtcgagaaggcaaaagtggaggctgagaagaccatcaaagcccaagcagatgagtttgagaagaagcttgctgaaaaagaagtcgagaccatagaacggtgcgacaaggttagtttttgcactgtatatcggacctggatggcgaaccctaatatggacaccagcttcttggaggaaaaagaagaggaaactttagccctttgcgagaataccatgatggaggaagaagatggcgaggtcgaggaagaagaagaagtagatctatccaagtcccccagcatgtagacttggttatttatttatctcccttttcttttttagaaaatggccccttgaccaagacaatggtttgcccctggtggcacttttattttgtaaagacagaatttgcaaggttagatggccaacttttttttttttttttttaatgcctttaagtttaaacttt

SEQ ID NO: 155572 - DNA, 1015 bp, Cannabis sativa
gagctacctcaggtactctgggcccatagaactaccgagaaaacagcaacgggacacactcctttctcgctagcatttggctcagaagcaatgttggctgttgaagtcaacatatcgactcacaaaagagagttttataatcaagagaaaaaccaggaactttggaaattgtccttggatctacgtgagggaaaatgaactgagtcgcaaatcaccaatgcatcataccaataccgagttacaagatactttaacaaaaaagtcaagaaaaaattattcaatgttggagacttggtgctaagacgagtatttgcaaatacgagagatgcatctgcaggagtgttcaacccaaattgggagagtccatatgtcatcgaagcagtagttggagttgttgtttataaattagctcaactcaacggctcgctaataaagaactactggaacgtagaacatttgcgaccctactactaataaataaatgatgtaactcgcattactgatgtaaaatttaaacttcagttataaataaagagaatcatttatattaagtaattacaaagttttattctttataaattacttaaggggcatttatgtatgattaatcggaattcatctagaaatacatggtataatgcaaacccaccatttcaattttttttttgaaattcaaaggtcctcgactaagcctctttgacgaaagtggagttaaactgttataactccctgaccaaacctttttgacgagagaggggtcgaattgttataacatcttgatcaaacctttttaacgaagaaggtatcaaacaactataatttttgatttaaaacctatctaacgggaaaggaaaatcaaaagttataactcgtgtataaaattgaatactaacaattctcctgagctaggaaagtactaaacgaggcatcacgacgccttgataaaagtacttaaacctagaaaatggatagataatataactattcgtatgagaaaattaaaaaatatacaaag

SEQ ID NO: 155573 - DNA, 574 bp, Cannabis sativa
gaagaggtactttcggtacttgtcctccgccatggcaataatgtcgtccgggaacaccttttctacggttggagccctcacgttcgggcagataactttggagaggttgaagtcatccaccgactggtgccccaaaatcaacttggccttccgacagttctctgtcgtgaccaactccccgacatcgagggccttcttgtcgtaagtggcaaaggtcttggcccgttgaagaaatatttgggtaggctcggtccgcatataaggagggatcctaacccactccgtgagaagctccgggcggtccatggcttggaaaacagaggagaagaagaagcggtgacgatactccttcacgtgcttctgctggttaaaagggattgggccctcaatcaaaggattggcccggaggccataaaaaccgtccttaagtttatctcccttttgggaatagaaacgagttcataaatatacaaaatttctgccggacttggcgtgccccagctccgtgtcgcataaaatataaaaaggcctgaaagcaggcggtaagcttgaggaataagttggtatggcgcaa

SEQ ID NO: 155574 - DNA, 826 bp, Cannabis sativa
  modified_base (526)..(529): a, c, t, g, unknown or other
gtcctcttcgatagagaattttatccatcatcacataacggtgcgcgtgatattgtatccttctggatagtgccttctcttggggcaactcgcctttcgttttgtatttgatgatggggactatccagctgggctcttgctcaactattgttatggtattcttgattttaatgcttggctctgccaagcgttccacgggcactacccccagtttttcaatttcgctgtctgaagctaacttagccaaacagtctgcgtgagcgttcttttctctggggattctttctacttcatagtccgtgaactcgtggagaagttcatggactattgctacatatgcagccatcttttctgcgtgcgtctgatattctcccgacacctggtttactaccagttgtgaatcgctgtagacttccactcttttggcccccacggcttttgctaatctcagtcctgctatcagggcttcgtattcagcctcattcttagaagctgtgaattcaaaccgtagggctgcctggagtcnnnntccgtttggggatatcattgcaacccctgctccggatccattctcgttagaggcgccatccacaaatactttccacgccaggacttgtggtacaagtatgttagcattagcctctacttcgtggcactctgtgatgaagtctgctagcgcctgcccttttatggaggtgtgtggcacgtaatgtagaccgaactggcttaactccatatcccatttgaggagtctcccggatgcctttggtttttgcaggacttgtcggagcgggtggttggctaacactttgattgggtgagcctg

SEQ ID NO: 155575 - DNA, 618 bp, Cannabis sativa
ttgataattgaagatagcatttgtctaaaaattgtagataagaaaactaatgatgctcattggtggaggttaatcttcctttgcttcgacaaagacaatagtgtaatttttgtatttttcacttttcattctagccgaaaccgcatataattggattgtccattttatcgttgataaattgaatttagtagtgtcgacaaagcggtgatgttcctgtaaatagtgatgttttttcacaagacttgagtgaagcactgatatttggaatctgacaataagaaagagaaagctggaaacaagaaaaagttaaagcgtttcaacattcattaaatacaaggaatattgctgatatatatatatatatatatatagatataaatatttgagttaagaagttaaagccacacacctttgtcaaagattttacatttatcaaagagtcgccaatttcaccaattgggtttttcgattgaactgcaagacaatccccaaaagaagttcacaattatatttctaatcaataactaatttagataatacttcataaaacgttagaggtaggaggataagaagtgaaggatatatgcaaagaggcatcgaagcactgtttccaccata

SEQ ID NO: 155576 - DNA, 552 bp, Cannabis sativa
ttttaattgaattttgagattgatattcaataaccgattcaatctaactagaattaaattttagtatccaatccaatacaattgtaattaaatatataatcttttgtaattagattgaattgattcaatcaaattaaattagatgttacacacccctaacaaaatccctcctttgccatatatgagtcttcttgagtggtcaccaccactcactagtttttccaaataaaattaatttaatcaaaccctccataatcctatttatgtagagtgatattatgggctaccttaaagtgccaaatactataaaagatgatacatatattgttgcattttaatattaaattttatatatttttatttaataattaatatagaaaattgctaacctattataaagtatcgtatctatatggtgttagatactttaaaatgtcaaataacaatactcatttatatatataataaatttgttatcacataatcattataattagatgagtcctaattacaacctgatattacttcttagtcaacttttacgttcaaaat

SEQ ID NO: 155577 - DNA, 693 bp, Cannabis sativa
gaacctctttaaaatctggtgttatttattactttattatttttgctctattttaattacattcttaatcacttattaattaactcactgtcgttggctaaaagtgaggccaataaattggtgcttttattgagagcaaaaacccaagttttctttttgtcttaagttttaacatgcgtacaggatggtggtgcaaactcatggaggcctggctgatcagatcagggcgacccgataatgatagatcccaacgtgcagacccctgggaatacgagaggacgaccagggacaaaccccaaacaggccaatacacagccatctactgtgggccatggtgtgacttcccgtttggcagggatcacaccaggcgtgcaagagactgggaacaccagtttatcagccgatcagtccactccgaacactgaagtcccgtccaccactaatgttcagaggacagttggagatgatactgagatccaaaacctccgaacagcccttggactcatgcaaggtcaaaataatgctttgcaccatgatcaggaggatttccgtgctactataaaccttgcgttcgatgagcagagatgtcagtttatagaattgagggacagggagatggaaactttaaggtgttgagattatttgaaatgtacattttgttttatattagtgcaagtgggagtttattgggtt

SEQ ID NO: 155578 - DNA, 660 bp, Cannabis sativa
gcatgatagtaatatagaaatcaaagcacaacttctgcataatgcaacaatatagatgaactcaagcatgatagtaataccttctgagaactcgtattggccaaagtagaccctttggtaactgacatagattttctttaaccaaacaaatagaggaaaatgagtttcaaaaatattgagacaaataatcaaatatatattaagtacagctactttatgcataaagtggattaattgttaatgaatcatgctttgtaattgttataattgttgtgatttgtaatgtattataatttaattaaataaactccacgcgtaataatcaactctgaataaagatgactatacacatgtaagaagagaaaaaatggcaatgctggctatttaaattaagtgtataaaaagatcaaataagcacaaggaatcttcactctttaatcatctcttggtgaacattagtcatatatttaattatatttgttcataacacctaaataaggaaaagtcataaagaattgcagtgatataagttgtcgaaacttacaactaaatttaataatatctgttataaaatgatgaaaatatgcttaagaggaaaaatgataatttccttacaaaaggcaaaataacgaatagacattcaagattcaaggtaccatg

SEQ ID NO: 155579 - DNA, 520 bp, Cannabis sativa
gttttctctctaccaacccgagtataccctttgttcttgaccctcttcaagaacaaaacactcagcttagaaccctaagcaactctctcttcgatcctctctcttattctctctctcttctaccaccctttaaagtgaaaagactagacttatatataggctccaactcatagcaccaactaactaactaacataacataaagttagttaagttagttggtttaagtgagttggataaagagttggtttagaggatcaactttcacaatatctctttttacactatatcaaaaatatgtttatatacaaaatatttaagtaactttttttcttattttttttttttcagaacaaagctcagtctatataatataaaaatgaaagatttttctaattagacaaaaaaataagtataaaaatttaaatttttatagtactatttatttataagtaatacatattaaaagtgcaccctaatatattatatgtgtatgtaaaatatcactatcaaaggtgaaac

SEQ ID NO: 155580 - DNA, 553 bp, Cannabis sativa
ggtggtaggtcccggaagtcgcaggcttgatgcccgccaccaccacgatatgttctagttggtgagggcagatcagggtagaatgaagctcagccgcttcccacccgttggcacgggacttgtgcccttcttgggacacatgacccttcaagacctcctctaggatggccagacgcttctctcccttcttcaaagatttagaaccgaatgcagacatttcggttctgaaaaagaatgaaaaaatctagcagtcaggccccaaaccaaaccctaattcaaaaaagggaatcggggtaccctaaacgctggaaagaggccccctctggacacttgtcaaaaagaaagcctcaaaaggttttctttgacaaaagtcgggtgcaagaatcccacagatggtgacattacgaataagcaaagagaaaaggaaaaaggagtaaaaatcgaaaagacgaagtcaactctaaacccttgagtgtcattacgcgagacaaagatgggtcctcaacaaaaatacgatgaaaagaagtaattcaaacacaaaaaaggaggaatc

SEQ ID NO: 155581 - DNA, 1123 bp, Cannabis sativa
  modified_base (721)..(723): a, c, t, g, unknown or other
taatgaatttcatcccttgtttatgatcattgtgcaattgtgtttgttttgtttttgttttttaccaaatgctttgtacaggtataggtgccccccaagtgaccaagcagacttatggctctgggtcacttgtttcttacaagtatactttttatttgtttggggttttctgtccgaccaaaccttttgtacgcactagatggtaaattaacaacatgctggtccattcggctcaatttgaattttaaaataaacatctttattcatttattgatcgaaaatgtgtttattaccgtagtaacttacatcaaagctattaacttgatccgatcgtgtctttagcttaacatgaaataaaacaaattgtagaaattagaaattgtactttagatggtggtcacccgacctgagtactttgtaattttgtctgaacctttgggcgtggtccgcccagaaggccattcacttaaaagtaaatgttctttttgtttagtacttcatatggtcatccgacctggtacttctattggtagtattttcttaactgttccccattccaataccttggtaccagaacgagttacattttttcatcatacttacccaatttgtatgctcctgatttgagaacgttgaccacctgatatggtccttcccagttaggtccgagtacacctatcgtactatctttgctgcttagaaatactcttcttaggaccannnctcccacaaagaatttccgagccttcacttgtttgtcaaaatactgagctactttttgttgatgggccatcaactttaactttgctgtggttcgcttctcttcaatttcatcaagtgattcagcaaggagtacatgatttgcttcttggctatacgtcaatcttctttgtaatggtggctcgagttctacgggcagcattgcttcatacccatatgccatggcaaatggagtctatttggttgctgttttctcagttgttcggtacgaccatagaacttcaggaagttcctccggcctatttgctttagcatcctcaagtctttgctttagtgtatccttcaatgtcttgttgactgcttcaacttgaccatttgcttagggatgcgccactgcagagaa

SEQ ID NO: 155582 - DNA, 647 bp, Cannabis sativa
atatacatcattagattctaccctactctctatgtgcttctactctacacatatatgtatacagtagttttcatttcacaaagtgtgtaagtgtcattattttggtagattatattaatagtaagtccagtcatatctggtgtttctaatctgatataactgcataccagctttctgttaaagtctgtgtgggtctgttatgttttaacggttggtttatttgttgattaggtcggttgaactattgcctataaatagctaatttcgtctataaatgagtgagttagctaattgatatttttgggttagtttctattatatcgtgagagtttgtgtggtattctgtattgctcgtagggccggctcaagcatggagcagcttaggccattacacaaggccccaaaattaaaaaggcccattttttttatatccctttatacataatatatatttattaataatataaatataataaatataataaaggttaccacttacaactaacgtagggaagaaaaaaaaagtcaatacactgtaaactgtacacacgcatgcaatgcttctaaattaaaaactaaactaagtcaattatttatggttagttttagcctaattttatgggtttttttttttgaaaattttaatt

SEQ ID NO: 155583 - DNA, 585 bp, Cannabis sativa
agagagagagaaaagaaagagaagatttctatcaatgagaaaaaaaatagagagaaaataaaataatttgtatgcaaaaaaaaaaagtaagattacacgagcttggggtacgaaacaaccaatgcttttgttcgtttacaagaaggctcttttaaacactaaccaacttgattcttcgctgcctagtgtttttgttttattttgcaggaatttgagtatgtgtttcccgaggaggtaccacatggtgtgccacctattcgaggaaaaaagatcaaattgattttattccaggtgcttcaatcccaaaccacccagcatgtaaaaccaaagaaatacaacgacaagttgaaggattgatgaccaaagggcatgtgagagaaagcatgagcccttatgttgttccagtaattctggttcctaagaacgatggaacatggaggatgtatgttgactgtcgagccatcaacaacataacggtaatatattgacatcccattcctcgtttagatgatatgttagatgagttgcatggttcttgtgtgttttctaagattgatcttaagagtgggtatcatcaaatacgta

SEQ ID NO: 155584 - DNA, 660 bp, Cannabis sativa
accttaaaccctaaaccctaaactctttacagttacccctaagacctaacccctaaatcctaaaccctaaattcctaaatactaaacccaaaaacctaaaccctaaaccctaacctggacacaggcctagaacaatacccataccgagattggaacccaagacccagatccaaacccaaacctagacctaaactcaggacctaaacctggacccaaacccagaccagaacctggtctgagatctagaccttgagtgggtcctggatcgtgtccccgacccggacccgaatagggacttggactcagatcgagacccgaacccgactcaaacttgaacccatattgggacctagactcagacccaaacttgggagccaaactcgaacctgaacttggaccttgactgggacctaggatccggacatagatgggggacatgggccccaaacccgaacctggacccagatctggaccaaggatcaagacctagatgaggcacttgtacctgaaactaggccctaaaaccgggacaaggacccaaaacttgaccctagactcgagacacgagacctgaccttggacccaaaattgaggacctcactacagggacacaaccccgaacccagacccaaacccaaattaaggacccagccgaagacc

SEQ ID NO: 155585 - DNA, 522 bp, Cannabis sativa
acatattaactttaagaaagagaagaagatagagaataaaacaatgttgaaacccctctgaagaatgcctcccgtattgactttgggctctgaaattcgtacatctttttccctctaaattgcttgcccagaactattgaagtccacttctgatctatagccaaaaaatgataaaataaaataaaattcgctgaagaaaaaaaaaacctattctccttaggattagaaatcctattctacttaggattagaagaggaggtaagttttctatttcgttaactgatagtattttagatataactctctcgatattactcagaattggatgatttaagatgttttcaaaagataaaagagagatctagaactttcatgttttgactttttccaaaatctaatcaaaacatagttaaattaaggcttgaagttttaactttattttcttgcacaattttctctattttaaatttcatctttttgtgagatattattatctttttttccatatttttcctctgatat

SEQ ID NO: 155586 - DNA, 1142 bp, Cannabis sativa
  modified_base (27)..(27): a, c, t, g, unknown or other
tagcttttgtaaaacagagggtccaanatggtatttacccaaaaaaaaataataaataaatttgataaaacttataataataaggttcgccggagaagtcaccgagaaagtcattggtgccaaaaaaaccatgaaaaagtcatcggtgtaggaaaagtcaccgaaaaaattagtgtcatcgaaaaagttaccagaaaagtcactgtcgccggaaaagtcactagaaaagtcattgttgctagaaaaaatcaacagaagtaaatttcttagattaaacaaaaaataaaaccggttttataacattatgaataaaaacaaattattcaaaccagttataattgaaatataaccggttctgtaacataatgaataaaaataaataatacaaaataacttaaaacagttataattaaaattgaactggttcaataacagtgttataataaataaaaataaataacaaaaaataactcaaaccggttataactataatagaaccagttatataacataatgaatagaaacaagtaacacgcaactcaaatcgattacaattgaaaattaaaaagaaaattagttcctaaaatactgaaacataaattaaaaataaaactagttccataacaaaatacctcataacacataatacctcataaaatcgattatattttttttaaaaaaaaatgggatcaattctaaaaaaaatattgaggcataaatataaaaagaattggttttataacaaaataaataaatacaaataataacacataataacacaaatataatatgaagaaatttgttatatttatcaactagttaaaaaaatgagacaaaaaaattagttccgtaaagcaactaagataaaaactcacacaaaaaccagttaaataaaataactcaaaaaaaaaaaaaatatccattcaacatgctctataattacactcataccatatctaccccaaaaatactcattcattatgttatataactggttctattttagttataatcgatttgagttttttcgtattatttatttgtattcattatataacactgttatagaatcgattctattttaattataactggtttgagttattttgcgttatttgttttttttcattatgttacagaac

SEQ ID NO: 155587 - DNA, 652 bp, Cannabis sativa
  modified_base (180)..(188): a, c, t, g, unknown or other
gcccttgaatcctgaaggtgaggctgaggaagagcaagtgactccgctcaaaaggaggaagaaacttctggcccagcccaagcctattgaacatgcaatttacattagtgagcccatctcgcctgctcggccgccttctctcgtgctcagaaaagggaaagctattatgtctgaaataannnnnnnnncaggtgatgatggactttcgagtcctgcttgggcaatcatcttgcatactactccgtcttgtttttaagcttcttgactattatgctttatgattctgatgtctgttttctctaaccatgttgtttttgttccgtgcagacatgtctcagaagatgcttgatgctctaaataagagaattggcggaagctctagcgcatctcctccggccaagaagtctagaagcggtgaggggacctcttctaagggaaagacgcctgccggggaggtcattgatctttctgaggagctaacggtttctaacccctctactccaaaagttgctaagtgtaaggagtctcgaggagggagtttggacaggcctgaacaaccgaaaggtggatctgagctgatcaagaagggacccgagcagatgcggaccgctactccacctttgccagtgcttccagaggctaagaaaggcaa

SEQ ID NO: 155588 - DNA, 588 bp, Cannabis sativa
atataaattttatagaaaataaaaattattaaaatggggtgtctttaaatatttttgggtgtaaataaaattttccttaatacaaagagcggtgactaaattggccttttcctacttatccaaaaaaaaaaaaaaattggccttttcctattttacaccgatttaatatgttttatttggctctgtattttcttgaaaaataaataaaaatctgatattacctttccaaaaaaaatacagagctaagattattttttaattgataataataattaaatccgaaagtaaataaataaaaaggcataagagtgatggtctcatgcgcatccacactaataatttgagaattgttaaaagtcttagcatttttttgttggtgtctattgtagttaaatattaagttttatataaattaaaaaaataataatttttaaagaatatagttaataattgtggagcgttatttataaaaggtattgggcactattaatacttaataacaatacattaagggcctgtttggtacacatgactagattggattagacaggctaatttgtccaatccagtgtttgggcatgttagaag

SEQ ID NO: 155589 - DNA, 1039 bp, Cannabis sativa
  modified_base (455)..(465): a, c, t, g, unknown or other
atccaagtccgagtcctaggtcccagtctaagtgcaggacccggtcgtgggtcaagtcctagtccgagtttgggttttggttccgatctcggtttggatgcaaatttgggttcgagtctaggtccaggctcgggtccgtgtcccgagtaccgatctgggtctaggttctagggcccaagtctaggtccccaatctaggtgcaggtcctaggtccagatctgggtcaattcaggtttgtgtccttgtcccagtttatattttgattcagtttttgggttcgggtttgggtctgggtctgggtcggggtctgaatccttgtccgagtctgagtctgggtttgggtccagttcgagatcctggtctgggtttgggttcgggttgggtccgatttcaggtcttgggtgcgggtctaggtttgggtctgggtcagggtctcggtctgaatctaggtctcnnnnnnnnnnntcggtctaggtgtagtttgggtttgactccaagttcgtatccgaatccctatctaggtccgagtctaggtctgggatcgggtcccagatctaggtccttctccaagtttgggtccaggtctcggtcagggtcttggtatacgaacgtgtttgggcctgagtttttgtttcaatttgggtctggggctaggtctgagtttggttctaggtttgggtccgggtcctagtctggcagttcttgttcagtttccagttttgggtcccgaatttgggtcaaggtctcggtttgggtactggtctgggttcggatcctggtttgagtcccagatttggatccctttcacgtgtctcagtctagtgttaacgtctcgtgtcccaggtttgagttgggttcgagaccgagactagggtgcggttttgggtcccggccccagttctgtgtctcgagtctggttccatttttgggtctgagttcggatctaggtttaggtctcgagtctaggtctgggttgggatctgggtctgggtcctagttcgggtctaggtcagggtttgagtccgagtcctagtcaggt

SEQ ID NO: 155590 - DNA, 573 bp, Cannabis sativa
  modified_base (186)..(186): a, c, t, g, unknown or other
gcaattgttccatcttgattgaatttaaccgtaaacacccatttgcaccctatgacacattttcacgaaggtaaattaaccaagacccaagtacaatttgcaactaaagcattcatctcttctttcattgcagcaagccaaccaggatgagacattgcttcacgaacagttttaggaatagtgatngaatcaagagaagcaataaaagagaaagaagaagaggagagatgattataagaaataaaagaataaataggaaaattacattgatgtttacctttacgtagtgcaatgagaagatcatctttgagttttggatatgatgacaaaaatgcaggtgcaggacatgaaacaggaggtggaggagggggacgccaggtgtacactataggaggctgaaggagtggtggaggtggtggaggtgtaggcattgtggagctatgacccaggcaagtgaaggaacaagaaactcgtcagaacatctatcagacatagaggatgtgacaaaatataccaacaaatcatcatccttcccctgacgagtaggactagttgaagatgaaaaataaggtg

SEQ ID NO: 155591 - DNA, 650 bp, Cannabis sativa
caagtggtggtcagggagctcagattcccctgaatatccgtggccgtggtagaggtcttagaggcagggcacgtggtgggggtgatgctaccccgccataggttgcccaagctacccgagttgctcaagagtgggaaaataggtttgcagaaattcaagctaggattaatgaacaagatgatgagattcggtggttgcgacagcagggtgctactgcaatccctaatccagaaatactagtagctcctgcccctgctgtgccggtcgaacttgtagttgcagtgaatcggatggaaaccctggatgaaaggttctgtaagcaggcacctccagttttcctaggaggtcccgatgtcatgaaagccgagcaatggctaactgtgatcactaggatcttaaattttatgggcgtcaatggtaatgatacaatggcctgtgccactttccaattttaagaagacgctctggtttggtaagacatggtgttcatgattcatgatgttaccagaatgacttgagagaaattctaggagctgttcaatgccagacagtcagaagtgctaaaagaaaagaattcactcagttgactcagaaagaaaacatgagttttactaaatacacgactcaatttgatcgcttggcaaggttgg

SEQ ID NO: 155592 - DNA, 873 bp, Cannabis sativa
gctgtaaaaaggattattcgatatgttaatagtactctcgattttagaatctggtattctaatgatactaattctaacttagcttgttttattgatgcagattgggcaggcaatgctgatgatcgaaaaagtacaagtggaggttgtttctttcttggaaacaatttggtttcttggcacagtaagaaacaaaattctatttccttgtccacagctgaggctgagtacattgttgctggtagttgttgtactcaattgttatggttgaaacaagtgttgattgactatggatttgaattgggtattttaactattttttgtgataacactagtgccataaatatttcccaaaatcctgtttaacattctagagcaaaacacattgatataagacattactttatcagggaacttgttgaaaataaatcgttgcaattagaatatgttgatactgagaaacaattagctaatattttcaccaaggccctagactcaagtcgctttgactccctcagaaaatctttgagagtttgcattgtctaatccctcttgtgcttgtttttgtacaatattgttaagttattctttgcttgcatctaatcttctctcattttaatttgacaaatcatgtatatgtttttggattataattagttaggatctcgttcttatcatacttttgaggttgagttaaaagtttcatgttactttttatatgtgtctagtattacataatgtttttatacagagttgagcataatttgtttcagttacttttcaggccccttgctggaatagagctacccatacggaggtgtgaaagccaacttttgagtaagctggaactttgtaattgagagttatgaagatgat

SEQ ID NO: 155593 - DNA, 974 bp, Cannabis sativa
tatgtatataattttattgacatgctacatatatttaattattatttttatatattttgattgtatgattatttatgttaaacaatatttaattagtttttattttattatatacaagggtagtatataattttttttttatcatggtatatacatttttaattgtggtatataatttggttagtaatatatatttttattattattattttttgtatatatattttgatgaatggtataagtattttttcttatacgatatataattttttttacaaaatatttaagttctattttctattgtacttttgttgacattatatataattttattagcatgctatatatttttatttttatttattgttattattatatacatatttctattgtaagtacatattttctgttatatggtatataaaatttattatatagtatatcattttattttagataatacatgtttagtttttattttattatatataaaggtgatatataatattgttaatatgatatacataatttgttttaataatattatattattttattttttattattggtatatacgttttcttgtacggtatctgatttttgttgtctatagtatatcatttatttaagaggatatttagtttctattttatcaaatataaattttttggtatgtattcatattttaataatagtatatataattttgttagcatgatatatatttttttagtattaatttagtattaataattttgttagcatgattttattactacgtgttgagtaaattccacttataaccagtccctttacaacaaatatccacatcagcaaacttacaattgaaataaacaacttgactcaaccctaggtgactttccctctacaatatcaagaaataggagttagttacaagtatataaacatcaaatcaaagcaaatactgttggaattatttttaccaggatct

SEQ ID NO: 155594 - DNA, 593 bp, Cannabis sativa
ttctttcataaacataaatttaatcatttataatttagacgttttataaaaatattgtaaaaaatatgagtgaatgaaaaattacataatgtataaattattcgtcgagattatatgtatatttaaaagattatcattaactaaataaatataaaactaaatatgtattcataatacttttattattacaaaacgacagaaagtgtaattatttatatatatatatataataaagaaaacccaagcaaaatcatatgacattttttttttactttgtaatttttctttctttttttttttttataaaattttgaaattttttcaaatttttggtgagttatgattttaatctatatatcataattaatagataaaaaacttctcttaaaaattaataacttataaacatcttcatctacaatttataaaattaacactaataaaaaaaaataaaatcaataatataaatataacttgtaagaatattaatcatcaacaaaatctttatgtaatatagatggattgacttttttaatctttacatattctatactttttctattaactcataatatacagttcaaaatataata

SEQ ID NO: 155595 - DNA, 519 bp, Cannabis sativa
ggtgccattccacctgtcaaccaatcaaatcaatcgctaagacagccagtcgcttctgtatttgaaaggttgggggcgactcatgacctaagaaattatctgaacagaaggagagagtagacgatcagaatgtcaagacgatcgtgctgcccagagcccgtgctcaaattcccgctcggaaagatgctgacgtgattcaaatgggatttcaaagatcaggccctgaagaaggcgaaaagggatgagcttcgggcccctgttgtctgcaagcactgcaccaagcgctttgatgatggcgtctttatggcctggcagactaatggccaaaacctcaagctcgacttctatccaaagtctgaggatgttctcgtccgcttttgggagaagaagagacttgatgccctgctggaggagcgcagggggcctcgtcttccacctcgcattgattaagccaactattaaccaatactgctattatcactatctctttttttttttctttctatttatagtcctttt

SEQ ID NO: 155596 - DNA, 630 bp, Cannabis sativa
  modified_base (493)..(523): a, c, t, g, unknown or other
tttggttctttgtctgggttctggtcctagtgttagtcccagatctagacatcgacaactggtctgttccaactcccgttacctgaatcctgagtcaagatctggaacactgtcactggtctaggtctggatctggttcaagtcccaggtcccatttttgagtttgggttcgggatcgagaatggggtgcggttctaggtgctgaccctagttctgtgtccctagtctagttccttgtttggttccatttgcgattcttagttcgagttttggtttgagttcggatcggagtttgagtcctggtcggactttgggttctgtatggatttcagtccaggtccatatcaagctccgggtgtgggttcgaatcctgggtcttggtctaggttgggccaaagtcccaagttccaatcccgatctgaatctgaattcaattctgggtctgagtcctttgttttgatcctggtctagtttgggtctgattctaggtgtnnnnnnnnnnnnnnnnnnnnnnnnnnnnnnnggtttgtgtccaggtgtggaccccgatttgggtctaggttcgggtctaggtccaagttgggctcctcagtgctagtccaagtttgggtctgggtcaggatctcggtc

SEQ ID NO: 155597 - DNA, 771 bp, Cannabis sativa
caatcttgaggctattttaaaacgatgcatcgagaaaggtcttgttctcaattgggagaaatgccatttcatggtatcttcaggaatagtcttaggccacattgtttctgaaagagggattgaggttgacaaatctaaaattgaccttatctctaaactgcccacccctaagactgtgaaagacatctagtcattccttggccatgctggtttttataggaggttcatacagaatttttcaatgatttctcgtccactatgcaacctcctagccaaagatgctactttcgagtggccaccgaagtgtgaggagtccttcccaacacttgtgaattcactcacttctgctcccattattcagtcacccgattggagtcttccttttgaaatcatgtgtgacgccaacaattttgctgttggagctgttcttggacaacgaagggaggggaaaccttttgttgtctactatgcaagtagaactctcaatagtgctcaaatgaactattccactactgaaaaagagttacttgctgttgtctttgctcgtgaaaaattccgagcttacttgattggatcacctattaggatctttaccgatcactctgcccttaagtatctcctttccaaaaaggatgctaaggcacgtttaattaggtaatcctcctcttgcaagaatttgacataacaatcaaagacaagaaaggtgttgaaaatgtagtcgcggatcacttgtcccgacttgaattcagtgatcccgctgatggcccacct

SEQ ID NO: 155598 - DNA, 689 bp, Cannabis sativa
  modified_base (516)..(520): a, c, t, g, unknown or other
aaagaataaattacataaagtactaattttaagtactaattttgataaattttttacacttttacaattatttatttatttattttatatttttatggtgttccatataaataacaaaaaagttatgaaaatagtataaaaataacataaaaaaatcgtatttttaataaataaaattttaaaattataaaaatattaaaaattctgtataaccgtattttgtaatttttttgtatttttaaaataattcttaagagattatttcacaaaaaaaaaaaaaaaaattacaaaatacagttttacataattttaaatatttttacgatttttttttaaattttatttatagaaaatacggtctttttatgttgtattgttattaatttgttgttaattttttattagctgtcagttttttttgttgttgttttgatgttatttaaatgttatttttatgtaattttcgtgttatttttatgaaaaattgtaagaatataaaaaaaaattaaacgtaannnnntaatttttttacaaaaaaaaaaatagtatcttatgtaattatcacttactatatatcttatccgttataataattaaaaaaaaattagtaatttttcccccgaaatgtaccaaatcatgcccctgaacttttttggccgttaaaattccccctgaactattgagattgt

SEQ ID NO: 155599 - DNA, 576 bp, Cannabis sativa
agaaatagcacaggacaccacaacattcgctcagacgaagtcctctccaccgagcagcgagcaatccgcccagcatgccaacacttagcaaattcagctttcgcattgtgagtcattgaagaaatccttataactttgggatcagatcacaagctgtctgaatcccttgatcagggtattttgtattaaatacgcaatctttctgcttatattaattgtaataagaagggaaatacttccctcccaagcttaaagccctataaatagtgattcatacgcactgggcaaagggtcgaaaaacttgtctacgaatttatattcagagatattattgtaagagatctaagaaaaggaaccattttccttgttcttaaatcaatacaaactatgaggattaggctattaccaaactgctcgggctaaacctctataaaaatctcgtgcctttatttgctttattatattatactcatattaaactatttgtcgcttacaaataagactcattgtcattggctaaaagcgaggtcaacaggcacaaaacctaacaaagtcctacttgcactaatataaaac

SEQ ID NO: 155600 - DNA, 611 bp, Cannabis sativa
cttaccgcagccatggcgttgctgatgtcttgaacctggtagacggagttcaaggaggcacaagcggcataccgttttggcagaaattgagttagatgggagacatactcgctagtcatctctgagggaaaaggagccaaggtgggcccaaggaaatgattgaaccagtccgtcagtgggtccatgttaagatcccacagattccggaaggcctcctcgttgagagtgttttgctgctcctctcgtacgacccttttcaaggcctccacctcagcatgcccccggctgtactcttcgaggacgtagttgtatttggctatctgaagattctgcctctcctcgtctcttcggaccgcagtcaacaatatgccgtgaggcactgtgtattcctacgcatcggagggaatctcggagtcatggctcggggctggagtgtccaacctctgggggcgcttagaaggctcctcctccaccatcttgcccttgcgcttgcgcatgagggcggcctcctgctcttcttcaccttcttcaacttcctcaagaacctcctcctcgtccaccaagacaatagtgcccgaaggggcatcggaggaagacctcccgggagtgac

SEQ ID NO: 155601 - DNA, 513 bp, Cannabis sativa
gacatattattgatgaaaatgcatacttggcaagaaatctcatcccccttcttcatggccgactactgccactcattgtgccacaaagatggcagtggtcggctatgcttgttcttggtagaaaatagttttttcacttgtgttgcactccttggtgttaagggaatacatttgaacaattttcccttggtgttttgtatgtggcgaccactgccattcccttgtcacagtgctctccaaaaattggagaacactgccatttccatattgaagtgggcgcataggccttattccatgggggttttatgccattttgactttatgcacaaatgtaagtcatttcatgcctaaatgagtcaagtccttgttggtttctttggcagattgaggtccctgtagtgaaaatgctggcgcgggcccatgaaccctagtttgggcacacttgggtgtgtgagtcccgacaccaaatgattggttaatgattttaatccctctagaggtgccatgggaccc

SEQ ID NO: 155602 - DNA, 701 bp, Cannabis sativa
gccgaaaatctcggtcaacacttcatttttcttaattttacataaatgaatgtatatatataatagaaaataaaaaatcgaaaaattctagtaagccatattcgttctcaattttagaaaaagacatttactatagatagaaaagaaaataataaagaatgaaaaattctcattgctgtcacatgttcgttctcagtttcagaaaacaacatcaatgtgaaaatcttttgaggccacttgtttccatcagtgaaaggctcatctcttgctttagcgaagcccctgttaagtgacaatttggcattcacattcaccctttccttggtagattccttgatccaaaggatccgaaatcgattatttacctttttccttttaactattctgaaggattcttgataaaactctccaatgatgaatgactaaacagggatgaagagcggcataacaggaggtttcatttgaagtttatacaacaaaaaaaaattaataatcttcgaatgattagagcatgtttgatattgttttctgtttttttgttttaaaaaaatgtttttagaaatgagaacaaaatataatttttgaagtttttaacacacaaatcatgtttggctagtgatttttaaaaacaatattgatcaaaagtgaattggtttttaaaacagaaaacaacattttgttgttttcaaaattcttgtttt

SEQ ID NO: 155603 - DNA, 534 bp, Cannabis sativa
tattagtatgatacatttagtaattgatttagtattgttataatttcttgaggtatataattttattactacagtatattaattttcagtcataggatatatcaaatactattgtatatatttaataatttaatatatttattcgcttttgttacaatataataatatgcattactgaaaaaaattatataacttaattaaattattatatatttttttaaaaaataatacatagtaaatgtattttttataatttttatcagctaatttattatatttagttattttcttaattttttttaaaatagatatttactaatttagttttcaaatttagagcttttttctatcttagtctgaaaaaaatgaaaaatagaaacaaaaataaaaagaagaaaaagaaaagaaaagcctaaacatgatgttaaaaaaatatgtacacattaaagaggtgccattggtaatatatttttaatcattttttatttaattttgtaattagaaaagtgaaaatatttttcaaaaatatatttt

SEQ ID NO: 155604 - DNA, 723 bp, Cannabis sativa
tgtggcccatcctcaagtaaatggccaggtagaagctgacagtaagaccctcaaggacaccctgaagaagcgccttgaggaagaaaaaggcaactggcctgaattgctcccagaggtcctatggtcacaaaggactaccgagaagacgactattgggcaaactccattcgctctagcttatggctataaggcgatgttgcttgtaaaattggtgccaccatctcacaggaggacaacctatgaacaagataaaaataacatcatgctgacagaatcacttgacaaaatagaagaatgaagagatcaagccaacctaaagctataggcctaccaagaaaaggtcgcaaggcacttcaacaaacaagtcaaggacatgaaattcttcatagaagacctagtgctttgaagagttttctaaaataccaaagatccaatagcaggagtgttcagacccaactgggaaggtccttatcaagttatagagataactagtaagagagccttcaggctgggaaggtacaactagaacatggagcttattctcctaccaagatactgaaatggagagcaccttcgcagatactatcagtaactagcttacagaatgctactttgcaatagtagttttaccaactcaacattagactgaaaaagagctagtacccacgacctttttggcgtggccgctcatcgttctttaacagtggcctctgctatgcaagt

SEQ ID NO: 155605 - DNA, 779 bp, Cannabis sativa
taaatttaatattaaggaccatgactccttcttatagcctcattgaagccatgtagtgattaaaaatacaaaaacttgtacaactttattatcatcttaattttttgaaaacttggaataataataaattaatccacacaagtacattagtttactagtatcaactaagtgtgcaataaacgattgttcaaaattccattcaatataaaatcattttaacaataatatgagaattaatgttttctaaaaaaaattaaaaaaaatatatattataactataactattataattgaatactataagtttttaattgtcctttttttttttaagaaaaatagtaatttccacaaatcaaataaaagtctatcctgataaatcactcaaagaatagaattgacaataatatatttatcaagtcgtttacaaaatgaatgaagaaaacgctaacaacaacctcaactaatctaataagctaacaacgatcaaacattgaaagagtgtgaagtatccaataatattctttttaattgtcattgtgtaaaagaaaagtagttcttaattatgattttgggattattagactcttaaatttaatgaatttttcttttataattatgtcattttaaaaaaaaaaatatttttgttcatactaaaaaaaaagtaataatatgtgtgtatatatatatataaaactcaaaaataatcaaggcagaaattaaaccgctttgataccaactgttagactataatatagtgaatgaaatacaacatatatata

SEQ ID NO: 155606 - DNA, 722 bp, Cannabis sativa
  modified_base (570)..(573): a, c, t, g, unknown or other
ttagctatttcatataattagtttctgtgttaatttataatttaattgttttacataatcagtaattatctaatacatttaactggaaaaaattcacctgtcccatttttttttgttctactcctgtccccaccaattatattttgccacatcatttaaaatgccaaatagacattgattaaaccaagatactgttaactcctccatttgttttcttttgtatattaaaataatcattaattgacccaactaattctctttcttaattaatgttaattctttttctaaaatcaaatgttataatgattttttttttttatatagtttatgtaatttttttaaagggaatatttgtttcattagaaacatacaggtttttttaagagaaaaaaaataaaacacatacaatttttaaagaaattcatacatacatgcagtaagatttttatatatttattaatttattgtgtattcattttttttttaaaaaaaaattactaattcaaaacatcaattagattcaaatagctagtatttttttttatgaaatgagaacttcattaaatttannnntctgaatacataatatccagcagacatgctggagcattagacacacagaagctacgttcagacaaagaccgagataacctagcaacagcatgtgctagacggtttgctgaacgttttacaaaataaattgtgaaaaaaggaatagaaga

SEQ ID NO: 155607 - DNA, 773 bp, Cannabis sativa
ttttctgaaagttttgctaacactgtatcctattttgtttcatctccaaagtagcagccttcaaagagttgctcatatcaataagagcatgttctagatctggtgatagtacatgaggatagtaagaagttggttgaacatattgattaattccattgtaggaagtgctagaataatcttcccattgttgattgtatgtgtaagtctcaaagtagggattatattgatactcttgtggcgaggtataataaggatcatagtattgttgattgtacatctccatgtttctaaaggaacatcagaaaattaaaaccacaactagaagcacaaattagtaaaaaaaaaaaattaaaaaaaatagaaaaaaaaaattctaataaatttttctttaaatatctatcttttattttgatttttttaaaagaaaatctaataatttattcttaaaaaattaaataggaataataaaataaaacaatagtacccgccaacggcgccaaaaatttgatgcgtatcgtaagccataagaaatttactattttttttattccaatactttcaattattttagtataatcgtaagtaagggtcgatccctcgaggactatgtttattcaattattcacaaattagtaacaagaattaggaaaaaggagagttttgatgattagaatagcaataagaaaaattaaaaagaaaacaagtttaaataaagaatacgatatgagaaactagttaaaggttattcactaccctcaacaatcattcctaat

SEQ ID NO: 155608 - DNA, 706 bp, Cannabis sativa
  modified_base (301)..(301): a, c, t, g, unknown or other
gactacatacacttgtcaagatcgttttaaacagtttaggagtcttaggtgaaatattaaaattggacctttaatttaaaaaaatatcaatcaatacttcataaatttaatttataataataataatacttcataaattctaaaacagacaagaatttttaaattatatgtattgagactacaaggttttattaattttttataattattatttttttgtaagtacatattattttctcttatgaacatttattatgtatactatacattataaaaaaaatagggatttttttatttttanacttcaaaacagttttttttttatatatatatttttacggaattctatacaaaaatccctatagcaacctaaatcccaatcgaaaattatatagcaactcacgtagaaactaccgaaaatactaccgaagcaacccaaactataaatttgaagaaaaaaaaagggttaaaaaatagtatatgaggtaattcccaaaaaaatattatattatatatttaggaaatttttttggtgaggcattatttgtggggcatttaatatcttcttctaattgggcaattttatggtaataatgtggtcctaaatttatcctattgtaacaaggattaattaaaattgagtaatttgcggcaaaaccccttcaactatcaatttacttgcaaaaaaccatccaacctcatattt

SEQ ID NO: 155609 - DNA, 1150 bp, Cannabis sativa
gaaatagtcgggattttagagtttcccaaaataaccctaggtgcccttttatgttgttttgtggggaaagggcaaaatggtcattttgcccatttatgttttttctttaatggtttttaatttaaattaataataaggtttttattggtttttggctgagtttagtttaataaaacaaggttttattatttttatttcataaaaataaaagttaaacaaaaaggaaatattttctctctcaaactctctctctcttttcgagcactatagaaccatttaggtttctggattttctccccaaattcaagttattttcaacaaggtttaagtggtttcaagctttaggtaagctccttttaactccttcttggttttcttgaattttaagttagagatttttgcatgaaatggtgttttgctgctgtggttgctgtagttgttagttgttgatttctgtagttaaaatatgatttatgatgttgatttaagcatgaattagtagttgtttgaagattttaacaagctatgagttttagaactcaagcttaaagctttaatggtgaaattcaattctgagctttgattgttgttttgttgctttgaaatagtttattagggtataatatgcaggtctggaaagtttgattgagtttggaaacgatttggtttggctaggttgatttttgggttttctgggtaaaaccggctaactggttttacaatgcttgtaaaaccgcttacccagattttacagctgggaaatccgaaaatttagcttgttgtttcgtgtttgttttaggtttttagttggttgtttccctgctagtttaaggtattgccatattaagttgctgtagataggtttttggtttaaaacctaagtcccgattgtgatttagcgagtcacttatgcgtgttgttatcaatgtgatttaggagcctataattcgccgaacagttgttccactcaggttgaccggcacacctaaatttgaaattgaggtaagattggtataatgtcatgcatatgttattacatgtttagtgtagatgttgttattgcctgttagactacattgatagcagtaatagtatacgtagagttgtgctgattactgataaatgtatgttggctaaatactaatcgatg

SEQ ID NO: 155610 - DNA, 590 bp, Cannabis sativa
aacagaaatttttttttaaaaaaatataattttttgatttaaaatataaaataatttacttttaaattaaaactataaaatttcataaataataatacaataacataattccgattaggtaatatagttatactaaattcaaataaatataattaaaaaaatcactatcataatttataaaaaatagtaatatatacactaaaaatagtaaaataaaagttacactatagaaaataataatattttcactgatttgaatccacatcatttgttgctgataatacaaacctatattataaaattcaaatgtataaaaatattacattatataaaaattaaaatagtacacaatattatttattattcaagatactaattattatacaaaacattccattcaaaaaaaaattattatacaaaacataatttaaaaaattataaaaatgatactaatatacttcaaaaatacaaacacataatataaaatatataatattaataataagatagctaatatacacacacttagagtaaagtaaatgtgtatatttatttaacttttcaatttaatttttatttatgcttattat

SEQ ID NO: 155611 - DNA, 562 bp, Cannabis sativa
ctcaaagtcgatttgcttcaagtaatatagtttgccaagccgtttagctatcccaatcctcgatgtcaaatggtcctggatatagcattgatcagtatcaaataaaaacttgtaattgttggtgtgtgtgagtgcacttactgatagtaaattgaatttaaagtctggtacaaaaaggacattggtgagagatatattagaattaatagcaaccgtgccaatctttgtgatgttagctttggcaccagtaggtaattggacagagagatcaattggagcagtttgtatagaagaaaaacactctaaatgacagcagacatggtgcgttgcaccactgtcgataatccataaagagggatgaaaaatacctgagaaattgttcacacaagctttgtcagttgaagtagatgcatctgtgggctggagttgctgtgccaacatggaaatcagttgttgacactgagcttgtgtgagttgagaattggagatgtcaggtgttgatgaagaaacttgagatgcctgagggttgttctttgaagtactgccagggtcagattttttg

SEQ ID NO: 155612 - DNA, 896 bp, Cannabis sativa
caaatatatatgaaaaaaaaatatctttaaagaatttttttaataaaaataactaactgatatatttttttaaaacttgtaagacactaaagtttttggaagcaatttttttatttttgatatttattttaaattttggtatttatgcagatgtggcatattagtatttatgtaaataatatttttgaaagtacttttataaataaattttgttttaggtataatattgaaaaaatttctttaatatgggtgtactcttaatgggtaatattagaaaaatttgagtttttatgcttaattttttttatttaattagaaaaatctctcatttatatattatatgggttgagattgttccatcagttgaaaaaaaaataatagaaaaaaaaatttcggcaaaaaaataataatgaaagttgagtttgagttaaatatttttcatataaacatatttttttatataaggttagaaatgatactttttgatattttctttaattaagtagttaaattaagcataaaaatttaaaattttcttttattatttgccatcagattaaaatctaatggtttaatatttttaaaattaatatttataattaaattttttagtacccatcaataagtaatacccattaagaagtgttccaaacatatataaacaatataataagtcatgcacatatttcaccagaacaataacagtaaaaaatctaattatattacctcgtgaaacccaatcacatcaacgtcttcttctatgaggggttcaagagcagtcgtctgacagtggttcaattcggctcaacgacgtcctccgtttcagatttttattttcatttattaatttactattattagtttaattccaattaatatttttatggggttagaat

SEQ ID NO: 155613 - DNA, 766 bp, Cannabis sativa
tagcatggctccagacataaggtgagtctggctccaagctccaaaaccaccgtagttacggttgggggtctcctcatcttgaggcaagcggtggaagacgccagaggtaaaaggcttgatctcggccacagtcacaatcttctccaactgatgggcacaggtaaaggttgagcgaagctcatcctcctcccaaccgttagatcgacacatgtatttctcctagacgaagggtcccttcatcacttctttcagggtggccagagtaatcgctcctttgctggaagttttagctccggatgtagagacagacatttcttgaaggtattgagattctgaaaaaggaaaatctagcagttagcccccaaatcaaaccctaatgtgaaaagagggaatgggggtcccctaatcgttgaaaagaggcccactctggatgtttgcgaaagatgaaaattccaaggattctcctacgcaaacatcgggtgcaaatatctcaaaagcagtgaaagcagaggaaaaggaaaggaaaaataaaagaaacagaacatgggtaaaaaaactgtctcatattcagaagcaatctctcagcagaaaggttgattgaaaaataaaagagaaagaaagtagcagaacacaaataaaagagggtatatacaccatacggtagtcttctccaaagtcatttcccagaatttgagcacttaaccaaaggtcctaccctaacatgcaagtgaacaacaaaagtataaagtacccagaaaacttacac

SEQ ID NO: 155614 - DNA, 511 bp, Cannabis sativa
atacaaggccttaatttggctttttcgagccccatcttccgtagagtctccttataaaggatatttaccaagctcccattgcctattaactctctcttgatccttttattgatgagttgaatggtaatcaccaatggatcgacgtgaggatacctcacgtttttctcgtcttcctccgtgaatataattggaggttcctcggttttcaccttcttggaaggttgtggggcaaatgctgactgctcgttctttatctctttcacgtatcttttctgggcgttattgctttcccctgcgatatgtggccctctcaaaataaccaggatgtcctccccctcaacaggaagaggttgtaacccttggttgtttgggttattgggtagactgggttaattgtatctgtggccctatcttttcacgtactgtttaaaatgtcctcgagcgatgagagtttctatctcatctttcaattggcgacattcgtcgatcgtatgcccaatatccttatgga

SEQ ID NO: 155615 - DNA, 635 bp, Cannabis sativa
atattataaaatatagagagaaaaaaaataccaataaaaaatcgaggctaaaatcatgaataattcaaagtaattaatgatggtgaaattgttgacataaaaaagagtatgtatgtgaaatattttgatgagtgaaagattaaaaagaaatagatgatattaacaataattagtaatttacagaaaaatatattataaaatatagaaagaaaagaaatatcaatagaaaatcgaggccttgatgttgtctattgatgtcattgctactgtttattattcgtcgaggtactctaaacaaacaaacaaaaaagatttaaaaaacatataaggttagagaaagattgtacactaaaaataaaagaaaagaaaaaaatagaaaaaaaaaaattaagaagaagatcgaaaagaacgtgagatagagtgaatgtgataaaattatatatagatttaaggttatatattattttaaaaattagtaaaaatttaatattagatattttttatttattaattaattcattaatatctataaattgaataaaaacttaaaaaatgagagaattaaggagagaatagtttagagtgttttgagtgattttagagtgacacgtcaccgccttatatctctcctttat

SEQ ID NO: 155616 - DNA, 502 bp, Cannabis sativa
atatctatataatttttatttttatatatatataataatattattaataaaaaatattctgttaagtaataagatatactgttaaagtgaacgtagaaaccaaaacgtgttgttaaaccaagaactctattatatagccacactttatataaaatagatatatatatattgtaagagtctcacattaggttgttcattccttagtgcatggtctaaatccatacatcccagaactataagtaaatttctcttccaatccttgaaatgggtctcattaagtattggaataaaattaatgttagcagatattgaggctccagaagatgaactagctcaatatagaacaaataaaacaagttcacattaatatacataattaaactataaattcaaaaattagttgatcccatctcaagatacaaagcacacattaatatcaagtctttaaacaataatattaactgtaagcggtactcttggtgtagcaatcaaacattgacaa

SEQ ID NO: 155617 - DNA, 699 bp, Cannabis sativa
ttgagatgtgaatatctgcgtttacaatgcttttgatttaataatttttcttgctgagtccttgtgactcacgggtgcttcgtggtgcaggtagaaagttagctatgttcaaccatgaatcagaggtctaccggcaatgtacatatcagttgtggtgtcttggctttcgggaagcaggatcgacttcttttctttatgtgtaaaagtgtaactttacttttgtaatatcaattttgcaattcgttataaggaaattttataaacagggggtccccatactttagtggtattttaaaaagaaattttatatgtatgttttaaattatcaaattttaattaaactacactttttctaaactaatatattagtaagaaataagtttttaaaagcacacacgtggcgtccctgaggttcagggcgttacattggacgtagtagttggtttctaattagcaacttggtaggctttccatatcagtttggtggcctgtcttgttcgatcatcgatggctgcttgctgagccttcaatgtttcgatttccctatccctccattcaatgaattgacgcctctgctctttaaacgcaaggttcattgcagcacggagttcttcctgatcatgatgcaaagtattagtgtgaccttgcatgagccctctatttaattatttgtttcttcaatttaatacatttaattaa

SEQ ID NO: 155618 - DNA, 507 bp, Cannabis sativa
tgatccttgtctaatgatctttttagacagcctttcccaacccgcatgattcccgcaaaagccttcatgaatttctctaatgattttgtttgcttctacgggaagaacacattgaagtaggggcattgaatatcctcttttgtatagttttccttcgatcattgtgtaacgaggcactatataaaaaagtttttgcacctcgtttttttcattcagaagttgcatgttgagtaattagttgacaataggtgtcatccatgttggagagctatctactatctcaatgtcttctgtttcacatatacttggctcttttagcatttctaccgaaacaagatttagttcgtccatatcattctgcgaggcaagttttgctaaggcatccgaactggagttctattctattagaatttgttcgattttaaattaatcaaatcgttccaagttctttcgaactttctctaaatacttcaccattttcaagcccttggcctggtattccccgag

SEQ ID NO: 155619 - DNA, 593 bp, Cannabis sativa
ttagcagtgaactgggccgggcagacgccgaagaagtctgccacatccttaaagtatttatgcaagggcatcaacgctgcccatgggcacccgaccaggcacacatcccttgtcagggtttgtggcacgattgttgtgtgcgggaatgtagcagtccagtttgcccaggtatctgccctggtcaagagttcgaaggcgcgcttccgtaatcttcgacggagggcttacccacctagcgcccaaggcaccctgccttctatgaggaaccgtcgcagcaagatcctcattgacttagtccacgccctgaaccaggacgtctccatcagcatcgactggctccctcgcctcgtggtactccctgtaatttggggggttcaatctcagcctcttcctccgccttggagggactgccaagacgtacatcgtccagctcctcgatctcctagacctcagcatccccttcatgatcctcctccatctagacggccggatcctgttccgtgctgggaaaagttgcgtgccgagccacttgcggatcagatgcgtcagcccgacgcgtggttttctttgtacgagccatcaccctatggctg

SEQ ID NO: 155620 - DNA, 584 bp, Cannabis sativa
ttaacgggagatcaaacctatcgttaaatttaacagaatattcttttatttttaaaagtatattctgttaaaccaagaaatgccgttagataggcactttattataaattatttattcacagtaagaataactattatatgagtatgtaaattttgagattaacgtacatttaattattaataacaatatacatattataagtttacatatacaattatattttatttaccaaatatattgacatacggtacatttataaaataaattatttaaataattatacagctttagttaccaaaatctaaaaaaataaaagattaaaccttaaataaaactaacatttacgtggcttggtacgtaccatccacctagtatatatatatcttgaaagccctttagaggatgttatttggaaataaccacctttaaagggtagtacgcgttaccctttggaggcgattacactacaatatttaatatcattagctatagatattactgctaataattggtcgctattaactattattagcgatgaactaaacatctgtcgctaatatttatgtcagtcttgaaatacaaa

SEQ ID NO: 155621 - DNA, 517 bp, Cannabis sativa
aactatatcacacgtgatctaaaacatcgatgtagaaaaatatgcatgttaaactttagatgcagacactaactcacacacgaatagctacaaactcaggctttcagtagatgcagcccaagacacaaattaataaaatgggcttcggcatgactctccaaacaagtaatggggaattgctcttgactttggcaagaccttggaacagaattcatcagtcattattaatggaagcgcacgccttacactatgctctttcatggtgtcggagtcattcaatctacctggactgcatcacctcagattgtaaggttctagttgactacatttgtaataatgatactcataatcttcattttaacaagtttgtttatgagattcaaagcaacaaactagccaagaaagctttaggcttatatcaggaagctttatagaaaaattattcattccaattgtaatttgtattccggatgctcttgtttaaatttttaaatggatactgattttctcaaaaaaa

SEQ ID NO: 155622 - DNA, 562 bp, Cannabis sativa
gaaagtatgaaccaatgctaccaatactagtacgccagattattgagtgcatgtggtattatggttggttatactttcgaaagcatgaactagtgctacctacactagtacacttaagtactgagtgcatgtggtattatggcttgttgtacttatagtatggattgatgctattaacactagtacgactagagtactaagtgcatgtggtataatggtcaattatactatggtcaagaatgttcgagactcaattctacgtgtttgcattgtttaagacttgttgataggtgtatgggcacttagttgtaggtcagctatatatttacgttttatgcttttcttactgagtctgttgactcacagatgctatgttatgttaaggtaaaggaaaagctgttgttgagcggcagtgagttttgagctggatgaagattgtatatatcgagacattttgacctggcgtgttggatcttcgggacaactagggctcacgattttgtagtcgttgtgcgacatcttttgaatatgtaaagttgaaaaatgtagatacgggatccca

SEQ ID NO: 155623 - DNA, 514 bp, Cannabis sativa
tagttccaaggcccaggtcccccatccaggtctgtgttctaagtctcgatctaggtctaggtttaggtttaggttgagatcttgagtcccgatctgagtccaagttccagcctgagtatcggtccaagtctaggtctcaataaatgtttgagtcttggtctgagtctggtccgagttagggtctgggttccaaccctgttccgggtccaggtttgggttcgaatccatggtttgagtcccaagttcagattcgggtcttggctcaggggtcgggtctatgtcccccatccaagtttgagtcctaggtcccggtctatgtccaagtttgggtttgggtccttatcctagttccagttccgattatgtgtccgggtttgggtactgttctaggtctgggtcagggtctgagtcctgatctgagtttgggtccaggtctgggtctagctccgaatctcagtctgcgactgggttcgagtctaggtttgggtctcgggtctgggtctgggtccagttc

SEQ ID NO: 155624 - DNA, 742 bp, Cannabis sativa
tatctggtattttcttcctttctgctctctctttaattataatgtccaatctatgattacatgacttttgagtacaataattaagtgtgtagttacttgaagatatctcaattgattaggtgtgtgaatgtgtgggagattgtatagcgggatgggttgaaatccccattataacatttgaataacaatgtgtatattataggtttatatatacaattatgatattattaacaattagttatataaaacatatcgttcataaaataatttacaattagttaccgaatttttaaacaaaaaccactaaaacttatataaaactaatatttacgtggctcaccacgtaactctcatctcgtatttagaaaatatattgttgatgaagattttcaagaccaataagtttttaaacaaaatatgaaatgtgtaattgtaatgtttctataaagaatattgaagcaaaataaaatagaacaagccaaaggctatacaccctttaagtagtaatatatattaaatatgattaaaaaccatacaaactatacaaaagatgttttagtgtattgttatatcatacttttggtacttatattaccatattttgagttgtagtaatgagtttcatataaattatttaaaatttgtgaaatttattattgaattaaattatagtaataattgtatgaggaaattacactctatgtcctttttatattgtcctcttttatttttactttttttt

SEQ ID NO: 155625 - DNA, 598 bp, Cannabis sativa
  modified_base (26)..(28): a, c, t, g, unknown or other
  modified_base (56)..(58): a, c, t, g, unknown or other
aataagtagaactagaatttactaannnataagtagaactagaatttactaagtannntctctaacttattaatttctctttccgccactatagattcgaaattgcacacgtaattatatagaatgctctatatgtaccaagatatagatactttatgattatccattattacaatcctaatagtcaaaaatcctttatagatgatctacatcgagtaaagacaaatttaccattctactctttaatgtattttatccttaaaacacttagctacctacaaatgatatttcagtaaactaatataattattgaaattaggcctcaatcatttatctctatcaatccaagctcgaaggaaatcatcgtttcacttctaaatatttatagaagctatagattcaatatctatgattaacgctcccactcaattgaactaccatgtccttaatctgtatgtcacgagaagatctaattggtcgaatttcacgaaaaaatggaagaacataaataatacaagtatgattgaacctaactatcttaggattaagatctattgacctaagatcaaccagtgatattgacttagaaagttataac

SEQ ID NO: 155626 - DNA, 508 bp, Cannabis sativa
tcaatacatcccttttaagaaggtgcattgtagaatcatcctataataattaattgtaagaaaattttatttacacttaaaaaatttcaaagagaccttattttaataatatttattttatataaaattatatctttaattgtattaagtttttgggtatttttcatttaggcatatcaaaaaaatccatttagttggagcggattggagttccggcccgacggatcacctctgatccgaaacattcggatacttatcggatctcggatcagatccgctctgacccgcctaattttttctggatcggatctgatccgacccgatttcaatttattttaaaaaaaaaaaaaattaattcaagactcacatctcttgggacttagactcgaacccggacctagactcgaacttattcaaagacaacttaatttcatttttacacttctaaacattttttttttgcatttttacggaattctatatagaaacccctattgtaactagcact

SEQ ID NO: 155627 - DNA, 504 bp, Cannabis sativa
ttatattattttataacagatttttatttttattcaaacaataatgacatgaacaaaataaaagtactaatccatgaacgtatgtatacattatttgtgcatatatatatatatattcatatatattattatgtggcgtggtagtaagatggaaaacactataggttttgttctaatttatttaaacattattaataaattgagaatatataagataaataatgacataaacaaaataaaactaattcatgaattattggccaataagaataaaccactcgaattaatatttcttttacttggcatcatgacatcacagcgatgtcatgatgatcggaaaccaccccggacactgcccggggcagctagagcaaatgaagcattattaatcacaaataattaattaatgttatcacaataataccaccaaagatcttaattgcttattctgcttattaatagtactctccatcttcatatctgatttttgctttaattaattaa

SEQ ID NO: 155628 - DNA, 797 bp, Cannabis sativa
  modified_base (745)..(748): a, c, t, g, unknown or other
aattttagaccaacttaaatcagattatttttcttagaattaataattacgttgattttattcaaggtacttaattgtttgtttatatttttaataagtttaatttaattagaaaattacatttaagctggaaatttttcaattttagaccaacttaaattaaaataatttttagaatatattttattttattttaataatcattccctcataaatttcaaattacatttatttaaatgttgatatttcaaaaaatttcaattttgaaaaattagattaagttaaaaattaattttaattaattttagatcaacttaaatcaagtaattttcgtcaatgatttattaaaataattgactaaaatatattatattttaattagaaaataagtaattagtttatgaattatctagatagatattttctaggtagacttttggtatttttctatatattaaataagaaaattactatttaaattgattttgttctacacacttaaatattttatatttttcttaagattatttaattaaatagaaaaagtatttttattattaaaaattaatttatttaattttagaccaacataaattagaatcatttttccaaatttatttattttattttaatgtgaatttcgaaaatgtatttttataatacattggatttttaattctatcatatttatttataaaatattaaatttgagttaaaaattaatttaaattaattttggaccaannnnaattaagtaattttcataatatatgttggaaaattaataataaggatgg

SEQ ID NO: 155629 - DNA, 567 bp, Cannabis sativa
aagaagtagaaaaaaaaaaaaaaaacttacaaaattatatataattgaaaaaaaaaaatcaaaattctaattaaattgaataaggatgtgtacatataaaaaacatctcaaatagagagctaaaagtatggtgtatatgcatattttagctcatctcaaatgaaaatttaaaatttacggacatttacactaaatactaattattcttgtaaaaattacccaaaatatgggaaaattttaagagtttacttttttatggcataaataaataaagctaagtggttatggttttttttttttttgtttttttacatttatatgggttttttttatgtcatatttttgtaaaaaaaagtagaaatctcatatttgtaaaacaacaataagttttgccgggaaagttgccggtaccgaaaaagtcgctggaaaagtcaacggcaccgaaaaagttgccggaaaaatcacgtcccccggaaaagtcgtcggaaaagtcaacgtcgccgaaaaagtcaacgtcactggaaaagtcaccatagtaaatgtctcatatataactaaaaatataac

SEQ ID NO: 155630 - DNA, 612 bp, Cannabis sativa
gtgtaggagtaaaacagtaataaaatgtgcaaaacagatttttggtgtaaaaatttcatatacatttcattatttatatttttaaaagtaattatttaataaatatatattttataagttttttatagttgatgtaatatataataataataatatacaatttattaaggatttttttttaaaaaagatttttatatataatttatatttttattagtccaaaaataatattcaaactaaattattataaatgaaactaaacattattttcttttttcttaatatgtaaagaaaaatataaatgatgagaacattgtttttactatttatctattttataatatgtcttttaagtaatatataaatatatatgagggaagttgaggaatgccccttttttgtattagttaaccaaaaatacctccacattagatttgattgaaatatacccagttttacaagtgcattacctaagatgcccttcacacaaatctcatccatagccattaacaccccaacggaactttagattatgccatctcatgccctcccaacgtacccaccattgccagcatccctctgcctcctccgccaggccatcaacactacaca

SEQ ID NO: 155631 - DNA, 624 bp, Cannabis sativa
taggcatatacaatcttagtctcattcatggttcccttagaaactttgtatgaaacttaatggtgagtctattatagtcgaatactcaacttaagacccaacatttgtccaagttgttacacttgagacttgtactttgctgatacccagccttgtacaatgacattgtttggcatgtacccttgagtatgattgtccaaagttttgtctatggcttggaagctgcaaggaactctaccttttggcttggaaccttccaaaaactctgccttagccttagcccgatacgtggttcctataggaactctgtctagttcttctcgggctatacggttcttgctaggccttgtcctgatgcatgtgaactgattttttattcacattcggtctcaaggctttcatgttcttgcttttggcctataggcacttagtttttgaacactactattatttagccttaaagcctttcactatggacatatgatcgtcctagctatcttcttatggccatgacatgtaagtatccagatttaatttttttatgccaagccaaagtatgcatgcacttaacttaaaggtaggtttagtagcttattctaggcgttaaaatttctctgcataagt

SEQ ID NO: 155632 - DNA, 616 bp, Cannabis sativa
ctgaagaacattttgaaagattttaactttatcaagagcgttagatttttcttgaatcaagtgaagccatatagagaaaaatcatttatgaaagttatggcatacttgtatccttaacgtatttgaataaggtccactaatgtcagtatggataatctctaataaagattgactgcaattagcaatcttctttcttcttttagtcaattttccacaagtgcaatcagcacaagtatcccaaccagaagtatcaagaggaggaagaattttagctctaactaatcgttcaaacttgtttcagaaatttaacccaatataaggatgttaccttaatataagagctcttacgcacattattcacaaaattgaaagaggaaactaaggaagttaatgataatttaaaaagaccaccagagtaaaaacagtttccaattattcgaagtcaaacataatgtcaacataatgattgacaaaatgaaaaaaaaaaatcattattgaactaatagcggaagcgaaaataaataacttttaaaagtagacattaagaaagtactgttcaaaacaatctgaacactacacttgttgggttttgtgccgtaaataaaacccatttcaa

SEQ ID NO: 155633 - DNA, 594 bp, Cannabis sativa
ttgattgttgttcggggttggaaggtaatttcatactgacccagttctaccgcccacttgagtaaccacccagaggcgtccagcttttgcaatatttgacgtaacggttggttagtgtacacccgaacaggatgagcttcaaaatagagccttagctttcttggttctagaatcgggcaataagtgagtttctctatcaatggatatcggccttcggcctcaatgagtcttttactaatgtaatagatcgggtgttatatgttgttttcctctctgatcagcacggcacttacagcatgctctatgacagctaagtatatcccaagttcttctccgtcaagaggtttcgagagtacgggaggttttgcgagttgcatttttagctcttgaaaagctttttcacattccattgtccactcaaattgcttgttttctcgcaggatgttgaagaacaaaacacacttgtctgttgattttgaaacaaatctactaagtgcggtgatccgaacagttaaactttgtacttccttggttcttgttggcaatttcatatcccgaagggcttgaatcttctctagattggcttcaattcct

SEQ ID NO: 155634 - DNA, 574 bp, Cannabis sativa
tttttatttatattaaaaataaagctttttttttttaaaaaaaaaaaacatatatagagtaaaccttctttttttttccttatttcttttctaatttgtttttgtttttctgaggttttagtttttgtttttttaagttttttcctttcttatttgagaataactttagtgtttctattgagaatggggtctatgctattgtctttttacttgagtgaatattatgaaatatgttgggaaaaaagaaataagaatttttcttttgatgaaaagatacaataaaaagttacttgggcttttctttattatttttatttcctataattaaatttgaagattttatttgaatttcaaagataagattatattcattatatctgaaagtttgagcatgatttttttttaaaaaaattcttctttcgtattttggttatttgatcttgaatctctacgataaaatttagttttaagtcacattatgttatcttactgtttaaaatacttttgagttatttttatttttagtaacatttttcttactttctaaactaaattgagaattttatggtaagat

SEQ ID NO: 155635 - DNA, 995 bp, Cannabis sativa
cttagtcctagtcctagttcggttccagttctagttgcaattctgagtttgagtttggattcaagttcatgtcagggttcgagtcttggtctgagtttgggttcgggtttcgatataggtctggatcaagctccgggtgtgggttcgggtccaggttcgggtctgggtccgagtcccaagttccattctcgatctgagtttgggttcagttctgggtctaagtcgtgggttccaatcctagtctgggttcgagttcatgtccgggtctaggtctaggtttgggtctgattctaggtctttgtctgagttcaggtcctgagtaagggtccgattttgggtttgggttcgggttcgggtttgatcctggttcgtgtccaggttcctatcctagtctgggttcggggtaggtttcgagtcagggtctgggtctgacttcagattctcgggtccaggtcaagtcctagtttgggttcgagtcccggatttcgatttgggtctgggttctagggcctaggtccctggtctaggtcttccatctatgtccggttcctaggtcttggtcttggtccaggttcaggtttgggtcccgagtcttggttcgagttcggtcccaatttgggttcgggtccaagtttcgttcccagtcttggtccgggttcgggttcgggtacgacttcgggtcccagtcctagtgtgggtctgatttttaagtcccatgtctatgtctggttgttagttcctaggtgtggtctcagtttttttggtctaggtctgggtcagggtccaggacccggtctgggtccaggtcctggtcttggtttaggtcgcaagtcacaggtcccggtctgggtcgaagtcccagtattggttcaggtctgaatttggatttaggtccgagtctttatctagggtcgggtcccgtgtctcgagtgtagggttcagtttttgatctcggtcccagttctggggcacaattttttgtcaaagtcccccat

SEQ ID NO: 155636 - DNA, 952 bp, Cannabis sativa
cagccggtgataggtcctggaggtcgaaggcttgatgtctgccaccaccacgatcttctccagctggtgggcgcatgtcaaagtagaatggagctcagccgcttcccacctgttgccaccgcgcttcccctttccttgaagacttggaaccagacgcggaggtagacattgtttggttctgaaaaagattgaaaaaatccagcagttaggccccaaacaaaaccctaattcaagaagggaatgggggtcccctaaccgctggaaagaggtcccctccggacacttgccaaaaaagaaaagccacaaaaggttttccttgacaagcgtcgggtgcaagaatcccaaaggtactgacattgcaaaaaagtaaagagagaaagaaaaaaaagggtaaaaccaaaaaggcaaagtctactctaagccctaaaattgtcattacgtgggataaagatggttcctcaataaaaacgcagtaagaagaaatgatctaaatgcaaaaaggagtaatttaatacatcattcagaaattcgaacaagacttttcccagaagttcaacatccaacccagaaacagtaaagcatgctatgtaaaccaacagtgaacaagtatacgagatatgaagaacttacatgaagtttgaagactgggggttggtgttgatcgccggtaaaacgtagactggcagcgccgaaggaataagagcagaaaatcaatggtgtttgaagtttcttttctctctgaaaaactctgagaaattttggtgaaatgctgaaagtaaccaaatgaagtaagaaggctggcttttataggccagaatagacgtgggagagctgtgataagccaccatcgtacggtcaggatggtaattgattcgaattccacaaatccaacggttcaattaaacactcatcaaggcggtagaaaacacttgagtacccgtctgacacccat

SEQ ID NO: 155637 - DNA, 534 bp, Cannabis sativa
aaattaacaaattaatattatagttaccgaataaaataaatataccttatatatgtatatttgtaccgaaatttactgaaaatattcctaccgaaccgaaaaaaataaaatctcacaaatttcaatcaaccaccgtcccctcaaaacagtgcgtaacctcctagtgctgaatcatatataactatttgagaacaaaaaaaattaaaaagaaacattcgactattcaaacctccattaaagctctgcaaaaatatcggtggaatctaaaaaaaaaatcaccattaaagcttgacaaaagcttcaatccacaaaattctaaaacaaactaaaaccatcaacaagaaactaaatggtaaactttgataaacttaaaaacaaaaagaaatacaatagtaaactttgataagtcaaaactacacaatttttatcaatttcaaaatcaataatatctttcttgaaacacatacaagaacagtaacaagatgatgtattagaaactaaacaataaatttctaatctctgaataacaaataa

SEQ ID NO: 155638 - DNA, 521 bp, Cannabis sativa
agcttttggaacatcagggagtatttgaaagttttgaggaaatcagaggtggccatcaaggtcacagatcctcttttaattcatatctagaatgttcgaaatgcaagaatcaccatcagggtgaatgtcgggccaaggctgtgtatcatatttggtatggatcttatgaatcgggtgctcaaggattacctggatagatgcgtgatcgtatttattgataacatattggttttattttgaattagaagaggaacatgagttgcatctcatatcagtattgcagtggttacgagaccacaagctgtatgctaaatttaaaagtgtgaattttggctatctcgtgtctctttcttggggcacatagtagataagatgggatcatggtggatccagccaaggttgaagttgttcaagattggccaacaccaaaatctgctactgaagttagaagctttctgggtttagttgggtattatcgccggttcgttgagggtttctcaaaggttgttgtacccttaacg

SEQ ID NO: 155639 - DNA, 532 bp, Cannabis sativa
accgacctttgtgttctacagttctatgctggagcattcgcgagccatcatttggtcacttcacactactcccacacctatcggtgtttgaaactttagggataagtgcttaattgaactaactgccccagtccaattaatgttggttgacccagcagtatgttgtaggctgatggcaggttgacaactaaaaagtcttgcattatagtggtggataaaggtgcttcgcccaatgttaataggagctcgattattccttgactggcaacactatcgcccgtaaatccacatagatttaccatgcaaggttttaatttggctttttaaagtcccattttcctcagtgtttccttatataggatgttcagtgaactcccgttgtccaccagcactctttttatcctttttttttttgcaagttggatggtaattacaagtgggttgacgtgtggatatctcacgtgtttttcatcttcctctgagtatagaatcgaaggttcttcagtcttagctttcttagaaggttctggag

SEQ ID NO: 155640 - DNA, 1065 bp, Cannabis sativa
  modified_base (995)..(1007): a, c, t, g, unknown or other
aactgtctgcttatgaaggagaacatgtggccaatccccacctgtatcgttccattgttggtgctctccagtatttgacaattacacggcctgagatctcttatagtgtcaataaagtttgtcaatatatggcaaaccctctctcatctcactggaatgtcgttaaacgcattctacgatacttaagtggcactgtcacacatggcctgctgtttaaaccattgactgaacttgaggtttctgcctttagtgatgccgattgggccagtgaccctgacgacagacgctttacatctggtttctcgatcttttttgggcaaaatttttatttgcttggcaatgcaagaagcagcatattgtctcccggtcaagcactgaagttgaacaccgaagtgttgctcaagcagtttctgaactcacttggcttaattctctgtttacagagctttgagttcccttcgctcgcacaccagttttatggtgtgacaacctgagtattgttctattgacggccaatcctgttcttcatgcccgaacgaagcacattgagttagatttctattttgtccgagagaagatatcacagcaacttgttcgagttaatcatatccctgcacttgacctgattgctgatggtttcactaaagctttatctagctcaagatttggtgttttttgtaacaaacttggtcttgatgtatgcaccaattccaagtttgggggggggggagtataaaggaggatagtttgttattctgttagagttagttactgtctgttatacagttggttagattaagtaagtttcttccaactgtttcttgattgtttttgcttgtatataaagctctgtaactctctctattggaatcaagttattctttcagctcactctttctctttctttcttcttctttcttcttctctgtttcatcttcttcatgtctagatacaacactatgtgtaacagacatgaacctgcttagcacactgannnnnnnnnnnnngtcaggtctagtactaaccatcaagtacattatggaccccactgcattagagtaggga

SEQ ID NO: 155641 - DNA, 655 bp, Cannabis sativa
ttgatgtatatatttgagtgagggcttaagcctacatatgggctaaagtccctccgtccctgactatccattctactcccattagtgtcaaactacttatacattaataagaaaatactccagtcctttaaataagtcaactccataattttttcaattgtgccataaaaattttgtccatcttcactgggaaccataacactgctattttgtgttttgcggttatcatctctatccttaactaaaaacttaatgccattcactatgcactcaagataaaaataaattgttggattcactgggtctgcaatagcacacaactcatctgacaccacagtagggttgttcaatcgttgttcattaagctacaattgagaaaaaatgaaagttattaaggaaaattcaagtgttagggtgaacaagattatgaatataagatttagcaacaatacttactcgagttttgaaccattcagaaaaactcaatctcttgcatattttcaatattgcctacaacctctcacatgaaggaactccttgtgctcactacatcaaaatacacttggtaagtttaggatttttgaggtgaactcaaatgttcttccttacttttaattgaaagtagacttacttgatatacggctcaacctctgtg

SEQ ID NO: 155642 - DNA, 865 bp, Cannabis sativa
  modified_base (838)..(839): a, c, t, g, unknown or other
aactcatgctctctgggaggacccccctatacgaacataaacaaatagattaatttataatacattaaaaaaaatcatattttacaattaaccgattaatacttacaaatccgtgtcgtatcgaagccaacgatcttgtgccttgcgtcgttggatatttcatctgttgcctattctctttgtttttacttgaacggtccaaaaagtttttgctggctggtgaacatttcgcaaatagacttccaactctcgacattcaagtagtcagggggcaattgaagaagtttctcccaatcttctggtttagtgtaatgttgtttaaaatgcatgtgtctgttggtctttcgctcactttacctctccgccatcttcgtatataaagtccccataagtaggtcttgatggggaatcccgtcaatataaaaataatactatgtaataaaataatttaaaatttatattaatttataactaaggatataaaataattataccataaataatggaaaatcactcacccttattcgattaagcacttgatccttaaattattggggtacatcagaaaaattataatgatgacctggacaaaaaatagaaacttgctggcccataaatccaacgtaagagctggcttcagtcccaactactttgccagtttcaagatccacctcaagctctaatagcttatcagcgtccctccttctttgttcaagtttagcgtttgatgcaaggccacgatcctttctgactgttggttcagttttatttattcgagagaaaaattattctgctagtacattgaacatttatgatgtatgtaaagcccgcttagttnntttggaaattagcagttatttatgtt

SEQ ID NO: 155643 - DNA, 854 bp, Cannabis sativa
  modified_base (52)..(56): a, c, t, g, unknown or other
aaaaactacccacaaggttagagcctctctctctctagtttctctctctagnnnnnagagcttaaacacttagcatttttctataattctcatgagaaataaaaaattgacatggagagtgaaatactataaattttgtgtgtctctctaaattatttggttaaacttattaatcatctcgtcaatctagcgagctagttttggccacttttcagcatcaacactatccatctcaggattgagatcaattgacctaagatcaactaagtgacaccaacttagaaaagatgtgacagtaagtttatgatatttttttcactgccaatatcgatccagtccaatgtatagtcgatacattcgatataagtttactttactaatgccctaaaaagggcattcgacttatacaagtgtaagtaaaccacatctttgattatcagattagtataaattcagtgcactaataaatcgtatgactaaataatttgaagcatatattcttgattattttccactgtgttgacaatactataatcacgaatatcaatatgtttataatttaacaaaatttatatattgaacatataatcttgaaagtaacatgtgaaccatgcaacaaaaaatgatttctgatcttttattaattaataaataagattatgttgaaatagattttatttagggcataaaatcccaacagttcttcccacaaacaatgccaaactattgacagttgaactcgtcaattacattgtggagagaaacatttactagtgactgataaaaatggtgaagtgatgttattgtaaaagtgtgtgtgtgtgtgtgtgtgtgtgagtgtgtgtgtgtgtgtg

SEQ ID NO: 155644 - DNA, 518 bp, Cannabis sativa
  modified_base (34)..(40): a, c, t, g, unknown or other
atagaagccatagattctatatctatgattagcnnnnnnnctcaattgaactaccatgttcataagatgtaagatttgggctaatacattggtcaactttaacgaacaattctaagaacataaataacacagttaagatcaaacctaactatctcagaattaagatctattaacctaagatcaactaactaatattgacttagatagatataatggtaagtttatgatatcttgtctaatgtcaatatcggtccagtctggtgtatactccatacatccgatactagcatactttactaatgctttagaaaggatataacacttatccaaggtgtaagtatactttattgccgattatcatgtcagtctaaatctaatgtattaaaaatcatgagacaaaaactttaaaatatattatcatgattatattccactgtgttgacaatactataatcatgaacaaccatatgttttagatttaatagaatttatacattaaatatataatcatgaaaaaa

SEQ ID NO: 155645 - DNA, 1097 bp, Cannabis sativa
  modified_base (66)..(66): a, c, t, g, unknown or other
tttttgcaggagccttacgtagttgatcttgatgattagaaagtacattgttctttttagtatatnagtgaggacatggatgagaacaaattgtagtgttttgtacttatggtttctagttattatatttgagtttacggttggtagttaatattgatgtattaaatattgttaggaacaaaaattcaattattcattgaaaaccttagtttccaaccttatctattattaaagtaaaattgaaaaaaaaaatgaccatcacacccttataattctcttcattaaaaataaattgacttacataattattacaatattgattttaaaaggcaaaaccaaagaaaaaagaaatcccttttaataagacatgtcatattgtaatactataatagttataactaaccacctcctaataataataataatttttagaaagaaaataaaaagaaaagagggaaaataataataataatcaatggtgcattatcttttctcatcaaattttctctctctctaaaataacataataaataaaaaaaaaaaagtgtataatgaattgtctcaaccaccaaaattaaataccattcactttaacaaatgaaacaaaataaaaaacacaactaagtagtaagtattctaactaaaaaaaaaataggtccggcataacccgacccaattatctcgggtcgggcttgacccgctaggcaaaaagaaggagtcggactgggccgggccgaaccaaagttatgtcgggccgggccgggtttgtggcgggccgggcccgactgacattcctaagggcactcattcactcaaggttcaaatatggtgaagaacaatgaaggaggtgagaaatgactaaggaaggaactctctcatataggttgaagaatagtcaagatgactttaatttgacaaagtgtcaagtggatgagataagagtatcatgttccttttatagtgtttcaactaaggctaagggttgaattatatggattcaaaaagaataaaatattgggcaaaaatccacatcatggtcgtgcactataaaggaccaatttctagttagacttttgccactttatttcaaccactta

SEQ ID NO: 155646 - DNA, 579 bp, Cannabis sativa
gatttgtgaaatggtatcagagccgccattgttggttgggcttcatcttcattttctttcttgtttcattgatttcttgttttttcttcaatggcacatggtggaggagctcaaactcgaaccaatcgtgatgctactaatgcatcaaatgattcgaacagatactctgttcttggagaaaactcaagatccagcactgccaatgatttgtcgaatccattcttcctttcgaatggtgataatccagctgcagtccttgtaccaaaaatcttaacaggtagtgaaaattacagtacctggagaaggtctatgatgattgctcttgttgctagaaacaagatgaagttcgtcaatggcaagattccacagccagatgaggaacatgaggattttgatgcttggtgtcgatgtaacagtactgtaatttcttggatactacatgcgatttctggtgagattgcagatagcattatgtaccttgataatgcagctgagatttggtctgagttacatgaaagatttaatgaaaagaatgctccaagaatttatgatgcaaagaagactatgcagaatcttgtg

SEQ ID NO: 155647 - DNA, 753 bp, Cannabis sativa
acaaaatatcgacatcctgtcgatattcagtcgacaatacaaacttaaaatcaacatgttaatatagatgacaacatatcgacatacgatcgacaagttgtcgacaatttagggcagaaaataaattaaaccaccaatcgacgtcctatcgacatacaaacgatatcctatcgacatgcaataacagcaatacaatttaaacagacaccaaatctttcgacatcctatcgatatgtcatcgataaccctgtaataaacatagataccattgaaacaccaacatctaacaacctaaagaagcacaaaatctaaaaaaaattccactaatctcaacaacatgcaataattggcatccaaatctatgaaaaatatattttttctcataaaaagccttacctttgaatgaaattggtggtggtggtgacgggtcctgctcgtggtggcggcgacagttcttccttcggtttcggtcgacgtttcgtcgtgggtttgggtgaaattagagagagacacacctcggtttgggtttgggtttgcctcgttcgtgggtttggttcgccggttgctgggtttgtcgggttcgtggtggagatgggtcgacggagatgggtttggggtttggggtttacaggtttgggggtttggggtttaatggttcctggttcgtggtggagatgggtcgacggagtggttcctggtttgtgagatcgtgaagagggaaagtcagaaagagagagagagggaaagtcagag

SEQ ID NO: 155648 - DNA, 708 bp, Cannabis sativa
  modified_base (681)..(682): a, c, t, g, unknown or other
ttctagtttatagtcattatttttcctggttgtcccatgtggatcaaaccaagtaccacaagcttggttactcctagttatcacaagtttggttactcttagtcagggtcgaccttgagaatatatggacctaagacaaattaaattttggggccctcagaaatatataaaaaaaaaatttaaaaagagtattataaaaattcgaacctgaaaaattgagtttttgcaaatctcaattatatattcgtacgaaaatatacaattgaatacgtctgcagaagcagaatgtaattctgttactgcagagaccaattttgtagagacaaaacagaacatgcagaatattaaaataactgtagaaaattaaatcacttgacacaagaaatttgtacgtggtatcagtgttctttcaaacactactagtccacggggccatgcccagagaatgaaatcaattagtaaagtatcaaagtttacaaaagcaattgacttaaacaaatttagacttcctccagtgatttgccgcaaccctttgtaaatccaccttgctaatcagatctctgaaacacaccaagtagtgaactcccttcagctattgatgtgtgcttacttcctcacgaagtaaggcttaaacatatctcctctcgaagatatatcctcactgttgggttttatgccctnnataaaactctttacaatctgattagt

SEQ ID NO: 155649 - DNA, 952 bp, Cannabis sativa
  modified_base (889)..(894): a, c, t, g, unknown or other
ataataataataataatagaatcagttatacgtgatactaaataatattgcaattacttttgaccacgtttaaattttttattaaaaaattttaattaatttttgacaaaaacttactttatgttttttttttaaatgataacttaaatgtcaagtattacataattataactaaagagcattgctattgggcacccgtggtgcccaacacctttcataaatgacaccctacgattagttagcgatattttctaaatcttatattttttttaagttatatgaggcctgctagataattacaccaatagcggtatgatatcaaggagagttacattttagcatttctcataacttaaatatcacattttttttatatattttttttaattaaaatattttaaaaaaataatagtcacttttttaaagcatattaattaataataacataacaaattaataaattgtctccaatatcttaaaaatatttaaaattcgagatgaaatctaagattaagatatagatttgagaaatacaatagtgacgactacaagtgaacggtaatgacaagggatgagatacaatgatgacaacggttgagatacggtaataaaaataaatgagatacaatgagacaacaagtgagatataataataacaatagttttgaatgatcgagatatgaaaataatacattatgggaaacaccgtaattttttctacaccacactatttatttatttttataaaaataattttttaacaaaacaatttaaaatactacatataataaattttaaatttcttaataattaaatccaaataataattaataaaattatatttagtttttagtaaatgaaattattaataataatatgaaataagatnnnnnntttataattttactatatattataattatatttttaagtaactatttattataatact

SEQ ID NO: 155650 - DNA, 597 bp, Cannabis sativa
accttccacaatatattccaatcaacagaaactagaaaaacacacaaaatcaaaacatgccatggatgacccaaacttgagttttcaaactcaaacttgtacagccatcaccgcacaaccctaaaccagctgctagaacatcaaacaaactaaaattatgcttaaaaactggattacaaacgtttctaaccctaacagccactaaaactcaaaattgcataaacaagctaattttcaagttaagaactaaagggctatggtactagggcttacctcccccttggaaatacttgaatacttgctgaattccaaaaaaacaaggtgaaatttggctggttcctcttggctttgatggtggtcgagcaaaaagaaagagaaatgggagtgactttctctaatttgtgtttttcttttaattcctttatttcaaaatgataaatcccaattaaattagtttaggctcaaagaaaaagaggctaggtgtcacctatatacccagccacatgtcccacatggcaaattaccaagatacccttgctacttaacttaagcaaattcaagcctaggggtaagatagtcaaaaaccataaccccgct

SEQ ID NO: 155651 - DNA, 525 bp, Cannabis sativa
tgtgggattacaaaatttgtagcttttttaattactagagtatacagtaaagtatagttccttactattttggagtccatattccttttatgaggcttataagacctcatcttataatcaaataaataatcacaaaattataaccctaaataaaatggaagaacaaaacctaattttttagatttttaaaaattcccaaattcttaaaacacacgaaccttgaatcctcaaagaatcaattaaaggtggctcgaataccacttgttagtttcattatcactcataaattttcaatagcaatacttaattttatacataaacatattacataaaattataagtgtataaccataaatctaaagaatacctttattgatccaaagagaagaagccaaatagtggaagcgtaccttaatccatagatagtgataatcttaatccatcttctaaagataatatttgtgggatttattgggtaatgatcttccaagaaaacaagacttaaagttttctaattttctctct

SEQ ID NO: 155652 - DNA, 533 bp, Cannabis sativa
  modified_base (464)..(465): a, c, t, g, unknown or other
tttaatctgtgtatacacctagtatcacgataggattcatccaaatcaatgtgtgtctgtgcctatatgtttactttgggcctagatgcatatagggagcctatttaattttgataattaaaatggactaggttgctaaaataaaaatgtcactttgatagtttttatttaggtccaattagtattgggcttattcaatgaataacaattatttaattaaggttaaatttctttccttttgggcattgtgtgagagttaggcgaccattagtagtgggtacgatatactgaacgcagccctccctcacatgaattgtaataaccgcattttagattatagattagtattaatatttagcgaaaattattgatatttttataattatttatgaatttattatattgtgggtctcattatttaaaatgggcattgcagttgtaatttctcaattctggagattttnntaaactctaagagtattatttaagttaaatatgcattatgtaatttttatgatttttgctcggcggtg

SEQ ID NO: 155653 - DNA, 620 bp, Cannabis sativa
  modified_base (485)..(490): a, c, t, g, unknown or other
cgagactagggtgcggttctaggttccgacccaggttctgtgtccatagtttggttccatgtttgggtctgagttcaggttcgggtttcgatcccgagtacaggattgggtggggatgtgggtccggttcccaattcagctctaggtctgattttgagtacggttcctggaccggttacggttccggatctaggtccaatttcaattataattcctagtccaagtcctagttcaagtccttgtcaacttccagttttggttccaattttgggtcacagggtgcaggtttgggtttgggactgtgttgaggtccggttgtgggtttgggtccttgtaagggttagggtccagaggtgggtcaaaaatctagacaccgactacgggttttgtccaaaccctggatccagatctggatcccaatctcgggttccaatctggttccatttctggtgtcgggtcaggagctgggtcctaggttcaagttnnnnnntgggtcgggtactaggtcccggtcctagttctttctctcagggccctatccatattctgggtccttgtcccagttattaggtgggttttggtcccagtctaggtttgtgtttgagtcctagtctcggttc

SEQ ID NO: 155654 - DNA, 819 bp, Cannabis sativa
ttgtaattgtcttgttgaatttttaagtcaaaattttttcaaaattatctgaacatgattgtaaaaaattacagtttaagtcaatattttctatgttttgttatcaagttgtaattttcagtgtcatttgttacacttcccaaacatgtggtaaaatagttgttattaacacgtatagttgagaaaattttttagtgtaaagtttttcatttttggtgagttgtgagagttgagaaaataactttttgaacttttattgaccatttgagttggcaaaaatcaaactttcgaaatttcaaacatgacatttactagagggattaattttttgttaaaagagcctttgtatttatttctttgtaaccttattgaatttctttgtatttttattattatatgttgtctctggttaaaaaaaaaaaaaagaaacaaaaagaaacaaacaaaagtaaataaaaaaatcataagaaaaaatgaaaaaatatcatataaaaaatataatgaaaaaaagaacaagagcaacatcattttattttaattttcattttgagaaaaaaaaaagaaaaaaaaaagagtaacatcattttatttctattttcctccattctttccaaatctaaaaaaaatttcatattagtttattttaattcaaaaaaaaaaaaaaaagagaaacatcacatgtctctaaaaaaaattgttattatatttttttatttaattgttagttagttggctctttattttgtgagtgtttcatgtaaatcctaaaggttgtttgtcatttgaattctattagtttgatgtgtctattttgtgatc

SEQ ID NO: 155655 - DNA, 791 bp, Cannabis sativa
ttcaattatagtcgttatgctgtcaaaattttggtagaattaggataatatttgattttagtttctcttaaacttggttgttaggattgtatcagaaatataaggtatgctttctttaacttacttttatatgaatgtttttttttatatatatatttagatattccttaaatacttagagtaattttaaaataatattgatgtaatacatatgatagatatagtaggctaaaaaaaaaaatacaaaaaatggtctattgagatttgaacttgtgaccaaaagaataaattgataagtacaccaaaacacattctttatataaattagctactgtgattttatttaaatattaaaagaaatataaaaataaattagtattgcacatttcattgtagtagaattaaaaaatacatcataaacattgattctaatacttaacattagaattttattagtttattttaagtaaaataataaaataaaacacaaaaaaattgggtaaaaggggggcataacatgatttagtatacccaagttcaaaaaaaaaaatcgcctcaaacggacaatcagatcaaaagttattaatgttcaaagttttcaaaaaatttcatacaaagtttagccctttctctaattttttcaatttattctggtccttaaattattgttttattttattggtcttgaaaaatttaaatgtgtaagaatactaaattacttaaaaattaaagtattacacattatttattatttaataaactaataattatacaaaacataacttaaaaaa

SEQ ID NO: 155656 - DNA, 661 bp, Cannabis sativa
tctggaccaaggatcaagacctagatgaggcacttggacctaaaactaggccctaaaaccaggacggagacccaaaacttgaccctagactcgagacacgggacctgaccttggaccttaaactgaggacctgactacagggacacaactcctaacccagatccaaacccaaattaaggaccctgccgaagacccaggatttggactggaaaaagaccgacatccaagacagagatccgaatttggacctaaggctttgacctaacccgtagtcagtgtttgaatctaggactcggacctggatccgtaactatacctggacccagacccagactgagatccagacccagattcagacccagaccgtgatccaaacctgatctcggacccagaattggaatcagacaaggtctggactagaacccagacacgagacaataacaagacccaaacctaaacccatactcagacaaaaacccataccaggactaggacccggaccgggacttgtgacttgtgacctaaaccaagaccaggacctagacccagaccgagaccccgacctagacccaaaactggggctggaacctgaactcagactcgaaacctaaccaggatctgaactcggaccagacccgaacccaaatcgaaacacgaactt

SEQ ID NO: 155657 - DNA, 904 bp, Cannabis sativa
agacattatattccgctgcaaccactgtaaggttcctgatactttatacgtgtttatttcataattccaacaactaaccttagagccatggtaattgatttactttcaagaaatttgaacttaaaacgatttatgtgtgatttggatggtttcatgttgatttgtgtgttatttgatgattgattgatgtttgcaaaaattttatgaaaaataattgaatttttgttctggaattatttttgttggatagtttgggaaaaattaagcaattcacttttttttttacagaacttgatttcgatttaatttgaattagttatgatttttttgaagttttgaaaaaagatagtggtggtgtcactcaatacgcgcgcggatccgagtgatcactcggtcacgcgcgcctcagacacgaagctgtccgagatttctcggtctgaagcctcgaatttagctatgtgcgtggacaaggctgctggcagcctctctggccgagatttctcggctgtgcaccctgggttgcgcgcgcggatggtatgcagtgcataccatccgtaccatttataatttttttttcaattttcttccttttttcatgctttttcatagaattaatttcgaattttttgtgtaatattgtatttagaatttttttttcatatttcaaatctaattatcagaattaaatttattagtattttttaaagtaatttaagatattagtgaaatttgaagcttgaaaataggtaaaaatctaattttttgcttaattaattatcttatttttaaaattttattattttatcttatttttaaatttaaggttagatatttacatttttttaattgattgaccttatttgaattttaaaataagattattttaatcatgaacttttaattt

SEQ ID NO: 155658 - DNA, 524 bp, Cannabis sativa
tgtgtgaaatcaccactgtgaggctcaaatttggttaacgaaaatctgcgttaacggtttggtgctttcattgagagcctctatgaaaaagctcaggaaaagcctcctgatacaaaagtaatagatgatgccgaagaaaataatcctcgtgagggaaccaatcatcgccctggaaaagagccgttgagccctcagggatctattgattcatcacatgaatagactgtaagccctaggaaaaacctagtattggggtccctagcttcacggaccatgggtgaataatgcccagtcacatcctaaccaggttgatgatgatggcgcctacgatccaaccaggtacataccgatcgtggatttagagaatcgccaccttaggcgatgattggatgaagcaaactggagtaatgcctttagagcattagatagctgtagtaaaggcagcggaagggaatagtcctcgaaatcaacctggccttggaataggagattcacgaggcaaacctcgcaactcgcaaaccaag

SEQ ID NO: 155659 - DNA, 697 bp, Cannabis sativa
gaaaatgctgcaagaggaagctgaaatctcaatctcaattgaagggtgcagatatgttagggaagtaccaaacatgttccttccttggcctaaacacctaattataacactcaaggtaaattctcttataaattaattattaatgattaatggagtttgaatatcttcaatattcaaccatagtgaattaggttctgcgaatatatgtgctgtggtgggatggatgaataaactactattatatttgtgttatttgtcattaatcagacatgtttaaaatttttgggggcattcaattacagtcattatgctgcaaaatttcggtagaatttggattaaatttgatatattatggtgtgttttgtgtagggtccactcgctcaaccgccttcaagacgtgatgcgtcgatggggaaagctcctatgctttctccacaaggtgatcatgatgaagaagataaattattctcgcgaaatgtcatggacttgatccctaaatcgctaaaatagatggttgttaaatttctgaacctcaaagatagacgtgatataatcacaattcctgtgcctaagggattaataacatcgcgtacctagatcacgttatctgaagaaaatttgcagtcggtgtgtgacttcatcggcaaccaaggaatactgtttggaatgatgtatactcttttttaatctaattaac

SEQ ID NO: 155660 - DNA, 585 bp, Cannabis sativa
ccagttggggctttttcccgaaccctagttttccccatttttgtgtaatttagggtgtttgcatcctatttatcgataaggttatccttagttccaattttaaatccctgatagatgttttacagtgtctctcaccaagttttgaatattatggtttagggccctgtaaagcgtcgagctgcagttccactcaggctgaccggcacacctgagcacggagcgaggtaagtaagcatgaatattacatatatgtaaatgaatgcttgtttggactgtttacactactaacacagaatgttcgtgtgatttaagagtgttagtatagtgtaggatatcagtatggttataatgttaccaacacaagtaccaaagggtacgtcgtgcatgtggtacaacacttagtacctcccgggagtacaataatggctctaccaacacgagtacagggttggtttcgtagtgcatttggtacagatgtcgtacttccctgaagaacgttcttatccacttggtgagctaaattattgagctcatggcggcttaaacataaagccgatatcacattgcttatatatatgttttgct

SEQ ID NO: 155661 - DNA, 516 bp, Cannabis sativa
tcactattatgctttcaaattttactacattaaatattattaattttaatattctgatattaaaaaaaactaaaaactaaaataaaattaacctaacatctatctagttgtttgtatatgtatgtatttatatattttgaaattcatatataaaaatcaatgtaatatcaatcatttctaaatatatattggatttttttttatttttatacttgtaaaaaactttttttatatattttttatgtaaaattcctattgccactagcggaacaacctaaattataaccaaaaatcgtatagcaacctacataaaaaatcctggagacccaaatagtaaaattttttaaaaaataatatattaaataattccacatatatatttacgtgcacatatatatatatacatgttgctcctgattttgtccaatatacgtggaccaaccagacaaagacacgtggacacaaaggctttagcactcaaattaatagcgaagtctttataaagaaaggcattat

SEQ ID NO: 155662 - DNA, 545 bp, Cannabis sativa
cacaaccacactctatctttctcttcttcttcttcctccttcacatactgtttttattttgttacctactacagaaggagagagttagcttttatttgggtaatgttatagatttgggaaaaaaaaaagaaaaaaaaaatgaagaaggtgaatagtagagagagagctcaaatacaatgaaaaataaataataaaagctattacaccttaaaagaaaaaagataacgtgtagaaaccagaaagatgtatattaagctctttatgattagtttttttttaaaaaaaaaaaaaaaattcacaaaatgacaacaccatcacatcaaaacttttttactattaaatacaataaaactttcataattagttttttttttaaaaaaaaaatatatatatgtcactgacgtgacaatcgatttttccatcaacttttattatttttttttaaaaaaaataataaaaaaaacatatcttgaagtgacaaaaagcataaaagggaaaaacctttatactaattcagtatgcaatatgtagattatacagtaaaa

SEQ ID NO: 155663 - DNA, 533 bp, Cannabis sativa
tactgaaaataaaatttaaatagttatttaatacgtatataagaaaaaataatgatgattacaataaaataattaaaccttacattcactactgttaattatttaaaaaaatttaaaaatttatagtaatttttaataattataatgtatatgattaaaaagaaaaaaaaaatagactaaaaaattttttagatgtcaaaacaaattaaatgtcattttaaagagtgtactataaaattatcctgaactatatatatatatataaaaaaattacaaaaatatattttcagtaaaaataataaattatttttttttgttattttatagttatattatagctgtcatgaaattattattctagttattttttattattttatagttatcgtgagattaatttattgttattttttagtttgtttttacattttgctaaaaaatatattttttataattttaaaattctattgttgtccctgaattcgcccaaaatacgtggaccagtcaagtagggacatgtggatcagataact

SEQ ID NO: 155664 - DNA, 666 bp, Cannabis sativa
tatttttagaaaggttttgtgggtggctggctacattgatctataagatcagctaaaaaaacaaaaggacaaaaaacaaaaaaagacaaaagatccaacattaatctcatagcaaagaaattaaagttgtaggattttttgcagggtcgaaaacatcagcccaaaaaaaaaaacacaagaggcttcccttatcatatatatatattaatagtaaagtagtatatattatatatattatatatacattactcatctttaaccgcctcattactcatctcttttttttagaggaaacttgtgttgcttctcttgtactgtagtatgcataatttcatatacaaatatatatttttttatgaattgtaatgtatatggctgtggataaaaggattttcttttgtgtatgtgtttatgcagattgaatggaactccatactatgggccataaaagaatgacagtttcttcaactgtagagagtgcagtttcatctgaatgtgatgacgctccaccttctcgtgatgaattattttctattatctatgagaaagacagggtttacctttatcaggactcaatgagagatcatataatttctggccaagatcttccattgcgttgtcattatgaaggcaatgattttgaaattgactatcgatcactttctg

SEQ ID NO: 155665 - DNA, 532 bp, Cannabis sativa
ctcctactctctctgtctaacttctccctctctctctgttattcccatcccaaacctttcaagccccaattgttcacgagctccgaccaaccaagacaacctacggccaaatcttccttcggccaggacgaagactacccaaaacccacgaccaagacgactcacaacagagaagacccatgacgactcgcgatgacccacgacgacccacgagaagcacccaagacagcccacgaccaccgtattttttttctagtttttgacccatctagcgcttgttttctgcatttattttctggtttttgacgatgtcgcgaaacagcgcgaaatcatgaaacttctctaaatgtctccaattcacaacatcgcttgttttttgcatttctttttctagtttttgatgatgtcgcaaaacatcgctagatgtcccgaaaaatcgcgaaattgtgaaaacatctctaaatgtctccaattcacaacattgcaaaatacatcacgaatatcatcgctaaatattgctaaatatcgcaaa

SEQ ID NO: 155666 - DNA, 565 bp, Cannabis sativa
taaagaatataaatgtttatttttacttgtaacagtataaatgtttatttaaaataatattaaaccaaaatagaaaaaaccccttttttaaattcgtgaataaaaggagtattttgggcctgaaattatttgattgaatttggagttgaaggtgcaatgaagttggcctgacacagcttttttgggcatcagatcgaaatgaatgatttgggcctcacattgaagagaatctgtgacatgaatctataaaggcaatagaatatgtaatagaaatatttattattagagattttttcattttaatactttaaaatagtttttttttttttggtatttttacttaaatctacatagaaatttacatagtaactaacggagcaatttaattgcaactaaaagtcatatagcaactcacacgaagacaccaaaactgtaaatttgaaaaaaaaaattaaaataatatttgacataatttcccttattattattaggctaattagtaatttttcccccaaactttgacatgtaccaaatcatgccccctgaactttttggccgttaaaaa

SEQ ID NO: 155667 - DNA, 695 bp, Cannabis sativa
  modified_base (500)..(513): a, c, t, g, unknown or other
attacaagttttattaaatttatttattattttttcccatattttaaactttaattatttttcaatctcctattttttttaccttatttatttatgtcataaaaaggtaaactctattatatttttccatatttataaaaaaaaaaacccttatatttttctctaatttagctaactaataatctatatatatatatttatgtcataaatccaataaccattagctagaataaacttgggtgggaaaacctaaattacctttactttaccactaagcaacctttaaacttatggataaaatggtcatacttaaatactccacataactctgcccgctaaattttagatactaaatcgtattaaagtgacattattggtcaacacattaaatttatactgttaccaggcataaaatataaaaataccgaaattcatatacagtagaatctctatctaagaatacatttaggaccagaaaaattatattctaattgagaggnnnnnnnnnnnnnngagttacactagaaaaaaaaaataaaaacactaaaaaatatcaatgtaataataatactaataaacaatccttaatattattgttataaatagtattaattatgtggatgtccaaatcttttatttattactattaatgtaatcaacattccctttttcttagtttccctttctcttagttt

SEQ ID NO: 155668 - DNA, 942 bp, Cannabis sativa
caaggtgcaagtaaattacattgtagattatcctatcagttaaaccttgtgtactgataaatcataagaatacatttaatcacacaattttgattactttctactgtcttgacatcacaataaacaagaatatcaatgtgttaaggatttgaatgtatttataaatcaaacaaatgatcatgtaataaacatgtgaaccaaataacacattaaacaagtaatgaaatatatctgtttttttattgataaatgaatgtagaagattacattaaatagaattttagggcacgaaactcaacaaactcctacttgcactaacataaaataatcagtacattttaattaatcatagattttgtctgtgcttttaaaatgtagtgattgtcaaaatctttgtaaatggatcatgtaagttgtcttcaatatcaactttctccaccagtacgtcccctcttgccacatattctctggtgatgtggtatttcctctcaatgtatttactcctcttgtggcttcgaggctttttactgttggctataacactagtgttgccacaaagtaaaactattagtttttccattccaggaacaacaccaagttgtgtgaagaactttattagccagaccatttacttagcagcctcagcgacagctatgtattcggtctccatggtagagtctgatattgcagattgcttgacacttcttcaaacaactgctccacccccaagagtaaataccatcccaaatgtagactttctgtcatcaagacaagcctgaaaatctgagtcggtatagcctatgggatttaaagcactacccttgtagactaacaattcctactgttacctgggttcatctgatacctgctcacaattcctactgcatagcaaatgtccggtctagtgcataacatagcatacattagacttccaactgctga

SEQ ID NO: 155669 - DNA, 728 bp, Cannabis sativa
aggaattgcccttgtcacgcctggggggaaacacctgcacgctgcagtcaagttcagattcaaagcatctaacaacgaagccgagtacgaagctataatcgctggcctaagactagcccaggagatgaaggccgaacacatcaaaatctacagtgattcatagctggtggtaaatcatgtatccagagaatacgaggttcggggagaaaagacgatagcatatctgagcaaaatacatgatctgctcgcacaattcaaaagctagggtctcagacgaattccaagagaagaaaataaaattgcagacgcgttagctcgattggcaagcagcaatgtaagtgacaaggaaaacttggttcctatcaagttcctcgaagagcctagcatcacttgcacggaagaaatcgaaatgattaatacatccccaaactggatgacactaatagcggcctacctcgagtctatgaaactcccagataaccaaaatgaagctcgaaaaatgagaaggaaagctacatggtatattatagtagagggagttatgtacagaagaggattctcaatgccattgctcagatttgtcactcaagaagaagctgcacgactcctatccgaagttcatgaaggattctttggaaatcatgccgccggacagagcttatccaagaaaattctaaggcaaggttacttctagcaaacaatgattgaagattcaaaaacctatgtta

SEQ ID NO: 155670 - DNA, 756 bp, Cannabis sativa
ttctaaaaaaaattagctaaactcttccatttttctttttttgataaggagtcatttactcaaaaaaattaaatcagagtcaaaaaacaaagtcaagttccctcagaaagtaaagcaacctcaaactcgaatagaacaactcatacttaattcttttaatataaaaaaataatttaatctcatttaaaaataattaattatttaaaaatttattatacaaaaagagaattctaatttgtgtaaaaaaaggtctaatttttgtaaaaaaataaaataaaatttcattgtaaatattataattaaatgatttaactgttaaaataattatagtagagatttatataaaaaattatttataattattaattgctaaaagaagtttaattaaatattgaattaattattttaaaaaaataattgattataattaattaattctaaaaaagaagttttagatattgataatttattattaaggttaaaaaaaatgtaattaaaataaaaatgtaaccattaaataatcacctcgtctacattttaaaattttccaaaacacgaagagttgtggtcaaaataagtcaaaataaatattagtgattctgttcgacccaaccgaaggaacccaactgaagttgatttgagtccgaaattgcagaacccgaatctgcaaactataataaaccaaagcgcaaaacagaggcgtacctgggagaaaacggacacccgaaccagagccctcacctatggcagacgatg

SEQ ID NO: 155671 - DNA, 605 bp, Cannabis sativa
  modified_base (26)..(28): a, c, t, g, unknown or other
agcttttattgctttagtagtttatnnnaatagtatgatttaagaaaagcttgttagggagcatgttagtagcccaatagtagaataagcgtatgtttttaatttccaaacaagtagcattagtaagttctctttgatcatgatctgaccagactagctcttggttacgcaggctattcagattagatggacgccatgcgaaataccaggagccagggcaactcgattggatcaaatgaaggtcaggagctcagattcccccttatgttcggggccgtggtagaggtcccaggggcagggcacgtggtcggggtgatgttaacccgccacaggttgcccaggctgggaaggatgcctagaattgggaaaacaggtttgcagaaatgcaaactagaatcaatgaacaagaagaagtgattcgatagttaacacagcagggtgctcctgcagtgcctgttccaaaaataccagtggcacccgcccctgctgtgcaagccgaaccggtggttggaatgaaccggatggaacctctgtatgaaaggttccgtaagcaggcacctccagtcttcctgggaggtccagatgttatgaaagccgagcaatgg

SEQ ID NO: 155672 - DNA, 508 bp, Cannabis sativa
  modified_base (396)..(397): a, c, t, g, unknown or other
ttaattttaattattaaataaatgattttggcatttataggattagaattgcaaaatatggcatttgtgaaataatagataaaatgttaaaaaaatgacaaaaatgtaactagtgttgggcccacatatggccgaccactattgtcctattttttgctattattttatcattttttatttcaaataattcaatcctaaccctaagtgaattatataaaaagaaaagaatggtctgattatccatctaatgcttctaaacctagttttcattctatcacacaattagtgttttgagacttcttcttcttcttcttttctctctactattttgaaattttatagtgtacttcaccattaaaattcgagccttaatgattgagtgcatgcccacccatnncaagttagtcctcaatcatagtgcgtaagactatgaagaatccaaacatctaaaggagtatcgggcttagatcttgattataccctgtacagaaaggaacaagggttagag

SEQ ID NO: 155673 - DNA, 511 bp, Cannabis sativa
tggtagaacctcaaaatgtaactgaggctcttctggatgaattctggaataatgcaatgcaggatgaaatgggttagttcaaaagaaacagagtgtggatcttagttcctaaacctgatggagtaaacattataggaaccaaatggctcttcaagaagaaatcagatgagttcgggacagtggttcgaaataaggccaggctagttgcacaaggctacaatcaagtggaaggggtcgattttgaagaaacttttgcccccgtggctaggcttgagtctattcggttactgttggttgtggcatgttttctgaaattcaagcttcaccaaatggatgtcataagtgcctttctcaatggagttctacaggaggaggtatatgtgaaacaacccaaaggatttgaggacccaaacttccctgagcatgtctataaactcaagaaagctctatatgggcttaaacaagctcctagagcatggtatgacaggttaacctcattccttctagcaaa

SEQ ID NO: 155674 - DNA, 720 bp, Cannabis sativa
  modified_base (45)..(56): a, c, t, g, unknown or other
  modified_base (686)..(695): a, c, t, g, unknown or other
ttgtcatttaacaaaacacagggtccaatctgtaacttttgcaannnnnnnnnnnnaaaatagtatttaccctaatattcctataattaagttattttgaacacttcattatgaatgccccctaagagttcaattctatatttataatggattaatcatggaattaataaacaagaattatttagttgatgagacttaataaataatctagtttattggagcttagaattatatataggtccatagtcctcgatttgccaccttaaaacactatcaagggtagggataaagagtagtataaagatgttcgaaaaacatctattcgaattggcaatatagtaattatttatcttgtaataaataaataatttttcaaattaattaaattggataaagacaaaaattattaagataaaagttgtccgaacaaaaatatcaaccttgtcgtaggcgcttagcatatgctgcctttatgtagtttataatgttgggttaataaattatttaattaatcctattaggtaaatatctaatttgaatagttgttatagatattttaacgttgttgagatattctctcaagtagttgagaaattttctcataaatattagctttacatggtacactaacctttgtcattttttataaaaatactatcaggcggtattttttactgtattttttnnnnnnnnnnatactgcagtatactgtgttaaatt

SEQ ID NO: 155675 - DNA, 560 bp, Cannabis sativa
aaattagggttttaatttttctttaaataatattgtgctgcaatatttggcagttttagtttcaatgtataaatatatatattgaattttttggttgatattaaaaaaattttgattcatgaattcatgatatattctgattggtgttatgtatcattgattaaaattcagtattgtttatattctttgatcggcgttgttggcttcagtggattaagtataatatgcatatatacattgaatttgttgcgataaaaggtttcagttttctggcttcagcttttgaaaagcccagcccagagaatttttgttttattcaaatgatatatatgtacattatgttttcgttttaggcttcaaggcttctgccaatttttttttgttgattactgtatatatgttttacatatatataattgaatgtgatgttttggtttcctttttattgtctgtcgcgtatacatacatatatattgactaaaatttggtaaggcaattacatattttttttccttttattgctctcaagattataaaatatatatgtatgggaataatta

SEQ ID NO: 155676 - DNA, 524 bp, Cannabis sativa
  modified_base (29)..(51): a, c, t, g, unknown or other
agaattcatattagggtgttaatgaaacnnnnnnnnnnnnnnnnnnnnnnnctggtaaaatatatccaacagtacgtcaactacgacatcaaaaactatatctgaataaggtacctattatacattacgatacatactactgcttataacaaattacaccttccgatttctgaaaacacctaaaaatgcatcatgtttgttaattctgttaaacatgattatttaacaattaatcagtactaatcatatagtttaccaattgtaatcggaactgatagttaactaatcagtactaagtacttttcaaatgacagtacactataaacctttttaattgtaatcgctccaatattatagttcaaaatgtaggcatctaattcgtaaaactgcatatagaccttgtaataaatataaaatttagtttattaacagaacacctattcatataacatgtttattattttttatatacatattgtaactatgaacaaacttttactgtatacaatacttaacatgattaa

SEQ ID NO: 155677 - DNA, 735 bp, Cannabis sativa
ttgagggcatggactacgccagtgaggaacttactgctgcggttcctgatagaaggcaaggtactttgggtgtcagatgggtgagccctccgtccaagcttactgaggtgcgtttgcgggatcttgaccaggacggctacctgggcgaattggactgtcacattcccgcccacaataatcgagccacaaaccctgaaaggggaatgtgcgcctggtcaggtgctcatgcccagcaaggggcattgttgcctttgcacccgtactttaggaatgtggcagacttcttctgcctctgtccgacccaatttactcccaagggcattaagtatctgtctgccctcttcgttctctatgccttctccccacgaggttagctggtttttttatttgaagtccacccctaagcaaggcaggtcggggtacttctatttctctcaaccagatttcaagtggttgacgggcaccgaggataaggccattagcaaaattgggcattttgttgatgagtatttcatggtggaaggcatgggcaccacccatactcagttccagtagatccccacatatcaccgccctcccttcactcttgctcttagggatagggctcaaaggcttgctcaactgttggaggatgaccggaatatcattcagttgacctccgaggacaactttgtgaagtatgggctctatccgaaggatttcattcctaagccaatgaaggggaggaagaggaaa

SEQ ID NO: 155678 - DNA, 570 bp, Cannabis sativa
tctctcggaaactcacacaccacacacacacacactctaccagttggacctccctgtcgccggagctattgttgttcggccaccttacattacggtggagtttgttggacaaccgtgaaaccaaaactcttagaaagaaattccttcaaaatataatgggtatgtaatttctttagtaattcataaacaagacattgtctaattttgaattctaattagttaattaaaactaattaactgagtctacaagacaatattatctcaaccagtacgaagaccatgagcttatataatcaagcttccaataagtagttctagaatttaccgaataaattctctacttattaattcctcctgactccactatagctttagaattgcactcttaattatataaacactctatatgtttcaaatatagatacattattaatgatccattgttataatctaaataatcaattatcctctatagatgatttacgtcgagtaaagacaaatttaccgttctacccctcaatgtattttatctttaaaacacttagcttcctataaatgatatttcaataa

SEQ ID NO: 155679 - DNA, 583 bp, Cannabis sativa
tttcaatatacacgagcaaacaatcacttaaaaattaatcttccatcttgttgcgaagtgtagtcttcactatattcatagctgaaaaagatcgttcaatggtagctgtagaaattagaaatgtaagaataagaactatcactttatacacaattagaaaaatctccgcttttttagtttataccaaccactgacataaatcagaaatggttgccaaaacattaaaatcaggaagttctcgtacatgagcaaaatgttcaaattgcgtccttagttgtaccatctcgtattctgtaaaatcttttgggtaaaatttttgtaccaacttgcaaatgtcatcaattctaaaatgatgtgtgcatctgtctctgatctaaagctgaattaagaatgagtaactccattgtgatatcattgaatttgttgtttaattcttgtacttaaaatctatcactgcattgaaaagatcaactctgtaataatactccactgcaattgcatcttgttgaccacgacttcttcctctttttgcagtataatgagcattaaaatctggcataggtatattaacaagttcacaaaa

SEQ ID NO: 155680 - DNA, 596 bp, Cannabis sativa
aaagtaacaactcagtgttaacctcattaaaacaaaacgattatttagctcttgtagttgtaaatatatatatatcacactgttgaaaaaatcaatacgaaaatagtaaaaatttgtaaactttggagctctatgtcgcgatttcccttgagcacaatacataccatccatagcacatcaatattgaactcaacacaaaaattagaaacttcttctactaaagaattccatccattgtctctcatcacttgtaattgtttcttgcacacttcaactaaatccatggcattcacaatatcttgatgatcacctttttgcaagacttgcgacaactcatttgtgatttcaagtatatttttcactaaatgcaagctaaaaataaagtcatatgtttgcactagttgtaacataatagatgcttcatattttggtcactattcaaactatcacttgtaatttcctcaagtacataaaggatagatgaaaatatgatagtgaaacttaccaaagtgccaaaatgtgatccccatcgtgtttcacatggatgcttaatcctatttttttttttttttatttaagccttttccacttgaaag

SEQ ID NO: 155681 - DNA, 812 bp, Cannabis sativa
tgtggccagaatcctaatcgacaatgggagttctatgaatctattgtttaaagaagccttcacggcaataggcctcacggaccgggatctttcaccgagccgttcccagctcacagggttcaatggaacaacacttatcccaatgggaaaagtgagactcccagtcaccttgtgcccagacacaccccaaagcacctttaagtactgcacatttgtggtggtggactgcccaacggcttacaacgcaatcctcggccgaccggccctggtggatttcggtgcagtcacgtcgattaggcacttgtgtctgaagttccctactcaggaggctgggataggaactgtgaggggcaatcaacgagaggccaggcagtgttataacgttgctgcacacctacccattttgatggtccgcgaagttattgagctaggaatggcagaagaagatgagttggatccccgggtggggtccgagaaaattgtagaacctatggaggatgtcaaggaagtatcggtgtgtgacctcgaccctgccaaggtcgtccggcttggaaaaagtctagagccggaggaaagagaaaaaataattgagacacttaagactgccacggatgttttcgcgtggtgtcaagaggacatgaccggcataagcccccacgtcataacccatgtccttaacgtcaacccggataagccaccggtctagcaaaaaagacgccccctcgactcagtaaaggcagaagccctggagaaagaggtggacaaattactaaccagtggcatgatctgagacgtgtattacccagaatggc

SEQ ID NO: 155682 - DNA, 502 bp, Cannabis sativa
tgttttctccttgttctgaacctaattgtgcacctgatactacacatgcccagaattttcatcaacctgttgtgcatcctgaacaggtttttatttctgatccacacagtgagcaggttcttaattccaacctgcatcatgatcaggttttttctactcctgcaactgattcctcacaggttcaaactccttctgttgtcactcgaacaggaagacaaacacataaaccctcatatctcaatgaatatcattgttatcttgctactaatgcttttgcttcctcttttcaaagcaagtctaacacaccttatccattatctgctgtgttgtcttatcacaggttgtcccctgcctttcaagcaactgttatggccattttgagtcactttgaacctgatttttttagtcaagcacatggcatacccgaatgggataatgccatggacactgagatagatgctcttaaaaggaatgacacttggattgtggtttccttacctga

SEQ ID NO: 155683 - DNA, 578 bp, Cannabis sativa
atctatgtctattcttgtggagacgaagaaaaaggtcaatggagcaacaaaaaatatataaaattaataatatgtatgatccgactcagatcaccatttacaagggataatactcacccttaagaatcacttgtgatgatcgcccgtaacgatcaatagggttcccttggtttggattggtcagaagctcctcagccttgtaatccgtcgtttctggttccaattaaggtttgaagtccttgggaacggatggagaagaaaaatggttggtgcatcctggagttatgaatttggggggctgaacttctaaactcagatgggacattctagcaagaaagagatgatccattctcaagatggatctcaccaaagagccagaagtatgtgaaaaatgacaagcttgagccgcctttttatacacaaagtccagtgacaagaaagctaacgattgggaaatctaacggtcgggaatagagcagaatatgaagagacgattcataatgaccctagaaaccgtacaaccaccagaatcaaaggacgcatttttccaaaaggggattttgacgaaaatgccctct

SEQ ID NO: 155684 - DNA, 586 bp, Cannabis sativa
accctaggctattaaccactcatactaggataataaccctaatcccagttacaattactcacatatatcaatctcaatataagcgccaccgcgcatactctacgtgctaactactcccttacctattgtcccgcaaaggtagagattcaaaatccccaggtgctcctgaccaggtgccgataatcccagtcacacaatccgggattttcacaaatagggttaacccctaatttcacattcataaaatatattcatggcatttaaaataccgataatcacatagagctccgaatgagctttccaacaatataaagaacttccaaaacgaagtcccgagtcaaaagttatggccaaaacaaaattcagctttttcccgatacagtccaaccgaaattccggttggttggaacagccctgaaccaaccgaaattccagttgtctgggaagcaacaacacgaaaaatttcaatctttaagcccccgtaacctactcaaatcttcccaaacaccaccaaactttccagagcatcaacatatgacatattaaacatatttcatagctcaaacacaataatttcactaaaaat

SEQ ID NO: 155685 - DNA, 669 bp, Cannabis sativa
tccttagaaagggtcgcctcaccggccctagatttcttggccggaggggacgagcttgagcttctcccaactctcttcttcagggcatcaagtatcttctaacacatgtctgcacgaaacaaaaatagcatggttagagtaaaaaaggcatcagaagcataaagcatgatagtcaaaaagtttaaaaataagacaaaatatcttgcaaagcgattgtcagaacaagactcaacagtctaccatcaccttataagtctcttgcctctgtcaggacggccttcccttttcccagcacgggaaaatatggccaagtaggtgaactgggctccctaatgcgaattgcatgttcaacgggcctggattgagctggaagtttcttcctcctcttgagcggagtcacctgctcttcctcagccatcttcaggattcaagggctcatgagcatactatttggcccttgcacctcccttcaacttagcctcacgcttcagttcaatcagctcattctccttatgagctccattagctcgttcaacaccagatttccacttcctccccttgaatggcttaggaatgaaatcctttggatagagcccgtacttcacaaagttgtccttggaggtcaactgaatgatatttcggtcatcccccgacagctgagcaagctct

SEQ ID NO: 155686 - DNA, 578 bp, Cannabis sativa
atgaaattaagaattcatgtttcgggttttgaaataatccttaactaaaagaaaactactcagaactagacattataaccaaaatcataatatttgatttgtagttttttttaattcctccaaatgactctaaatgcatgaatagtctttaaaataacctaaaaagttaaaatcacactaatcaataatttaaagaatcaatttaagaatattaatacataaattaatcatatttataagataaatatggactcatcagcattcccttcatcatcaagattctcagccatgatgtctcgacccttagccttttgaacctttctccttcttcgaaatgtgcactcaatctcggggtcaataggagcaagttcaaagtcctcttgttggttcatacactgtaaatacctgagattgcaaagcccaaactagcaagatcaaaaaccataaaaataaattgtcaaatagttgatagaacagaatttagagtttaaagtctccagcaacggcgccaaaaacttgttgtgaaaattatattgatttataattgcgcaagtgtacacaatcacaaacaagtaata

SEQ ID NO: 155687 - DNA, 1018 bp, Cannabis sativa
  modified_base (971)..(971): a, c, t, g, unknown or other
ttccaataccttggtactagaacgagttgcatcttttcatcatacttacccaatttgtatgcccctgattctagaacttcaaccacatgatatggcccttcccagttcggtccgagcacacctgtcgtactgtctttggtgttcaaaaatactctttttaggaccatatctgccacaaagaatttcgtgctctcacttgtttattaaaataccgagctaccttttgctgatgggctatcaatttcaagtttgctacgattcgtttttcttcaacttcatcaagtgtttctgcaaggagtacataattaacttcttggttgtacgctaatcttctgtgggatggtggttcaagttctacaagcagcatggcttcatatccatatgtcatggaaaatggagtttgtcaagttgttgttttctcggttgtgcggtatgaccatagtacttcaggaagttcctccggccagtttcctttagcatcctcaagtttcttctttagggtgtccttgaatgtcttattgactgcttcaacttcaccatttgcttggggatgtgccactgccaagaaactttttatgattccatggtttgcacagaaaccagtgaagaattgactgtcaaattgtttgcgattgtccgagaatatcttgtatggtaatccgaacagacaaattatgttcttacaatgaagtcttgcacttttttggacgtgatggttgccagtggcttggcttccgtccatttggtaaaataatcaactatgaccactgtgtattgcacctcgcctttgcctttaggtaactgcccaatcaggtcaattccccaaatggtaaaaggccaaggactttgcatctgagttaattcgttgggtggtgcacgaggtagctttgaaaatccctggcatttatcacatttcttaacgtaagcctttgaatcttcaatcatggtcggccagaaataaccttgccttngaattttcttggataagctttgtcaggctgcgtggttgccacagaat

SEQ ID NO: 155688 - DNA, 923 bp, Cannabis sativa
gtaaacaatcaaacacaaccagcaataacaatttaactaaggaaaaagaaaactccctcaagattcggtctcgtccccactagagtccctgcttcaaaatgccgaagcgatgctgatgcaatgctgtaacaactgggacttactgcttcagcacacaaatcagattcacaccatattccagcagcctattttatagtcattccatgccttgcacctgcaataaaaatcaccacaccattgcaaattcattagtaactgaagaaattgaaattatataagtatgtgtatatatatattttttgtttttcttttttttttcctttaatttttttatgttttttttttcttttttttttttttaacaaggggtggcacaccccaaacttaattgtaaatacatatatttttttttcttttttttcttctttttttttcaaggggtggcacaccccaaatttattacataatatatatatatatattagatatagtcttgttcttccgctcctgggttgcccaaatgtgatacaataaggccaaggcaacccgaagtccttcttcaagcttctttcaaagtgatggaggtctttgctcggttgacctcaccacccccaaacttcactcattggcctttcaccaagaattttcttcttgaaagtgaatcacgtagttccaccaccccatcggggtatactctcaccaccaagaaagatccatcacaccttgaatctagtcgtccattagtagccttcgttaaagagttggcgaaaatcacttgttgcccaacttcaaacatttgagaccaaatttttctattcagcttctttttctttctcttctgtttgggtggttttttagggtcaaatgatgttttgtctttgctttctcgtggctcgtgatccttagcaatttctttaagggga

SEQ ID NO: 155689 - DNA, 540 bp, Cannabis sativa
gctccaaagcttgagcaaaataacaaaattcaacctcacaccttgaatcatcaaatcccaaaacacaaactcaagaacaacactaaaattagacctgaaaactcaatcaataactcgtaaattctgacctaaactcacattccatgctcaataaacatatatcacaactaaattatgcttcaactcacacaagaacactaacatgcaacatcacaatatcatcaatttattccatgcttttctaaccaacaatatcagcaaccacaaaaaaaatcaaaagctgtaaaaactacctcaatttccaattccaagctatgcataattaattccccaagaactaagctccaaccaagcaatctctcacaaattgaaaaagatgaaattcaagagagggtttgagagagagaggggttggggaggaaggaaacaaaggccagaaaattcatttgtttttcctcaaaaatcatcttttattaaagtaaatcaataaaggtcaaaagaccattttgcccctatggctataaaacatgcatatacact

SEQ ID NO: 155690 - DNA, 574 bp, Cannabis sativa
aatcttcgcctgggcgagataaagaacaagatagagagcgcgagagaatattgaggccgagtggggcaatcctgagagggagaagggttctcgagggtttgggcctcacgtctcggggttctctaaggtcgacggcggcggatgaatgcctaagagagagagcacaatgagggcaagaggggggatctttgcattagagaaagtgcacagtgggtgcaagaggggaagaagaagtgagggggagagagggagatctctgctaggatttttggtgttattgatggcagaagaaggaaggaggaatgagaagaaggtgatgaagaaagcaagaagaagaaggagtgggtgtgggtgtgggtgtgggttatgcgagaggaagaaaggaagaggaagaaaggagtaaatcaaaagaaaaagaaaaaaaaaaaagaaagagaagaaaaaaaacaaaaaaaagctaaattttgttttaattttttttttttttttgtaatttattttatattttaaaattattttttaaattttaaatattttttacaaagattttataatatttaaacaattaatatta

SEQ ID NO: 155691 - DNA, 649 bp, Cannabis sativa
tgaaatggccgaggcttttcgtgcgatgtcgcccacgccaactcaaggtggtggggggaatcttctcgaggaggttgaggtcgcggaggttgaggaagttgagaacgaggtggtcagcaaagtcgcagatggatttgttcctgctgctcccaattcttgacttttcctttaatatttgcttgtgttaaactctatttcttttctagttttttttttgtttatgcggtacaggggtactcgcactttgtacttagacaaatttgcattttattttgaacaactttatatcctcgcggggatatctatttttaatattttcgcagtacacgggtactcgcgctttaatatctataatatttcgactttaattataacctggtgtaataagtagaaaatttcataagacttgaaaaaattttaaacttgagagttaaacttgaagaatttccaagaattgtctttatataatcaataatacattagtgtatataccccctatacttcggattttcttttataaaaaatgactatgtataagtacaaggcgaatacaaattagacaatgcgagtactattgataatagaattttaggcttttgccattccaagctcgtggaatcgcagcaccatcgagtgctgcgagtcggta

SEQ ID NO: 155692 - DNA, 538 bp, Cannabis sativa
aggaataataatttattttttattgaatactatctcaaatttaaattatttaattaaaattaaagatagtatctaagatatttattgtatgattcaatttctatttaaaattaaattatacaactcgaatagtgtattatatatatgtatctttttatacacataaagtatatacatatatattttcatttttttttcgctttgtaaacgtcattgaaattgtgacgatgcttgcttttctccttttttttcgtttgttcgagaaatttgtttagaagacactcacagtcttctatgcgattttttttattgttaaactttggcatttaatttacaagtcttgttcactttgaaataagcagaggaattttctaagtgacacatgtttcttattttcaaataggcattcatatacatgaatataggagccactctcacacttgtgagatttttttgtttagcctataaagttactgaaaagaaatcacatatctttatatattaaaagtgcctatctaacgacatttcttggtttaac

SEQ ID NO: 155693 - DNA, 669 bp, Cannabis sativa
tcactaatctagagtcaaacataatgtcaacattatgattggcaaaaggaaaaaaaatatcattatttaaccaaaagcgaaagcgaaattaaattcctcttaaaagtaggaacatagaaggtattgttcaaaacaatctgaacacttaactgtaattcaagaataaatgtgccaacataaataatatcgactctaacatcattgccactttaagctttgactctctctcacttggcttcctgagattcctagcccctggttgtggttgcttctattcatatgttcccaatcctttcgttggccttgagttgagaaacatagtgagaagattcatgcttttccttttacagcttgctttcctcagctacacactgagaaattaggtgaccgacactccatgttttattataagtgttgtagactgtcttgataaagttaaaagagtcataaagtgtatgaagagcccgatgaataatgtaagagttaggaagaggaatattatgatctttcaacttgtactgaacattcacaattttcaaaataaaacatcgcactcctttgatttatcatattgaatggttgtcatttcattcataagatgtccagttgtggcgttttcactagtgtcaaatagtttttctactgttttgaaaaactcattagcatttg

SEQ ID NO: 155694 - DNA, 594 bp, Cannabis sativa
taattaatttaatatacatttaacacatgagattaaagaaaaaaaaaaaccttagatttaaaatattaattctcatcttcctaaacccttataaaattgtcaatacttattaagtaaatttatattttaacagttttattatgagatgatgagaattaggttggactagtgtttattatatatattggattattaaattttaaattacgttttttttttgtatatatttttctttttaatgaaattaacttaaaatggtagctaaaatagattggatggatgcaatccaatccaataaaaaaccagttaatgtatccaaaaattggaaccaatctaatccaatacatctattgaatcggatcagatcagatgactccattcgattagattggatcgaatgataaaattcaatacccaataaataattagattggatcggttgggtccaaatctaatatgattcaatgaactatactcttattaaaaaaaaaatctttcatttatgttttttgttagagtaatttgcggtataaatatttaagtttaactcctagttgtaaataaataccgaagtttaatttttggtgataataa

SEQ ID NO: 155695 - DNA, 667 bp, Cannabis sativa
gtttaaaaagagtgttcaagatcagaatgagtgtgtgtggaggaatgtaatgggagtatcactcttgaagtgacttctctcaatatgagacatttatttatagttattaactctgttgattttattcttggacatattctattgtgtactactgactattcaagcaataaagatccatgattcattcatgctcgagctaagttttcttatctaattttaactaagttctagttttgattttgtgattgctttttgttttgtttgtgtattcttgaatattgttatttctataacaacccattttgagggtgagaatttacacaaatggtatcaaagctcagggtttagagttcaagaatcacattcaatcaatcaagactcatcttcaaatttatttcaagaataaaactcaaactttcaagaatcatattcaagcaaccaagaacctggttgaatcactacaataaggtttgaggtggacaagttcactggttcaaataatttcagtctttggagaatcaaaatgaaggattttctagttcaccaagggatctatgaaggacttgatgctgaagccatggaattgattgaagacaggaagaggaaacttgaaattgaagccatggcatacagtgccatcctcctcagtcttggtgaagaggttttg

SEQ ID NO: 155696 - DNA, 894 bp, Cannabis sativa
tttttttttttttttgcaattttgtagggtttttctaagtctgtttgaggtgtttttattgagttgaacaagttttgagttttgaactcaaacttggctcaataatagtgggttgtgtattttggggttatttctagttctatcacttggaaatggttcgttatgatataattaggtatcctagacagtttggtgaagtttagaatcgatttggttgagtttgaggaattaggccatttctgctgtaaaaacggcacgccgtttttgggagaacggcctaccgttttctaggcagaaagcttagaaaaatggcctgccttttttacagttagggctaccattttttggttaattttcccaaaacttcacttttcagcgttttctcaatatttaggttttagtgatgctatttttcgataggaaaacttttagtttcaagtctatgtccccaaaagtgatttagtgtatcacttatcagttatgcgtatgttgtgacttagggacttgtaaatagtcgagcagcagttccactcaggttgaccgacacacctgaatttagaatcgaggtaagattagtataatgatatgcatatatggttacatatttagtgtgtatttttatgaatgcctgttagataacaaattaataatagcagcattagtgtacatagagatgcattgaataccgacagttaaatgtttggcagagtactgattgacgctatcacatcgaagagtaccgagtataggttgatattatggtcaacaatactgtcgtacaaacgttctagactcaaaacgtgtgggatgcgggatagggttatgattgggtgtatgggcgcctagttatgatttgattaagttatgatgtgattatgcttttcttactgagtc

SEQ ID NO: 155697 - DNA, 639 bp, Cannabis sativa
tagtgatctctaataataaaaaaatagaaaaataaaagaattaagaagaaaatttaaagtaggaaaaaaattaaaaaaaaaatgagagaattaaagagagaataggtagttaaaaatttagttattatgtatgattagatattttttaattattaattataaatagagagtttttttttataaaaaaaaaaaaaaagaactatttattactaaggtgttatatatatattttttttaaaaaaaaaaaaagaaagtaatacttgaaagatatatacgtataaaaaatattgtgtcgtttgttcgtatagtttcttttagataaatatttttgtttttgttcttcttagagattattactattattattactagtttaattagagattttttcttttaaaagtaataaaaaagtaaaaaaatgatataattaagaagagaatatatggaagtgttaaaactatatttggttaaatttttctaaattcaaaagtctaagaaatcatgagtgaaatataaaaatcttaattgtcatttgttgcaacaatatgtattatgagatattagatagcaatgttaaaaactcaaaagaaaattagaataaataataattttatgaaaataatattttgtttatgattt

SEQ ID NO: 155698 - DNA, 642 bp, Cannabis sativa
acatgagtctactttggcacttaatagagtaaagtggatgaaaggagtacagagcaaaacgattgtggaggttggagaattcaaccctaattatttaagtctagggagttgatcgtgccaaactctaaagctcagggagattggccgcaaattactctaacagaaatgtaacttaaggtatttaatccgtaaaaaaaatgtgatatttaagtgtatgaaaccaaaaaaacataaggtatttatgtcgtaaatatccaccttaaaaaacaatttactttttgtcaatattttttctccattttatctcacatcattatactcattattttttcatattattttctccctcatcactctctctcatcatttctcacattattttctctctcatcactttctctcttctccttctctctcatcgctttctcactcattatttttctctttcattgctttctctctcctcattttctgttcactttctctctcattattttctatttcatcaaggtccgggtctaagtccaggcagggccggcccaaatattttgggggccttgtgcgaaatttgtaaattggaccctttagaaagaaaaaaaaaaaatcatgtacattaaaactacaattctattagtagttttt

SEQ ID NO: 155699 - DNA, 713 bp, Cannabis sativa
tcatcaggagaagtcatacccaacaattccaaccaggttaatggtgccggtcagcacattagccaaaccaaccagttgctgagacaaccaggcatttatcgtattcaataggttggggacaactcatgatctcaaaaatgatctaaatagtgagaggagtggacgatcatcttgacacaccgatcgtgtagcccgaaacccgcgctcaaattcctactcaaaaagatgctgatgtgactcagatcggccaaaatgctgaacaggttaatctagccatgcaggcatagctagacgaactaaagagtatgttccaaggcatggccggtcagagaaacaatgatctcgagttggaccgagcatgtggaacccatttctcccctgagatcaatctcctggagttgccccacaagtttaaaatgccaacctggaagatgtatactggtaaggaagatccattatcccaccttaagtatttcaagatgcaaatggatctgcaaggagtacgaggagaagtatgttgcagaatttttcctgccaccatctcggaagccgcccagcaatggtatttcaagctggcacctggaaatttcaactcatggaaagctttctcctcggagttccatgtgtaattttccttctcttaccaactttcgttgcacctgggagacctggtcaaagtaaagcaaagaccaggcgagcctcttcgagcatac

SEQ ID NO: 155700 - DNA, 851 bp, Cannabis sativa
ggtaaagacacaaatttaggaaatggtatgttagaaaaggatgaaaaacaactgaaattgcaacacatgtggtgagtggcaccactgtccacaatccaagaagttgagtttaatgttgtacctgtcaggttcgatgtagcaggggggattgcagctagttctgcatttgttgtgctgctaggttgtggcttaacagagagattagttgctggaattgagaggagagatcaatgtgaccagagctgctctcagtgtcatttttctaggtgtttgcagtagcaatattggccttggctttgcctttttcttgctttcttttgtccccataaccaggaggaaatagcacttatcaacaaggtgaccgggttttccacaatttgagcaagatggtttaggtttcttggctcttggaggttggtagaactagatgcagcagccaaggtaattgattcagaggttcccaacaatctttgacgttcttcttgaacaatcattgcaaacactcaggacagatttggtatgggttcgttaagcaatatttgagcacgaaccgaagtataggattcgtttaaaccagtcaagaattgaagaacttgattttggttgtaagaatccaagaaaactttcattgcaccataagtgcaagtggtaatgggttgaaattctttcaactcatccgaaagggatttcaattttgtaaaatatgtagaaacagagctgtcaccctgctgaaacggagtgagctatgtttgtaattgaaaaatttgagggccattgccttcattgaaatgctcagcaagatcgctccacatttcagtagctaaatcaaagtacattatactttgtgcaat

SEQ ID NO: 155701 - DNA, 878 bp, Cannabis sativa
cttgaacgtaatttttggcgtgtttaactttttcgaatttcttaaaattttgcaagatgtcttaaataagtataatttacatgaccatgagaaaaattttgactaatatattatttattcgaatactaaaacaaatagagatgtatcccttttaagggggtgcgttatagaatttgtctataatatattagattattgtaatattctaatataatcttaataaatgttcaaaatttagaaaattttactgttaaaatttaaatttggagggttaaatgcaaataaaacaacaactgagagagtttagccaccaaacaatcataaaaaaaaaaaatgtgtatcttactaaaataattgtgtcttttaatctatataatgtattatatcatatagagtaatgttacagtacaatgtatacaattaaaatataatattaaacagtaaactgatatttagttcattgtaatagtaatggtaataaataggttcactacattgtttgtttttctcttttaacttttgtattccattacaatgtaatgcttattactgagtattgtgatgatgattacataccaaaactaatgtataatctccattacaattatattctatattaccttttttttaatattttataattttataattaaaagcaatagaattattttagtcaatatatattttattccattacattctcatatcaaactaacacaataattctgattacattgatcattccaactacaaaccaaacattataaattataatcaattcatattaccattcttattacattacattaccattactattactaaccaaacatcacctaaaatattaaaatatgcaaatcaaaacctaatatttaaat

SEQ ID NO: 155702 - DNA, 754 bp, Cannabis sativa
aaaaaaaaaaaaactaattatacacgtgcattgcacataacatcaacctagtatataaatatatccctatacctatttatgtaattgtttctaatatatatatatttatatatataaacgtacatattgtatattataaaaaaaaaatcttattttgtgactaaaaataaaaaaaaaaattgtgactaactaattaataaataatgaatataatttttttaaaatttacatgataattattgcactaattagatgattagtagtgcaattacataccttacatataataattgagcgctcaaactacgaggttgaatgaacttaattactgcaaaaaaatttactgttgtgccttctgagcggtggatgaaacaaaatataggtgttcttaaggttaattaattgtgatgttgcaatctttttcatctagttttattttaattttttgttaaacgattcagaaattaggcagtttatttatttttttaattctaatcatggtcgtgtctccaacaaggagatgtcccaattaaattctaagttattatttttatcgattgttattaataaaattatactatttattcaaaaaaaaaattataaaaaatattaatacaaatatgtattaatatatatgtatatgacaattaaattgaataatatattatgctttaatataataaaaaaaaataataaaataaaaatatctcaataataaaaagaaatatttatgtcaagtaatattttaaattaa

SEQ ID NO: 155703 - DNA, 507 bp, Cannabis sativa
  modified_base (434)..(434): a, c, t, g, unknown or other
ttgctaaccatataatttttttctaaccatataatttttttttcaaattataatttttttttcaaatttaatttttttttcaaatttgttattttttgaaatatattttattaaattaaaattataagattggataaatgttggttttaacattttatcttattagatatttttttaattaaaattaattttggcaaaaataaaattgaaatttgaaaaattagttagtttaggtttgaatagaaattttagggtttcttaccataaaatttttcaaacttattttattttattttttttaataaaattggttatattctaaccataattatcttattttttaaattggttataagattaataatataatattagatatatctaatttttaaaaattcaagacatatatatattatcccaatttttgcactctnacgtggcatcacatgatggtgacactgctggaaattattttaccaggatcttagatcaactcacaagtatgtt

SEQ ID NO: 155704 - DNA, 529 bp, Cannabis sativa
ttttatgaattcgaaatagtctctgttttgattgattccggtcatcttctcagttaaactcggtggaattaatggtggttctttttctggttgggtttcgtttcggttatgttgggttgttgggtggttgaccgaaggttgcatcacacgaaggtttcaatctcagaaagcgtggaccgtaggttgaaggtgtgtttaagaggtatttgtgtaattttttttatttggactgtaaatttatttatttggccggctgaaagtttttttttgtaatattgttacatttttttggttaaaactgaaaaaagctcattttttattatgtataaatgaatatattatttttttaatgtatataaatgtaattagattggatttattattaattagattttgagatttacattcaataactaatttaatctaattaaattaaatatttaggtgacgtttgataacatttttttaattagttttctatttttaaaattaaaaaagtaaaaatattttttaaaaacatattttataa

SEQ ID NO: 155705 - DNA, 776 bp, Cannabis sativa
  modified_base (560)..(591): a, c, t, g, unknown or other
  modified_base (701)..(703): a, c, t, g, unknown or other
tcaaatgtgataaactatagctacgagcgcaactgcaaaaataccacgacagaacttggacaaggggtttaccccgctcaatatccacctcaacaaccatactgtttcattagattttactttccaacccaactaatctttaatagacccaagtccaatgaaataaaacaattttgctttggtaaataccaaatttgtatagtctagtcttagtttgcagcctaatattgtcaagaattacaagccaaactataaacttatgttttggagtgccaagctcactctccaaaccaatgcgccctatttcgaatagggcaaagattggtgtaataaacatgtttgatggtatataaaccctacctttgtttttgcttttacacaccaaagagtataaaatagatttaaattatctcatttttcacttgtattgtaaagaaaaagtgtataaaaataggatttttttttaaggtaataaaaatcagtccaaattatctcattttccactcatattaattatctcatttcactacaaaaaactgttacttttagtgacaattttnnnnnnnnnnnnnnnnnnnnnnnnnnnnnnnngtgatttttagtcacaacaaaaacctatttgtgagctacaagttgtcactaatttaattttagttccaataaatattgtgattgaatatacatttagtcacaacaaattnnnatttttgtgactaatacttttagacacgaactttttagtcacaacatagtaatgataatttataattagtcac

SEQ ID NO: 155706 - DNA, 643 bp, Cannabis sativa
tggtgtaagctccaaccgaaataattgtcagcttgccactaggataggtattttgctgatgtggcagagaacaaatgagtcaaatccaccacaaatccacctgatttgattcacttgttcactgcctggatagagctgactgtattgatcatacccttggaatctagtatgttcaatagattcaagcaatgaatgaatttatccctggaaacactctttgtaaaaatgtcagcagggttatcatgagtgtaaattttctttacttgaacctgctttgacataactacatctctaataaaatgtagcttaatgtcaatgtgttttgatctctcatgaaacattggatttttcatgaggtgcaaagcactttggttgtcacaatagacaacaatatcttctgagtttaatcccaattcacctgtcaatcctttcaaccagatggcctccttaatagcttcagttgcagccatatattcagcctttgtggatgacaatgcagcaactttctacaaatttgatttccaacttacacagcttcctagcacagtaaatacaaaacctgtgcagcttcttcttgtgtctatatttgcagcaaagtctaagtctacataaccagtaacctcttcttcatattggtgttcac

SEQ ID NO: 155707 - DNA, 638 bp, Cannabis sativa
atttatttatttacttgagaaacattttttttttaaaattataaaaggtcacaaacaattttaaaatgttacacttatgcttgttagttattgaaaatatgtttaaaaaaaaaataaatgaaattttaattaaatgtgaccttatgtataaacattatgtttacattattattgataatatttattaattattaattaaatatatttattatgataatatttgtgatgatatatttttattttttatgattaaatttgtgatgatatgttgatataatgtgtttattaaaacttaaatataaatttataaataaaacatgtatatttattatttatatatgtttatatgtttattattaagtgttaccatatatagtttgtatataaaatatagaatatatttctcataattaataaaatgtatagggaattgtaaataaatttttatgcacatataatgtaataaattctttggggcaaagaatcaatttctctaagtgttttgtgttttttcagcaataatactggaattgaggtgcagaattctatttgtgctatgttgaaaatttatgaggccaatgaaaatggctattacttgggtctaccgtgttcgattgggagaaataagaatgctatcc

SEQ ID NO: 155708 - DNA, 562 bp, Cannabis sativa
  modified_base (55)..(60): a, c, t, g, unknown or other
aagtagtagtatttctggtcctttatgttgatgacattttgattattggcaacannnnnnagaaaatgactaacatcaaggaatggcttgacactaattaaattttaaatgaaagattttggtgaagctgcttatgttcttggtattaaaatcattagaaatcggaggaacatatcccttgctctctctcaaacaacttacattgataaggtactagagagattctcaatgacaaataccaaaggggcagtgatacccttctagacctggtatccatttatcaaatgaacagtctcccactgatcctcaacagatagaggacatgagaagggttccttatgcttcagcagttgaaagtctaatgtatgcaatgttgatcccgacatttgatatgtagtaggaactatgagcatgtatcagacaaatccaggagagaaacattggactgtagttaagcatattctgaagtacttgaaaagtacaaggcattatgtgttagtcagcaagggtggtgctttaaatcctgtaggctataccgactcagatttccaggcttatcttg

SEQ ID NO: 155709 - DNA, 563 bp, Cannabis sativa
atctcgtccttgagattttttttcattggtgctgtgcccaatgtcattgtggtactcgcatatcttactggggtccctccgagagctatccttgtacagaggaggcggtctccggtagtgcgtattttacctagtagcaaaatatacacgttcttgggagttcgttaaatccgtgtattgagtatattggggagtatacccccttttctgtcgcttatcctccgtccggttgctgcctttggaggaccttttgctccgtgaaccttgagaaggaccgcctaaactttcagtcggaggggagtgcgatggggcttgtccacttatccacgagggatttccaaaatgggaaggaagatgcgggggccaaggccttgccttgactatatccgggagtagcagaaaattgtatgccgctcattggtggagtggctgttgacaaagtgcctgggagctgagctcctagcgcatatcctgctatcccggtaggatagtatcccccataggccactatttgggcctcttccaggttgatatatttctggactcttttctggaaatcttga

SEQ ID NO: 155710 - DNA, 596 bp, Cannabis sativa
  modified_base (566)..(570): a, c, t, g, unknown or other
tatctatatattaatatttttttcacaatttcgtggccctaagcgttcggggcctcaaggcgcacgcctagcctgcctaccctcagggtcggccctgctaaagacactaccatgatcatcccaaaggaatttaatagtgttatttcgtttcctttgtgaggcaaaacgatgaaaaaaaaagtagtgtttctatccccatcctttaactagtgaaccctagccctttgtctccaataaacttcctctttatacaagagggcatctagttgggactgaagatatttgacttgtgagataacattgttatctcgagaaagagtggattatagtctgtcaactttctgttgaagagtaagaatcctagacttaaagatatgtctagtagacttaccccaggacttaagagaagaaatgcaagctgagcagaaatgaacctagagtaaacacctaaattagacccctcatgggaaatcctattccaagcacttttaatggtagtataaaaagcaaggttctctatgttggaaatattttaccagggtcttagatttactaacaagtatgtnnnnnaacatcctaaatatgaaattctaaaa

SEQ ID NO: 155711 - DNA, 733 bp, Cannabis sativa
taaatattaaagaaattaacaaattttttaaaatctaatcataatttaaaaataaataatcaatttttaaatttaaacctcaagatatcaaaaaattaataataatccagtaaaaattaaatattattaatttaaaattgatgtttaagtttaaatatattaaaaaataatattttattttgaaattaggttttaaaaattgggaaaattcgaaattgggaaaaaatcccacaaaataagattttttgtgttgctgcccatgcaggctgcacgtggagccaaaataggctaaaaacagccgagtcgcgcgcgcggaagggagggttgcagggtgcctgaccgagaaaacttggtcacttgcagggtgacacgtgcacggacctgtgtctaaaggagggacaaccaagtattgagacaaaatgtgtctgagatccgcgcgtagcctcatcttgtccgagggtctgtgcgtgcggtgtacccaatctcgacaccattaaatcccgattttaaaactttcataactttttcaattttttatcagaatcgagttccataaaaacaaaaattggttaatttttcacaagtaatccaaataaaatattttcagaacaaaaataattttttttcatggaaaatttcgtaaatcacattcaatcatcaagtaacacataaaccaagatgaacacatccaaatcaacatacaaacaatattcatcggtttaaatccatattt

SEQ ID NO: 155712 - DNA, 713 bp, Cannabis sativa
  modified_base (671)..(675): a, c, t, g, unknown or other
tggaaggagttagagttgaaaatccggattaggtgattaatgcctttatgattttttttatcaaagtctattaggcaacaaagttgattacaggaaacaagtccaaaactgtgtgttaatgcagggtccggttgtctccagggaacaagctgatgcactcttagctgagtatacgactgatgaagtgaagaaggctatttttgatatcccggggaacaaagccccaagccccgatgggtatgggagtttcttttttcaagataattgggagataataggcaaagagacagctgaagccattatctatttccttcatcctggccagttattaaaggaattaaactccactattttgacccttattcccaaaagcaagtgtccaaacaatgtgggggattataggcctattgcatgctgcaatgttctgtataaggctgctaccaaactcatttgcacccgacttaagatgatcttaccagagttggtggcattgaatttgtaaagtccttttttttttggcaagttagatgcataaatattttttatttatggttagtttgctttgtgtttccaatccgattttcttacctttattattcgctttaattgattttttctatgataggaaagatgtcttttcagctgaacttttcttgtatggaaacttcttnnnnnagaagaaattctcttatggaaagttggtttttaaagga

SEQ ID NO: 155713 - DNA, 507 bp, Cannabis sativa
tatatatatataagagtgtttagaggagaacaagaaaacaatataaaactaaagaatagaacaaaacaagaaaagaagaacaaacacccaaagtagatatgaggatcaccaaaagcttgaacaagctggtttctacacctttgtctaggactttgtggaaatacttctaggaattatcaagccttagaactctctagctttgtatttgaaagatagaagagaagagtgtgtctcaaatggtgaaccaagatctctatttacagtgtttaggatgacacactttgaaattcaaatattctacacccaatggttgttaccatctcttaattgggtgtaaataagattaaatgggtgatttagaagttatgcgagttgttaaaaaatatccccatagtgaataacgctcaagaattaaagctgaaaaaacagtaactagctactagtttctaaatttttcagcttttgcaaataactctccaaaccatttcaaacaattcccactttatt

SEQ ID NO: 155714 - DNA, 967 bp, Cannabis sativa
agcacaattttgcacctgcttaagattgtattgaatttctctaattttggaggatatggaaggcccaagtgactttttccatttagaaaagtgctttgaacattgcttaagtttcccagctaagttgacgatgggatcagttgtattgctttgatggttggaactccaagcctgcagaagacaatcttcaaagttcggttcagccagccacaatttatcaaaaaagaaccggttgctgtgattttgggatgctggcaagtgatggaggttcaagattaatggacgatgatcagatccgaaatagtcttcatgaagaagatgatgttttggaaacagagaatcccattcaatattagatatcgcccaatcaatgtgttcttgggtatgagattgctggccttgtttatttgtccaagtgaaggggtgaccattaaattggatatcatggagaatgaacgagtcaagaaaattgcgaaattgggtagaaggagcacgagaagtgtcccccccaattttgtcattcgaatttaaataatcattaaagtcacccattatcaaccaaggagagttatggatagtggatccaactctgtggagaactttccaagaatgtgttttattatgataattcggtgccccataaaagccagtgaaataaaaagcagaaaattggttgggcttgaggtaacaatgaaaatgacttatattataagacaaaagagttacatcaacatcatgagtccataacaacaaaaggccaccactaagaccaaccctagggacttctaaaccattaggaaaactaagttgagatttaaacctacttaaagcaccagcagggagtttagactccattacaaacaaaagtgtgggcataaatttcttagttaatagggagagagatcggaatgctggtttactccctaatccgcgagcatttcaactgatgacgatcatggcgcttggc

SEQ ID NO: 155715 - DNA, 847 bp, Cannabis sativa
aatgctgattacatgttagtctagctcagagatgattagataacatgttatttaggacctaaaagatttgaaaagagttaggttaatttttataatctgtccttcacattaggaaagagaatagtaattagccttaacaattgggtaattaaatcaataggaatcttttccctaatttctcatccttgattgaacacctttattgctttctttaatgggtgtctacacatttggtaccctgtgttttatctaaatacaagtttggtactctgtatttttaataaaacttatttggtaccttgtattttacaatcatacctatttggtaccttaaattcaaatttttttgataaaatttaatcaatacaatcaataatctaaaattttatgaattctgaattcaaatttattgagttgattacatataattgataactttttagttaaattaataaaattgtattgattaaatatattttagggtaccaaatatgtacaatttaaaaatatgaggtaccaattaagtattattgaaaacataaagtaccaaatatgttttttataaaaacacaaggtactaaatgagtatattcccttctttaattttcttgttttttttctttattttaaaatctatcaaaattgtttatctaccaaatagaatcataagtctaatttagtggtattcagttcaattccctgtggttcgacctcacctgcgtgagtttactacttaattacgtgcacttgtagattgttcataattttcgtaaaaagtttttggcgccgttgccagggaattgtttaaagattgatattgcataaaattagattaaattctactttg

SEQ ID NO: 155716 - DNA, 700 bp, Cannabis sativa
  modified_base (330)..(330): a, c, t, g, unknown or other
ccgatctaaaaaaaatatttttaaaactgaaggaactctgaaaactagagttcttgagctgagagaaaggtgagatggaaatagaaagaagtacaaaacagatggaatgaaaagtaaagctcaatcaatcgattggccttgttgatctctttatttatataggtggattgatagaagaggttagttacaatgatatccaaaccagttgtacaaatgcaacagtaaaaagataactaactaactaacagaaaaatagttagttatgaacagtataaactaactaaccgactaaccacctacatctccaataccccccctcaaatgacactnctgggtaagaccaagtgttaatttgtctcgtaaaaacagaaaaggagatgctgccagaggcttcgtgaagagattagcgagttgatgttgagaatccacatatcgaatatcaagttcttgagctaagactttgtctcgaacgaaatgaaggtcaatttcgatatgttttgtgcggtcatgaaaaacagggttggaagctagggaccctgctcttaaattatcacaccatagaatggggcaagtaagaactgcaatttgtaattcagatagcagggactgtatccatattatttcagttgtggccaaggcaagtgcacgatactcagactctgtacttgaccttgctacaacagtttgtttctttgaacac

SEQ ID NO: 155717 - DNA, 544 bp, Cannabis sativa
  modified_base (46)..(73): a, c, t, g, unknown or other
tatgtgtttatttcattgtttttgaattcatattaggatgttaatnnnnnnnnnnnnnnnnnnnnnnnnnnnnctggtaaaatatatccaacaaaatcccctgttcctgatggtatgaccccaggttttttctagaaatactggaaaatagtgaagagtgatgttgtgaaccaagtctgtcaagtctttgcgactagtagtattcctaatggactgaatgatatgaatattgttttgattccaaagaagaagcaacctacttcgatgggggatctgcggcctaaattcttgtgcaacgtcttgtataagataatatctaaggtgctcgcgaatcgtttcaaagaagtgctgcctcagatcatttcctcgaatcaatctgctttcatcccgggatgccttattattgataatattatgatagcttttgaggttatgcactatctcaaaataaagcgtgaaggcaaggaaggctatattgcgctcaaattagatcttagtaaagcttatgatcgtgtggagtggggctttcttcgagctatgatga

SEQ ID NO: 155718 - DNA, 628 bp, Cannabis sativa
attagaattgggcttattcaatgaataataattatttatttaattgttaaattactctcctaagctttgagttcaaaggtcaaacttgagcaaaactaactccaaacaccaaaaccagctactagaagctgaaactaactcaaatgaaccctacaattcgaactacacaaaaattaaaccctaacaacccctaatttccaaaatcataaactcaaccaaatcttaaaattcaagaactaagagatagagatgctagagcttaccttggcttgatttcccttgaattccttactgaaaacactagaaatcaacaacaatttccccatgttctaggctagttcgaagagagagggaagggaagagaaggtttgttcactttggcttattttctctttatttttcctaaaatgaaaataagattaattgaattaaccttgttgaatatggaaactaggtgtcaacacctaaggcagccaccactcaccccttgacaaaattaccaaaatgcccccataacctataacttgggcatttttaagactaggggtaaaatggtcaaaacccataaccccgctcaacctcgatattttattttctccaaaatatatcccactaagaaataaggttc

SEQ ID NO: 155719 - DNA, 606 bp, Cannabis sativa
tttttttttaagatttgacacatttttaagatttgacacaggttgtagatttgacacaggttgtcagattgacacaggttgtcagatttttctggttgtcagatttttctttcttgtcagatttttctttctttccagatttttctttctttctttttttttttttttcaagttgttgctatttaaatttttttttcatcttctctcaattttcacacttttttcacacacatacaacaaactctccatccaaattttcctaaactaaagatctacttatggtataattaatgttaaattttggatattcataggtttatcttttctaggctcagaatgtgaagaaataaaggataagtttaggcttaaaaagggtaactaagataaaattacatggatggcttgaaagacacaatcgatcaaaaaagtgtctaaatcactttcctaatcatgcataatttattatttcatctcaaatagcaagcaagcaagttttagaatttttttccaacaactttccacatgtcaaattagcatacataaaccaattcaattactagaatattacttaatatgattccatgttcttttaaagcacaaaattga

SEQ ID NO: 155720 - DNA, 813 bp, Cannabis sativa
ctatactaaaagtaattgctccacttgcctgcatctaaatcgatcatgctctctcaagatttaatatcataaatatatatatatatatatatagcaatttgcaagaaaaacctcttatattttaatttttatacatttaacttatttatttttttagtgacaaaaacctcttaaatttatttttctttgtaaattaaacacgccagttaaatattattaactggatgactactgtatatacctgtgtatatataacagtataactttgaagtcgatacagtagtaatccagttgatatttaacggtaatatctgactaatacttttaatttacaaagaaaagtaaacttaagaagaaaattttgccaccaaaaaaaaaagaaaattaagtgtataaaaattaaaacataaaggattaattttactgtaaatttctcatatatatgtggaacacttttatatatataatattaattattacataaatttaattataaatattaattttaaaaatattaaatcgttagattttattctaattgaaatttaaattttcatacttaatttaattacttaaggtgcatttagtaatattttttaattaattttttattttttaattaaaaagtaaaaatattttccaaaaacaagttatataaaactatttttactttttaacttttaattgacaattaaaattttaaaaattttgaaaacaaaaaaaaaattactttcaattttttttaataagtatcaaatcatgatccccaaactttgatatttaccaaattatgcccctcgaactttgacatgt

SEQ ID NO: 155721 - DNA, 733 bp, Cannabis sativa
  modified_base (566)..(566): a, c, t, g, unknown or other
cttggacccagacccggacccaggacccggaccaggattggagactcagacctggacccagtaccaagacctagattggggtcccaaactctaaattagtaccaaaatcaggacccaggacttggactaggatccaagattagaccccggtcttggtcctcgacacggacatgggcagggacccaggattcgaatcttgacccacgacccaacgcttcaaccaaactcgtagtcgatgtctagatcttggaattgtaccaacacccgaacctggaaccatttcaaagacctagacccgaacctgaaccctgacttacgctaggacctgcgacctaggacccgtgacttaggaccttgaccagaatctagacccgtaccagaacccacacccagacccagacctagaacaagaccaagacccaaacccaaacacagactgaaacctagaccaagacccaaacccaaacccagacccgggcccgaactcgtaacataactgagactcgaacccaggactcggacttggatcgagatcaggactgggacccagacccagactagcaccnagacctgaacctaaactgggacaagtactcggactgggacccgggagaaggatcgggaccaggacttgagaaccgaaccgtgacctataccccgacaaggtcaagacctaagacaaggactagtacggaacatggatcgggagctgcactcggactgggaacctaac

SEQ ID NO: 155722 - DNA, 768 bp, Cannabis sativa
  modified_base (649)..(660): a, c, t, g, unknown or other
gtaaggagttaatgcacaagatttttacgtggttgggacatttatgagccttattccacgagtctgtatatttatgagagtatttattacagagaatgttcttcgtgatttttctccctagctcttatgaaacccataattcttgacccccgctttaatgagtttggggggtatttatagtgtttttgtggggcgattcccaggactgaggtacatgtctttctgtaatattcagtaaaggcacacattcccaacgagtacatcatgggaagtgcatggtctaatccctaggcttttcaggggtttgatggatgtaatccattatcctttcttgactgatgtgatttctcataaagtagccgtcactaggctcattaatcatagcgtagtagctgcagaagggggttacgttgtcaaactttaatatttatggcaatttcaatacaccttctcccatgcggcattaaatgcgaggtgactgttcagatagggtttgatgtctcctggaggtgctttgttatagccttgctctccgggagtatgtgaaatcctcatgccttgtccgggaggcatgttaagtgcagacccttttaattaaggagacttagtcgaatcatctcaaagtcttgcttcttcaatccacgtgtcnnnnnnnnnnnngtccacgtattttggacaaaataaggggcaacaactagtttttcgttcttgatttgtttgttttgatttaacttttgtttgtttaagtgtgatcttgaatctggaatt

SEQ ID NO: 155723 - DNA, 500 bp, Cannabis sativa
  modified_base (444)..(475): a, c, t, g, unknown or other
ttttttttatcaaattacatttaattttattaacagatacataacatgacaatgatctatatatacaaaattgtactctcaaaattaatttagattcaaatcaaactccaattaataaaattaaactaaaaatattaaatccaaacaataaaagagatagaggctaggagtatattgccccattttatttatttattttattaaaaattatattaattaaaaataattaaaacataaaaataaataatttttattttgtaaatattttcaaccaattaattattaggttaactcgtcttaaaatacaacaatttcaatttttaacaatataaactttaaaaatataatttaatacatatcaaaaattaagaaaaaataaaactttttattaacctaataaagtcttaaaatataacaataaattatatatatacagtagaaccnnnnnnnnnnnnnnnnnnnnnnnnnnnnnnnntctaatttgttataaaaaaatcaag

SEQ ID NO: 155724 - DNA, 556 bp, Cannabis sativa
ttatcatttgttactaaataataatcttttaaaaattaacttttttggatttaaattattaaaatattcataataaaaccacttataattttaaaatattacacacataaccttaattaataaaaaatagtaagaataacctatttaatattctacactcaatattattatcaatactttaagtactgaataagtgtgcaagtccaagattagttcaagtaatttattttttttctaaaaaaaattaaaatctaatagcaattataaaattaaagatcattttttaccgcactcgacacatctgtactttattccaccctctgtcatgtaattcttctttctcaaagaggaagtcactttatcattccttcttcgcagttctaaattattaatatattgtacatgtatcatttgatcggagaggaatcataaaaaaagaaaaaattacaaaattgttttgattattgatcttgaatatatattatcgaaaggtttgaaagttactaactgttatcgattattgatcttgaatacgtgttattgaaaaagtttgaaa

SEQ ID NO: 155725 - DNA, 526 bp, Cannabis sativa
  modified_base (172)..(175): a, c, t, g, unknown or other
aaacaagacgctcgagcaacacaatgagcaaccctatttacagaccgtttaacaaaatgtaaagacacacaattaagagacgaaatcaaagaccgacaatcttgaactaaaaaaccaaattgagatggcattgaaactgagccaagaacagcctgcaccaccactagcgcannnntctcaatttccaccccagtccaccctttgcgtttgatccaactcaacgcttccttcaccccgataacctcggcaatctcaggtcccacagctcctgtccaactacctaaaatcccctcaatgagcttcccatgagcgtcccgtgctacataaccgaacccaaacttttgctccgccgaaaatattgcaccatccacattcactttaatggagcttgacagaggctttttccaacgctccacaccgaatgtgaattgaaaaccagcagcgggccggttctttgaacttgagcagcagaccactgctgcagagtggctcgggccgagagtactacaccagctacagttttttt

SEQ ID NO: 155726 - DNA, 607 bp, Cannabis sativa
atataaaaaaaaaaaatataaatatatgcaaatgaactgtttgaattctaattttagatagtataattatttaaaatttcatgaaaacttataagtgtttttttttcaaaagattaaagaattttacacgaatgataaaagagattcttttatcttataacgctcgtcgtctatcatataaggacatatttagctaatttatagaccacaataaacattaattgttactagcataaaaaaaaaagatatagctaccaaaaatgcttattatgtgtctataatgaacattggtataaaataaatatttaaataactcaattaaataattagttttcggagtaaaatttttacagatgaatacttgctaaatttaaagatcgaatattctctgtccaccgtgaatctctcaaaatattcaagtagctagctctttctatgctttcttctccagagatccttcgtttgaattgctaggagcctagggaggtttctagcgaaaaactctatgatagtagaattcataggattattagaattgttgggagcttggaaaaatgttagggttgtttttttttttttttatactttaatttttttttattattta

SEQ ID NO: 155727 - DNA, 571 bp, Cannabis sativa
  modified_base (139)..(143): a, c, t, g, unknown or other
  modified_base (516)..(517): a, c, t, g, unknown or other
gataacggtacgttcatcattccaatgttgatggacccgttgttagcacctccgtttgtttggtttccagccatgatggtattcttacttgaaacgaataagattttaattctcgagttcccacagacggcgccaaatnnnnncgagtgaatttcgcaacaccaattttatataatattgttaataacagaaagaattctatatgaagaacaagtgcgagtattcaacctgggaatgagaaaaaattaacggaaagctagaaataataatgagacaaagaattatagtggttcagtcagatcacggtatgcttagtccactgtagcaagagtttcgtaggtggcatttcatggtggatcacccttttatatacaaagcaggtgtccattctcgattctacgagaatttttatgaaagcctttcatttgcttctcttcaatggaagttttattttaccagaatttatccatcagttatacaaggatttcattcattgtcaatccgtttttacacatnnaattacaataattaactaaacaacattaatattaataaatgaacggcagttact

SEQ ID NO: 155728 - DNA, 603 bp, Cannabis sativa
atggctcgaactaaacagacaatgtgtaaagtcaacgcgtatgaccctcatgtggcctagcacgccaccttacccagcaccgaacaggatccggctgtccaagaggagggggctgagtccaggagatagaggaacagggcaatgtccgttctggtagtgcttccgaggcggaggaagaggaggaggtcgcacccccaaacttgggggatacaacgaggctagggagccagtagatgcggacggcgatgtcttggtcgagggcgtggacttcgtcactgaggagcttattgctgcaattcctcacaggagtcaaggtgcctttggcgccaggtgggtgagccctccgtccaaggtcaccgaggcacgcctgcgagacctggaccagtctggctatttgggcgagctggactgttatgttcctgcctcaaataaccgagccacaaaccctaagagggggatgtgtgcctggtccggtgctcattccaaacaaggggcactgctgcctttgcactcgtattttaggaaggtggcggacttttttcgtctctgtccgacccaattcactcccaagggcatcaagtatctgtctgccctgttcgttct

SEQ ID NO: 155729 - DNA, 725 bp, Cannabis sativa
  modified_base (45)..(46): a, c, t, g, unknown or other
tttagggtgttaaacaacatactcgtgagtagatctaagatcctnntaaaataaattccaacaatatatatagaagaagtatgaaagagtgatgtgacactttaaatcactttaatgttactatctcttctctccttaattctctcttttcttaattttttattcaattaataaatattaattattaatgaattaaaaaaattcaataaaactttaacaaaactgtatattatatataaaaaataattactgtttatttattataaactatatatttctacaaaaaaaaaaatattaattttaacctaaatcacttataatcgtaaaactatacatttatcaatattgtataagtcatctcaattatttttttttatcaatatcatcaacaaatctctatttattttctctctatctatatctcacttgtaacaccctactagtttaggctttttaacgtgatttctaacttaattgtgagctaatcaacaagtttattgaaaatcgtgaataattaaaactttatttaactaattataaataccaaaataacatacgtatattaaaccgggatcgcgtttacaaaaatatttataaaagtttcttagagtataatccaaaatttgtcgcccatcgactatataaaatacacccaactgtcccaaagactgtacgctccaggcctaaccaccctgacatgtacaatcattacctgctcgctctca

SEQ ID NO: 155730 - DNA, 576 bp, Cannabis sativa
ggggttttggggatttctaccaccccgaccacctccggtctcaaccatttcaccctgtcatcttacgttttgttgggtgtccattatttaggacttagcctgcaaacccacaaggcatgtaggttagacagtggttataatatttccaagaccgcatttagggttttaataatatttcacacatatatgttatacaacttaatcattttggaaaaggtaaaagcttacggaaccgtgagttgagctcgacactagccttgattgtaaatatctttgatgatcttcagtgaacaacctggtggctctgataccaaactgtaatgcccgtatttaaaaaaatgaccaatttggatttaaatttattttattatatctaaataatcttgtaaatcgggatctcgagtttaaaacacactcaaaattacatatactatatataaagtttcataatgtattattttttttacaaaatttcagggcaaccatgaaatataactcaaaatgttgaaagaccgaaaccctcaaagttgcactgccgcgatatgtacaatccttgtcaagctccaactcactgct

SEQ ID NO: 155731 - DNA, 567 bp, Cannabis sativa
atatgtctatttaaatattatttacttttcgaggatattacagttggggtctaccagtgatgttttttgtgactctgttttgccgcttaggtcggccagtagattagacttgtaataatatttggtaaaaatatttttgggatccccacttttgtaacttttactttatagctaaaattattattacaagtttattttcattccatttgtatttaaagtttaattttcgcgctaattttattagtaatcttgtttaggggattaggattgcttaagtatcttgggtattgtgcctaattcattacaatttggtatcagagcaatgtttttaaacttcctgtaggccggtcgaacatgtacattcaccgtcggagacaagctcgactcatggtgcagtaagtgttaagagcaaaaactttgctgcttatgtgatcatttgtttaccgctttccattttatgtgatgccatgatttaaaggctatatgattaagtgtttatttatatggaataaatagttaagttagggtttaaggcaataaatgcgtaagtgtggtattggtgcttaa

SEQ ID NO: 155732 - DNA, 527 bp, Cannabis sativa
attacatatcacgtaatgtaaatatggtttatgatttgaaaatcatatagctgtgattttcctgcttttactgggtcaaaatgatcgtgttttaaatcatgtctttaattattatttttggaattttctcgacagaagcttggttccagtgatctcaatagcgagctggggtcattcttctttccgaggtcgacgatgcatgtctagtgtcgatcgcggttcttatttacaaagaattcttcgaaactcatttgaatgttagcttcggactttccagggttgtgagtctcgctgatgctaacgggatgaagttatatgaggtcttcccataatgagacggccacctcgcttacttggtcttgagccgatccgtctgtaacacttagtttgtacactaaggactttcgcaattgatatatgtcgctttcgtcttctaatgtgtattttccttgatgccttgcaattcgcattcaacgacatatggtttctcgctaatatactaagtgccagtttgtacattgattcct

SEQ ID NO: 155733 - DNA, 628 bp, Cannabis sativa
  modified_base (396)..(396): a, c, t, g, unknown or other
  modified_base (442)..(447): a, c, t, g, unknown or other
  modified_base (500)..(501): a, c, t, g, unknown or other
attctctgggcgtggccccgtggaatagtagtgttcgcgagaacactgataccacgtataaatctcttgtgtcaagttattaatttttctgcaaatattttatattctgtatgtactgttttgtcactgcaaaactggtttctgcagtaacagaattactttctgtttctacagacacatacagttttatattttcttatatataattgacatttgtaaaaacactgtttttcaatatagattaaggacatggtagttcaattgagtcggagtgctaatcatagatacggaatccataacttctatctggacatagaagtgaaacgatgatttcttttgagcttggcttaatagagataaatgattgagcgctcatttcaatgattatattagttnactaaaatatcatttataggtatctaagtgttttaagaataaaatnnnnnnaagggtgtaacggtaaatttgtctgtagacaatgtaaatcatctatagaggannattgattattaggattataacaaaaggatattcttagcgtatccatatcgtggaacatataaagcattctatataatctagagtgcaattctaaatctataatggcgcaaggaggaattaataagtt

SEQ ID NO: 155734 - DNA, 534 bp, Cannabis sativa
ccctaatgatattttgtcctttagtggacttagtaattgagtttgatatgttaattttttattattttggctgaagtaaaaaggattgtgtggcatttactttcatttttttcccaacttagaaaaaaaatagaaaattttcaaaagaaaagcaactctttttctctcaaacctctctctctttttcggcccctttgagcagcaagaaaccagccaatttccttggtgattcaagctctccttagcaagatttagtgttcataagttgttggtatgttttctgcatctttcctttatgttttcttgatttttgaagaaaagtttgatagttgcatgcttgttaatttgatgttgttgctgttgtgtttatgtgatattttcagaggattagtcttgttattttaagtaggttagagctactttaacgcatgatatttgctttgattctagattggaagtttttagctcaaagtgaggggaaatttcgaaatctgttgctgtgattattgcatgagttagaatttgttttctgca

SEQ ID NO: 155735 - DNA, 737 bp, Cannabis sativa
taattattaattattatatatattttaataattttagtttaagtcttttgtttatatttattttatttattaattaaagataaataatattgaagtatatgaaacaacatttgagtttcaattgaaaaagatatatatatatatatatatattttaaaaaaaagatgacatataaacatacaaatcgtgtattaatatatagggtacttattaaaacaataaaattgaagaaaaaaaataacaaaaggaagcatgtgattctcacataaaacaaataaaaaaaaatacaataaaacatacaaaacaacgatattctcatgtaaaaaaaatagataaaataaaaattatacaaatataaacatatacattagaaaataattacaatctatcaaattgcttgtcacatttttttttttaaaaaaacgtatgatattataaaatagattttatagaagagattctatatatatgctttactcttccaaaatacatcaattcgtagtggaattcttgtgtttaaaagcttcaatataataacttagaattggaatggaatatgttcaccatattacataaatttataattatttgagtttagtttatcttcatctttcatagaaaaaaaagaacttctataacatattattataattattataattatgagaattgaatatagaattggagtagacatattatcattaaaatttaatatggtatatgaatagttatttata

SEQ ID NO: 155736 - DNA, 597 bp, Cannabis sativa
cttttacaaatatattgtttatctttttggtgttttgtatttgaccaaaccttttgtacgcactgtatggtaaattagagacatgcttataatttcgactcaatctgaattttgaaataactatctttattcatttattgatcgaaaagtaaaatttgttaccgtagtaacttacatcagagctatttgatccaatctgatctttcatcttaacatgagataaaacaaattctagacataagaaactgtactttaaatggtggtcacctgacttgagtactttgtttcttttatcgaaacctttgagcgtattcccctcagaaggtcattcacttaaaagcaaatgttcattcagtacttagtttcgtcatccgacctagtactttattggtagtattttcttaaatgttctccattccaataccgtggtactagaacgagttgcattttttcgtcatacttacctaatttttatgctccggagtcaagaacatcgaccactagatatggtccttcccagttaggttcgagtacacctgccgtactgtctttggtgtttaggaatacccatctcaggaccatatctcccacgaagaa

SEQ ID NO: 155737 - DNA, 582 bp, Cannabis sativa
acgggaaccacatcagaaacaacgactgattttgaatctgattttatctctgcgataatctcaaaagcaaaaacaattgacggagaaaaggaacaaaaagaacactaaagaatgaacacccaaacacgaagaaggcagaaaaaaatactaaattacaaccttaaacagatgcgagtgggcttagaggaacagagtaaagaactggcaaaagaacaccatcacacgcccctccacgccccgacgtgtgggaaaacacgcaaaaacttcaggcggcgcgtgagccccacgcgtgaggaatccagcgactggacttcggggtttggtagattggcggcaaggcaacactcctgagtgggcggtgagaataaattcgcactccaaataagatttttgaaaaagaaccctaatctctttctttttttatgaaccctaattttaaatttcgaatttcgaatcacaaagttctaataccatgtataaaatagtgaatcgaattgtgtgtgtattaatttcatagaataatatatatttatatacaaagctaggagactaaatggcaaactactaattacaaaataggaa

SEQ ID NO: 155738 - DNA, 587 bp, Cannabis sativa
  modified_base (293)..(293): a, c, t, g, unknown or other
attattcatgtgtatataaatatgcaaattgcaaactatttagttgtgttgcacggtatttgtaatcattttatgtaaactcttcctacaaaaatgtcctctgtcaataaatttattttttctttaattaaaaataataataatttctaataggaattgtctctcataacttttgacaggtatggtaaaatagtaattaattattgttttatttatttcacaagttttgtattcttgtttttttttttttgtaaacgttattttttagctttttttgtattatgtatttactnttatataaaattattttaaaatttgataatgtaggtgggtaaaattgtatgaaaatttgcaattttctctaacttacatttatgattcattttataactgacgcaataggtgaaaaaaaaattatttcaacaatttatgtgtcattttataactgacggtatacgtttttagtgacaatttcgaaatgccactaacgattttgcgtcatttctaaattgacgcagaagataaaaaagaaaagtgtatattttgcgtcggttataaaatgacgaaaatagttttttgtgtcattt

SEQ ID NO: 155739 - DNA, 790 bp, Cannabis sativa
ttttttagtcctcgattcctttgagatatcttctctttagtggtattttctaaggctattttctcaagaaaataatatttaaaatagaaaattttcagtaattacactcaattctcaagtgtacgagaattgaagagaactttcaatgtcatgttttttatacttaaagagaatgagagaatcaattgtttactaaattttgaaaagaaagaaactagtgggccccatacaaattacgaagaaaataaaaggaaatgttctccccttatttttatgcgtgatacatattccctttcttaacttactttatttcagttttaattttattaattaaaattaaaaagacaaatatgtccttcaaaaattgtaattacatgtctaacaaggacaatttagtcaaatcaaaacactccaattaactttccaagttatgtaaacaaaattaaatgattatagtttcattttttgacagtttagtaaacaacataataaaatattatttccaattatcttacatcttaaatcgattcatttattccattaattattctaattccaattatagtttagtaagcgtgtcacctccaactgttgtgatattttgcacacgtaagtgcacgtatcgtttacaagtaatagactcactaagagtgaggttgatcccacgaggattgtagttaagcatttaaaattaaattgttacttctatttggttaaataaaaaataagaaagaaaattaaagtaagaaaactagtaagaagcaactaattaaaggaaattaacagttaa

SEQ ID NO: 155740 - DNA, 525 bp, Cannabis sativa
attacttcagccactaacacttccagaatggaagtgggaagacattgtaatggattttatgtttggactgcccaggaagacaaggatgtatgactcagtttgggtcatagtggatcgctttacaaagtcagcacatttcttgcctatgaaagtaacataaacagtggatcattatgcggacttgtatgtgaaagaaattatttgtgttcatggagtcccgaagtctattattttttatagagatccaaaattcacattgaagtactgggtgagcttacaaaaggcgatggatactactttgaagttcagcgcgacctttcatccttaaatagacgggcagtctgaacgaactattcaaatacttgaggatttgttatgagcttgtgtcatggactttggagtttcatggaataagtatttgtctgtgattgaattctcctataatagcagttatcaaagtaccataggaatggctccttacgagctgctctatggcagaaaatgtcgttccccaattcattggga

SEQ ID NO: 155741 - DNA, 754 bp, Cannabis sativa
ccgctagggttagaaacttagatgacatcatgcaacttacaactcttcaggcagggatctccactgatccattaaccgctggaggtgagttgagggatgatctgcaaggacctcgagagctcaggtatttatcttgaaggaagaagcccgaaaggaaatgaacttgttcaaaataggctcgggatgtaaacccaacaatgtctcaataggaaccacttctgcgagaattgataactcgggggcttctggtccgaaaagaaatgaaggaatcaaggaaccatcgaaggatagaaagaaacaaaagaagcatgacaaatatgtgccagtgtatactatttatagagagcttaattaaactcggaaaaatatttacctcgcacatgagcagaaggtagccttcggtaaacacgagcctatgaggaatacgaggagcaaaagagatcctaacaaatattgtaaatttcataaagatattgggcacacgaccgacgaatgttgccaattgaaggatgagatagagagtcttatcgctcaaggccattttaagcagtatgtgagaagacagggccagggatacaaccagcctgtcaatttgttaccctaaataaccaggggttgaaacctattcctatggaaggagaggacatcctggttaatttgggaggaccgcatattgtaggggaaagcaataacgctcagaagaaatacgtgaaggagataaagaacgagcagtcggtctttgccccagaacctt

SEQ ID NO: 155742 - DNA, 534 bp, Cannabis sativa
caagaaagattaaatggattagcaatgttgtctattgaaaaaaaaaaattattagataaacttgactataacgatttaataaataatttcgcatctgaaaaagttagaaaaataatttttttatataagtttattattttgttgatttgtaaaatttgttatttttctattcaatttgagattttttttttagtaaataattgttgtaaaaaaaaagggcctttattttgaagcttgcccaaggcctctaaacggttagagacgaccctgcttcccacttactcacgatctccactattcattcctctctcatttttctcaaaagtctaatctttttcaagtgtgagagtgtgtttgtttttctatggtttcaaagaaaaatggcaaaaacaaaaaatgctcaactgtccaaaaaatgctgttgtatctgcttccacttctgctcctacagaaatggctgaattcaacttgcgtttggaaataatggagacaagttaggcctggcttcttaagaagatggacagcatcatgaaa

SEQ ID NO: 155743 - DNA, 677 bp, Cannabis sativa
atcaaatatgggagtgtagtatagtggtgaaagtcttattgatagatcacttttaatatcattcaaaaaaaaaaaatcacttttaatatcttctctattatattctttaaaatatctcactaaaaaaattatatttttattttatctcacacatttacattacattatacatgattctttatattttcctttatatcatttaaataatatatttatagtatataaataataaaatattatacattatattatatatatagttttacactcaaaaatcaacaaaatacactataaaaataataaacaattataactatgcactaaaacctaagaatgttgtaactacatttggctaaggaaattaatattttgagcaataatagctcataggtattttaatcacttgtttttagctcttaacaatatttttacatttataactattttacataagttattgtgagtcctcaagagcactcataacaatttctctaaaataaaaaatctttaaaatttataaagatctaaaaaatacaatacaacagttgctctagttttcttcttcattttaaacctttttttcttaaaattcattattcatgttctacatttatataatattactcattatttttaatatattttattaattattttgaattttaataattattttt

SEQ ID NO: 155744 - DNA, 552 bp, Cannabis sativa
aagaatcagtaacttagccgattgggttttgtaaggctcggttagaacgcacaactaagcttgctcggctttgtatacaaattatacatcaacatgatctgtaacagtatttctcagcaaattatacccaattaaaatgagatttacagcttaaaatttttcgtttactgccattttttttttttaaaaaaaaaggttagagtaatttttgaaatttagaaaattgcataaatatttttagaaactatcttatcaaatttatagaaagtactttccttcactttttttttcattatttatttattgggtaaaaactaaagggaaatttgattttctatatttaaaaaactttaatattttattcttaaaccaatacattttaaactaaaaaaaatatgacactttttttaaaacccaaaaatactcctctcataactcaaaccctttctctctccttccctcaaatctctgcatctctctttctcaactgccccacccaaaccccatacaaatcatcccagccccacccaaaccatcccacaaccgccccac

SEQ ID NO: 155745 - DNA, 582 bp, Cannabis sativa
aaaatagattacattgaaatggagttttatttagggtataaaacctaacaggagatgctcacccactacatgaatcggtcagtccttgaggtaaatgagcagctggtcagagttgacaacgagccttctctggagttgttgatgtgaggattcctgaaggagttcatgagggtgagtcttccctgacagtttcctttaatccttctttacttggctcagattctaacatttttttctctgtgcagactagtctgaagatggcctacacttatttttgaactaagtctgttgcctcaaagaatgctgccatgtccaacaccatgagggcggaagtagacttggtcaggaaggacgctgatgaagccagggttcaatttggagccgtccaaatggaattaggtgtggccaagatgaccaaggatttggaggcttccgaccaacttgaggctgccatgacttctttgtccaaagaagtgactgacctctaggaagaaagggaggttcttcgaactgttttccgcaggttggaagcagagaagaagtccaaggaggagctaacgctgaggtagagaggctcaaagg

SEQ ID NO: 155746 - DNA, 1062 bp, Cannabis sativa
tttgagttcctttggcggcagccatggctcgttccaattcctcatttctttgattggattctgcgagccttcgatggagttgtcgatattatagttcctccgagtaggacctcttccttggttgctctgagttttttcccgtagggctcctttcatagtcgatgtgttgtctattcctccatgactggttcatcattttgagtattttccatgttgtgatggaacaattagaagatgtttttttcgaggggttttttttataaggctctcaatgaaagtaccaaactgctaactcgaatttttgtcaataataaataaagccttgtaaataaataattaatgcttataattaataaatatatatatagaacacttaggaatttttatgtaattttgtagttaaaatttacatacttcacgagtcattattatttctactttaccaattcttttttaatgaaaatttagataaatatctacttttactaataagtaatttattatatactattttttttagcaaattataaatatgtattttagtaatatatttggtatcctgtattttaaaatcatacgtatttgatactctaaatttaaaattatttgataaaaattttattaatgcaatcaaactgtcttcagttttataaattttgaattcaaattgaattttttgattacatataactaagaacagtttgatcaaattgattaaatcttattttaaggtacgaaagatgtataatttcaaaatacaaagtaccaaatatatattattgaaaacacaggtaccacgagaaaatacagggtactaattaataagtatattccctacaaaaattgataaatcgatgacactcgaaaagattgaacttctacattcgtaaaataaaaataactctttggttaaatgattataaaaaataaaaagttaattagataaaattctatctattttttcattattaattaatgaattttattaaatatatttcatttataaagaaaaaaattgcgttaaaaaattacaacttaagttatgtataaaagtgagtagtt

SEQ ID NO: 155747 - DNA, 833 bp, Cannabis sativa
aaaccctcaaacaccatagatttccaccatagatttcttacttcttttccatagatttcttacttcttttccatagatttcttacttcttttccttcgttttcttacttcttttccttcgtcgctgccaatcaactctttactgtcgatcaacacgaacgcccagttctcaagctttatgtaagttcttcgcatcttgtactttagtttattgttagtgtacctcgcatgctttactgttcatctgctttttctgggtttgatgtttgagttttctgggaatttctatttcgagtttctgtgtaacacgttagattcctcttttctggtgctcgagttacttctattctatgtattttttgtcaaggacgcatcttttcttcacgtaatgacattcaagggtttagagtagactttgtcctctcgatttttacccctctttccttttctttgcttattcacaatgtcaccatctgtgggattcttgcacccgactcttgtcaaggaaaaccttctaaggctttccttttgacaagtgttcggagggggtctctttccagcggttaggaaaccccattcccttttttgacttagggtttggtttggggcctgactgctggattttttaatcttcttcagaactaagatgtctgcatccggttccaaatcttcaaagaaaggagggaaacgtctggccaccctggaggaagttatgaagggtccagtggcgcaggaagggtacaagtcctgtgctaacgggtgggaagcggccgagcttcactctaccctgacctgtccccaccagctggaacacatcgtggtggtggcaggtat

SEQ ID NO: 155748 - DNA, 639 bp, Cannabis sativa
ggcatctggtcattggtgtcagtcttgagagaagtttggtggtggccttggaagaagagttgaggagccagtttcgaggcttgctcttggagcctggtgtgcaaaagtagtcccgattccaactccatcaaatggcatgcccccagttgttcgaccagttgctggagtctgtttgtcaacacttgtagaacatgttgcaaccatcttgtttagtaactttcttgagttgtggctcttaatgaaagcaccaaaatattgacttaaaaatctagactcttctaagccacactcgctcgttagattggcgagaataaataagtagttaaatatttataagagagacacaataaatttatagtagttcacctcctatatcgtaatagtaatggggttacgtctactttgagtgtttatttctcacgagatggtaattacaacaatagactaagtgtcagaagctccaaattctagaaagagaagctctgaccttgtggataattttctgaatatgaaaaatgaactaagggagctgtccttttattggtgaaagaggccataaaaataggaaaaaaatacaaataagatgtttttgaccattgatgatgatatatggtgaaaattagcttctcgtggtgatgg

SEQ ID NO: 155749 - DNA, 770 bp, Cannabis sativa
ctaatatattatatacagaaatcattattcagttttaaaaaaagagatatagaaaaataaagcaaaaaaaaattataccttaaggattataagatgtttagaactttcattatctcatttcctccaaacacaaccttgaacatataactctaaactataaattatacatagttagattaaaatatataaattatgagacccaaaggccaacactcttaaaaatagcatataactctaaactaactgcaaatatcaaaatttgaaaatacatttttattattataataaaatatcttagaataaaattatcttttattaaaataaataaaaaagtcacccaataattttccataaagcaaaaattcaagtacataggcacattttatatagaatagatacattcaattatgagtaatttcacattctaataaaaaataaataaataatactcaacttgaatataattttaaattcagctctgatttctcaaggcgaaaaaattaactcaactcaactaattaatagcaaataaaaattgaaaagagccattttagtacgattttatgtattttcctatatttaaattcaaaattttcgttcaatcacaccatttaaatatataggaaaattcttaggtgagagtatcacttttcctctcactcatgagggtattttttaaacctttgatttgtaatataatggtaataatttgttgtagtttatttgattatcatgaggtatcacacatagaatttttattatttattttt

SEQ ID NO: 155750 - DNA, 645 bp, Cannabis sativa
atctttgattttgttctttttatattcaagcttaaatcaagataaaatcaatctaaatatgaaaaagataggttagacaagaacttggggctttcactaccctagtacaccctctgttcttcaccccttcaagaacatggttttacagcttagaacactaagcaatctctctctaaattctctcttttattcttactatcaatagtgaaaagagtagtctatatatagttgtaactcacaccaggaaaaataggtacataacaggtgccaactaactaactaacacactagaaagttagttaagttaattggtgtaggtgagttagttcaaaagttggtttaaaggatcaacttccacaaatttccacattctctaaagcaaactacttgtaatcttttcacagaagccttgatgatgttgatatctcaaaatgttcagcaagaactaatgtttagcaaacaaactgagagaatgaatgcatcagtttgctgaatgtgagaaccttagttcccatgtcagcagggttgtcacttgtgtgcacctttttcaatttcaaaaccttgtcctcaatcttctctcaaatccaatacagtctaatgtcaatgtgcttgctgttctcctggtatataggattcttacatagg

SEQ ID NO: 155751 - DNA, 544 bp, Cannabis sativa
aatatgaattttctaaaacaatgacattaaacacataagagtttacaaaaccttacattgatggcagtgaataatatgacttctttcgctcagatctttacccttgttcctttcttttgcagactaataacaagatctgagcctggatctctttttctctccatcgggtttggttactaccgtcttctgcactatgattgagtacttgacttgctatatgtgggcatggtactctatcactatggctcgaattggtgaagaacaataattgagggttcgaaatcactatagaaagagtttgtcatctactagttgtcagagaatgaaaactatgtttaattttgttgaaagtgagttggatgagaatgagagcatcatgttccttttatagtatttcaattagggtttacgatttaactatatggattaaaaaagaataaaacaatgggcgaaaatcaagcctagtggccagccacttagtgggcctcactaattacaattttgccactttatttcaagtaccatttatctttctttcaataat

SEQ ID NO: 155752 - DNA, 578 bp, Cannabis sativa
aaaaaaatattaattaatttcattttatctttactaaaatataattcttttacttttacactttttctcatattttttaacactctttctctctcttacaaaaaaattgagagtagtactcattttatatctttctctcttttacatgattaataaaagtaatattttttttgttaatgttttgtagtttattcggagttgatttataaatgatttgtattttttaacaaggttgatgtcttgttatttttttattgaattatagttgtctttgtattattttatagttatttttaagtttttgtttaggtgttttaaaattatttttcttttatttttatgtttttttttacaattattgtttagtttatgtgcaatttttatagtatatattcttaaattactccacataattttttagttgtagggtttagggtttaggtgcatttgtttcaaaatattattccacatagtatgtacacttgttttattatttttatatatttttttagttatttttaagtggatttcaaaatatttttttgttcaatagttattttttattcatgtgtattttt

SEQ ID NO: 155753 - DNA, 556 bp, Cannabis sativa
ccagaaaccagcagcctgaaacacaaaaattcagcaaccattccaatcttttcaccccaaatcacaagcaaacactgaaaacatgttcacaacttatcaagctcgaagctagggtattaaaatccacaattcaagcatcaatatccaacaataatctcataatttcaggttgcataaacacaaaagttcatgcttctaactcaacaaagttcaagctcaaacacatgaacttcaacctaaacatacccaaacttccagctgcaaacacacgaattaaaacatatttccactagaaagataccttatattcttactccaagatcaacaacataaatccccaccaaaccatgcaattccattaacaattcaccaagattaaaacccaacaccaagaacatgcaactccacaaactcaacaatttaaaatatgcttttcaacaaataaaaccagcaagaatttcaacaataaattccaaataagctcagctagaaactacctcaattccaagctcaaaaatccacaattccaaagcttcaatccacacccaacttcaag

SEQ ID NO: 155754 - DNA, 514 bp, Cannabis sativa
tcaaattctcttgtttctgactctgctccttcttctgattggtgttcgagtgtgtatgattctgttgttgctgtgttattttcaagcattgccacattttcttaatatggtgttattgtggatgtgatttttaggatttcagcaggtgttgtgttgttgttttgttggttgacgcataatgggcatgtaaaatctatttctttgatcttcaattgcaagtaaaaaaagaggctcgcatcgttgaatattttaattggtggtatttcatctttcgcttggtattgtatttgcaatgttgttcttgtatttttgcactccaatgaagtaagtagtatctctaatagcccttcatacttgcaattttttggtgtgaattctccactagccctatatttgacataattatgttcttcttcctattgtccattactctttatcaaaattggtatagattccataacctgtcatttttttttacaatatttcatttacttgacattttttccaattaaaa

SEQ ID NO: 155755 - DNA, 559 bp, Cannabis sativa
cccaattcactaactacaacaacgtatgcgatcttggtggtgtgagttgttcgttcatatcctcacataagctcacgttcttaagatgcgtacataagactaatcgagtcttatgtatttgagatatatgtgtcctatttgagtcacgtatacggatattctgtaaaaaatcgataacttaggacatgcgagtccttatcgggttatcgagtgcggtaggtcatctgaaccagttcgttgagtaaagaatcaatctttactaactcgcaggaaaacctttatggacatggcatatatcttggtatatgcgagtcttaaacccagtcttcggtcctgcctcgtgcgaggtataatacgacaagactttgtcagggtcacatcatctcgctgagtctagttcacgcgaggtttatactcaagtggtctccttctgacagctcaacactcctcgaggagagtgagtccacatgtcatctttataagagtctggtctcaagtttctaggtgaaaaattcacactataacacatgcccctagtttcgcgattgacagttatgtc

SEQ ID NO: 155756 - DNA, 757 bp, Cannabis sativa
ggtgtaccggtcattagcggatcatttgattggaatgaaattcggaatgtttaattttttattttacatttgaaatttgaaattatataggttttaggttttaaactgatatatatatataatgcgttttatatacaaatctatatattttaggttttaaatatttttacactgatctataaattatatattctgcataaatctttatatatataaataatattagggtttataaattaatttgggtatttatttttaaatatctgtgtatatatattattaatttgtgtatgtaataatataataatataaatatagaataattagtatatatctgtatttatttaaatatacatatttgggtataaattaatacatacatctgtgtacaaatttatatatttatatagaaaattttagggtttatatgtttaggtatttttttttacttgtgcatatagaaattttaatctttacatatatatgttttatttatatatatatgcgtattatgaatgtatagatgttctaaatatatggatataagatttatattttttttatttatatatatgtatatataaaatatatactatatattaatgtgtatatatattatatacagtgatatatatattatattgtgttattttgtaacatttttaattaatttcagtaattaataatatgttatactttttgtttttagattgaacaaaaagatttttagtactttggagaaggtgtacacaaaagt

SEQ ID NO: 155757 - DNA, 681 bp, Cannabis sativa
cgggaatgaagagtgatattgttgaatacgtttcaaagtgtttaacctgttagcaagtgaaggctgaacatcaaaggccgacaagtttacttcaactttaagaatacctaagtggaagtgggaagacataaccatggacttcgtagtaaggatacctaggactactgggttacatgcttttgtatgggtgatagtagatagattcaccaagtcaacgcacttttttacttgtgcgagtgacttatactctggaacagtatgttgaattataaattaaggaaatagtgagactccatggtgccctaaagttaattgctttagaccgtgatcccaaatttacttccaagttctgggagagtttacagaaaaccatgggaaccaagttgagattcagtacagcctttcaccctcatacagatggtcaatctaagacaaccattcagatattagaagacatgctacgaggatgtgtgataaattttgaggtatcttggagcgagttcctacccttgattgagttttcatataataacaactatcagagtaccatcggtatggcaccttatgagatgttgtatggggaaatgtcgatcacctatctactaggatgaggctagagaaaaactttatcttgggcctgaattggtccaaaggactagtgaagccattgagaagattcga

SEQ ID NO: 155758 - DNA, 571 bp, Cannabis sativa
gcgacatagccttgaatgccacgacattccaagaaaaattccaaaatggttgtcattttgaaattttattgcgatgtctaatggtattttgaccataattctctcgatatactcaattggacgattcaagatgttttaaaaagaaaaaagaatgatctagaacttttattcagaatgtatatcttagaaatgaccaaatcatagtaaaaaattagcttgaatttttagactttattttttatcacaaacaaagcgtgttgagcatctaaaacttagactttctcgtccattgtatcttacaactcaaaaatttatgctaaattcataaaattcacattatttaccatattatctctcatttcaattcatatgatgtatatgaccattaaaacctaaaacaaaaagaaaacgagagtaaacttgaacaaaaataaataaaaactactgaaacacatactaaaatggactctaaaaatgtataaaaataaacttaaaaaattctcccaaacttaacatttactctcccttgagtaaagaccaagttaaactaacaaaaaaaaaaaaacaacaa

SEQ ID NO: 155759 - DNA, 591 bp, Cannabis sativa
tgcagcctggagggtttcggtcttttactattttggagtctgtattttgaggttgcatgttagcgagttttaaaaaaaaaatatatgtaaataatagttaatgctttgtaattgtattttgagactcgggatcccgatctatatagttataaagatataatatactaaagttatcttttcagtctagtaaatttaaaatacgggcgttacatttatgcaatgagaagttttaatatatgaaaatgaaattgaaaaatagcatttgaatcgagaatcaaagtttattgttaatctccttacaaaaaaaaaaaaatatattgttaatctgtaaagataatatggctggaagaagatggaaaaattgatttttatttcatttattatgtatagaatgttttttcttttttgaataatattttttttgttcaactaataatgtttgattcatattaaattttttctataaaaataatactttttctatattctgcatagtaaaaaaaaacatcacacctatatatagttatgaatacatatatatatataaataattgaataattatttaattttaatattattaatttagttta

SEQ ID NO: 155760 - DNA, 620 bp, Cannabis sativa
  modified_base (559)..(568): a, c, t, g, unknown or other
aattaaaaaataaaggagaaatcagttcctaaaatactgaaacataaactaaaaacaaaactagttctacatcttaacacatagtacctcataaaaccaattatcatttttttaaaatgtgaggatctatttgaaaaaatactgaggcataaatatgaaaagaaccagctccataacaaaataaataacacaaataataataaataactaaaaatataatataaaaaaactagttatatttatcaactagttaaaaatttgagaaaaaaaaaatagtttcgtaaagcaactaagataaatactcacacacaaaaaccagttaaataaaataaatcaataaaaaaactggttccttaaattaactaaataaaaaatcagttctcgaaacaactaaattaaaaactagtttctaaaataaataattcaagaattaattaaataaaaaatcagatgacataaattaaaatagactcggttccacaacaaaatgactaaaaacaaataacacacaacaactcagaaattagttataatttaaaaatagaactggttctataannnnnnnnnnaaaaataaataacacaaaataactcaaactagttataattaaaatataactg

SEQ ID NO: 155761 - DNA, 692 bp, Cannabis sativa
tgtcattgttccttttcatcatgtttatttgaatcggatcaatttccaactaatataaaactaatttgccaccatttacataaatcgtaccttgtatatctgatagtttttggtactcgtcaaacgacactccttcataatttgtaaactattattaaacgatattgcaactgtaaggcaacgcaaaaaattaaaaacagccttattcgtaacatgtggttccttaattagaatcagatcttgtttattatttttaagaatctgaattgcctgttgtacaccagtgaatcaagcaaaatgcaattgtacatgacgtatattcatttttgaataaattttcatatcataccttttttttttggattcgagggggagctccaaatctgtttaatacagatttacattgcttgaatttggattttcgaggctggattgagtgattttgaacgattaaaaccgaaattaaatgtttaatatcagtttcttcacggtttttctggttttttttttttgtaatagtctgtttagatcattggagttcttcttttccaatcaaattttgccgaaatttatggttgttctacactcgatttggtttcattctggttgcgtaacagattggatcgatcgaggtttcttcatcgtctccgttcgtgatgtgcggcttaaggtatagaccaggtggtattttt

SEQ ID NO: 155762 - DNA, 860 bp, Cannabis sativa
  modified_base (235)..(240): a, c, t, g, unknown or other
aagatgggcttagaattttaaaattttcccactcaaataaggtactgtgatactatgtccaagaactttattggtatcaatttctattacaacactaacatattaattggaactaaatacaggttcaagaataagttctaataatttgctaatttgttcattatattacatccatgtttaatcaaaatatgtgtgccatagagattttgcggtgtattgagtatagtctagagtnnnnnntgaactacatatgtcaatagcttcatccacccctaagtgttatggagatcatgtggagttatgaatataatctagagttcaatagatgtaaaagatcgttgaactgcatatattacttcttaacttcttccacccctatcagatcaaaagatctttttcattaaacataatcttaataactgcttaagaaattaacaattattcataaaaattgaatttgaattcgaggtgtttaggtggtattatctctttacagagatgaatataccataaattttgtatcaataataaaacacaaacacatataaaatatgataaacatataaatataattggtattggcatacaagttaaagaaaaatgaagctcagtgcaattcataatgaaaatttcttaaagagaaaattttattaataatctaaaaattgtcataatgaattgtctgcaataatatgaaatatggaataaaatcccaaaccaatagctaaaactaaattaagtgttcataaattgaaacaattaaatcaaaaattaaaaaaaaaaaattcgagcttcatcttcacttggacaatctccacccttctgtccaaccatcccactcaactcgctaggatagcaat

SEQ ID NO: 155763 - DNA, 703 bp, Cannabis sativa
aaacacaacccttttataaatggggtgacacgacacaatccgtgtaactcgtttatatgcatattttgtttaaacatatcaaccaataacatgtttataacacatatatgacatgttaaagtaataaaataactttaaatatatcattaacgggtcgtttcgtatcagtcgtgtcaacccgaacatgacccgtttattaaacgggttagacgagttaacccgaacacgtaggacccgaacccatttaaggcaaacctaaacccactaactctcgtgcgggtttcgagtcgtgttatcgtgtctgacctgttttaccgattttactttcgtaggagttaattatcagaatttagttataaaatttaaaatcataggaagaaaattaataagaagtaatatagtttagagcatgattgttatcgagtactaatagtactgtcatatgattagttagtaatattttttaaaaattattatattacaataaattatataaaattcgatacttaattataacaatattgcatattaaattgtgtacagtattaaattattaagggtgccttttagtatttttttatagtttaatagtcaacacttttcagaactcacaagtattgggagtggggttttaaattccaatttttgttaagaaggtgtattatgcaattaaataataataaaatttgttgcctcatttttt

SEQ ID NO: 155764 - DNA, 683 bp, Cannabis sativa
tgcaggccatccaagaagagatgcagtctcttaggaagaatagaacctagatttttacgaagaaaccagagttatacaagctagtaggatgtaaatggattttcaagcataaagaaggtttagggaatgagcctaccaaatcaaggcaaagctagttgccaaggggttcactcaaaaagaaggcatcgattataataagattttctctccagtggttaagcaagctttaatcagcatcatgaaggcaaaggtagcaagcatggacctagagattgaacaaatggatgtaagaatacctttcttgcatggtgagttagaagaggaaatctatatgcaacagcctgagggctttgacaatgggaactaagatgaggtatatgcttactcaagaagtctctttatggcctcaagaaggcacctcggcaatggaacttgagctttggcacttatttacagagtattagatgcactaaaagcaagtatgaatcatgtgtgtatttcaataatcaaacctatttgctactctatgttgatgatatactgacctttagcaaaacaaagtcagaaattgacacgctgaaaaggaaactcagtgatgagtttgagatgaaagatctgggcaaagcaaagagaattcttgggatagacataaagagacctagacctggcatgatagtactttc

SEQ ID NO: 155765 - DNA, 572 bp, Cannabis sativa
aagtgcaaggaatgatagacacgtgtcactcgtacatgttgccacgtcatagtgcaaaaaatgggataacatttgcctccaagtctgcgcgggacttccgaagtcgcacgtggacttcactcggtttggatctttatttgaacagttggcacgtgttcaaagcgtctgttggtgatccgacgagatttgaccaagggtatcttcaatattcggctcattaatgttgactgacatgtacctcgaattacacccgaattacacccaaaaaatagcacgcattgatggttgccattcaggtacttgagtgtttaacgtttaattttggggggaaaccaaggcatttaaatttcgaaacgagtgcccttcttcactaatcaacttataaatagggcagaaatccctaataaactacttttagcagttttcattcttgaagagttcagagcaagaaaacttttcctctcaaattcttcaaagaatccccaaaaagtgtcgatcagtgtcatccgaacaactctaaagcttcaaacagtgagtaagttcctcatctctttcctcttttatgcttgaat

SEQ ID NO: 155766 - DNA, 519 bp, Cannabis sativa
atgtatggatctattccgatccactccttaccggagaacattttatgtaacgaccatgaggtctagcttattttaatatatgaaaacgcttattttcaaaaataaaagtgtaggtaaacatcaaattaataataacgatcatcataaatattattcattatttttgctgttatagttgaacacgacatttcatgaatataatcttaattaaatttcaaatggtaaaaacaaaaacaaaggcatcatgaaatgttaatatttacatatatgtttttataattttatggtggattgttgttttatgctaatgttaaaagtgtttaaaagtgtgtgatagtaataaggtttttaactgtttgtgtgagaatagtacttataggataggttttctgctgctggtatgagcatagcactgcaggatatatttttagctgtttgtatgggtttacttacagattattctatcatgggtgagtacaatttgtgataagggattgccctattggatgccgagtgtga

SEQ ID NO: 155767 - DNA, 727 bp, Cannabis sativa
  modified_base (34)..(38): a, c, t, g, unknown or other
aataaaagataacaagcgtaaaaacgctccaaannnnnttaaaactcaattaaaaatatactaaaattaatctaaaattaatactaaaaataacttaacagctagttttagcccaacgattagagcttcgtactcggcttcgttgttagatgccctgaatccgaacttgactacagcgtgcaggtgttgccccacaggcgtgagaagggcaatccctgcactagatagttgatctgtagccgacccatccacatgtagtttccagttcagtttttcttcactgttacttggcttagttgcttgtaccggctcgggttgctttctggtatgctttcttttttgcctgtgcattctaccctaaagtctactagagcttggcctttgattgtttttcggggtaggaaagatatttcgtactgaccctactctaccgcccacttgagtaaccgtccagaagcatctggcttttgaagtatttgtcatagtggttggtgagtatatacccgaataggatgagcttggaaataaggcctcaacttccttgttgctagaatgaattagtaggcgagtttttctatcaacggatatttgccctcggcctcaatgagtcttttactgatgtaatagactgcgtgttgtacgtggctccatcgttttttagaccaaactgcatgactttgtagcaatagagacacatatatgttcggaaacttgtatgttcttggtc

SEQ ID NO: 155768 - DNA, 670 bp, Cannabis sativa
gggaattaggaagaaaatctagatatgagtcagacgaggagctcgaaccgtgccatccagatatcatgaatactctttttccccagggatttaaaaaccctcacgtcttatcgtatgatgggatcaccaatttggtctcgcatttgaataacttcaacacaataatgcgagctagcaatgtgacaaacaatttacgttgtattttgtttcccccctcgttagttggaacagcaagcagctggttcaacaaatttacccatcattccgttacttcttgggaacagctgtctaagaacttaaaaaaacagttccaggccacaagggataggtgacccgaggcatcctcgctaactaatattaagcaacagccaggtgagacacttaaagcatatttaagagttagaaatctggatgatagtacgcaactcactgcccttcaggcagggatcactaccgatctatccaccgctggaggtgaattgtgggaagacctacagggtcgtccagtgaagaacatcactgagttcaacgagaaggctcaggtgttcatccggaaagaggaagctcgaaaggagatgaacttgttaaaaactggctcgggaggcaaacctagtaatgtttcaacaagtactgtctcaactagagttgataactcaggggcctctagctc

SEQ ID NO: 155769 - DNA, 608 bp, Cannabis sativa
  modified_base (555)..(583): a, c, t, g, unknown or other
ttagggcacaaaacccaacagacgccacatgtgtgattttacaaactaattcttagttaatctattagtttaagaaaagtgcggtttagttacaaactttcaatttaaactaaaacttaacttttattcaaaagattgctaagtatggggatcccctatttataaaaacttttacactttagcttaaaactagatttatagaatagggttacatttccacaaaatagtcaaaaggatggatcctattcactggcagccaaaacgccgcggttgatatgtacatcgccgggagacctttaactcatggccgaccacaatttcatcctccttacccgcaccacgaagcacccgtgagtcacaataactcacctagaaaagctattaaatcaaggcaatgataagcacaagtaatcacaacattatataatatgcgtactcataattcattacttattcaacatgcataaataatttaacatctataccaacacgcatattacgcattataagaaaatcatagtaacttattattggtttttgtgccctaaataaaannnnnnnnnnnnnnnnnnnnnnnnnnnnntaataaagatcagaaatcattttat

SEQ ID NO: 155770 - DNA, 509 bp, Cannabis sativa
  modified_base (72)..(97): a, c, t, g, unknown or other
aagtagatgtaatcctggttctccaaacatggcaagtgtctgtgctgtatcccctccacataattcataacnnnnnnnnnnnnnnnnnnnnnnnnnntgtcaccctcatagaaattccaatacatggcgaatactgtggaccagatgtgtctaaaactacaccttttcgagtgtagacttctggatagaggttccgtcttcttctcagtaagtgtgccatggcatcaatttgctgtgtttcaaaagagaacagtaagacagatattgcataaatgtcgcacaattatcgcaggaaatcgcatatcgcatataatcgcatatatgtcgcatataatcgcataaatgtcacaaaatcgcatataaatcgcattaaactcgcacaaacatttaaaaacacaataaattaattttgttaagaaatacttacagcatcttcgagccattctccatgcaccatcagtttcacgaaccaggatcgagtggctacgccagtgtgaacatccctagga

SEQ ID NO: 155771 - DNA, 739 bp, Cannabis sativa
tattgtgtgtatatattgtgtatattatttatataaattttgtaattgtattgtatatattttaagtaatatatatgtatgtttatacatatagtgaatgcgaatgagataggagagatttaattagttaagaatatagtttttaaaattgtattagtgtgagatataattgattatatatgtatgtatatgtaattttttcaaaaattaatgtatataatttagaaattagtaatttgttactcttttttataactagtaagtaataatttggtgttgatcgaattttaacttgctataggtatatacattcactaactttttgttattataattagataactatgcatatttagtggagtttgaacatcttaaatattcatccatagtgaactaagttctgcgatatattatactgcactcggatgggtgtaataatatgcatgttaaaagacatcattatgtccgcattagaagaacatgatttgcaacagttggcaaacgtccctgaaaagcatcttgaaattgacttcacggattggttgaaatttgttcaaagtcgactaactcctgaatttcaggtattaattatatttgtactaagataaatttttagatacaagtactggtagccaatgtatttttttggtattgtaggaattgagtaaggtgcaacgtgaacgttcctcaaaaattcaatccagacatcgaagtggtcggagtgggatggtgaacgtac

SEQ ID NO: 155772 - DNA, 1044 bp, Cannabis sativa
ttacacaacaaatccaagcaaaaagcttgaattatgaggacatagctgaaaccttaggttatccaggccttaggtttcatgagtatgatggagaaccgtatcagctgtttaggtgtgaaataaatccggtagccaaggcatggctatactttgttagtgcaaggttggtaccatacaaacattattctgatgctcagctcgacaggcttaaatttgtttatgcaattatgaagggttacaacttgaatgtggcggacataattagagtaacttttgatttgatggttgagggatcttgtgggggtggactcgggcttgctgatattatcaccaccttgtttgagggacatggagtaccacaatactcctatgatacaaaggcagcaccacaacgcagtatctccctgtccacggtgcttcgattcaaaccaccgcaccctcatggtcaaccgccagctcagagagatcctcctgcagaagaacgagagcagtatgaagacattgtaccgccacgtattgctaggcctctcgacctagccgtgcaatacacgcatgatcagctgaattatctgattcagcagaacatgcacatgcaaaattacattgcccaaaggagcgttttttatgagcagcaggtggcccaattaaacacgctaatcacgaggatgaatgtcggtgtggaagaacccaactattttgcaataccgccccgcttccacccttatgatcagccacctccaccaaaccccttctgatggggcttaggtaagtctctctcaaccacagttttattttcacacattggggacaatgtgcatctttagtttggggggagagatttaatgttttttttaagtttatttcagttttttttcgtttcacttttagttagtctttggtatctgtagtgttggtgttgatagctaagttcgaaaatgattgaaccagttttattcacttgtgcaatggattgaaatcttaaccgtgtgcttgagtcataactctttgaattaaattggatgtgtattagaaggttgttcattt

SEQ ID NO: 155773 - DNA, 636 bp, Cannabis sativa
gcctgttccagaagttccagtggcacctgcccctgttgtccaggccgaacaagtgttagcggtgaatagaatggaacctctgtatgaaaggttccgcaacaaggaaccttcggtttttttgggaggtccggacgtcatgaaagtcgagcagtggctaactgtgatcaccaagatattgaattttatgggtgtcaccaggaatgacagagtggtgtgggccacttttcagtttcaggaggacgcattggtgtggtgggacatggtgtccatgatacacgatgtcaccacaatgacctgggaaaagttccaggaacttttcaatgcgaagtactataatgaggccgtcagaagtgccaagaggaagcaatttactcacctgacccagaaagagaacatgagcgttactgagtatacaacgcagtttgatcggttggtgaggttggcctcgagaattgtgccaaccgattttagtaaaaaggaaaagtatctggatggtttaaatgtgaagattaaacatgacttgatgattactaccgacgacaagaccacctatacggaaatggtggaaaaagcactgcgagctgagggcgcagttgggtgtatgacggagtgagctaggactccagtgggtggcgg

SEQ ID NO: 155774 - DNA, 667 bp, Cannabis sativa
tattacctttccagcctgcataagtacacagtcgagaccctgtctcgaggtatcataataaaccacaaacttttccttatctgaaggaagagttaggactggagcagtaattaagcgttgttttaactccaggaaacttttctcacaccgatcagtcccaaacaaacttctggttctttcgagtcaactccgttaagggtacggcaatctttgaaaaaccctcaacgaaccgacgatagtacccagctaaacccagaaaacttctaacctctgtagttgatttaggtgctggccaatctcaaacagcttcaattttggccggatccaccatgatcccatctttatccactatgtgccccaaaaatgagacacgggataaccagaactcacacttcttaaatttagcatagagcttatgatctcgcaaccgttgcaaaactgctctgagatgcaaatcatgctcttcctttgactcggagtacaccaaactatcatcaataaacacaatcacgcacctatccaggtagtccttaaacacccgattcatcaaatccatgaatgacgctggggcattagtgagtgcaaaatacatcacaaggaattcatagtgtccataccgagtacagaacgcagttttcgggatatcttcctctcgaattctcagctg

SEQ ID NO: 155775 - DNA, 602 bp, Cannabis sativa
ccctgctcttaacgaccaaattttattaagctacttaatattaataattaaaaaataaaaaaaaataatttaaaaacatgaaaattaaacaaaaattaaaaataaattataattttcctttttttttatttttcttttcctttttttctacttcttttgaattgaaaaaaaaaaaacacaaaaccctaactcttcatccatcccatctacctcccagtgttcattggatcacattcaataaatttggacccaaccgatccaatcctattatttattagatattaaatttggtcatccgatccaatccaatcgaattgagtcatccaatccgatctaatggatttattggattggatcggttccaatcattagatgcatcgactggttttttattggattggattggatccatcttatctattttagctatcattgaagtaaatttcattaaatatatatataacataatttaaaaaactttataatccaacatacataataaacataaataatttaatctcatgtgttaaatatatattaaattaattaatatatatttttaaataaaacatattaagtatataaaattataaatgtatttt

SEQ ID NO: 155776 - DNA, 523 bp, Cannabis sativa
ataaaaggtataaatgttgactttaccttatggaggtatttttgtaaataaaatgtcaatttatattttctatgtaataattccttatttattatgtgataaaatttacattatttttttttatttctttgatgtcatttatattattttattagaatatatatttttttttttaaatgaaagtcataacaactcaaccggaatagtgtccaagttaaaaaagcgatcagggtgagatatagaagcccttgcaaaggaatgagctgctacatttgctgatcgttttacaaaatgaaaaaaaaaatattacgcaaagtacttaataaattcttgcaatcactaacaactttgccaaacaaggaaagcataaccacagagttacgaatagcttgtacaaccgaaagacaatttgtttctacaaccacaataagccacgaatgatctttgatccaactcaatgcctctcggaccccaattgcttcgaccaccacaacagaaatcgaaccatggaacaactttgtac

SEQ ID NO: 155777 - DNA, 943 bp, Cannabis sativa
  modified_base (386)..(387): a, c, t, g, unknown or other
ccgttaatcccatcaaacttttgtgtgatctagtttggtggaaatggaatttagtcatagtaagtcgggtatggcttatgatatccaagaataagcattgttgtagcctgatattcccgaatactctccatgataaaagccttcaggtcctgctgaggttgaagaccaactaatgttagttgcacactgagaggtggcggttgtatattgcctacaggcggcactgaagacgaggaatgttgtccaacctcactctccttttgtctcatattagcttgatgagataattttgttgagagtcgggctacttcttcatccctctcagctaataatctttgtagttcttaaatcttctcttcattactgattgccccagttactaacannggcatatttttatcattgccaatggttagttcttcgaactgagtaatgagatcagcagacaccccctcactgtgttcaataaagggagtgtcttctaaagagtgttcagatgggcaagacctctcttcatgaactttttgaacaaaggggttcaccgattcctgaacaggaattatacgcatggcacaagctcttgattgagttatagggcccgtgtaggaggtaggcttaacagttgaagtgacccttgttggtcagtatccctggaggaacatccagtcaccatgttcttttcagaatgagttagggcttgctttgggaacccttacactttcacttctagccttctatgggaaggaaaaaggcgtcctacacccctcatctaataaagggtgttcattgatctcagcagatgccccttattgaccttggcagtggacagggattacaattggaggcctaatcgttgtgcctcctactaattccctcgtttcaagagggtttggtgaaggtgaagtttttgtccccctcttgtcttttgttgccttcctacctc

SEQ ID NO: 155778 - DNA, 555 bp, Cannabis sativa
  modified_base (484)..(488): a, c, t, g, unknown or other
cagattcttgcactcattggtactatgtccaatgtcgttgttgtattcgcatctcttgttgggatcccttcgcgaactgtccctgtacagaggaggaggtttccagtattgcgtattttgccttgtggagaaatacactcgctcctgctgtccgtcaacttgtactgggtatactggggagtatacccccttctttagcgcttgtcctccgtcaaattgccgccttttgaggacctcttgctctgggagctctgaggaggtccagttaggcttgcagcaggagcgaagtgagacgggacttgtccactcatccttgaggggttacttaggggattcccataatgcgaagatgcaagagccaaggctgggctctgattgtatcctggggtagcggagaattgtatgccgctcattggtggagtaacaggaggaagggttcccgagagctgaacttcgggtacatacctgttgggttttatgcccnnnnnaaaactctatttcaatgtaatccagattattcaatatcaataaaataacagaagtatttttcattca

SEQ ID NO: 155779 - DNA, 509 bp, Cannabis sativa
actttcaaataacataaaaaaaattagcataaaatttagtatacgtgcctcgcacgtagctttttactagtatatatatatatataaatagaacaattctcaatgaataatacctattgatagttactaaataaatttaacaataaatatttattttaaaaatattaaattattaaattttgatccaaatgacgaataataaaagacaattattaatatttatgcctagtttagttacttatttataaaaaatataaaaaaaaaatctctttttacattatattaaaaatatatttagatacaaaatatttaagtcaaatttaatttatttttttttttttactgaaaaacttttgttcttaattttttttcaattgatggaacaaacccaaccatataatgtaaaaataagagataaaactaattagatagtaaaattgaacttaaaaactaaaatttactcattcatgagtaatacccattaaaagtgtattcatatataaatattc

SEQ ID NO: 155780 - DNA, 567 bp, Cannabis sativa
  modified_base (63)..(67): a, c, t, g, unknown or other
acacctgatctacctatgatgacacagagactaggtcgtgaaacaacaatatgcaccgaacannnnnaacatggctctcatcagtataaccacaataggcaaataataagcataacaaagaacacattcttttttattttctagaaaattcggcagcataacaactgcgtttggaataaacccaaaaacaatagcctgcataatatttgctcacaaaaatatatttggcactcagtgccccagaacactctagaaaaaatatgcagattaagttttcaatttttcaaataatttgtaaatcataaaaagttgaatatgtccaatattatacaacacatataaaaattaagtccaataatcaagttgagtccctacctctcccgagtcgttaaacttttccaaaagacgatcttaagctcttaagtcccgagctccaattatttagtccaatcctacacattactctcacctatacaactaaatggttaaataattatcattatcgcattctacattcaaaaccgagtccaacgacatataatatgactatatttaaaatttggggtt

SEQ ID NO: 155781 - DNA, 550 bp, Cannabis sativa
attattttaagtttattttttaaaaatattagaacgtacgcataattttttgtggggtaaatagaattgcccttacaaaaaatcatcagtgataattttattttattttttgctaaaaataataaacatatatactaatatcaatatgattgagaaacattgactagaaatcctaagtatttttttattacttatctatatctatatatataatcatttaattaatactaacagtatataatcctcatattatagggtatgctttggcgtgttgtgtgaggtctcttcatgttgagaaacaccaataacaaaatgtattcatacacacatatacacagcaagggaactccaatgaacacacacaaaagtactccacagaactaaaagcacaaccacacaaacttaagttgagaaattgctgtattattgattttgagtaagttttacaagctgcgaattacacttggttctccatataagaaaatagagtctaatagtatttatagcaacctaaacactaaggaggaccaactgtcataactatcgagat

SEQ ID NO: 155782 - DNA, 638 bp, Cannabis sativa
  modified_base (469)..(483): a, c, t, g, unknown or other
  modified_base (576)..(578): a, c, t, g, unknown or other
tccactcggcaaacatacgtctttattcctcgaacgcgagatttaccgcagcgcggagttcttcctgatcatgatgtagggtattggtatgaccctgcacgagtcaaagagtagcacggaagttttgtaactcaatatcatctccaatggtcgtttgggtgttggtagcaggcggaacggttgtgttttgaatgccctagttaggtgctgaactgttattcccagtcccttgcacaccaggcgcgatttcatctataggagtcgttataccatgacccacattcgccgactgttctggattaacagctggcggaacccttgcgtttcctgggttctgaaatttaggatccaccgtctatggatttgttggatcaaccaggcccctgggaatttgtactaccatcgtacttgtggttagattttgaatgaagagcgattctagagttcatctctcaatgaaagcaccaannnnnnnnnnnnnnntttagccaacgacagtgagtcttatttagaagcgacaagtaatttatagcaatcgatataaagtaaaacaatgtaaagacacaagaattttannnaggttcagccccgagcagtttggtaatagcctaatcctcgttatttgtattgacttaaga

SEQ ID NO: 155783 - DNA, 511 bp, Cannabis sativa
aaaataggggggggggggggagagattactaattagcctattatatatattgaataaatattattttgtacattttattttataaaaaaatattaataaaattatctgatttaaaaaataataaactacattataatttttttaaaaataatattaaatagtacattaaataaattttctatcaaaataaaatttaataataactctattttggaattataaaaaactaattacatgttagaatatcttatctttgaaaaaaaaattgttgaaaattaattaagctcaggtcgacttatttatacaattttcaaaattataaaatctattttattatttaacaaaataaaaaatctaatcaataactttaaaaaaatataaggtacaaaataatattaaccctatatataatctatatatatagggaaatttgattttctatacttaaaaaaccctaaaattatttccctaaacctaaatgttataccataggcaatatatgactactttt

SEQ ID NO: 155784 - DNA, 538 bp, Cannabis sativa
aaatacatacgccatacaaaaattttgatcttttgtggcacccgcaaattccacatcccattccaccaatgagcttgatccacagaagagctactgttcattccactgaccatatcaagagcaactgcatagccacttttcaccgtgtaacaaccatttgaagtataatgccaacaccagcgatccgcatatggcccactccgcaacggtataccaagaatgacatcaagatcaagttgcagaaaatattgagacaaagaacgaacatcccaagagccatccacaccaatcaactcactaaccatcacactggcactaggagcaggcgagataggaggaaacgtcctaggccggggaagccaaggatcccgaaacgcatcaacactttgcccgtcccccacaactttcctcatccccgactgcaacaactttaagccccacatcaaactggaccacaaatgagacgaacctggacgatccttagcgtccaaaattgaggtagtgggaaagtatctatactttaacacacgaccagcca

SEQ ID NO: 155785 - DNA, 729 bp, Cannabis sativa
agcatgtatatgtaagttattatgatggagtacattttggtatttaagtaatgtatagagaaataataatacttaattaagttgtgtatattttatgggttgtggattgagcaataagacataggttaaatacatgtttgttgggtccatatgatagatagggaggtaatgtggtaagtggtgaaggacatgcagactcaacaccccgcgtgtcggtaagttaaatttcgaggacaaaatttcttttaaggagggtagaatgtaatatccagattataatagtatttaattttttttcttggcatattaatcatgcgtggataattatctcatttatttgtgttgttagtgagtagagattattgcttagagtagttttaccaattttctaaagagagttaaagttgtatgaactacgaaagtaaaatattatgatattttcataagtaggtaatcgtttaattaaagcccgatatgaaagtccattagggtttttataatatatttattagatttaattaattgtataagtggtattaaataatattattatttaataaatgttaaacaattcgtaagttgagaaattcgcaggttcagaatctgttttactaaaataaccatatctggagttttataactccgattgaggtgattccagtagcgttggaaagataattcaaagatctataaattttgtagaaatatatcataatttgtaatttttct

SEQ ID NO: 155786 - DNA, 530 bp, Cannabis sativa
gatgacgagtctcccaatttggaagttaacgatgaccactgccttcttgctcgagttctcactaggaagccagtctatttgactactctgcaaaaacaaatgaaaacacactgggatggacggtttccttgtaaaattactgaaaaggagactgatctcttcatgctctcattcggctgtgaaggtgatctggagagagtccttactcaagagccttggcactttcagaaccatcacattgtcctcaagaaaccatctgcacttcagaatttaactcctactgatctcaagttttcacccttttgggttcaagtatatcggctaccttttctcagcaaatcaaggggattagcaaaggctttgggtaatattattggggaattcttagaagtttttactgattctctcaatgaaggatgggggccgttcttgcgaattagagtgaatcttgatgttaccaaaccattacgaaggggacggaatattcgtctgcagcaagttcgggacaagttttgggtggattttcgcta

SEQ ID NO: 155787 - DNA, 529 bp, Cannabis sativa
atatttaagatattcaaactctactaagcattcataattaattaacaataaaagttagtaaatgtatacctcgagctagcaagtaaccggtcaacactaaataagtcatatccttacaaattgacctcactacctacaacataaagaaatactacaaaattacaaatttctttatttagctacttactagttatataatttttgagtaactagttaatttgttactaactagttactaatgagtaactagttagtaataaaaatacatgaatatgaatagtaataaactatttactagctaataagaaaataaaaacacatgaataaaattaaaaataataaaaaaagatgataaaaaatagagttaatttctaaacttttgtttctaaactaattttttagaaattaatttctaaactttaattttcatactcttctatctcattttcattcacaatatttaacaaaactattagtttaaaatattcaatatatacatatacaatacataaaatactctcttatatca

SEQ ID NO: 155788 - DNA, 614 bp, Cannabis sativa
  modified_base (286)..(286): a, c, t, g, unknown or other
ccccaaactagcagggaacaaactccctgaaaaccggaaactagcacgaaacgacaagctgggaaaaactgagtttcaccccttctacaaaatctgggtaaccgattttacaggcagtgtaaaaccggttttacccagaaaactcacaaagttcaaacccctaaccaaacttttttaaactcaaccaaactttctagacctgctaattagaccccaatgaacatttctaaagcaacaaaacaaccctacacgctcagaattaaaatccaccattaaagctccaagntttgagttcaaaactcaaacttgggtaaatctaataaacatgcatcacaacttgcttaaatatactcaaacatgcataatataacctctgaaagcaacagcaatcaactacaaaaagcatagcaatagatttcaacagttcaccattaaaatcaagatttagctcaaaacttcatacttgtttaaaatcaactaaacaccaacaaaaaaacttgcttgaatccacatattaaaacctaattaagcttcagaaaatacaatcaaaacgtagcatcaactacagccacaaattctcaagcatgcaatattcaacttttccttaaaatcca

SEQ ID NO: 155789 - DNA, 640 bp, Cannabis sativa
aagcttgttatgagaaaaattgagccctttgagtgagttgagcttaccaatcatctttggaatctctcctgttaagttgtttcttgagaagtcaatggttataatcatagattggattttgggtaactcaacataattttcttttattgtcaatgaactgatatcataatagataattaaattgtcaaatgcctccatgtagttcaacctatcaaaattagcatccatcattcccacaaaattattaaaataatttcgtggcaaatggccagtaaattcattgccactaagatccatgattttcaaatttcgaaagggatgtctcaccttgggattgcctattggaccttgaaatctattagatctcaagataagaacttgaagatttggaagagattccaaccacctgggaaatcatccatttatgttgttatttccaatatctaaaactttcaactccttacagttgacaaatgattttggcaatgacccttccagttgattttcattaacattcaatactcttagtctgtttctgtaacaccctaacaattaggcatgttacccaaggtgattaagaaaccctaatcccctaaacgggattactagaaagataaacacaggtaatttaaactttaat

SEQ ID NO: 155790 - DNA, 822 bp, Cannabis sativa
  modified_base (168)..(180): a, c, t, g, unknown or other
aattttcaaaataattggttagttaaataataatttaattatataagtgtaaatatcttacttcacaatttgttacatatacattgtttgttatgtttaaattgtttattcaaaaaccttttttaacaaatttattatttatttaatctaaattgttatgattaactnnnnnnnnnnnnnaatgatatgattttaatcatagtcgaattgtcaatagatcttataaataatttataacaggtaaattttgtatttctttcatctttgtaaacctagaaacatgatagggtgcatccaaatcaatttgacctgtgtgagcctatatgtttactttgggcttagatgcatataggaagcccatttatttctaaatatttaaatggactaggttgctaaattaaaatatcaccttaaattttctcagtacactttatggtcaaagagtagttcttaaatttgctcaatacactggtgctcatgccattgctggaatacgagcagaccaagtcactcacttatgtacccaaatgtgttcttacccatataagcgttgaccactttaaagacagtttaaatcacatatgtgtgattttctaatattatatacacgtaattaaatggagcgtaattaaagcccacaatttcggggaatattgttatacctatattactataaatagggacagattataccgaaaaaaggatgaaaaatctttgagagaaaaaggagtttactaattgtaaaaccctaattttgtatccagaaatatctaaataagatagactcgtggactatgcagagttaactgcaaaaccacgtaa

SEQ ID NO: 155791 - DNA, 539 bp, Cannabis sativa
aaaaaaaaaaaaaaaaattccatcccacttacaccatatttttcatttagtacacaacaacctatgtttatgatgcaaaataggtaaagataatttatttaagttcatggatcataatcaaggataaatatgcattttattttaataaagaataaaaattagaaaaattaagctcaaaataggacaacaaaggataatatattgaggttagctttttgactcaaacaatttaaaaaaattgccttaatcatttttacacaacaaacatttaggatttcgcctcaataaataatcacacaagttatagttatcttaatatcaaccaaatctacatatacacacaaaatcacatattatatagaataagtagaacaacaaaaaattcatatacactatcaaaagtaagcataacaggttaagtacacaatccatcaattttttacacacactaaatagtagtatcaaaagagtttagcattagtttatcatcgaattcataggtcataagtcaacgttaatacaatcatccaataataaat

SEQ ID NO: 155792 - DNA, 503 bp, Cannabis sativa
  modified_base (304)..(304): a, c, t, g, unknown or other
tgggtcaagatccgaatcccaatcacgagtcccagtctagttccatttctgatgccaggtcacgagctgggtcctatgttcaagtgcgggtcttggtcggatactatgttcaggttcgggttcgggttcgggtcccgagtctaggcttgggttgggatctgggtccggctccctattcgggttaagttctaatttggagtccaggtcctggtccggttactgttctggatctaggtccaatttcagttataattccaagtcaaagcactagttccagtcccagtcaacttccggttttggttcnaattttgggtcacagggtacaggttcaggtccaatttgggtttgggactgggttcagttcctggtgtgagttcgggtttcgtcagggtttgggtccagggctgggtcccaaatctagacaccgactccgggttttgtcgaagtcctgggtccaaatccgtatcccaatctcgggtcccagtctggttccatttccggtg

SEQ ID NO: 155793 - DNA, 775 bp, Cannabis sativa
ctagggaactaagccgcgcttcgcacggtgttgttcatcttttatattttttttattatatagatatattgtgcttgatgagatataatttaaaatatagtattttgatatgtgtaagtaacagtattgaaattagaaatataatatttttaaaatatatagaaagataacactttgtgataaatattaaaaatagtaaaattaacaaagaaattgcatgtgttattataaaagaataaataaaaaagaaaactatttttaaatttaatatattggatttgtgagtgatgatgtagtctttttgaaaaactatttagacctatttttttgtttaatagaaagaaacaatataactactatttatgaaagtttttatattttgtttcataagatggcaactgtaaaaaggttttaaaaaaaatgaggaatttacataaaaatattaatgataaaattggtctatatgaaatatttaataagagaattaattttaataaattatgtggaggtgaaatatatgccttaaattataatgatgaaaaaggaggtcacgattgatatgacgaattgcttctatataaaaatgtatatttgtcttgctgttttttaataattaaaataataaataccgtatgaatttggttgtgtaatcgcgtgatcattataattatatagtgcattgtacaatcattataatccatgaaaatcaaatttaatttatgattattttttgtaattttttttattttataaattcatatattaagtatttttt

SEQ ID NO: 155794 - DNA, 1334 bp, Cannabis sativa
cctttctctcccaagatcaatctcctggtgctgcctcacaagtttaaaatgccaacctggaaaatgtacactggaagagaagatcctctttcccacatcaagtatttagagatgcagatggatctgtaagaggtacgaggggatgtgtgttgcagaatttttcctgccacccaatcggaagccgcccagcaatggtatttcaagctgacccctggaaagttcaactcatggaaggccttctcctcgaaattccatgcacaattcttctcttcttgccaaattccgttgcatctaggagacctggtagtagtcaagcaaagaccaggcgagcctctccgagcatacatcagcagattcatgatggaggtgaccaagtttcacgggtaactgaagatggaaagttgtacgcgatactgggggcattgaagtcctcggtgaactttggaaggatataaggaagaacgacccagtagactcaatgagtaattttctcgaccgtgctgaaggcttcatcaaacttgtagaggctattcagggagtagaaggtgagcaaaagccgggcaagtcaaaagttccttccactggaacgtccgcccaattcccccattatccaaataattcaagcttaaatggcaaacgttctaacaacaacaatagacaatggaatgggaagaaaggaaaattcactggcaaaaccgaacaagctccccgagagaatcaaaccagtacactgcatttaccatcttgactgaggatatagaaagtgtttacatggccactcattcgctagccccgtctaagaagctcgcgcccatgaagaaagatgttagtaagagagacatgaccaagttttgtcgattccacggagactacagccacgacaccaatgaatgcaacaatctgaagagagaaattgaattcctgataaggaaaaataacccgcatttacaaaagtatgtcaaagccgatcagaatcagaggaatgacaatagccaagaattgctacctccaccggtagatggacatctgtaagtcatcattggaggccaacatatagctggagatttaggcaaagcttaggagaggtatgcctgaacagcacagcacgagcaagaagaagtgatcttggccgtagaagaaaggaagcctaaaatcccacgggcaggagggcctaccataaccttcaacgatgaagatgttgtcaaaatcaagtttccgcacaaggactcgttggtcttagaggtccagatagctaacaagatggtggccaaaaccatgattgataatggagcctcttccaatatcttgttcaagactgcctatgaaaagatggg

SEQ ID NO: 155795 - DNA, 511 bp, Cannabis sativa
tcatgttgcctttgtttaaattcaaagtttgctaaccttgattatatgggcattgctatatgttcgaatttcggatatggtgaatgtgattttatcttaaaattaattggtaattggaggagtagtccattcctcttatatactctattatctttccacacattagcaatgtgggactctctaatatcctccctcaagatggtggctattttatatgctcactatcttagacaactcgatcataagtaactcttttttagttcactatccctaatcacaagtggctcttttgctctactttttggatcggtatttttgaatttttagtggctctcttattttttattggctctacttcgatcgagtttttttctaggttggatagttgctagagattttttttatttggttatttttgctctgataccatgttagaatttggggaataaggtgaatgggattctatcttaaaaccaattggcaatgggaggagtagcacattcatcttata

SEQ ID NO: 155796 - DNA, 640 bp, Cannabis sativa
ttttattaattaaaaataaaaaaggcaaatatgcccttcaaaaatatataaataaaaaataattacatgttctaacaatggcaatttagtcaaattaagtcattctagttacctttcctgattatatgtaaataaaataaaatgattctgatttcctttccggtgaatatagtaaacaacaaaataaaatattgtgtctgattattttatattttaacccgattcatttcttccattgattattctgattccaattacgatttaataaatgtgccatcaatttaatgttctgttagttgatcaataagtgccacatgtaaatatagtattagccaaattaataattcttttagaaaagataattttaaaaaacaaaaattaattaaaataaattcatactattaaaaaaaatattatatacacattaaatgaaataaaaattaatttttccattttcttcccgtcatattatctttacacattttgaacaataattttttttttggtaagaagatttacaataaactttaattctcgattcaaatgctatttttcaattctatttcatatattcaaaattcttccataaactttctactaatatttttcaatcaatgaaacgaaaaggcaaactttaatt

SEQ ID NO: 155797 - DNA, 609 bp, Cannabis sativa
ccgcttttcattttgttggtcttaaggggactcccaagtacttgagagggaagtctccttcttgaagggacaactctttcaccattttttgcttaacaccctccttcacacccccaaagtagagatgggacttattgatgttgatagcaagtcctgaagtggcactgaattcatctagaatctgcttaataacctgaaccgagccaaggtctcctttgcaaaatatcatcgtcattcgcaaaactcaggttaattatttttagattcttacaaagaggatgatacctgaatttggattgattagcagctagaagaagcctcctagtcaaatactccattattaggacaaataagagcggagataaaggatcaccttgtctcagccccttcttgccttggaaactctcttgaactctcccattcatcaagattgagtaagatgtcgattttaagcaagtcatgatccaagttatgaatctgcctggcatgttaaaatcctttagaagcttctccaaaaactcccaattgactgtgtcatatgctttacttatgtccaccttgatagtgcatctaggtgaaatgttcttccttttgtagttctttaggagg

SEQ ID NO: 155798 - DNA, 562 bp, Cannabis sativa
  modified_base (27)..(41): a, c, t, g, unknown or other
taggatgttaatcaaacatacttggtnnnnnnnnnnnnnnntggtaaaatatttccaacagtatggtccttcccaattgtctccgaaaatcccatgcgctgggtttttcatgtttggcatgacttttcgaagaaccaaatcccctactcgcagaattctctccttgaccttatagttgaaatatcgcgcagtttgctgctgataagtcgcatttttcaagtgagcctgggtcgcgcttttcttctaaaaggtcaagatggaggaattgcttttcttcgttctggacaatgttgaaaacatctcttcgtagggaacctgccccaacctcgactgataccatagcttcgcatccataggagagcgagaaaggagtttcaccagtcgtggattgggggttgtgttatatgaccataaaacttgcgaaagttcttatggccatacccccttactgctgtgttgtagcattctcgcgagtccaactggactcctcgcacagatcctactccagagggagtagggaacttcatggtgagataatagatggacgtcacgatcttcatct

SEQ ID NO: 155799 - DNA, 507 bp, Cannabis sativa
atttcatgattatgtttaatatataaattctattaagtccagagcatatataaatatatatattttttcatgattatagtatcgtcaacacattggaatataatgaaaaaccgagtctttgcaaatatcaataaatattacagaaatataaaattgtaaacgtctccagcaggagaatataattctgttactgtagaaaacagttttgcagacacaaatcagaactggcagaatataaaaataattgcagaaaattaaatcacttgacacaagagatttgtatgtggtatcagtgttctttcgaacactcctagtccatgaggccatgcccaaagaaagaaatcaattaataaattatcaacaattacaaagacaattgacttaaacaagtttagactccctctaaattattgtcacaatcttttatgaaaaaccgtgtttttgcaaatgtcagttgtttataagaaaatataaaaactgtaagtgtttgcagcagcagaaagtaat

SEQ ID NO: 155800 - DNA, 1154 bp, Cannabis sativa
gtgtagtaatgtcttaaatattctgtctaaaaaagaaacacacagtatttcataatttgtgcatatagatatacatatatataaatatatttttctatcaaaatgaaatatatatttaatgaaacgtattgtaaaatatacctaggttgatgttgcgtgcaatgcatctatagttaattttttttagttacgttcaattaggtgatgttaagtgcaatacatgtatgtttatttttttttttaattaggtaatgtatttttttaaaaaaattttaaatgtggtttgagattttgatgtataagaaaaaaaaattagcttttgctacattggagtgtcatttggatatgattatatacacatatattttttttttaattttaaaaattttcttaattaggtaacgtattcgataatgcatatattgtaatttactatattcttaaccgaaactcatataatcaaatttgagtgtgcttatatatagattggattcgtaaatttgatataaaagttttttattcctaaactttacgaaaaatatagtgtgtgaatcgatttaccataactaaaatggaaagcaatcaattccttagtacaaccattttaatttaaaatataaaataaataataataaagttaaaaatatggttaaatatttatgatattttaaattttaatttttttatataaaatatttgaataatttttttttattttaattgaaagttaaaccaataaattaaaaaatatgattaaaaatatcaataacattttaagtattttaaaattaaattaaaatttcgttatatacaatatctatataatttttatttttaaatatatataataatattgtaaaattaataaagaatattctgttaattaataggatattctgttaaagttaacgtggaaatccaaaaagtaaaatatactgtgtgaatcagtttaccattactaaaacggaaaacaatcaattccttagtacaacaatttcaatttaaaatataaaataaataataataaaattaaaaatatggttaaaaatatttataatattttaaattttaaattgttttgatataagctatttacataattttttttattttaaaccaataaatttaaaaatatgattaaaaatatctataat

SEQ ID NO: 155801 - DNA, 505 bp, Cannabis sativa
cccactagattaaataatatctcatttgtagcaaataattttgtaacataacattttatttaatcaatcaaacattatattatggagtaatataaacttctcccacttgattaaataactccactctaatagaaatcattgcatttgtgcatagtgtaaaatgtcttttgactggaagtttatctaagtgtaattaccacaaagtttatcaaaattttggttgtcgtagcattgaaccactatttcttgataacaaaccggtgataacacacacacacacacatttgctatgttcactcaagaaccttatggattgcttttgcaccgttaatggtcatgtgcacaaattcaatttatggactttctagagaataactcttcacaactctttagacacttctcaagcttaagtgagttttcttaagcttaagatccattaaaaaacctttcgattttaaccctcaattttcacaacatgtactcatccatagatgggacaattgag

SEQ ID NO: 155802 - DNA, 513 bp, Cannabis sativa
tctccctctctttttttcatttcaactttcattttttttccactttccttttcctctttatttttcctctctcgtttcgtctctgttttgcttctttctttcttttttttttgctgtcgatttttggagggcattgttcttcgggttggagcttagggttaaagcatccattgttcgtgtgttcttcaaggtaagcatgtgttttttacttttttttttctttgattttagggtttttttaactgtttatttttgtgggtttgtcgaagttgcattggttcttaatccttcttacattcttagatttttcgttttttatttttttattttgaattttttacttcaatgatgcttaatccgaagagagagagagtgtgttgttcttgtttttttaaaaaaattaatctgaagttattgttgtattgttttatttattcatgctggattagttgagtattttgtgttttgggttttgttttgtggtttacaatgttgttgtttagtttttttttt

SEQ ID NO: 155803 - DNA, 545 bp, Cannabis sativa
taataataataataagtaatattttgaaatgtgagtcacgttatatacattaaattattattttgagagagtaattattataattagtgtaataaaataagtttaggagcctaaattaataatttttttttttaacaatatataataaaagttaaaaaataaataaaatcacaaaattacaaaattaaaattctaaaaaagtagagcacaatgtctatcattagactaatatcacatgtttgtgactcgttaaaaacttctaatattatttattaaagggtaaatactcatttggtacctaggtttagttaaaataatacacactttggtacattctattttagaccatctccaatggaagatgtaaaaattgtgttatatttagtacaaaaagtaattttgtgtggtgaatttatactaaattttaattttatgctccaatgtacaattacaaatttttgatgtaaaatttaaaatctaattaatgttttattaaaaaaaataaaatttaataactttagtttataattaattttattattatt

SEQ ID NO: 155804 - DNA, 643 bp, Cannabis sativa
gagtaacacgtaggtttacgtcacgtaaacataaacaggcatgtgagcccaacatgtaggtctgtgacacacaaacagatttaaatggcattaatatttatattatatgatgagtatatattattgttatgttttatactgtcttgttgggcttggctcacgggtgctctaatgtccaggaaagggtaaagctgtgtttgatcagccatgagtgtaggagctggacgaggaatgtacatgttcgggctacactagaccaagcgggttggggtctaccagtgatgtattttgggactctgttttgccgcttaggtcggctagaggaaacgaacttgtaatagtgttttgtaattatttttgggatcccaacttttgtaacttttagatcgtcaagtttaaattattaaaagttttatttttacttcgtttatgattaaagtttaaatttcgcgctaatttcattagtaatttcgtttagggaattagggtttcataagtatcttgggtagcgtgcctaattatttaagacattaaaattgggtatcagagcgccaaggttttaaacttcctgtagaccggccgaacatgtacattcattgtcagagacaagctcgactcatggtgcagcaagtattgagagtaa

SEQ ID NO: 155805 - DNA, 1104 bp, Cannabis sativa
tttgtaaaagttaacccaaattacagtatttttgtaagttttccaaattaaataggctccctatatgcatttaggctcaaagcaaacatataggcatatgcatataatgatttcgatcgatcctatcatgttactaggtttacgcatagatgaaagaagattacaaaatttacatattacaaattatttatttgacctattgacaattggactatggttaaaatcaaatcattggatctgtcaatatgttaaccatagaaatttagatcaaacaataataggttttacaaaacaataaataaaacatacaagtaacaacattggacagttggttataggatttatttaatttaaattaaataattaattaattaaattttgaaattcttaaataattaaatatttaatttctaaaataaataaattaaattaaataattaatttaaaaataaacctataaatttgaaaatttatgttatttttaaaaggtttataattaattaaataaacctataaatttaaaaatttaaaaataattaattaaataggtttataacaaacctaaacatctcttcaaaaattattaactaacatttcaaaatttatgttatttttaaaagaaagtaaaattaaatatctaataaaataaaatcataaataaaaatcatttatccaactttataatttaaatataaataaaataacataattttgaaagttgacgaaatatctagttattttttagaattatctagattattttattacaatatatcatatttttaaattttaaattgattatttaaataatgaaaatattaaatatctgatctaaaatttaaaaataagataaaataatcaattttcttttacaaaaaaataaccaataaagcaaaaaaatatagatattatcttttttaagttcaaaatctactaatatctaaaattaattaataaaaaataattaatttcaaactgataattaaaatttgttttttttttaaaaaaaaatatacatagaaatttacacaaaaaattggaaactaattccatgaaaaagtatgaaaaattgaagaaaaaaggaaaaattcgaaactgtacgga

SEQ ID NO: 155806 - DNA, 516 bp, Cannabis sativa
taattcttttcgagtggtccccccgatatggggcccaccagagatcatagccattcttccgttaggtcttggtggcaggccaggggtctattgagggattgatgctcctgagggtgcagctggtgccaacgctccgggcgtacgccctggtgtccctttgggcaatggaccccttgccggaaccgggttgagatggggtagccggttcttaatccactcatacagatgacccaatgtgatcaagttttcaatctcatctttcagatttttgcactcattggtactgtgtccaatgacgttgtggtatttgcatcttttgcagggatcccttcgcaaactatctctatacagaggaggcggcctcttgtaatgcgtattttgcctcgtggcacaatacacacgctcttgtatgttcatcaactctgtgtacagggtatattggggagtataccctcttttttggcgcttgtcctcagtccggttgctgcctttcgaggacctcttgctccgagagcc

SEQ ID NO: 155807 - DNA, 589 bp, Cannabis sativa
  modified_base (318)..(320): a, c, t, g, unknown or other
atgaacgtaattatagcataatatatatgtaaatgaacgtaattatagcataatatatatgtaaattataaacaaaattatatgtatatattgttaaatacgcatataagtataaatatatgtatagaatatgtaacacacaaatttaagtagttcgacagaatatcatttacttacgtctacggtagcatttaagctatgattaggttttattaataaaatggagatttacagattaatggtctcagctgtgtataaatgggtatttttagtgagatagaagcaatatcaacgcaaactatttttgtgtagagagannnagataaataagaaaggaaaagaaataggtaaacaaatagcgtgcatataaacacgctcttcttttggagtttatcttttctgaaaggcttgaggtgaaagattcaagggagtttgtatgcaagcatactgttatgcttcgacgcttacaagcagtctatgtagaggaagagtaagcaaggaaaaatttctttgaagattgataagacaagcttgatgggactggacgccttcttttcctctttacttctctttgtctgtccttctagct

SEQ ID NO: 155808 - DNA, 541 bp, Cannabis sativa
tccaataccagctacaatctgtgaaagtatcatactcccactagttttaattcgcaaataaatactatttttccattttataaacatgttgtcattcttctttgtaattgctcaaacatattttcctatagcagttaagttttaatcttgtattttcttaaaacccaatccacttgctgttttaggtaaacaaatattattcaaggctactaggccaggggatgagttgtccgagaccctctttcacaaaaaaattctacagattaattgcttcaacatctctaagcaacttcttgggtaaaatcataatttgaacacaatatgaatgtatagaaattaacactgaattgaatctgaaatgtctgagctcgagttcgaactgagaacatctagtgcgcatttatccattttacaaaaaaaaatatatattatatttaataatatttaagtacatatatataatttatcaaaaaaaaaaatacatatatctattctatataaagtgtgtttatataattgaaattcttggtttatgagaaat

SEQ ID NO: 155809 - DNA, 552 bp, Cannabis sativa
tgcatgacattatactaatcttacgtcaatcccaaattcaggtgtgccggtcaaccagagtggaacaactgctcggcgaattataggctcgtaaatcaaatccatagcaacatggataagtgacacgctaaatcacaaccgggacttagcttttaacccaaaaacctatctactgcaattttgatatggcaataacctaaactagcaggaaattaaccaaccagaaacctgaaagtagaatgaatggaaaagctaaatttgttgggaattccaactgcaaaaaccggttacccagttttacaggtacctataaaaccggctagccaattttacccagaaaacccaaaaaattacaaagcctaaccaaatcgattccaaacttaaccaaactttccagacctacatattatacctgaataaatattttcaaagcaataaaaaactacccaagctcataattgaaaaatgccattaaagagccaagcttgagttataaaactcaaagcttgctcaaacaacaaatcaaccatcaaaacaagcttatttcaacat

SEQ ID NO: 155810 - DNA, 501 bp, Cannabis sativa
cttttgtctataatggtggattctttttctaggggtttttcttgcaatttctggttattttatgtttatggatgttgaattatgtatttaaaagagctcggtgcgatttgaggaagtattgagcatgtagtgaatttttttgggtttactacagagaaatggttaactagtttcccaggcagccctagaaaacagtttactattttagtaatctgatttcccagttctagtaattttggaaccctagtttttcatgttttatcgatatttaggttattaccacgctatctatcgatagtgaaactcctagttttaaatatatgtccctgcaacgtgatttagtgtaccacttatcagttttacgtatattgtgactcaggggactataaatcattgaacaatagtttttactccggttgaccgatacacctgaatttggaagcaaggtaagactaggataatcatatcatatgtgattacatgtttagcatgcatgtttat

SEQ ID NO: 155811 - DNA, 604 bp, Cannabis sativa
catttgaatgataggaacaaagtccttcatggtggcaaacagagagatccatttacaattgcatcattcacattgagctacatagaaaagtacagaggtgcaaagggtgctctgcaataaattgcagcaaccagtcgctcaccaagctagctttcaacagaccgaattcacaaatgaacagctacaccggcaacacaacacttctgttgacactacagcactgccacctccaacagcaccacaccatcttacccgatccacttgtcacactggtttggttcgatcttcttcagccttgcaccagcaacctgctgctacaacaaggaaccaacagaataacttggctgcagatgcaagtaatacatttccacgaagcttagacaatatcacatggactcctcctgctgtgcatatgcttaaaatgaatgttgatgctgcagcaaatttcaacaaacaaacactcggcattggtgctgtgattcgcaactgtagaggagatgttcttgctgctctctccaaacgtgtacaaggctgttttcgtagtgatgaaatggaagctaaggcgctttttcatagtcttaattgggcttcacaatgttcgttt

SEQ ID NO: 155812 - DNA, 564 bp, Cannabis sativa
gtaaaaagtgagctgactttgtaaacctgtccactctggtatgttcaatggctacagcaaccctgtaggcctccaatgttcagtcttaacctgttgacaggtaagacatttagcaacatactcagcaatatcattcttcatgcctggccaccagaacatggcttttaggtcttgatacatcttcgttgaccttggatgaattgagtaaggagtcgtatgagacttatccatgatctctcttttgatactctcatccatatgcacacaaacacgattttcgaatcgcaatattcgcgtttcatctactgagaaatcactaaccttctcagccgaaaccctagctcgttttttttaccagttccagatcttgcatttgtacttctttaattaactctaaaagagtggattgcagagtaatattagccaattggcccataaccaactcaatcttagatcaagtcaactcatttgctagctgttgggagatttgcttcacagtgctcaactgactttgaccttttctacttaaggcgtcaacaactacattggccttaccaggatgat

SEQ ID NO: 155813 - DNA, 1260 bp, Cannabis sativa
ttcccgatgaacaactctttagttggagagaaagtttgatggtaccctggtttgttgattatgtcaacttcttggctgccaacgtcactcctccagagatgtctcatcaacaactgaaaaagttcttttcagaggtaagacattactattgggaagagctgattctctacaagcactgcgctgatcagataataagaagatgtgtgcctgaagaagagatgtattctatcttgaaccactgccatgctttacaatgtggggggcatttcagtgggacaagaactggtgcaaaggttctttaaagtggattcttttggcctactcttttcaaagatgctaatgaatttgtgaaggcatgtgatcgttgtcagagaacggggaacatttctagaagaaacgaaatgcctttgacaagtatcttggaggtggagttgtttgatgtctggggaatagatttcatgggtccttttccatcttcattcagcaatttatacattttattggttgtggattatgtatcgaaataggttaaagatgctgcaactccagccaatgatggtaaaacagttttttctttccttcaaaagtacatattcactcagtttggaactccccgagctatcattagcgatgaagggagtcattttttcaattaactatttgaagctctgctatccagatatggcgtacgccataagattgctctaccctaccatccacagagcaatggccaagctgaaatttccaactgggagattaagatgatattggagaaaatagtgcaaagatcgaggaaagattggtcacgaaagttagatgatgcactaagagcttacagaatagcgtttaaaacacctattaggatgttaccgtataggttggtgtacggaaaagcctgtcatctgtcagttgaattagagcataaggcctattgggctatgaagaccctaaacatggatttagcagcggcaagagagaaaagactgctgccattgaatgagctggaagaatttagaaatgaggcctatgaaaatgcgaagatctacaaggaaagaacaaataactggtagaacgaaacttagtcaggaaggagtttcaaactgggcagcaagtcctactttttaattccaggttgaaactatttcctggtaagttgaagtctagatggtctaaaccgttcacggtagtcaaagcattcccatatggagctgtggaactaaaaggcgaaagcccaaagacttttaaggttaatgggcagcg

SEQ ID NO: 155814 - DNA, 594 bp, Cannabis sativa
ccacccacgccgaaaaccaacccccgcccatccatacccatctcgaccgaacccacgcaccccggccgacgaccaccggagaagaagaaggtctgatgccgtgctcaaagactaatttttttttggtttttaaggtcaggtctgatgggcccattggaccccatcggacgagcatcgggcccatcggatccgaccttaaaaccccaaaaaatgtgtatcgggccccatcggacggacatcgggtccatcggacccgacctcaaaaacccaaaaaatgcctcatcggactgacattggacgggcatcgggccccatcggacccgaccccttaaaagtccagaaaaattgaaaaaaaaatgtcagagagagtttcctgcgatggtgggggcggtcgggtgtgggcggccggcgtggacgatgtgcgtggtgacggccggtgggtggtggtgacggctggtgggtttcctgcgatggagttttgggcgaagatgagacagagagagtttgaggaaaggagagagaaagggtttaagtttttgagaggggtatttttggggttttggaaaagttgtcatatattttcaatgtagaaaa

SEQ ID NO: 155815 - DNA, 741 bp, Cannabis sativa
gttatgacactaataagtgtaatcaggtgtgagatgagatagagtttctcatcagatagaaatatgctgctcttcagcaatatgtacgacatgaagctccaattgggagtaatgcacctctcatgcatgcgccggttgcaggcaggctaaagatcgtgattggaggccctcacatagctataaattctaggaaggcctgggatattacaactatcgcctccttatagaaatttcatcctcaaaattgacctgaatagcccgacatactgctcccgcatctttgactctaactcttaagtcacctcttcaactttgttgttcctccatatcactttaactagcgaaatagtcttgttcagtaagacctttttcttcctgtccaggatctgaactggttgttcattgtatgacaggtccgtttgaagctcgatatcttcatagcctaaaacatgagtcgtatcagacacatacttttgaagcatcgagatgtgaaacatgttgtgaactctagataaagtagggggtagggctagcctataggctacctgacctaccctttcaataatctcaaataggacaataaattttgggcttaactttcctttctttctgaacctccgaattcctttcattggggatacctaaaggaaaacaaaatttccaacctggaattcaatatctctacgctttggatcagcgtagctcttctgtctaccctgtgaggcaagcatacaagctcga

SEQ ID NO: 155816 - DNA, 547 bp, Cannabis sativa
ttttaaaataataattttatttaattttttaaaattggcaaatattttacttagtaatagggttatattaatactattcataatttttaaattgataataaaaggttgtaggtggtaaaataaaatagtataagacgttaagatagtataaataaaacttttatcttgatttgatctctttggttataaaccaaaaatagaatagaaaaattctgtttgtattatcacctagtgataattttttttttgcacaaatttttcatacatttaatttatttattggcacattttttaaatataatggtaattttttttttcttttttatttattttgaattgacacaatgtaactagtagatattgacatattaaagtgtattgttgtgtagttggttttggttgttttaattatgtattacccatctatctatgtatatctataaatgagaagtatgaatcagtgatgtggcactctaaaatctttccaaacctatttttctcttttctccttaattctctcatttttaatattttattaaagtataaa

SEQ ID NO: 155817 - DNA, 775 bp, Cannabis sativa
tacaaaatacagtgaatctatacccataccaaccaagacccttgattggagacacaagatccccttgtgtgaatgatgagctctcttcaacagttttattcaatctgaactcccttcagatctggtgatgaagatgatactaaaaattccttcagtgtgaactcaacatcttcaagctctgatctgcaactttgaattaatacctccaagttcaaagatcacctgccatggaacatatagacgaaacaagaaagaaacgtaattcctaatcaccaataaaaaggttcatcaacataataccaagaagttgtatttatacccagctaaactaagaataccgaaatagacagatgttaccatttgaacaattaaaacctaaaatatctttgctgacgtggactaacactaacattacaaacttcagacaaaacactatgaatctcagacgcaactggatataacttgtcactacagaaaatactggttcttacaagttggaatattgagtcggttttctttgtgttagttaagctctacgattattcatttgttattagtttacttattcggttagttagtcaactcccctttgacctacatatacttgatactacattgtcattcattcatctagttcaataattatataactttcttcatttcctaattcttttcattccgcaatattgtatatgttgaattttataccctaaataaaactcatttcaatataatcttattttttattaataaaagattagaagtcatttatgtt

SEQ ID NO: 155818 - DNA, 651 bp, Cannabis sativa
gaaggcatccatgttctctcaagccggccgtgaaatcctaattaaagcggtggttcaagcaattccaagctatgcaatgaattgtttttcgtcttcccaaaaactcattaagaaccttcatagcttggctgccaacttctggtggggggatacgaaagacaataaaaagcttcattggtgcacttgggacaaactttgcaaacccaaagaggaaggaggccttggatttcggagtctcaatgaattcaatcaagctcttttggcaaaacaagggtggagactaatccataatccccaatctttgctagctcgggtgttgaaaaatagctactaccccaatgtttatttcatggaagctggctgcccctcgggagcttcttgtgtttggaaagggatatgctggggtaggaaaattctgcaagaaggggctcgttggagaataggaaatggtagagaggctcgggtctgggaagataaatggatacctcggccttctggaactatgcttctcaaaaaacctgaggtagaaccacaaactaagcttcatcattttattaatacggatggacagtggcaacttgataaagtgaagaagcactttcatgaggaggacatcccttgggtccaaggaatccctatagacttgtatgt

SEQ ID NO: 155819 - DNA, 727 bp, Cannabis sativa
aaggtgagcaaaagcctgacaagtcaaaggctcattccactggaacgtccgcccaactccctcattacccaaataattcaagctcaaatggtaagaattccaacaataacaacaacagacaagggaatgggaagaaggaaaagttcaccaacaaaatcgagcaagctccccgagagaatcaagcaaagtacactgcatttactatcttgagtgaagacgtagaaagtgtttacatggcccctcagtcactagctccgtacaaaaagcccgcgcccatgaagaaagatgtcagcaacagagacatgacaaagttttgtcgtttccacggagactacggccacgacactcacgaatgtaataacctgaagcaggaaattgaaaaactgataaggaaaaacaacccacacttacaaaagtatgtcaagaccgatcagactcagaggaacgacaataaccaagacttgctagctccaccagtagacggacgtctacaagtcattatttggggcccgcacatagttggagatttgggcgaagctcaggagaagtatgcccgaacggcgcagcacgagaaagaagaagttatcatggccgtagaagaaaggaagcctgaaatccacgaggaggaggggcctaccataaccttcagcgacgaagatgctgtcaaaatcagatttccacacaacgacccgttggtcgtagaggtccagatagctaataagatggt

SEQ ID NO: 155820 - DNA, 934 bp, Cannabis sativa
ttgacttttgcaacattgataaaataaaatacaaagaaagtaggttattatcgatatttggggccgaacctctttaaattctaatgtctttttttatatttattgcatattctagtatcattaattacatttattgttacgttttgatttaaatttcatttattatgactccacgttgattagctaaaaattcagttaacattttgtaagttaaaaataaaaaataaacttataatccgtaaaaataaacaatgtgaatcaataattctttagcttcataaaattttacaattttagcatataactctattctcctcatcttttacaaagttgttttttttttagaaattttaaattcttattatctatttttcgaagtagatgtctaattttttcttatattaaatttaacatatttttttcgaagtgctacagagtgtttggtttgatggaaagtatgggtaagataatcatttttaagtaattgtaatgaggattcataagatatagtagtgtaataactttttatacaagtaatgtaatagtgattacaatggaatgtcattacaagagtttaaaagcaaactaaacattagaattgtaatcataattccattacaatattgattacaacaaaccaaacatgtaaaagttaacttccatatttaaaaattatatgacaaaatatttttttttcaaaaaaaattgataaaaatattagttatagttacaatatcattcatataaaattttaaaaaaattcaaataacttacaatgctaaaaataaatttaatatttttttaaacacgcgtaataaattaaaatatcaagaactttatttcaatacgttaaattattcagaaaaaaatcaaaattttataaaaatattattgtatctataacaaatttaaaacattataatataaaattgta

SEQ ID NO: 155821 - DNA, 808 bp, Cannabis sativa
cctaggtccctggtctaggtcccctatccaagtctggttcttaggtcctggtctaggtccaagttcgggtttgggtcctgagtcttggttttagtccaggtttcagtcccagtcttagtccgggttcaggttcaggtccttctcagggtctggatcctggtctgggttgcgggtctcaggtcctgatgaggatttaggaccaggtcaggtctaggtcccagtctgggtcccagtccaggttcgggtcccaggtctcgggtcccagtcctagtcaaggtctcagtcgaagtttgggttattgtttgggttcgattcttgtcttagctttgggtcttagtcacagttctagttctaattccgtgtttgggttcggttccaggttcgggtctgggtccaggttgggtcagggtccgagtcttagttcgagtctgagtacaggtttttctgatctcggtttgggtctaggtctaagttcgtgtccaggtttgggtcctatatctgggtcccaggtttgggtctgggtctacgtctgggtccaggtcccgtgttacgatgccagtctgggtatgggtcggtatttgagtccgggtctggttcgtgtccatgtcctggtctgaatcccagtttatgtcaggggcttggtctgggtctgggatcgagtcttgagttcgggttcgggttcacgttcgagtctcaatccaagtctaggtctgggactaggtttgagcctgagtttcgaggctgggttctggtttagtttcgggtcccggtctaagtccaggtcctggtcacggtcccggtcctgttc

SEQ ID NO: 155822 - DNA, 544 bp, Cannabis sativa
  modified_base (200)..(201): a, c, t, g, unknown or other
tttccccataaagataatgccgccaaatcttcaaagcgaatactactgcggccaattctaggtcatgagtcgggtattgctgctcataatctttttgaacggaaggcataagtgataacctgtctggatgcatcacaataaaccacgaacttttctttgtcagatggcaaagctagtactggagctgtaatcaacctctnnttcagctcctgaaaactagcctcacatttgtctgaccatacaaaacgctgattcgttttggtgagctcgattaagggtgttgaaattatagagaacccttctacaaaccgacaataataaccgactaaacctaagaagcttctgacttctgtcactgttttcggtcttggcccatccctgacggattctatctttcctggatccaccttaatcccatccttgctaacaatatgccctagaaagagcacctgagataaccagaattcccatttcttgaatttggcataaagcttatgttctcgaagccgttgcagaaccattcagagatgtagctcatgctcct

SEQ ID NO: 155823 - DNA, 638 bp, Cannabis sativa
attggtgtgcgagttccttgacgtctttccagaagatttactgggattgccacctacctgggagattgaatttgtaattaagctggttccagaagcggaaccagtatcaaaagcaccgtatcgaatggctccagtagaattgaaagaactaaagatacaattgcaagagttattgaatctaggattcattaggccgagctactctccttctggtgctccggtgttgtttgtaaagaagaaagatgggtctctgtggatgtgtattgattaccgggagttaaataagcttaccattaagaacaaatatcctttacctcgaattgatgatctttttgatcaactgaaagggaagacagtcttctccaagattgatcttcgctcaggctatcatcaactgagaatttgagaggaagatgccccaaaaaattctttccgtactcagtatggacattatgaatttctagtgatgtcttttggactcactaatgccccagtgacattcatggatcttatgaatcgggtattcaaggattacctatgtagatgtgtgatcgtgtttatcgatgacatcttggtttattctgaattggaagaggagcatgagttgcatcttagatctgtattgcaacggttacgag

SEQ ID NO: 155824 - DNA, 738 bp, Cannabis sativa
  modified_base (710)..(710): a, c, t, g, unknown or other
atccagacagggtctggggtgtgtactgatgcaagctgatcaggttattgcctatgcttctcatcagttgaaagattatgaacagcggtacccgactcatgacctgaaagttgtcgaggtagtatttactttgataatttggcggcattatttctacggagagagatgtgaactttatactgaccataaaagtctcaaatatttctttacccaaaaagatttgaatatgagacagaggcgttggttggagttagttaaggattacgattgtgagatcctttaccacccttggaaggccaatgtagtggctgatgccttgagcaggaaggggcccgggcaggtagctagtatgattcagatttcacctaagttagcagaggacatggtcagatctagcatcgagtttgttgtaagcaagcttcctaacttgacgctgcaatctgatctgttagaacgaattaaagccgctcgattaactgatccatagttagtaaagatcagggaagaggtatcaagtggtcaagccagagattttacagtgtcagacagtgggatgttattattcaaaactagggtttgtgttcctaatagtgcagaactcataaatgaaattcttgaagaggctcataccactccatattccttacatccccgtaccatcaagatgtatcaagatcttaaaccttacttctggtggaatggaatgaagnagaatgtggtagaattcgtatcaaaatg

SEQ ID NO: 155825 - DNA, 664 bp, Cannabis sativa
atttattgactttcaataagatatatatatttataagatattaaaataatataaataaaagtaattactttgtatatttttaatgagcattaatggtaatattattttttatatagctaatttgcaccttatttattagagcccaaatacaaaaattggatcaaacataattttatggtatattttaggtctatccgtcatctaatagagatagtcttatacactactattagattttaattttataagcatgggctagaaaatacatatgcaccacatttacatcactctattggagatactcgtaaattaagtcaaaaagtaaaataacatcaatgattattcataaattaaatattctttttaaaaaaatagaaataaaatattataattaaaaaatatatattgtattattaatgatcaatgataaaataaaaaagttatatttattgtgggctaaatttgatatttattaaatatataaatcaaacataaaaaagttgcattaatgagtggtaaaatagtaaataaaaaagtgatgtttattgtgatataaaaatttaatcatattagactatcttcagtgcaaggtctaagagtatctccaagagaggtgtaaataagtggtgaaaagctaaaatataactcatttaacaaaaagtgt

SEQ ID NO: 155826 - DNA, 691 bp, Cannabis sativa
cccggggccacgctgaggtggaggccttgaggagggttttgcgagaggaggtgcaaaattcccttaacgaggagaactaccagaatccgtgggatctaaacctcgaccccctgacggactggttcaaccgtttccttgggcctactttggctacttttgccgcgaagatgaccggggagtatgtctaccaactgactcggtgcacacccaagcggtacgctgcttgtgcatccttgaactccgtcttccaagttcaggatctcagccatgccttagccgcggtaagtactttgtgatttacttcttttctcattaccttacttaaggccttcactcacccttgcttccttttccagattattgtagaggctgcctgcctttccgagaccataattaatcatggcttcctcttgtctgaatttgggggcatagacgaggtcatgaaggtcctgcaggacttgtctactgaaaggcgggtgttccacgaggaggtgcgcgctaggaggctcttgctaaggccatgttcgtggaagaggctaagcaaagggaagcccaagcggaggcgatgatccgagaggaggtccttcggagggataggctggaggcgaagcatagggaagcattgagggttgagggcgaggctgtcgccaaggcccaacgcgagcttcgggaggctaaggaggccttagac

SEQ ID NO: 155827 - DNA, 688 bp, Cannabis sativa
tattactaactaaaactgttgtgatatttttggcctccaattggatctacagaattgccgaatttgaaaatattttttaattcacaaataacttccatgatatctacatattctaaataaataatctccgtaattaatgagttacgtatatttatccactcatgataaaatttataatttatacaaaattaggtcagcaggatcataatcctactcattactacctaaataacccataatgtataataatttctaattattcataattagttaacaaagccgcacttcatgcggcatgtataataattataaaaattttattcacactaaaattatatttattttattaggacaacaaaacacaattttttttattacacataaaaaataatagaattacaacttcataccaaaaatattaaaagtacatataaatagcaaaaaaatcactaatttttcatatatatatattattgccttattaaaggagtaccacaattaagttaacctttgctcctaatagagaatttagtctttatttactcaatgtacattttttttttttggcatggatctccatgtgtatatttatagaagactttcaaatagaataaaaatatatttaaacaatatataagagagaattatttatatatataagttatatatatataacagataaaaaata

SEQ ID NO: 155828 - DNA, 872 bp, Cannabis sativa
acgaggagctgaacatacgaatcaacgctaacacgcctatgctagttaggttgttacagtcatcaacgttctttaccttggccgcctcgatgttgaacctattaatatactctcaccgggttttacgttggccaaggaagagcatttaggttttcgagatatggtggcacaaaattcttttttaaaatcactccacaatttgtcccaataggcgattgaatgcttcttgaatttgttgaaccatgttttttatgctcatgtcaaggtcacaaggaataacatgaacttcagatcggcacttactgggcttgtcctcattaatgtgttgaaatcactaatgtggcctcccaggtcagtacttccaccatattttgtcatggtaggcatcttgaacccttggtggtattgcaatgccaagatgtgcggagcaaaaggctcaggttcctcatcagattcgtattgcccgactctcccttgggcattcaataactgttgaatttgttgttctaatgctgtaattcgtgggtcatttatcacaggagccagagtattggaccagctggtggaagagcgttcacattaagctggggtgcatattctccttgttgtggaggaatgtcatactgtgcttgataaggagcctccctctgtacgtgcccccagttcaagtggtctctaaaattaggttgccgcctttggttcagatggtcccgaaggtccgagctccttgcgtcacgtgggggtgtcgaggatgttcctcataatatggaggaggtgcattgtcttgaacgctcacaaggcgaatccctgagtcggaatggtaactctcccccatgaagctcaccgttctctgttgttgtggcccccgaggt

SEQ ID NO: 155829 - DNA, 579 bp, Cannabis sativa
  modified_base (42)..(52): a, c, t, g, unknown or other
aatatatataaaaagagatatgtttcaattaaatataaaatnnnnnnnnnnnttgattaattgattaataaaaatggtatttttcaacttaacccaatagcaattaataaccaacactctttactttcactattttttgttttcatcaaatcgttgattgtgtatttttttttattcttctcaataagatttataccatttttttataaatgtcacttatgtataagttgagtttttttttttggaaaatttcataagatcttggatttgtcaatttttttttcttcttctcactaatattattttataaggattttttttttatataaatgccatatttataagttaagttcatgaaaattttcatagtctttgattgtctatttttctttttaataagatgtataccattttataaacatgattcttttttaatatataaatgtcacatgttaaagttttaggaatttttcatagaatcttttacttataccattttataaacatatattttgtataaatgccatacatataagttccggttttggaaaatttcataaaatctctctctctctctct

SEQ ID NO: 155830 - DNA, 875 bp, Cannabis sativa
  modified_base (825)..(829): a, c, t, g, unknown or other
ggtatttacccttattttaataataaaataatcaaataaaattctcataggtctttatatgtcacccttaacgcgtgtgctaagccctacacttgtgagccatattttaaggtttaaaattgatttctcaattttacaacaaataaaatttattatttatttttctaataaataatatttaattaattttcattaatatcttatttcaataggattaaaataaatattattttcactaaaacaatatatttctaagtttaatattattcaagaatcatattatatttaactaattaattagttttagcagataaaactaaataattaaatactaattacataattcataattgatgtaattaatcaaaataataattttcataaaattactattttactcttaaaagttatttcttatataaatcaattcttactcatatttctccatcaaattaattcttcccctgtacagtgttgtatagaggtgacttgggaccatcgatctatatttcgaagctccaataaatacttagttattattaaactcatcgaaatagaataattcagttgaataattttattattactccactataaatatagaagggaaatttgactaaatatgcttacataacattaaatttttttcccctaaacttataattaccaatatttgtaatctaggccaactttaatattattcccaaattaccctccccatttacatcacatcggaccaaaaataaataatatataaaaatcaattgggtctgatgggggtccgatgatggcccaatgctacccatttttttttaattttttttnnnnntttttgtacataaaaaagttagcatcaggtgaccatcagaccatat

SEQ ID NO: 155831 - DNA, 563 bp, Cannabis sativa
  modified_base (509)..(514): a, c, t, g, unknown or other
gagagagagagagagatggttttctctcaaatatcccttttctttctattttctatattttccacaaaaaaaaataagtccaacatatttaattcaatagtggccagctgccactctaaaaaccagccaccataccctagtaaaatgacaaaaatacccctccacacaagcataactaacaaaatggtttcgaggtaaaatagtcatttcaaaccttcgggtaaaactcgacattcccaatgtctaactatattgtcccgctatactaaaactactaaagtgtgatcctaatagccaaacgtcgcgtttcaatgttgccggacataaaacatgcaaaaatataaaatttcatatatgacatatataaggcattttgaattcaaataaatctccataaaataataaatcataagtatcatgcaaggttcataattaaaccctaattatttgctaatttccaaattaaagttaagcgatctttacaattatccccccattaaaaggatttnnnnnncgaaatctaacctgaacaactctgtatattgagccctcatgtcggactc

SEQ ID NO: 155832 - DNA, 579 bp, Cannabis sativa
ccaaactaattagttagcagtttttaaaattatttattaaatttaaatttataaaagttgatattgaaatgaactaataagggtatgctaccttttgtggtgcttgacactctaatgtgtctaacatttttgtaattattacgtacatatgtttattaacttcgattaaaattttaatttttttatattattataaataaatttgtaagaacatcttcaatgtgatataaaaaatagtattatatttagtgaaaaaaaaattgtgataatatatttatcttaatttttagtattatgctccaatgcacatattaaaaaagttgatgtaattttttttttatttttcttttgttatgaattattattatttttttacaatttttctttttgtatattttttttacaacaattgttgtggggtttttttatgtataataattttttttgatgaattattttattattaataattgaacattattatttggcatcttaagatgtccaacactatataaatatgacacttaataattgcttaacagtgattttatattattcactaaattaaaatttgtgaga

SEQ ID NO: 155833 - DNA, 729 bp, Cannabis sativa
  modified_base (269)..(271): a, c, t, g, unknown or other
aatgttgagcttcaaaagggaaagaagattaaagttgtcaattctgatagaggtggagagtattatgggcattatgatgaaactggaaggaaccctggccgtttgctagatacttgcgacaacgtggcattgatgcaagatatataatgccaggtttaccccagcagaatggaattggtggaagaaggaatcacacacttcttgatatggtaagttgtatgttaattcattctaacttaccagagtttttatggggtgaggcattaagnnntgatgcttatatcttgaatcaagtgcctagcaagtcggttccaaagacgccatacgagttgtggtcaggcaagaaatcgagtttgcattactttcacgtttggggatgcaagactaaggtaaggccatataaccctaaatctaagaagctggatccgaagactatcagtgagagttttgtaagctacactattggttcaagaggttctaggttctattgtccttctcacaccatcagggtgatggaatcagaccgagctgtctattttgaggatgaatttggttcaagtcaagggtcaagagaaattgtatttaaggaagaatgtgtctatttccctgtacttgttgcttccgtttccgctgttaatcctactaatgatcctatgattgaacaagttccaatagaagctcatggtgaaccttaagatccagtacaagatgaaaatcttgatttagggg

SEQ ID NO: 155834 - DNA, 1261 bp, Cannabis sativa
atgaaccttgtgatctttatttagatgagatacctcgcaggttgtcttaagtttttttcgacctatatatttaaatatttgaataattttcgcaacaataaaaaatataattttttttatatatatttaattttttttttttgaacaagaaggaaaatatttattcaaacaagcaacaaactacagcaacaacagcaaaaacagagcagccacaacagacagccgcaaccccagccctcacggccacctagcaattacattgagaatatgcctatcaagcttcccttttcccccattgtactaataggaatataactcattgaatgactccaaacacaccactacagcatatttcataatgaaataaacattgtaatttattgatcacagagttgtgccttggaaaggtatcaaataaaggttggtataaacatcacgtgtatagtggataagatgaatatatataatattaaatattgagaaatgctaaagggtaccagtggtgcctagcaccctcttacgtgtcaatatcgctattggtctaactaaatatcgcgtcccatataatttaatataataacttttagattgtatcgctagccaatcgcaacacgacatatcgagaaggtactaggcaccactggtgtctaatagcaatgctcttaaatattagagtacatttggtaatatttttttaattaattttttttattttttaattaaaaaactaaaaatattttccaaaaacatattctataaaattgttttcacttttaaattttttaattgagaatcaaaattttaaaagtttacaaaacaaaaataaatcacttttaaaaaatttttgaatagtttttttataattaatattttagactctgactccaacctgaaacttgagacctgaactccggcctcggtctcagttctagactcagactacagccccgatcctacttggacctggacccgtttaaataaaatcaaaaaataaaaataaaagttatagaacacacttttgttttttgattttaaaattaaaaaacaaaagtggttagagaataaatttttattttttaaaagcacaaatttacttttatttttataattaaaaaattaaaaaaaaaaatgttactcccaaattattaactgagatattgtatatctatatttttttaagaggaaattgcactctacaccctttttatattgccctcttttatttttactctcttttttaaagtctatcatttttacctct

SEQ ID NO: 155835 - DNA, 589 bp, Cannabis sativa
agtaatactataagaggtggggtgataatcaagagtgccgtgatctacaaagaaaagaaattgagaatgtgatgattttaagactttataaatatagaactacgcaattaaaaatttcctaaataaattgactggtactacttatatcaacaagatagatttgttgttttttttttttattatgaaaaaactttaaatttaagcgtgcttaatttaaggtaatttcaaaatgagtaatctcttgaaaaaaatttctaaaaagtgcacgagtaaggtcaaaaaacactaaaaagactcgcattgatctacaagattaagtcatcattctatgaagcaaccaaaagagacgtacccgtgtataagagttattagtccttgagggaaacccgataaaaacttaaagcgaaaacgttacagtgtaaatgattagcgatattaggacctaatacataattatacaaatagtaatatgacacattaattattggattaagtagtcatctcattcttacaacaaaccaatcactcgctcactaagatttctcagaattcattcattcctcgttatttgctggtgcattcatccatt

SEQ ID NO: 155836 - DNA, 741 bp, Cannabis sativa
  modified_base (709)..(709): a, c, t, g, unknown or other
gtggaactagatgctttattattgttaacattgaaagttacatcattggtgcaaaatttcaccattccctcacaagagtaccccttgcccaaaaatacattagacttggtaagtatgagcttatcggattcatatacggccttaatgcccgagttttcaagtaagtcaccacttatgaagtttctattcatgtcgtgacttttttaccggaggtgaaaaatacatcatttgtacctttgccaagtacctttgatttcacctcattgcccatttggatctcatggttaccctttgactcttcaaaggttttgaatagtgattttcatatgtgacattaacagtggcacatgtatcataccgccatcccttcactttcccttgcacggaattcacctcactaagagtagcaatgatatcctcctcgatagcatttactttggggtctttcctatgcttacaatccttagcatagtttccaagtttgccacacacaaaacatggaccttttccacctttgaattggtttggtttagactttgaacccaaggtattaccctttttggtattttccttgttcttattaggaactttggaacttgcattcgctttggaagtcttatcattagaccactccacaagcttctccctacatatcgattcctcctcaatttgaatatgtttttggatttcttccaaagagtaatcctcntttttatgaaggattctcttcctataattctt

SEQ ID NO: 155837 - DNA, 652 bp, Cannabis sativa
ttgtaaatgaataaaactagagaaagcatgaattttctaattatcattagtgactgtttcattaggacagttacaagtggagcaacaagataaattctcaagagaaaactttgattttgggagggagacacaagttccacggggtggtccgccatttcatagtgaaagcaccatccgaagaggtgagagaaagaaaaacagtacctagaaacctgagggatgctgattctaaattaaaaaatcttccttaccaacactacctgtaagaactctcaaatatggagttcatactttgagcaaaatagagaaacagagagaagaggatggaagtgaattgaatgaaatgaatgctcaatcaaaaccagattgagtgtgcctttatttatactgttgtaatacaatacagagaatcaagagaataaaagattacaactgtttgtcacctaactaactataacagatttaactgaaagtaaccactaacagaataactaactgttatattctaacactaccaataggaaccattcattgttaataaagaaatacctagagaatctagcccccgggatccaatgatcatctaaagttttgatagagctaccatccccaaccttccaaactagactttttttttttaaagagatcccta

SEQ ID NO: 155838 - DNA, 574 bp, Cannabis sativa
  modified_base (409)..(414): a, c, t, g, unknown or other
attatttaatacataataaatgtttcgtattagcttgtattataatatttactaaaaatttggggtcaacaccaatctccgactcggacctggactccggaccctggaccccgacttgactcgaacccgaacccaaactcgggaccccggctcggacctcagacttggacccgaactcgaacccacaccccgtacccggacctagacccggacccagacctggaccccgacttagaccccgttcccggacctagacccggacccagacctggaccccgacttagaccccgtacccggacctagactcggacccgaactcgggacccggactcgcaccaggacccagactcgtgactcggtaccccaaatctggactcatagttggtgttgggatcgagtgtattaaaannnnnntataactttacacaatcaattaataaagtcgataccaaacgttatattgtattaaataatactaatacaatacaatacaacacaatccaacattatacaatacaatacattacaatacagcgtaccaaacgagcccatacaatacaatataatacaacac

SEQ ID NO: 155839 - DNA, 519 bp, Cannabis sativa
  modified_base (280)..(284): a, c, t, g, unknown or other
catggtactctatcactatagctcaaattgatgaagaacaatgaataaggtgcgaaatcactatagaaaggagtctctcatgtactagttgtcaaagaatgaaaactaggttaaatgtggttgaaagtaggttgttggatgagaagagagcatcatgtttcttttatagtatttcaactagaacttagaatttaattatatgcattaataaagaataaaataatgagcaaaaatccacttaagtggccgaccactctaatgggcctcactagttacaatnnnnncactttatttcaaccatttatcattctttcaataatgtcatattttccaatttcaatcctatgaatgtcaaaactatttatttaataattatagttaattatcaaataaaattaccttttattttatctattaattagacttgacaaagtctcttaattaaccaataaacctaaaaatctcttttcttcacaattaatcatatacttagtaaaaattcataaataaaacatagtc

SEQ ID NO: 155840 - DNA, 505 bp, Cannabis sativa
cgcggatggctccactgctccaactgctccaaccgcttgatttatctaagtttttatttccttagttattaaacttttttagcggtacatgggtacttgcattttgtacttggaaaaatttcactttacttttttttttattattttaaacagcatatatcccttcgaggatatttatttatctgtttgcttttcgcggtacacgggtactcgcatattctacagacttaatcgtaatctgttttttaatgacagcttggtgtaataactttaaaaaatgctaaggcaaaaaatttgaaacgtcgagaaatcaataactctcattacaagaaatcaacagtacaaagtaggctatataccccctatacttagaacatttatagaaataaattgagtaagtataaatacacggtgagtactactgagatattgcgagcactactgataataaaacttcagactttcgccattccaagctcttcggatcgcagtaccatcgagttct

SEQ ID NO: 155841 - DNA, 582 bp, Cannabis sativa
  modified_base (61)..(74): a, c, t, g, unknown or other
gcaaccgtatggagccgttgtacgaaacattccgaaagcaagcacctccagtgtttctggnnnnnnnnnnnnnnatgaaggctgagtagtggctcacagtgattgaacgtattctcaactttatcggagtggttggtaatgatcgtgtggtggtagttgataaccctcactcaggacgtcacggctatgacctgggaagaatttagggagttgttttactccaaatattataatgaatttgtccgcagtgctaagtagaaagagttcacagagttggtacaaaccgaggggatgtcggttactgagtatactagcaagtttgaccgtctggccaagctcatcgtgggaatcgtaccaactgattttaacaagaaagagaagtacttggccggtttgaatgcgaagattagccatgatctggtaatcactaccactgaagcaaccacatatgctgaaatggttgaaaaagctttgagagccgacggtgttgtgaattccttcaggagccccgagtgactccgagtgttggtggaacccccactgttcctactcctgtttatggtagggatggtggtgattcca

SEQ ID NO: 155842 - DNA, 514 bp, Cannabis sativa
  modified_base (471)..(471): a, c, t, g, unknown or other
acgtatgcgcccttttaacatgcgagttgagtgttcatattctaatgttaagctcgcgggcctaacacttaattacgtttaggatgtctgcgttcttatcgagtcgcctttgtggacatcgtatgatgagctgatagaacctagacatgcgagtctatattggcttatcaaggctgttgggtcatcgggaccaactcgcattataaagaatcgatctttatgcttacgcaggaatatggagaggatactcgcacatatcccgatatacgcgagttagatccattctcctatcccgcataatacgagttatagttatgcgatcagacttgggtcatactcgcagtatcacgctgactttatcttgggcgaggtttaaacttcgaggaatctcttacaaacttctcatctttcattgggaaatctgagtacacgtgtcctctaaataagagtctggtctcgagtttctaggtnagagaaatctcactataacagggggcacctatacctgtacaaa

SEQ ID NO: 155843 - DNA, 639 bp, Cannabis sativa
  modified_base (39)..(62): a, c, t, g, unknown or other
  modified_base (507)..(516): a, c, t, g, unknown or other
aatcacttattttaatctatatattttaataatgaaaannnnnnnnnnnnnnnnnnnnnnnnattaattaaaattaattttgaacattaatttaatttcgaaaaactaaatatatatataatatatataatttcaaaattagtaaaatataataaaataaattcttgaaaatatctaatttaagtttatctaaaataactaaatttacaacttaaataattttcaaaatttaattaaataacaaattaagtatcttgaactaatcaccttaatttgaaaaaaaatattcctatttaagttgatctaaaatttaaaaaaatttaacttaaaaatatttttaaagaatatctgaatgactaattttttacaaaattctacttaattattaatttaaaaaagtattctaatttaagttgatccaaaatcaatttgaaagaaaaattgatttctacttaaatatattttctaagaaaaaacaaataattaagtatctagaaaaatctaatnnnnnnnnnnttcttttatttaattaaatacagaaagttacatatagtttatcttgaattaatttcattgaactaagtgtgtttttcttaaattaatttcaaaataatctgatgaaaaataaatttcatatat

SEQ ID NO: 155844 - DNA, 607 bp, Cannabis sativa
tggcgtactcagacctaactgggaaggaccgtatcaagtagtggaagtcacagagtctggagcatacaagctgggacggtatgacgaaaacatggagctcattcttgtaccaaggtattagaaggggaacatttaagaaaatactaccagtaagtgcataaggtctaatgacctcctccaagtgcacgatgcttaaacatctactcttaagtaggtggccttctgagttgacctcgatcaaaggtttagataaaatgactggtacgcaggtcgaatgaccatttctaaaagtctagtctaaaaaatacaattgttttatgttagctaaagatcggttaggttatgaaatagctttcataattcaataaatgtaagttactacggtaacaaaattactcagaccaataaatgaataaagatatttatcatcattctaattgtgtcaagtatttttctatatagcaagttatggatttatcattgaaatgtgtacaaagggtctactcgaaccaaaaaaatcgaacagacaaaaaatgaacttatgcaatacaaatgaccaagagtcataagtctgctcggtcacttgggggcaactatactcgtacaa

SEQ ID NO: 155845 - DNA, 558 bp, Cannabis sativa
atgtcgataggatgtcgattggtgctttagtttattttctaccctaaattgtcgacaacttgtcgacagtatgtcgatacgttgtcgactatattaacatgttgattttaagtttgtattgtcgactgaatatcgacatgatgtcgatattttgttgacatgttgtcaaattgttgtctgattgaaattatcgacagaatatcgacaggttgtcgatatgttgtcgattatattaacatattgattttaagtttgtattgtcgactgaatatcgacaagatgtcgatattttgtcgacatgttgtgaaattattgtctgattgaaattatcgacagaatatcgacaggttgtcgatattttgtcgacatgttgtttattttgttggctgttggatgatgtcgacagaatagtcgacaatttttataatttgttggcagtaatattgatttgttatttgttatttgttttttcaaatggctccgagactcataattctagcatctgagcattttactggccgcgtgacttacagtggcaccggaacttttgcgaaaatc

SEQ ID NO: 155846 - DNA, 640 bp, Cannabis sativa
agcttctcacggagtgggttaggatccctccttacgcgcggactgaacctactcagcttttccttcaacgagccaagaccttcgcttcatttgataagaaggccctcgatgtcggggagttggtcacgacagagaactaccagaaggccaagctgatccaggggcatctgtcagtggatgactccaacctttccaaggtcatctgcccgaacgtaagggttccggccgcggagaagatatttcgggaggacatcatcgccacggcggaagataagtaccagaagtacctcttccagaaggcccaggagcaggcttacactaaggcctaggcggccgccggaaggccccttcgtatcgggagcccggtggagagaatgacctccaaaccaaggcctgcaggccaggttccgaatatgggggctcccgatgccagcacttctggttctggtaagtcccctttaacgatacattacgtccctcctgtccgtgaatacgctagccttaggcctatagggttcgatgaacgtctccataggtttaggatgccctctacttggtgggggggggatcatggaaaggagtattacttctctcacttaggcaattatttaggccggtctcggatgggttctggacctcc

SEQ ID NO: 155847 - DNA, 753 bp, Cannabis sativa
  modified_base (134)..(138): a, c, t, g, unknown or other
  modified_base (350)..(353): a, c, t, g, unknown or other
aaaagtgatcaactgacagcgggatcgtatagatctgatgcttgcacgtgtttgcacaaacaagaatgaaaagtagtatacacacaaatttattatagaggttcgacctccttgtgatagcgggtaatgacctnnnnnccttttagttgtattaataccgatggctaatattatctagatcactatagatggaatctgctatagcacccttaagaatactgataactctagaaattagagttattttcacatttttttaaactaaaattagtttagttcttaagttttaaatttatttagtgagttcttaattatttttgaatttattagtattatacccaaaattcggnnnncacatcagaggaagacacgtgtcaagctagaaagaataaagaactcaaatacgcaatcataattacacttgaaatggaatgactcgttaaaagcataattaatagagtatgtttacaactcggcggactgaacagtcttatgcgagataaaaatgtacaaattgttgcgttatgcttcgacaagaaaccatgtaactttaggtgtacaagacgaggcactaacctcgttacgtggaggagatatgatgacaatgaagatacttagcatatagtgtacggtatacaaactaagtataaccagtgggtgaaccaaagcgagatataagcgaggtgtccaactcgccgtaaaagggcatgcacacgaaaaagatcatctcgccaccagaaactgtggttgtca

SEQ ID NO: 155848 - DNA, 1016 bp, Cannabis sativa
tctgagaggaggatgtcccaaagatagctttccgcactaggtatggacattatgaatttttggttatgtcttttggactgaccaatgctcctgcaacttttatggacacgatgaatagggtattcaaatgtttcctcgatatttatgttattgtatttatcgacgacattcttgtgtactctcagtcagaagaggagcatgagcaacaccttcgaatggttctacagcgactccgggaacataagttatatgccaaattcaagaagtgtgaattctggctatctcaggtgtcctttcttgggcacattgttagaaaagatgggatcaaggtggatccgggaaagatagaatccgtcaaggattggccaagaccgaaaacagtgacagaagttagaagtttctttggtctggcgggctactatcgtcggttcattgaaggtttttctaaaatttcaacacccttaaccaagcttactaaaaaaatcagccttttgtatggacggataagtgtgaatcaagctttcaggagctaaaacagaggttaattacagctccagtattagctctgccttctgataaagagaagtttgtggtttattattatgcatcgagacagggtctgggatgcgtgttgatgcaagctgatcaggttatcgcttatgcctcccgtcagttgaaggattatgaacagcgatatccgactcatgacctagaattagccgcggtagtgtttgctttgaaaatttggcgacattatctttatggagaaaaatgtgatatatataccgaccataaaagtctcaaatatttctttactgagaaagatttgaatatgagataaaggcgttggttggagttagtcaagaattatgattgtgagatcctttatcatccggggaaggccaatgtagtggccaaagccctgagcaggaagggtcgcgggaaagtagctagtatgattcagatttcccctcagttagcagaggacatggtcagggctagcattgagtttgttg

SEQ ID NO: 155849 - DNA, 731 bp, Cannabis sativa
  modified_base (452)..(455): a, c, t, g, unknown or other
  modified_base (579)..(581): a, c, t, g, unknown or other
  modified_base (690)..(695): a, c, t, g, unknown or other
gatatcttaaataactgtaatgtacacgaccatgaaaaaaaaattaaactaaaaaaatctctcgaatatcggaacagataagagtgcatccctgcactagttttagagggatacattttagaattttcctaattaaaattgctaagaactaccaataaattggcttgggcgacctgtataaaaatgaataaaaaaaatcatcaagtttttcaaaaaaaaaaaaaaatcatcataaacaaaatttatatatatatatatgaaataatcccctacagatgctcaaataaaatttttgtacaattcattgtttttaattttttattggccaaatttcttttcctgtagcatgaggtaaaaattgtatcccctactataaataattcctatatatatatatatatatgaaatatttcttaatgggtattacccatgaatagttactaaacaaattnnnntataaatattaattttaaaatatcaaatcctcgaattttgatctaataacgaataatgaaatcacaaattcaaatttctatgcttattttaactacttaattaaaaaaaaaatatctctttttnnnctatatcaaaaatatgttcatacaaataaaatatttaactcaaactcagttttttcttttcttattttttttgctaaaaacttttttaaaatttttttttttaccgatnnnnnnatctcagcccatatgatataaaagatcggaagagcg

SEQ ID NO: 155850 - DNA, 577 bp, Cannabis sativa
  modified_base (403)..(408): a, c, t, g, unknown or other
tccctaagttgttgttcaacttagagtacactatcatagaattgaccatttcaagaaatgttctattcttcctttcggctacaccattttattgtggtgtatgtggtgttaaactctcatgaattatgctatttttctcacaaaaaatgagtaaattcatagtagaagtattcacctcctctatcacttctcaacacttttattttcatgttgagttgattttcaacctccgctttgaaaatcttaaaaacactaaaggccccatccttttgctttaacaaatatacataagtatatctactataatcatcaataaaagtaataaagtatcttttaccacctctagttagaattccatttaattcacatgaatcactagaattaaatctaataattttgaatnnnnnncaacacttggaaaaggttttttaaccatctttgcttttacacaagtttcacatttaccataattaattcttatatcacaatcaatcataccaaatttttttaactcttttcatagtagaaaaactaatatgagctaatctaagatgccacaaaaataaagaatcatgct

SEQ ID NO: 155851 - DNA, 531 bp, Cannabis sativa
  modified_base (44)..(44): a, c, t, g, unknown or other
aataattttaatttttttttttaactttttttttctttttcttnttcttcttctttcttctttctttcttaaactttctaaaaccctaatctcccagccttccctcccaagccctctctttctctctctcgtctcaccacctaagacctcaccggagccgaagcacccatgccctcgctggagccatttgccctctctctctctctcttgatcttctcctttccagaccctctctttctttttctcgtctattatctctctatatatatatatatatctctttctctcttcgcggtggtcgccggaggggggttggactaaacaaaaaaaatagaggcgggtcagagaaagatcgaaggagagagagaagagggcagatccggggttggaagtttttgggtcgtggggttcaattttgtgacctgtataacaaggggtagtcggagaaggtcggcgttgtgcaccgtgagagagagtgtgtgagaagggagtcggagaaggttgggacgtggggtaggtgactgggtgcta

SEQ ID NO: 155852 - DNA, 585 bp, Cannabis sativa
ctggtaaaataatttccaagagggtcctagttagggttctagtcttgttctaaggtcctggtttggtgattcttgttcaggttctaattttgtgtccgaggtctaggtctgtgttcgagtttggttcttcgtctgagttctggtcctattctgagtcccaaatctagacactgactactggtctattccaggccctcttacccgaagccggagtcaagatctggatcactgtcaccggtctcggtctggttctcgttcaggtcccaggtcccatttcagagtttgtgttcgggatcgagactggaatgcggttctagatcccgaccctggttctgtgtccctagtctggttccttgtttgtgtctgagttcaggtttgggttcgggtcacgagtccttgtttgggttgggatccgggtccaactcaacattcgtttctaggactgatttggagtccgggtcctggtccggttacggtttttgatctaggtccaattttgatctagtccccgtcaactttaggttttgtttccaattttgggtcacacggtacgggttcgggtccacttttgggtttgggactggg

SEQ ID NO: 155853 - DNA, 753 bp, Cannabis sativa
ttggcgaaggtcaggtttcttccgattcaagtgctcttgcagatctggttgggagtaattgctggcagatatcgtcttactcatagaccgcgtcctagtcatagactccatctttaagtggctcacagatttacttattcccatactttcgcgatcatttgctcgttgagtactttctcctcttcgagttgatcggctatgggttctggatcgcctcgaagtcacacttgcttcttcacgctctattctttccttctgagagaagtttgtcgtatttccccctcagggtacgtacgagtcctcgctctatgggtttgggaagaatgttggtgattcctaggaggtgatctttgttctcccagctgagttccaagatcctcctcattttcgtgagggatttcttgttcatcagtctctggttgtctcctttctggttgttcatccatattctcaaggggtgtctcattttcccctggttgttcttcccggtccttttcctatctcctggttcgtgaaccacgaggtctgcctcgtggtcttctcactctggattcaggttgattttgactgttcgtcctctgcgccgccctagctgaagctgcctctcattctaactcagtgttttgatgatgcgcctcttccagatgacatctcaggcggcggttttccatttcataagttctttctcccacagattgggcacctctacggttgagctcttcatccctcgtcccgagattctgaccattccca

SEQ ID NO: 155854 - DNA, 818 bp, Cannabis sativa
ttcctattatattatatacacataaaataaaaaatttataattaaaaatttatgaataaatcttaaaaaaaattctagtaataaaattgtaattttaatgtatacgatttttttttttttaaaaaaaaaaaagaattttaaaattttgcacgaggcccctaaaatgcttgggtcggccctaattaaagcctatctatatctatatatttatctatatatatatctatctatatatctactatatatatgaatgttatgtgtcaagccacataaatattagttagttttaaataaggtcttaattttttttttttttaaaaaaaaattggtaactaaagtaataagattatttgaacaatttattttataaatggcatatactcatttagtactctatcttttctcttaaaacacatttggtaccttgtattttcaataatacttatttgataccttatattttgaaataatatatatttggtatcctaaacataaaattgaatcaatataattttattaatttgtccaaacggttctcagttatatgtaacttgtaaaccccaagttcttgtctaacctattttttttttcatatttagattgattttatcttgatttaagcttgaatataataaaaaaaaaacaaagattcaatactagaattttacaagcttcacctgccctagaaactcattctaggcgggcagtgcttgggttccccaaatcagggtaatgactttcactatattcaaagatatcttacaaaaaccaacaatattgtaaacaatacactcttttacaaaatacagtgaatctat

SEQ ID NO: 155855 - DNA, 732 bp, Cannabis sativa
  modified_base (695)..(702): a, c, t, g, unknown or other
ttgaccaacttgttgatgccactggaggtcatgaacttctcagcttcatggacgcgtactcgggatataatcaaatcccgatgtacgaacgagatcaagaacataccccgttcattacagattgaggcctgtattgttataaagtaatgccttttggtttgataaacgcaggtgcgacatatatcaaaggcttgtaaatatgatgttcggagatcttattggggacaccatggaagtatatgttgacgacatgctcgtaaaatctcaacatgcaaaagaccatgtcacccatttacaggcaacgtttgatataatgcgacgatataaaatgcggctaaaccctctaaaatgcgtctttggagtcggttcaaggaaattcctcagattcatggttaatcaacgaggaatagaggcaaaccccacgaagatcaaagcattggtggaaatgccatcaccgacttagccaaaagaactccaaagcctcacaggcaaagtcgccgccctataccgctttatatcactatcctttgataaatgcaaggagtttttttagattctaaaaggcaacaacaagttccaatggaccgagaaatgcgaggaggcttttcaagcattaaaaacacatttggggcagcccctaatcctatccaaacccatgatcggtgaagtcttatcaatttatctagcggtgtcannnnnnnngattagttcggtactaatccgtgaagatca

SEQ ID NO: 155856 - DNA, 531 bp, Cannabis sativa
ctgttactggtggcagcagagggagttttttgagtgattgtagcagcaggttctgtggtagcagtagtaactggttctgtgacaccagtagcagtagcagtaacaccagtagcatcagcagctggagtgggatccattgtacttgtttgtgctacaccagcagcatcttgatttacccgatcttgagctgtacctgtatcaagcatagaacaaacttggctagagttgttagtagcctctgtgttggtgtgcaaatatggtgaagggttatctattgcatcatgttgatcaatctcaggtgtgaatgcaagatgatgagaactagtaggaatagtggcagtgggtaatggagttgattgagaagtaatagtagaagaaacaaccactttggaataaggaaaggagttttcatcaaaaattacatcacgagatatgtacactcttccagttgagtcaagacacttgtaacctttatggttcaaactataaccaagaaaggtacaaggagaggacctgaattggagtttgtgc

SEQ ID NO: 155857 - DNA, 513 bp, Cannabis sativa
aaaatgacaaagtatttagagaaagttcaaaagaacttggaaagatttgattactttaaaatcgaacaaattcttagaaaacggaacttcaacaccgatgccttagcaaagctggcctcgtagaatgacctggatgaactaaatctagttccgatagaaatgctgagcgagccaagtatatgtgaaactgaagacgtcgagatgatagatagctctccagcatggatgatgcctgttatcaacaatttactcgacaggaaaactattgtataaagtgccttgctacacaatgatcgaaggcaaactatatagatgaggttatttaatgcccatacttcggtgtgttcctcctgtagaagcaaacgaaatcattagagaaattcataaaggcttctgtggggatcatgcgaaatggcaaagtctgtctaaaaagatcattaggcaaggatattactggccaacgatcaataaggacacacatgagtttgtcaagaaatgtgataagtgtcaaag

SEQ ID NO: 155858 - DNA, 542 bp, Cannabis sativa
ttatgttgttcaaattcttactaattttactttcttaaatgtaggctaagatacgaaagcaagttgaggaggggatagtgttagtagaaggctcaaaagacatactctagtcttgggaacagaagagcatggaagacgtgatagaggaatgggacgtggcgtcacacagacacagtttttcgaaaccccacgtcctaaaagaaagagagtcaatgataatgatcgcatgagtgaggtggagaagtgacttcaaagtcggaggaacagggtcgtagacaagacgaattattaaagcaactcctccaaatagtccaaagcgaaagtggtgttgctggaacctcacatgcatctagtttatgtgttgagggagcatccaacaaaccagcttttgctgctgttacctcagttctaggagcaacacctgctgcaggggcctctgctccaccagctgccacgtcctctactccaccagctcccaaggcctctgctccactagctgccatgtgtgatcacactgcttctgttccaacaccaccacttgt

SEQ ID NO: 155859 - DNA, 551 bp, Cannabis sativa
cgatagtgtccatgaatattccaactcatggagacatatgagtccccttgtggtccccaccctactagtcccactgactagtagtagctcatttagcaccatggtactagttggtggtggagagctgacaccaagtactccccccttaaagagcattctaagcttttagccttctaccaagaagatatatgatttttgctctatagacatatggtcatcaatatataccaaatcactgagtttctcaaatcttactgcaccattgtattcatagatccaataaagtgcgtataccaagtctcgtcccaatccggacaatattaaagatatttacgaaaatgccactgctgcacaaacaaagcattaacatgccaccagcatgcacaccaacatgtgccatcacttggccaacttgtgggcatcacctagcttgtaacgtgtcatcttggcatgcacgttaccgttggaatatcttttaccaggatctggatttacaaacaagtgtgtttttaacatcctaaatatgaatttctaaaacgatgaaaataaac

SEQ ID NO: 155860 - DNA, 519 bp, Cannabis sativa
aaaaaaaaaattaagaaagaaagagaggagtaagttgaaagaggtattttttgttttagtattttcaattattaatctatttgtatttatacttaatcttccaagcttacatttaggtggtaaaataaaactttccaaatgactgaactgttagtaaatttaaggtatcatctttttttaaagttaactgccaacatagactacttatgtgtacactcttgtacatgtaacacatttatattgctacacctaatattattatttaaaaattataaaaaattatttcaaaatttataatattttttaaatattttattttttttatttttataatttcatttaattttaaaataaattttgaaataggtaccgaaagtcagggttgggtatatatacaattattaccagcgggaccgctgttaatgcactgtcgctaataattctaacaattattttttttattcttttaatattattagcggcggagtctaccgctaatagtttttttttttttttaaa

SEQ ID NO: 155861 - DNA, 634 bp, Cannabis sativa
catccatagatctagtcttaatgactctatcagaggatgagggaccagttttcttgcccttcgattttcctttcccggccattttcgctctttttgccatagctccgatagatcaccagaagagagagaaggagcgggaaaatttatttgacaccttaaaatattgagagaactttacacttaattatttaatttttttatttaaatatttaaaaagtgaaaaataaaatagtttaaggtgagaaccaatacggtgagaaagaagagaggaacttaatggcagatggtttgaaattgtgtttgaagattacgttcattgtctgattttccatcactccttgcccaagaccacgcccatcatctcttaccaaacgacgatctacagttttactccaaaacctctacactccaccatttatcgtgtgccaaccatctatatatttatgtggttttggttgatttagactttgttgacaatggataatgttctacataacccaccattgaagaaataaaggcaactgcaattgtattcatttgtgtcattctttggaaatttttactgtttcgtcaccaaggaaaaaatatgtatgcagtattgggattattgttgaaaattattttaccaggatct

SEQ ID NO: 155862 - DNA, 504 bp, Cannabis sativa
tttaaaataagataaaatagataaataatccatatactttacatatttttatttgactttatttataattacagaaaaacaaaagtaaaaatactataaatatacataaataggctcaaaagagtataaactagttttaaaaatatagtataaaaacaaaagattatataacttaccaaaattaataataatactactacataatagattagacattaaaaatgaaaaactaaaaaataataaaataatactaatgaacatcaaataagcagtaaaaaatggaaaatattataaaaattaaaataatatatgaaccattaatgtcttatgctaaaaaacttaataaagaatcttaattgataatgtttaatatacaaaatataaataacaaaagttcaaaaaacaaatattaaaacatgtagtaaaaatgctaattaatataagaaaggaaattctaattaatcaatatagtaaattattaatactaaaaatctcacatttaga

SEQ ID NO: 155863 - DNA, 843 bp, Cannabis sativa
  modified_base (39)..(47): a, c, t, g, unknown or other
agcatggtgaatggtgggacaactcctgttactgaaacnnnnnnnnntgtgcaagagactgggaataacggttccgcacacagccagggcgtttataacacgactattccaccacggcatcaacacctaaacaaccatcggagacgcaactgaattgcaaaatctccgcgatgcgctcggactcatgtagtgtcacagcaatactctgcatcatgatcaggaggaattacatgccgcagtaaacctcgcgtttgacgaacagaggcgtatgttcgccgaatggagggacaaagagatggaggcattaagggcttaccatgcagaaatcgaagatcgtagtcaacaagctactgtgctgatacaaagcgcttatcagactgtaggccaacaaacgtcgagcgtcattcccctgggagaaacggaggatgacccgacgatgaatgcctcctagacaaccaacggtcagccgtccaatccccggtcatgagttccactcgtgggccaagaggtagggcggcagaccttgtctgggaattcaccaggaggagccatgctcgacggatccacgcagaataatggagccattccacctgtcaaccaagcgaagcaatcgctaaggtagccaggttcttctgtgttcgataggctgggaaaaacccatgacctaagggacgatctaaacagaagaacgataacagacgagcagaatactacaacgaacgtgcagctgggagcccatactcaaatctctgctcagaaagatgctgacgtaatccaacccgaccaaaacgccaatcaagtcagcccagccgtacagcccagctcgacgaactaaagaatatg

SEQ ID NO: 155864 - DNA, 826 bp, Cannabis sativa
acattgggaatgttaggaatagtcggaattttagaattttctcaaaatacccctaagtgcaattttatgacttttagtgtgggaggggcaaaacggtcattgtgccccatttgtcctatgtgttttgtgagttgggatttaagtttattaatcagatttttattacttttattagctgatttttaattcaaataaaaccaatttttattaatcatttttaaaaaaaaaaagaagaaaggctttctctcttgcaactctctctttctctctctcgaaaatcctagggcagctagggttctttattttcttcatcaatttgctatgatttcgagcagctcttagggaattcaagctaaggtaagattctagacaactttcctttggttttcttgaacttcaagttatgaaattatgcatgttttgagagattgaattccatagttgttgttggggtttgaatcatgattctgtagttagaatatgatttattatgttgagttaagcatgatttagtagtttttttgaaggtttttgcaagctttgagttttaaaactcaagcttgaagctttaatggtgaaaattgattctgagctttgattgttgttttgttcttagaatatgtttattggggtataatatgcaggtctagaaagtttggttgagtttggaaacgattagataaggggttgaattttgttggttttctaggtaaaaccagttaaccggttttacactgtttgtaaaacctgttactcagattttgtagcagggggaaaactggtttttcagcttgtcgtttcatgtcagttttaggtttctaattag

SEQ ID NO: 155865 - DNA, 588 bp, Cannabis sativa
tcattagtccatgaaacagccagagtgacgtactcgtgtataagagccattcattccgtgagtgtaagggcccaatggaggcttgaagcgggggcgttacaggttctaccactaaagtggttagatcaggtgacatcattttttcaaaagacttaaccatccacaatgttttatatgtccctgactttcaacttaatctttttaatgttcccagttttcttcttacaattaccaacacaattttattcactcataattcctgtatacttcagggtacactaaacaagaagattgggatagctaatcgcattggcaacctatttttcctactacaatctgtcaactctcctagtcattgtaattcgactttttcttctactaaatcatgtaataatgtgcattcttggcactctagacttggacatccttcattgtccacaacaaagataataaatagtcaattacattatgagaatattgattttttcccctgttctatttgtcatttggctaaacaaaaatgattaccattcaattgtcaaaatcatattgctgaatcttgtttcgatttagttcattttgacatat

SEQ ID NO: 155866 - DNA, 680 bp, Cannabis sativa
tattcattgcatcctggcactaccaagatgtacaggatcttaaaccctacttctagtggagcgagatgaagaagaatgtggtagaatttgtgttccggtgcttaactcgtcagcagattatggctgaacatcagagaccagcaggtttattgcaaccactgacacttcttgagtggaagtgggaggatattaccatgcactttgttcttgggttacctagaaccacgggtatgtacgattcattttgggctgtggtagatcaattcacaaagtcttctacggtaaaaacaacatttacagtggatcaatatgcagaattgtacgtgaaagagatagtaagattacatggtattccaaagtccattatatcggatagagatctgaagtttacttctaagttctggcagagtcttcagcgggctatgggtaccaaactgaaatttagtacaactttccatcctcagactgatggatggtgcgaaaggactattcagatactgaaagacatgttacgagcctgtgcaatggattttgatggctcttggagcaagtacgtgccactaatagagttctcgtagaataaaagctaccacagtacaatagggatggctccttatgagctgttatatggcaggaagtgcagatctcccattcagtgggatgaaacgagagaaaagaaa

SEQ ID NO: 155867 - DNA, 537 bp, Cannabis sativa
  modified_base (38)..(56): a, c, t, g, unknown or other
aagttcatatttagggttttaatcaacatacttgtgannnnnnnnnnnnnnnnnnnaaaataatttccaacatttatatgattggaaagcttgttttgggctctatatgttgatctataaatgtgattcaaattatggatatttgtgaaaatgaatttgggattaaccttatgtgtaaaatcctgggattatgtgactaggattactagtacttgctcaggaacacccagggatttggaatctccacatacttggattatcaggtaagacagtaaacaagcacatagagattagcgttgtggtgcccatgtataatattctgtatatgctatgtcgaaaaccaagattagggttattacactaaacttaacggttatgtgatctagggttattaatctagaatttaagtgattatgaatacaatattatgttgtatatattgatataaagaattatacggttaaggaaaaattaggttagacttgataattagaaccgagataaattattctaaggccttattataaatagacgtgt

SEQ ID NO: 155868 - DNA, 609 bp, Cannabis sativa
attggtgctttttaagatttatattggtttattgatgtctttcatcagtatttcccaaatcatatctaaccatgtaaaaaaaatattgctatagggcaccaaggtgcctagcacttttatgacatggtgtcttataaatggttagcaattatctataatctttattaaattaaagtaagtggaatgtatcaataacgagattacaccttataagggtgctaggtaccatcgagagtgccttttaccatttctatgtaaaaaaaggtatactcagctaagtgggctaccatattttaattattttttataaaaagaaatactaaaaaataataaaaattaaaggtatatttacaacgaattttttttaatatttacaattattacacatatgatcttaattaaaaaaaagtaacggtaaaagtactttatttttcgattttgttgcggtaatattattttttggccattaaatgtcaatttagaaatataaggcgacatattaaataagctaaaaaaatatatattactacattgaacatgtatagacacttaaaagctaaaaaaatatatgactgaaataaaatcataaaataaaatacctattttttt

SEQ ID NO: 155869 - DNA, 564 bp, Cannabis sativa
  modified_base (36)..(69): a, c, t, g, unknown or other
accatggccgaccacttaaataggtttttcaaattnnnnnnnnnnnnnnnnnnnnnnnnnnnnnnnnnnaacctaaacctagtagttgtctatcctggtcatacagttatcaacagtgatcgggaaaatgctgatcacaatctctttagtgactattttgcagagaatccttgatttctagagtcgatgtttcggcaacgatttcggatgggtcgttctttattccttcgtattttcgatgcaataacaatgcacaatgactactttgtccaatgaagggatggtattggtaaactcagattatcgggtttacaaaaactaacatctgtatttcgaatgttggcatatgatgtaccagcagatgctactgatgaatacattaaaataggcgaatctacagttttagaaagtttgaaacgattttgtcgtgctgttgtggaggtgtttggaagtcgctatcttcgatcacctgaagctgatgacgttgcaaggctactccacattggtgaacgacgaggttttccaagaatgttgggtagtttagattgtatgcactggaagtgg

SEQ ID NO: 155870 - DNA, 674 bp, Cannabis sativa
  modified_base (347)..(352): a, c, t, g, unknown or other
  modified_base (434)..(436): a, c, t, g, unknown or other
  modified_base (515)..(524): a, c, t, g, unknown or other
tatagatgatctacattgagtatggacaaatttaccattacacccttcaatgtattttatcctaaaacacttaaataccaataaatcatatttcagtaaactaatataattactgaaatgagtactcaaccatttatctctattaagctaagctcgaaggaaatcattatttcacttctatgtctagatagaaactatagattctgtatttatgattagcgctcccactgaattgaactaccatgtccttaatctatatgtcatgagaaaatccattggtcaactttaacgaatagattaaagaacataaataatataactaaactagaacttaaccatctcaggannnnnntcatttgatctaagatcaactatgtgatactgaattgaatagatattatggtaagtttattatatcttatccaagttcaatnnnggtcccttccgatgcatacttcatacatccaacccaagattactttaaccaatgccctaaaaaggacataacacttatnnnnnnnnnnagtaaactacattgtagattatcctattagtctgtatattgataaatcatcggaatacatttaatcacacaatcttagttactttccactatgttgacaacacaataaacaagaatatcaatgtgctaaggatttgaatgaatttataaa

SEQ ID NO: 155871 - DNA, 629 bp, Cannabis sativa
cattaggcaatagggttccaaatgccatctcaaatacatcactaggccaaccaagctgattaagaactcttgatgatacatatgatcgtgtagcacccgaatcaaataaagtagtaaagaccaaaccattgataaaaagctgacctgtgactactgaaggactagcgacagcatctgccagtgtgatggcaaatacacgagcaggcttggcttggcttcaggcttaggttcttctttctttaattggggacaaactttcctgaggtgccccattgacccacattgaaaacaagctctccgattacaagtctcgggatgatgtttcttgcaacgcgggcactcaggataggagtaagtctgacgtcccccttgattttggtttcctcaaaacctcttaccctgccctgaactccccaaagatgggaaagttctcttcttttgatcaaaagtggaatcgccactctcttttcaagggccagaaatagggagagtagtggtcccacaagcaacaggagtgtaatgaccgctctagtaatttttgattagtaaaggcagttagcactaatttttatatttttattattatttgtgaatttatttaattctgaatcccaatatttagaaataaa

SEQ ID NO: 155872 - DNA, 862 bp, Cannabis sativa
gaggagcattggcatcggaaacaactgcaggaggaacttgttcttgaatctcgttttttagagatctcgagatcaataggcttggctagtgacttcttcttgtgggcggtggttttcctttgcctattgggaggaaccactttggtagttgtggggaccttagggttggttaccctcttcttcccttttcggtccatgatatcttcataacccatgtctgcaaaacaaggcaaaacattacaattgttaaaaaaggtagatgaaaaagggtaagtgtaaaatttttcacctaagggatttaccaaagtcacaagggggcgagctatcactagacggaggggtagagggaccatagtatctactgaaatccctatagcatgtaatcttgaatatatcaaaaggctcgattggttctaaatccaagctcgcatctatatgacctgccctatcttccatagtaccatattgctcagctataccataatacgactcgtgacagttatcctgaacgtagaatctaggataccagctgtcaaacttatgagcaatacggtccacgagaagagaatcccaaatataaaaattaaggtgggagtcttggaaggtgactaatgtactacgttcagccctaagtatagtgggaaaccaaaccacatcgattacctcgggatgctccttcaccggattcacgaggggtagtgttttgaagatattgtgcttgagaaaagcagccataagccttatcctcgctcgaaacagtaatttgctgccaagcagaatacttgggaatcttgtaatcacaagtatattccttgtgagtgagaaggcccaccgatcgcaggttggcctcgttcaaaaggaa

SEQ ID NO: 155873 - DNA, 668 bp, Cannabis sativa
  modified_base (172)..(173): a, c, t, g, unknown or other
  modified_base (437)..(438): a, c, t, g, unknown or other
  modified_base (617)..(618): a, c, t, g, unknown or other
cagaaagacatgtacctcaattttagggatcaccccacaaaaacactataaataccccccaaactcattaaggcaggggtcgacaattttgggtttcacacgaactagagaggaaaaccaccaagaacattctctgtaataaatactctcataaatacacagactcgtggannaaggctcattaatgccccaaccatataaaaatctctctcattaattccttatagctttcttaaatactattactatattggttgtcgaaaacctcggtcaatattttggtgttttcattgagagctgaaggaagcgtctgaaagtagacagtaacattactaaacaacaatggtggagactcgaaacacacgtcaacctcgtcctcttcaagatgctcaagacccaaacgatgaggacgtggcctcaagagcaaatgtgggctnngaggagggagaaggaacccacgatgatgaatatgaagggaacttcgatgagtacgacgcctacgacgaaggcagctacacagagttggtacttttgagacaaaaggctgccgatcacgaagctgaaatcgcagctcaaaaagaacaaaatcaaaagatgcaagaggtgatgctggccanncaaaaagccatggaggcagcaggaatccacgtgcatcataaagccatccc

SEQ ID NO: 155874 - DNA, 780 bp, Cannabis sativa
  modified_base (159)..(159): a, c, t, g, unknown or other
atcaccttcttatcctcagttctttgagccaatactcatattttagtctttctaagcgagcttaattcatcatccatagcccgagaccactcatttttgtactttccatttaaagcctcgtctgtactcaatggttctggtatgtcacatgaatgatcnattgacaaagcataggcaatcagaccagcttcggcataccttggtggtatatggatatctcttctagttctatctctagcaagctggtagtcagacagatttggtttttcctcagtctcatctggagctgtgtttgtactgtcattcttctaacctatttcaaatcctttaagctcgatttaaaactctgccaaatctcccctctttctagatgaatctgcatcaggtaatacactgcctttctcagcttttaagtgaggaaaatcattttcattaaacacaacatttctagaaataattaccttaggcttcccatttggggttttatattctataaccttttgtgcctataggatatcctagaaacatgcctttgacaaatatagcatcaagcttgtcatcggattgatgtacatgtgctgcaaatccaaacagtctcaagtgtttcaggtttggtatcttcccataccacatctcatatggtgtcttcaagtctatgactccattaagactcctattaacaaggtaacaagtagtagctaaagcctctctccaatgaggctttcccaaccccgaactaagaagtaaacatctaactttgttcaaaagggttctattcat

SEQ ID NO: 155875 - DNA, 609 bp, Cannabis sativa
  modified_base (144)..(147): a, c, t, g, unknown or other
  modified_base (252)..(274): a, c, t, g, unknown or other
gaatgtaagtttgatgagctgggtcagttctggtatgtatactgcgaggggctatggacgagcagacggtctagaacgccggtaaagccttggttttatttttttttttatagtaaagtattatgagctcagcgggatgttgtnnnnttattttaaaagtgcattcaactacttattttattttaatatgaatgatcattcgtctttaacatatatatagtaaaactcgctgtgtatttctaaacagttttnnnnnnnnnnnnnnnnnnnnnnnaagttagtattttgtaaaataaggtaaaatatcggggtgttacaatagtagtaactataagtaagatacagtgatgataacgataacataaaaaaaaaataaaagattacccgagttaactaaatttaataaatatttattaatatatttatgacttataatttgaatcaattaaaaatatctaaataatttatatacacttaataactaatatagatttgaatttttttcattgaaactgatagtcttacagtggtgcaagcattacgtagttctcttcctatggtttcatactttgaaagtgttatttcgatgctaaatgatttgagagatgt

SEQ ID NO: 155876 - DNA, 616 bp, Cannabis sativa
gtcccgggcaggtttgtaccacggttttgatagcccctcaactagcctctgaaaaggttagtgcagggattgagttcgtggttggaaaatttcacaatttgacactccaatctgatctattggagagaatcagaaaggcacaactagaagatcccgagctagttaaggtttgagatgaagtaatggctggtcggcctagaaccttttcagtctcaaacagtggaatgttgttatacaaagctcgagtttgtgttcctaatgttgatgagattaagaaggagatacttgatgaagctcataccacaccttattcattgcatccgggaaccagcaaaatctaccaggatttaaaaccctacttctggtgatatgggatgaaaatagatgtggtggactacgtgtccaagtgtttaacctgccagcaaatcaaggctaaacatgagaggccggcagggttactgcaacctttggtccttcctgattggaaatgggaggatattgcgatggatttcgtaagtggcttgcctagaactacgggaatgtatgattcaatatgggttatagtggacagattcacaaaatcagctcactttctgccagtgaaagttacatattc

SEQ ID NO: 155877 - DNA, 752 bp, Cannabis sativa
aaactcatttttaccatccttctttgctaagtgagttcagagtgaaaagagaagttttttgacttcaagtttgctgaagtgccttcaccgaaactactcgttggcttgacgctgcttgaatccagagatttgactcttgagtaagttcccaatttcctttatgcttatttttgcatgtttactttttgaattcaccttcgactttgctgtagaaaatacattggaatacctaggtttagaagctctgcgattcttctttgtcatggcttcatgcgattttacagtacataatgcttttttttttctgaactgcataatgcctgtctttcatcttgcttcttctaagcttcatgaaattttttccctaactcgagaaaatttcaaacttcctgagttttgacttttctttgaacattcttattcttgaatctgttgagtactcctggtcggcatatttgcttgtttatcgctccatattccgaccaaacactcatcttacgtgttgtcttttgtagatgaacccaagtgagttttgggagagcgagcatcgaattgaccaagacttgcttcaacttttggacgaggaccatcctcttctctgttcgagaccaccttcttctagtgaaggacattctacctcaaatattttatccagtcatagaatgatggctctgttgagttttgtgcgcttaataaaatcctttacaatctgattagttatcaatataaaaaatttgaagtgatttatgttt

SEQ ID NO: 155878 - DNA, 549 bp, Cannabis sativa
cctaactcaccatcatcgtacatatataaatacaaggtaaagtacagaagttttcatcacaaaaaataaatattaatattttttttttcatatatagcaaaaatgcagtgcatgcacaagaaatatcacttttaccagcatagttcgctactgcactggtaaaagtaacttttaccagcgcagcaaagaggtcaaagttttaccagcatacatttacagtggctaaaatctaacttttaccagcgcatttacgcgctaggaaaagtcatttttgtcagcgcttttcattttatgttggaaaaagttcgaataccaacattgattttccaacccctttagtcaacacatctcaagtaaattctattttaccagcgcaataccaacttttgccagcacaaaaatgtgctggtaaaaatggcatttattgtagtatatggtttttcaccaatttgctccaccatccctctctattattaataatcgttttacaccaaaaacatcttataattcaaaaccaaaatcaaaatcaagtacttgttaccccataca

SEQ ID NO: 155879 - DNA, 783 bp, Cannabis sativa
tcaaaaatctcatctgccatagtgactcataactaattgtaaatcaggttctcggggaataccaggccaagggcttgaagatggctaagtatctagaaaaggttcgaaagaacttggaaagattcgattactttaaaatcgagcaaattccaagagaacaaaactctaacgctgatgccttggcaaaactggccccgcagaacgacttggatgaattgaacttggttccagtggagatgctaagcgagccaagtatatgcgaaaaggaagacatagagatgatagacagttcacctacatggatgacacctacaatcaactatctacttgacgggcaactttcgattgacaaaaatgaggcgcaaaaactcttgtattcagtacctcgatacacgataattaaaggcaaactatacagaataggttatttagtgcctctacttcggtgtgttcttcctacagaagcaaacgagataatcaaagaaatccatgaaggcttttgtggggatcatgcaggttggcagagcctatctaaaaatttcattagacaaggatattactggccaacaatcaataaggacacccatgagtttgtcaaaaagtgtgataagtgtcagaggttttcacatatacctcgcatactgccaacagaactaaggatgataactgaggcattagaaagcaaagttggccatccaactttgggaatttgtctttctaaaaaatgccacaaggggcaacccattgtctcggccaaaaggccaaattcaaaaaaaaaaaaaa

SEQ ID NO: 155880 - DNA, 576 bp, Cannabis sativa
  modified_base (513)..(514): a, c, t, g, unknown or other
tcttcggtttttatataataactgaagagaaaaagaccctatctcttcgatttttatataaaaactgaagacataggtgggacgtatgctaactgtattcggttattatttaaatattttaaatatatattaattttttatttaatgattaattatatattaatttttttaaacaattataaactaattataaaaataaatattttctttgaaataaatattattttaattatataacaaaactaagtacaaaagacattctaattatattataacaaagttaaagtatacattacaaaatatgctaagtccttactaataaaaacagtacacaaaataagtattgcctaaaattaaaagtctaaagctaactagtacaagtatcgtgtcaaatttgataactattgatgttgcagtggtagcaacatcgtcttcgcattgtatgtgtccttcattccaaaatgtaaaattaaagtataaattagaatatctaaaaacatgtaattcattacnncatcctctcggagagtcaccatgcctctacgagctgagtggtgccttgatatattctggcaa

SEQ ID NO: 155881 - DNA, 611 bp, Cannabis sativa
ctcagattatttaattttactccctcctgtacagattctaggtcattcacctacaggtaagtgtaaacctgatctacctatgaatgacacggggactaggtcgtgaaacaacaatatgcacaaaccatgatcaatgtggctctcatcagtataaccaaaaccaggcaaataataagaataacaaaagaacatatttcctttatttttcctagaaaattcgccagcataacaggtgtattttgaatgaacccaaaaatcataacctgcataaatatttaatacaaaaaatatttttggcactcagagctcaagaacagtctagaaaattttgcagattaagtttttaatttttcaaacaatttgcaaatcataaaaattagaaaatgtctaatgttattcaacacatataaaatcaagttcaacaatcaagttgagtctctacctatcccaagtcgttaaactttatccaaaaaacaatcctaagctctcaagtcccaaactccaattgtttagtcaaatcttagaaatcactctcatctatactatccattaactaaataactagcatcattgcattctacattcaaaaccgagtccaacgacatataata

SEQ ID NO: 155882 - DNA, 519 bp, Cannabis sativa
cttcaagaatgtggcagatttctttggcctctgcccggcccagttcactcctaagggcatcaaatatctgtctgcgctcttcgtcctctacgcttcccaaaaatggggtatgctttctcctcacgaagttgcctcgttctttgatttgaagtccacccccaagcaaggcaggtcggggtacttctatttctctcaaccaggcttcaagtgattgatgggcacggacaatgcgaccatcagcaagactgggcgttttgctgatgagtacttcatggtggatggcacgggcatcactcgcactcggttccagcagattctgacatatcaccgccctcccctcattcttgctcttagggatagagctcaaaagcttgctcgactaccgggggaagaccggaatattatcaagttgacctccgtagataattttgtgaagtacaggctctatcccaaggacttcattcctaagtccgtgacggggaagaagaggaaatctgttgttgggcgggccgaacgagc

SEQ ID NO: 155883 - DNA, 579 bp, Cannabis sativa
aatgaaattcattaatgataacaaaagcacataataccaggattaaaagctgcgtggtcagcccgttgtctgtaaaatgaaaaacaattccaagcttaaagaccgcttcgccagacatgatgtcttagaaaaggccttatggctgaataagataatataaaaaataaaaggataaaagaagaagtatttaaacaggtggagtcccaggctcttggttcggatcttctgggccggtaggagctggaggatctgttgtttgaacgggtggtatatcagcattttggctggaggtagaagcagtcgcctcagtttcaccataaactactggaagcgcagaacttgaggtacatgtccttggcttcacctaagtaatcgaagtttgcctgaggattagctttctaaaagtcatagaagagctcaagaccagctgtctccaaggcatgaactttctctcccagcctggtcacctcactcgtaagctcctcctctttagatttcttctcctcttccagccgacgaaggaccgctagaagggatgttctgttggaaatattttaccaggatctcgatttactacca

SEQ ID NO: 155884 - DNA, 601 bp, Cannabis sativa
tttatggcacaaaacccaacaattcctgcagtggataacttatctgcagtcgacccttcatcatgtagtttccaagttggtttgtcttcactgttacttggctgaggtatttttacttgctcggggttgttttctgatacactttcttccttgcctgtgcattctactacaaaatctgctaagggctgacccttaattgttgtttggggttggaagataatctcatattggtccaactccactgcccatttgagtaaccatctagaggcatccagtttttgtaatgtttggcgtaacggttggtcagtgtatacccgaacagggtgagcttgaaagtagggccttagctttcttgttgctaaatcaggcagtaagtgagtttctctatcaatgggtatcaaccttcagtctcaatgagtcttttactgatgtaatagaccggatgttgaatgttgttttcctctctgatcagcatgaaacttacaacatgctccatgacagcaaggtacatcccaagttcttctccgtctagaggtttcgagagtacaggaggttttacgagttacgtttttagctcttgaaagctttttcacattccttc

SEQ ID NO: 155885 - DNA, 632 bp, Cannabis sativa
  modified_base (26)..(27): a, c, t, g, unknown or other
  modified_base (54)..(55): a, c, t, g, unknown or other
  modified_base (81)..(82): a, c, t, g, unknown or other
  modified_base (110)..(111): a, c, t, g, unknown or other
  modified_base (138)..(139): a, c, t, g, unknown or other
atatgcaaggtgactgcccgaacaanngcaaggtgactgcccgaacaagactcnnaaggtgactgcccgaacaagactcannggtgactgcccgaacaagactcagaagnngactgcccgaacaagactcagaagtcnntcatcacctgacatcgatcttattttagacatagcagccttaccttttccaaacacgggaggggatggccgaacaggtgaaatgggctcccttatgcgaatcgcatattcaacaggcctcggcggggtcgggagtttcttcttccttcttagtggagtcacctactcttcctgagcctcatcttcaggattcaagggctctaagcatactgcttgcccttgcacctcccttcaacttagcttcgcgcttaagttgaatgagttcattctcctgatgagctcatttgatccggccagcaccagatttcctcttcttccctgtcacggacttaggagtaaagtccttgggatagagcccgtacctcacaaagttatcttcggaggtcaactggataatattctagtcttcccctggaagccggtcaagtttttgagctctatccctaagagcaagagtgaggggagggcagtgataggtcggaatctgctggaac

SEQ ID NO: 155886 - DNA, 576 bp, Cannabis sativa
tcccattacccatgactcaaaacaagacaaaaccaaagaaaaaagaaatcccttttaataaggcatgtcatattgtaatagtataatagttataactaaccacatcctaataataataaaaaaatttagaaagaaaataaaaagaaaagaggacaaataataataataataatcaatggtgggttttgatgcatttatcttttttctcatcaaattttttctctctctaaaataacttaataaataaaaaaggtgtctataatgaattgtctcaaccagcacaaaaattaaataccattaactttaccaaatgaaacaaaacaaagtaataagtattctaacttaaaaaagaaaaaaaaaacgggtcgggcctaacccgacctgattatctcgagtagggcttgacccgctaggcctaaagaaggagtcgggccgggtttgtggaagctcataaaatgttgttctttaatcaagagattttcgatctccattgttggtcttacaatagttatatgtttttaatataacttcgagacgctagacttcgtcccacttatggatggttcttcgttgaaa

SEQ ID NO: 155887 - DNA, 736 bp, Cannabis sativa
gagctgcgagtagctggtttaacaagtttactcatcattcaataacatcctgggagcagctgtccagggatttcaagaaacaattttaggtttctagggataggtgacccgaagcggcctcgataaccaatataaagtagtagcccggtgaaacacttaaggcgtacttaactcgttttagcacagctgcggctagggttaggaacttggatgacagcacgcaatttacagcccttcaggcagggatctctactgatccattgatcgcagggggcgagttgtaggatgacttacaagggcgtctagtgagaagcatcactgagttcaacgacagggcttaagtgttcgttcagaaggaagaagcctgaaaggaaatgaatctattgaaaacaagcttgggaggaaaacccagcaatgtttcaacaagagctatttccacgagaattgataactcgggagcttctggtttgaagagaaaggacggagttaaggagctgtcgaaggatataaagaaacagaagaagcatgataggtatgtgccagtgtatactatttatatcgagcttaatgaaactcaggagaatatttacctcgcacataagcagaaggtggccttcgacaagcccgagcccatgaggaattccaggtataagaggtatcctgacaagtattgtaaattctataaggatattgggcatatgaccgacgaatgttgccaattgaaagatgagataga

SEQ ID NO: 155888 - DNA, 599 bp, Cannabis sativa
attattcattaagtaatattaacagcataaatgctatataaaaatatttatcattcaatatttacttatataaatatttaaacattacatacttatacaaatttgtatacattttaacattcacataactaaataaataatcatgagatcttccatacaaaaaaatcatgatatcttaatttcttacaaccaggttatctctcaaattctgtataaatatataaatatatactcttacaaaaattacatagaagtgtacaaataaaaaatattttctcttcaaatccaatgcaatatcttctatatcacctgcagacaaaataaactttatcatcatgaaagttttattatattattaaaaagatattataaaccaataataaaaatttaacactaaaaaaagaaaagttcactaataatttgcaattggtatatcactgatcagctatataaatactggaaaaataaacttaggtctatataaatgaatctatatataaatataaaggaaagcacaaaggagtctaggtggcatcttatatttttttttattgtatttttaaaattttgtgacaatttcatattttgttaagaaataa

SEQ ID NO: 155889 - DNA, 595 bp, Cannabis sativa
atgcaacataaaatgatttttgattttttattattagtaaatctaattatattgaaatgagttatatttagggcatataatctcaacaaggcggaccagcttttggggtaacccctatggccggccagaccccatgataaatactcatggatggctaggtcttgaacaagacccccatgggcggccaaggtgcatgtcagatctaaacgcgtgtttttcaagaactcgaacacgttctttatgactcaaaaagctaagaattgcaacgaaggtcaaaatcatatattttttgtcaagaaatcacacattatacatcctaagactatcattcagatcaaaataccaaaaagattacaatctaacgagggaatcgaaaaacattcaaagtgaagaaaagcttcatgcaatcatggaaaaatcaactaaaataagttagtagctagaatagaaagcttacccactataagggcttgtttggcacatcttttgaaaaagctaaaagttgcttttcaaaaaagctgtgacaaaaaagtgtttggtaagcagttaaaaaacaacttattgaagaatatatggaaatgctacagctaaaagc

SEQ ID NO: 155890 - DNA, 564 bp, Cannabis sativa
aaaaaaaaaaaaaagaaaaggggagtgttttttgtgcaagagtgggtggtttccttttgtgatcgtgggctagtggttactcaaaattttgaaattagtttcctttttgctcaactctcccatgtttatttaaccaatttttttgtcatttattctcaccacctacccgattctattcctttgtctctcttgtttgtttgttgttcattctttcttccagatcaccatggttagaacaaagaatctagggcatcccaaaaagatggttgaaaccgatgcaaccccctcgaatgctcctcctgttgcttcaaccgtgccttcagctgctgcaaaaataggagattcatcacttcctcagcgtgaatctcagcccaagaagccaaaacgtcttcctaagaaagtggctcgaaaatctgtgcggccatacaaaacttggacctcatcgtcttcatcttcaaaggaatctcctccacctgcttcaatttctcctcttgttgcatcagtaaaagaagttgctgcttctactccaactggcccttccactcgcactcgtgcccagcaagc

SEQ ID NO: 155891 - DNA, 564 bp, Cannabis sativa
ataataataataattaggggtgtgcagaaatctatctaataacaattcatctctaaatgatatttaattgtaattaaattgaattggatgttattttttaatatctaatttgatcgaattggatattgagtagagctttcaaaaattcaatacattcaacatctaatcgaactaattagtattttaatttagtttagatgagtaattaaattttatgtgtatatatcaaaattagaattaaaatcttactcattttgtattggatagatctaatccattctaatacatactaaatctaaaatattagatggatctcatcttaattaaactaatagatttacatgaaatacatagaactggtccaatccaacatctaatagatattagattactgaaattaattggatcaaatcggattgtaaaatttaacatccaatatataattgaatcagatctggatataaatactcttaataataataatttgaggtaataggaaatgagtaagtgttgaaagatatattgatgtatgaatcaacctaattcaattataattatttaact

SEQ ID NO: 155892 - DNA, 890 bp, Cannabis sativa
aggagtaggaaaagtgggcgttccaccaacattcggagtcacttggggctcctgaagaaattttaccgcaccctcggctctcagagctttttctaccatttctgcataggtggttgcttcattggtactgatcaccagatcatgtctaatcttcacattcaaactggccaagtaattttctttcttgctgaaatttgttgacacaatacccgtgacgagcttggtcagacgatcaaactttgtagtatattcagtaattgacatcccctcattttgtactaattcggtgaactcttttcgcttagcactgcggaccgctttattataatacttagcattgaataactctttgaactcctcccaggtcataacagtgacgtcccgagtgagggacaccaactcccaccacacgagagcgtcttcctggaactgaaaagtggcacaagtcacccgatcatttccaagcacccataaaattcaagattcgttcaatcaccgtgagccactactcagccttcatcacattaggaccaccctgagctctgccacggccacgggtgtgaccatggggattttagggaatttgatttccctgaccgcctccagtctcaaccatattaccctgacttcttgtattttgctgggtgtccatttcataggacttagcctgcgaacccataacccaggtgggttagacaacgatcataaaacttaataccgctcttatcaatttaaaggcagcacacttaaaataaataattataatctaatatgcttcctatcatgctttaataatcatttaaaagactaaataagcacgggcttactgaaccgtaaaccgagctttctctgatgaagattgtacgtgtcttggcaagcttcggtagaca

SEQ ID NO: 155893 - DNA, 527 bp, Cannabis sativa
ctttcttccccattttcattttcatctgaaaaacccagccccccctctctcgttctctctccgattccctcttaatctatctcaatctctctaaatttctcacaatttctctttatctctctcaatccctctttgtttatctcttttttccccaaaaaaaagaaggtctgatcaccactccgacctcaccaccgccggccgcaccaccgcaccactgccgactgcaccaccgcaccactgcatcaccgcccaacgcaccacctgaaggtatttttaaattttaatgtattttttaaatatttagatatatatatgtgtatatatgtgcatgattatgtatgtatatatgtatatatatgcatatggtagatatgtatgtatatgtgtatgtgtatgtatgtatatatttatatatgtgtatatgtgtatatgagtatatatacgtatatatgtgtgtatgtgtatatatgtatatatgtgtgtatgtgtttgtatgtatatatgtgtatgtgtatgtatgtatatat

SEQ ID NO: 155894 - DNA, 747 bp, Cannabis sativa
  modified_base (35)..(49): a, c, t, g, unknown or other
  modified_base (255)..(264): a, c, t, g, unknown or other
tgaggagccgtgagagcgagcaggtgaagattgtnnnnnnnnnnnnnnntaggcctggagcgtacgatctttcggacatcgaggcttttactgtatagttgctgggcgaaaaacttttgtttatgtgtatagcaaacttttaaaaagtattttgtaaacgggatcccggaattttatatatgtactactttaagtttattaaataaataataaagttttaattaatcacatttttcaataacctcgttgattagnnnnnnnnnncacagtacgtttaaaaatcacgttagcacgcctatgctagttatggagttacaatttggtattagagccaccaggttgtctttggaagatcgtcacgacatgtacaatcatcatcagcagtcagctcgtttcacggttcagtaagcttttatggctttagtagtttattttttatagtatgatttaaaaaagcctgataggaagcatgctagtagcctgatagtagaatatgcgcatgttttaatttctaaataagcggcattagtaagtttttctttgatcacgatctgaccaaactagctcttggttacgcaggctgttctaaattagtatggacgctaggcggagtaccaggagcctaggtaattcggttggatgtagtggaggtcagggagcttagattcccgtcaatatccgtggccgaggtagaggtcccaggggcagggcacgtggtcggggtgatgttaccccgcctcaggctgc

SEQ ID NO: 155895 - DNA, 692 bp, Cannabis sativa
gttcctcaaccggaattctggttcagtgcaggaatgaccaaaattttcataacttcaccaattcaaccccaaacttaaagaaaccttccagactggctatttagaccatacacaacatatctaaagcaacaaaacaaccatccacgctcagaaccaaaatccaccattaatgagccaagcttgagttcaaaaaactcaaagcttgctcaaacaacaaaccagccaacacaacaagctttaaacaacatatctaagcataattcatctactgaaaacaacaacaaacacaagcagcaactacagcaacaaaaaatcccaaaacatgcataataccaaaacttaacacccaagaaatcaaaaagaaggttgctaaagactttaccttggcttggatcacctaagacttactggaaaaacatgagttgctgaagaaataatcccaaaccctagctagttctagggatgtcgagagagagaaggagagagttgagtttgagagagagaaaatgagatttttggcaattttctattatttgccaaataatgagatattattgattaacaaactaatttagcttaatatcaactaaaacatgatttaatacatcccacaaaagacaaaatacaacgtagcaaattgatcattttgccccttaaacactaaaactcactaaaagggtattttgggaaat

SEQ ID NO: 155896 - DNA, 548 bp, Cannabis sativa
  modified_base (174)..(177): a, c, t, g, unknown or other
aatcttccagaatcatctggttttgataaaacttgtctcaagggctgatcggttaacacttttatggggtgagcctggaagtatggccgtagtttctgagacgcatggacaacacataatgcaacttcttctagagggggatacctggatttttcccctagtaaccttttactnnnntagtaaataggttgctggtgcttcccctcttctcgcactacagctgcactaatcgcatcttctgagatggttaaaaaaagaaataacgtctcttcagttattggttttgccaaaactagaggcattgtgagattcctttttatgctttgaaaggcctcttcgcactcttttgtccactcaaacattttgttgcctcctagtatgttgaagaacgacacacatttatcagttgacttcgaaatgaaatctgttaagtgccgccattcttactatcagggcatgtacttccttaggcatcgttggggatggcatgtttgttagtgccttgatctttttaggattgcctcaatacccctcgtgttaactatgaa

SEQ ID NO: 155897 - DNA, 728 bp, Cannabis sativa
tagttcaacataaaattttgaattcgctataagtggataaataagcgtgatttttaaattacggagatttatatagtatgtgtgaatgtaatatgaactatatgtggaattaaaatattttcaggtttgggaaccttggagactcgatcggggcccagaaatgtcataacaggcttaattgatagaattaatgggattattttgataatttgataatataggtattggggtaattaggattatgtagaatttaatgtagcgccctagaagtaaaagtttcttagtaactaagaaatgataagataattattaataataaaatttttattagtattattttattattacaatattattaatatattaatataataatataaacgtaaaaaaaagtaaagtagaatacgttgtagatattaagttatatatataacttaatcagagaacgaacagagaacgaaccctcattcctcccctttcaaccaaattttctctctttatattcagtttcattgatcttcaatccaaaacttagcgatctaagctctagtagtagtaggatagcgaattctcagagcggagaagcttaaggtaaggtttaatttcgttttaagttaaataataattgttttcgtataggagttttgtgaattagaatagttatgaaggttctgaccttataggattattctcgggtagtcatgggactagttctgatgtttacttgt

SEQ ID NO: 155898 - DNA, 542 bp, Cannabis sativa
tatccccggtctgccaccccgacctaatgggagagtggccatgatctcaggaggaccccatatcggaggaacaacccgcagagaattaaagcggtacgcaggggccgtgatgtacaatgagatttgggaagttactcaactcccagctcaaaggccccggctgatagatcaacccatcacattcacggaagaagacgtcaagactgtgtgttttccccaccatgacccggtagtcatagagacccccatcgccaacaaagtggtggccaaagttttgattgacaacggaagttccgtgaatctacttttcaaagaggcctttactgcaataggcctgacggaccgagagctctcaccaagtggttcccaactcacagggtttaacggaacgacgcttatcccaatggggaaagtgagacttcccgtcaccttgtgcccagacacccccgagagcacgtttaaatattgcactttcgtggtggtagactgcccgaccgcatacaacgcaatccttggccgaccggccttggtagatttcggcg

SEQ ID NO: 155899 - DNA, 897 bp, Cannabis sativa
  modified_base (196)..(200): a, c, t, g, unknown or other
aaagagttttatttagggcataaaacctaacataaacgacataagctcgtgcccagcagttgcatccactaactggtcgatcctaggaagtagaaaacattcttttaggcatgtcttattcagatcggagaagtcaatacaagttctccaagttccgttaggttttgggacaagaacaggattggctatccacgannnnnaaaatacctcgcgtataaaatcattgactaacaacttgtcaacttcctattttagtgccccttgcctctcggaatctaagggcctcattttttatctcttcgccaggtagtttggactttggatcaatatttaagtgatggcaaataatcttagggtcgatccctatcatatccccatttctccaggcgaattgatcctggttcactttcaaaaagcttattaagtgctatttgagctgctcgtacaggttcttcccaatgtacacgcattttgtgggatttcctgggtcgagaataacctcttccaattcttcaattggttttagcaggtttctttcatattaatctcgggatcaagatcttcctctttcttctcgttttctcctgccaagatcgtcatcactaatgatcgacctttctatgctacaactctatgcgatagcaagccagcatctggtcgccacgcactactcccatgccatctggtgtttggaactttaaagataggtgcttgatcgaactgactgcccctagtccgatcagtgctggacgacccaacaatatgttgtaagtcgaaggtaggtcgacaacctataagtcttgcataatagtagcagttaaaggtgcctcgcctaaagttaatgcgagctcgattatgccaaggctagcaattctatccccggtgaatccgcaaaga

SEQ ID NO: 155900 - DNA, 1158 bp, Cannabis sativa
tgtgtagaatgatcacaaaataagagttgcaaatcctttaaattgatgaccacttgaatatataactcttacctctttttcactcttaaattagtaaaagatgttactaattgtttatgaatgtgaatgtgaatgaatgatagctattgaaaatattattgttggagacttgatttatttatttataaggtgtataaatgattcaaaatcaagtgggaatgatttgaaaaactttggagaagaattggccaaagctgaaaaaatagttactagtaactagtatagtttttttcagcatacaattgcatacgtttttgaaagtttgagagtctttataatagcccaaaactcctccaaatcacccaattaatactataaacgctcaatttatgattggtaacatccaagggctttatggtggccattatgttcatatgagagtgaaaactctataaataaaggccatattattcacttctaagatctagtttaaatcattttttgtggttagaaccttgtgaggatatgctcatccttagatactaggctgagcatatgagctaggctagataaatccttaagagtatttctagagtttccctaagtgtccatatgagggaggaaatgacttttaggacaaaggtccttgagccttggtcaagttttttgtgtgttatttttctttttctttttctctagctttcttgtaatcctgatgaaatatttttatttgtattttgtagggctgtacatcggtcggtttggccggtttatcctatatatttctaacccaatctaaagttcaggttgctaaaatttaagtgcaacccacccaatttaaaaaaaaaaaaaaatctataaactgactaacagtttgatcggtttggtcgggttaactggcccaaatcggccaaactttttttttaaagtcaaagtcaataataatgatgaagttttactgttttatgcatcatcatccacactcacttcacatccataactacaaaaaaaaatatatatttgtatatatgaaccagagactaaaaccaaaacttgatacaaatagctaggaatcaatattattaaaatttgagaagagaaagagagatgaaagtggttcttacagaaaaaaaaacaaatgagagagagagagagaga

SEQ ID NO: 155901 - DNA, 786 bp, Cannabis sativa
tctttctcgaccaaaagatgaaggtggcttaggctttcgccttctccatgactttaacttggctatgctagctaaacaaggctggaggttgctgtgctatctggactctcttgtatccaggctctataaagctcgttattttccccatgatgactatctctctgcggggttgggtcgaaatcctagttttgtttggcgaagtatctggagttctatggatcttcttcgccaaggggttaaaagaacaatcggtactggctcttctactagtatcctgcatcatccttggctccctgactctggtaatccttacatcacttcttctcatattggtcttattggtcacaatgttagctcactgttttctattgatgaaagaagttgggacaccgatttggttcgagatatgttcaatgacagggatgctaatctaattttaagtatccctcttagcttctcagcttcttctgacttctggtcctggtctaatgaaagctctggtcaattctctgtcaaaagtgcttatcgtatcctccaagcttcaaaagaccccagaactggtagtaacaattcaggtttttggcaaaacctatggcaattaaaaatcccaccgaaggttcgtaatttcctttggcgtgctgcatctgggagtttgccgacttgtgtaaatcttagaattaagcatgttgatgttccacctgtctgccctgcctgccgagctgctcctgaaacaacctcacatatcctgctttcttgcacttttgcttcttcttgttggcaccatat

SEQ ID NO: 155902 - DNA, 613 bp, Cannabis sativa
taattttgatattatatagtaataacttcagctttatattgctgaaaatttctttagggatagggtttggattagattagaaattcgaccatcatcgtatttgaggattaagaagagaaagttttagaattaaggtaaaaaaatattaactaaaataaacccttaatgtattgttatgttctctcacgagttcttgccattcaaaaatgaaaaagagatgacaaatcaatataatgaagaaaaagtgtacccaatagaatttttgataaaattaataaaaaatatatattttttttttacaaaaataaaaatatagattcttataattgttctatttgttaggatttataaaacattcaagaatttataataattacagatctaaatatattcttaaaatactttaatatacaaaatcttaaattataaatctatataatctttgttaaattaatgaataataataagagatgaacggaaacactaacctgaaactattgttagagattgcatagaagattatgatctttcaagaagacactatctttctaaagtattttctctgataaggaaagagacaatacagaaaccctagtgtttcttggggaccact

SEQ ID NO: 155903 - DNA, 565 bp, Cannabis sativa
aaaccatgtgacaaaccagattgtattaacatacatctggctttgtttggaatggttctattcattctttctgctacaccattttgttgtggtgttaatctgattgttctatgcctttgaatccatgtttctctgcaaaacatgtcaaactcattgttgtaaaattccagaccattgtctgtccttaggtttttaatttttctgttagtaagattttgaacaagtgttttccaatgtataaaccttttaaaagcatcatttttattcttaagtggaaatatccatacctttctagagaaatcatcaactatagacataaaataagtgttacctccatgagtaggtgtcttttcaaggccccataaatttgaatgtatataatccaatatacctttagatttatgtatccctattttgaacttcagtctgtgatgttttccaagtatgcaatgctcacaaaattccactttgctgattttatcttttcctagaaattctatcccgaaatgatataaatccccaatcttagaaatctcctacttgtatgggcaaatcaacttagagt

SEQ ID NO: 155904 - DNA, 516 bp, Cannabis sativa
cggtttttatgaacacacccctagtcctaaatgatttgaaaatttgaatttatatacatacatttggtgcatattaaattttttgaacacaattttaccaaaattacaaaaatggacacactttatattaatactgtaacgctatgttccacagggacgccatgtgtgtgcttttataaaactattattttactaatttgtataattatactaaaaagtgtggctagttaaatttttttgcaattaaaataaatgcataatttttataaaatataagtattaatatttacgagatcccttactaccaaaacatttacattcgaatccaaaagtgctttcacaaagtacgtgtatacttcaaaatacaatcaaaacggattatcatgtccatcgggtcgtggcaccgcagctgatatgtacattactgctgcgacctcagactcatggctgctcaaccttggcattccctttacctgcactatttagcacccgtgagtcacagagactcaacaagaa

SEQ ID NO: 155905 - DNA, 530 bp, Cannabis sativa
tgaaaaatacttatgtttctttatggatgttgaataaaatagattacattgaaatggagttttatttagggcagaaaacccaacaacacagacacccgtactataactaatatcaggacaactagtagttaaatacaataaactaccaatcatactacgataaagagtggtgtctacctttgctccatgttcatcttttgtcaattacaaagtggtgctctttggagtacttacctgtttagccgttttaaggccagactttttgacaagattcttgccatactttgagacacgaatgttcctccttccatttgtctcacttgaatccccaaaaagaatgtaagttcaccaaccacactcattttgatctcattttttatttgattaacaaacacctgcatttcatggttagatgtagatccaaatactatatcatcaaaatatatttgagcaatgataaaatttgattttatgtgtttgatgaaaagagtcttgtctacactacctctttgataatcatgagaaattaa

SEQ ID NO: 155906 - DNA, 500 bp, Cannabis sativa
ttttttttttttttgtaatagctatacgtagttgttgtactttgtagcagtgttctctcttttttttttttttctttttgtttgaatctatgtaatatatataactatgtaccatgcatattttttgtaacagctgtacgtagtttgctccactttatatcactattctctttttttttttaatctatgtaatatatataatagttattttctttttataagtatatgtttgtaatatatttatatatattttccctttttttttttttatataaatcctcttgttcaatcaaatcaatctattctcacgtctcaggtatatatgtatttattcctgacagatttgtctgctgacgtttcaattttatccttttctcaaatattcttcttgctctactataaatagaagtttagccagacatatttttattatagtgacatgtcttcttctatgagttcaggaaagaaaatcatggctgataatacacttgccacaattc

SEQ ID NO: 155907 - DNA, 704 bp, Cannabis sativa
tttttcaatccaatccaattcgcacaagtgcggatatctgcattttgcggattgaattggattggatcgtgcggattggattggatcggatactttgtgaacacccctactctcagctgattgtatacactactacaaaaattcctttttaagtccatcaaagttggactagataaacttttccagtctattttgtgttggacataatagcctgggacataaaaggggtatttttctagtccaacatttttggactagaaaaatatttctagtccaacatttttagactaaaaaaatatctagtccaaactaaaaactgtctagtccaactatgctggacttaaaatttttattctattttttaaaaaatatatatatataaatattaaattatcaataaatataaatattctgaaatttaaatatatattaattaaattaataaaaatagtataattttaattttaaatttgaatttaataattgattgtaattatacaaaatttagcataataacaacattataacacgtaaaagtacaacagaaggaatatatataactccaaattaaaaaaaaaaaagattcaaaaaagtgggattcttaagtataaaaaaccccaaacttcctgaatgcaatatataaaaaataatacaatctggattcaagcaaaaaataaataaataaataaataaactccatattc

SEQ ID NO: 155908 - DNA, 506 bp, Cannabis sativa
gtataatatgtaaatgaaaaaaaatattaataaaaaaaaaaaaaaaaaattgggttgaaagacttaatagttttcttttttttttttgaaagaaagaatgtcattcaattaaagtaaatccgctgttacaggaggaccaataaatataggataagcaactgtccacaactgaactcctaaaggactagtaacagacttagctagtgcatgggccacaccattcgcctcacgcggaatggcacagcaagaaccaccaccaacagccgctaaaagagaaataatctcctcaacaattggcttaaacataagaatattattcggacaattaatccaagaactaacaattgaagaatccgtctccacacgcaccaaagtgaaccctagcctgttagcccaaacaagacccgctcggagagccataagctcggccaccaccacttggaaatcccccacgacgcccatagcccaagccgcccacaccaccccctcaccatcacgaatcacac

SEQ ID NO: 155909 - DNA, 530 bp, Cannabis sativa
  modified_base (313)..(313): a, c, t, g, unknown or other
  modified_base (476)..(481): a, c, t, g, unknown or other
tttgaaaatcagaaaatatcagggtgacatcactcaccccatgcgtgcggatcctcattttctcggtcgtgtgcaggttcggatagccttatgtctgagatttctcggtctgaaggcgccgagtgtgtctagatgctgggctccacgcgcggaaatgctgctggcagcatccgtgggcgtgtttgagccccatctgcccgattgcatgcccctggatcgtatgcattgcatactgtccataccacatgcaattttttcgaatttcttcattttttcatgcttttttcatggaattaatttccgattttttgtntagttttgtattttgatttttaattttcatgtttcaaatctaattatcataatcaaattaattggattttttttaaattaatttaagatattagtgtaatttgaattaggtaaacatctatttttttttgcttaattaattattttatttttaaaatttgatnnnnnnatcttatttttaaatttaaagttcgatattattttttttaaaataaatt

SEQ ID NO: 155910 - DNA, 1006 bp, Cannabis sativa
tgcaagcactaatgatgcatctgataaatcggtcattgtttctgttgatgaatttgccaagttattgaggtatcaagaatcacttaagtcttaatctcctatctccttctctcactgctcactgcgatgcgattgcattgccgattcaggtaactctaatgcatgtcttctttccacatcctcaaaattgatctttgattctagtgccacacattatatgacagataattccagtatcttttccatttttcagtctcatagtcccacttctactgttaccttagctgatagatcaccatcttctattcttggatctggcactgttgctcctacacctctgctcactttgtcatcagtcttacatttacctaatttgtcttttaatttgctttctgttagtcagctcactcgtaatctaagttgttgcatctcattctttcttgatcattgtacttttgaggatcttatgatgaagaaggttattggtaaaggacatgaatctgacagcttgtatgttcttgatccacttccaccaacccctattgcttgtctgagtgttgcttccgcttttgaggctcattgtcgtttgggccattcatcccttcccttgctgaaaaaactttgtccccaatatagtaaggtgtcttcattaaattgtgagtcatgtcagtttgtcaaacatcatcgggttagtttgagtcctcgagtcaataaacgtgctagtgttccttttgagttagttggggtccttctcctattctgtctaaacttggattcaggtatttttgttacttttgtggatgattattctcgtgtaacttttttgtatttaatgaaaaatcgttctaaattgttttctatattttgtgctttttgtgctgagattcaaaattatttttatgggtttgttcgtactttgtgaagtgataatgccaaagaatacacatcttctcaatttcaagcttacataacctctaatggaaggcttcatgaaacttcttgcatt

SEQ ID NO: 155911 - DNA, 588 bp, Cannabis sativa
ttgattgacttaaaagttcttatataaaaataaaaacaaaaaaattacttatcctaatttttttttttatcttaaataaatattttcccaattatttctttttttaaattttatcaatagctacaaaaaattagagtcatcaaaattatctttgaccctccctagttttgatggaaaaatacatgcatcctacctaaataataaaagtatttttgactgatattttatctcaaaaaaataatagagcaatatatatatttgtacatatatattttcatgttctctttctctctttatatatatatttatagaattaggttattgttatgcattgcatatatatttagttatgattttagtttttatttttattatatgtattttaaaattttataaattaaaaaaatcacttattaattttttaaaaattaaagcaagcttttaaaatttgaagaaaataaatataaaatttaaaaatattaaaattaaacgtactcctattaaaaataataataataaataataatgttataaataatatattaatatttatataaataatattaatatttttatatatttataaaa

SEQ ID NO: 155912 - DNA, 620 bp, Cannabis sativa
  modified_base (578)..(587): a, c, t, g, unknown or other
aatcaattaactgagtctgcaagtcgtattatctcaaatagtgaggggaccatggcctatataaccgagcttccaataagcagatttagaataagtggttaaaaagataagttattaaataaaatagcaaaattaaaacctatagggcccacaataggttcggccacttaagggttcaattaagccattttttttaattccatataattctaatcctaacgctagatgaaatcctataaatagaaagagacgactcttattttcctaacctattaatatgatacctactcattactctcactcaacaacaggtgtctggtttaatgcatttaagagcatacataagacctctcactgttgatcctaagaaattctttctttggattttatcttttctataatagttaaaattgttccttagataattaaaatctatgttaaggagccaaaaggttccctttaaaattagccattagataaacaaaataagatgcaccttgtttttcgatagccctccatgaaagaactccacagttaaacgtgcttgacctagagtaatttctgttgggttttatgcnnnnnnnnnnactcatttcaatataatcaaatttgcttattaa

SEQ ID NO: 155913 - DNA, 531 bp, Cannabis sativa
attaatataacataaatattcgctataaatttaatatagttcatgtatatatggatgtactttgaatgggtattactcatgaatgggtaaaattagaaaattttgaatttttatgtttaatttttctatctaattaaaaaaatctcttatttttatatcaactgagattgttctatcggtaaaaaaaataataaaaaaaaaattagcaagaaaaataagaaaagaaaaagttgaatttgagttaaatatttttgtatgaatatatttttgatataatgtaaaaagaaatattttttgatatatttttttaattaagtagttaaattaaatatagaaatttaaatttgtgatttcattattcgttattagatcaaaattcgatagtttgataattttaaaattaaccattcatggataatacctattaagaagtattatatagcttgatttcttatcaaatatagttaataataatacacccgaatttctttttgggctcgtttagaacaccgtattaggtcgtattgtatt

SEQ ID NO: 155914 - DNA, 1013 bp, Cannabis sativa
ttggattcttgttatctttatgagaaccttttgaaggtgatcgatttacttggattaaagggcgccacaatgtcaatgctatcaaggaacgacttgattggtgtttcattagtgatcaatggcaagattcttttcagccgattacaacaaaacaccttgactactacaactcggatcatagagcaatttctgttgaagtagttcccctggctgatcgaaagcatgaagataaaagactgtcaaggttcaggtttgaaaaaatgtggttgtccgactctgcagcaactgaaatcattcaacaaaattggaaaaaaaacttgactggaacaaccgtagacaacttttgcactaatcttgaggcttgttccaattctctccaacagtggcatcacaacaaatatggcaacatcaagaagaaaatcaaagctgctcacaaagaagtggaaatcctgaataaccaacaagtccgaactaatgagtccatgtgcaatatgaaaaaaatggaggatactttggatgaattgttatcacaagaggaagtatattggcaacaaagatctaggattgattggctataatgtggagatgagaatacaaaagaatttcatgcttatgcgtcttcaaggaagtccaacaatacatttaaaatgttgcacaatgatgttggtgttgcagtaggttcaaagcaaggaatgactgaaataatttgcaccttttttggtgatttattcactgcttcgggtaccaatgtagcagccttgcagcaagtgttaggttatatttagcctatgttttgggtctgaaaagtaagcattttctcgtctattggtgtcttttggagcggttttacgcttgattttcattgtttcaggttcccggggtatcaaagttcaaatccagttaactggtgaaaagacgggacaaattggcaaaaaaatcagagaaatctgctcaagagacgtcagtagtcgcgaccaccaatgagccatgtcgcgacccttttctgtggtcgc

SEQ ID NO: 155915 - DNA, 544 bp, Cannabis sativa
cctatttgctcaacgtatgtagcaatggcaggttccatctgtttcaacacctcaaaatgtctatcatattccgtcttgttccatccgtaagctacaagccatatttgctggttgcaaacatcagtcttgagcttgtgaatgacatttatagtaatatggttgaagcatgcacagtggcatacttatgggaaaacaacctcaacagcatgttcaatgctttgatgcctatccgatatgaacataagattttcaacctcctcattggcttcctttaacttccgtaagaaatacttctaagagtcatgattctcattctcaacaattgcaaaggctaccgaaaataattggttgtttgcatcgtacgcaacagcagctaacagtgtttctccatacttcgtcttcaagaatgttccgtcaatactaatcacaggacaacaaaatttaaatcccctcctataagcatcgagtgaccagaaacagtacttgaaccggtcatcctcgctgacaatgtcagtaataatactcggattcttctgttccagca

SEQ ID NO: 155916 - DNA, 596 bp, Cannabis sativa
  modified_base (47)..(47): a, c, t, g, unknown or other
  modified_base (81)..(83): a, c, t, g, unknown or other
  modified_base (445)..(447): a, c, t, g, unknown or other
cataaataacagtataataaataatttaaatagctataaataatttnataattaatcataaacaactgctaatttccaaannnactaagcgggctttacagggactttggcatgaaaagaggctgctggcagcctacttagggttaaatctgggtcagttgctcattcagacagcgtgtgtccgaaaccgtgtacatgcctttgttcggacgcgcatgggtgtgtgtcaggttgtgatatttgcattcaaattttagaaaatcataactaattcataaacaatccaaattgagttctgtaaaagcataaatttattaatttttcatctaatttccagaaaaaatactttcagaacgaagctaaaaatatttatcattgtaaacgtaatttccatacaatcatcaaatatgcacataaaccaacatgaacaaatccaaatcatcannntcattgttctaaatccatatttcatgaaaataaatcattacaatagctctcatatcagttgttgggaatatttaactaggatctagatttactaacaagtatgttgatgaacatcctaaatatgaatatctctaaaataatgaaattaa

SEQ ID NO: 155917 - DNA, 514 bp, Cannabis sativa
ttgaactttagcatttctagaatttgttctataatttgagcaatgtttctcattatttgggatcagacacaaatttataacttgattggcttgctgggatcgactttcgattatgctggttcagtctcataattaatcttaaataactgtctattttgtgggagtactatgaagagccatagtcatcttttctttgagtgcatttttgctaaaaaagtgcaagttgctatcacctcttgggcatatatgcatgtccttaataaggacctgaaacattgtgtgaaatggcttaaaattttcaagaagtctctcaatgtcgaaggagagcagtctatttagttttattgaatgcccttgtgcataatatttggaaggcccgaaataatgtactttggaatgatcaagtttatagtaaatagtatttgtaaggaccgtcggacaccatctatttctccattggaatgatattgtctgctttgggtcaagccctcacggatttatttttgggcacctt

SEQ ID NO: 155918 - DNA, 546 bp, Cannabis sativa
  modified_base (35)..(78): a, c, t, g, unknown or other
cttatgtgtttatgtcattgttttagagaattcannnnnnnnnnnnnnnnnnnnnnnnnnnnnnnnnnnnnnnnnnnntggtaaaatattcccaacacaaggttccaagggggcagtcagacttttgtcctcttttgatctcgactagggtctcatgacaaccttgtaggcatatacaactgtgatcttatgcgtgggtcccttaggaactctgtataagacttggtagtgagtccattatagtaaagtgcacaacttaagactcactatttttcaaagtaggtatactttagacggtactttgctgatacctagccttgtacaatgtaatttactggaaagtactcttgggtgcacttgactagaactttgtctgtagctttgtcaggttgctcacctcctcttatctcttctatgcaggtaatttcaagtgttgatctggagaggtgacagttgttgtgtctgttgggattttatgccctaaatataacccatatcaatataatctgatttgttatcaaaagaagattagaagtcatttatgtt

SEQ ID NO: 155919 - DNA, 546 bp, Cannabis sativa
  modified_base (26)..(61): a, c, t, g, unknown or other
tttttcatcagattattttgaaattnnnnnnnnnnnnnnnnnnnnnnnnnnnnnnnnnnnnttcaggataaactatatgtattttttgcatttaattaaattaaaaagttataactaattaaatttttctagatacttaattattcgaattttcatagaaaatatatttaagttgaaaatcagttattctaactaatttttggatcaacttaaattagaatattttgaaattaataattaagtagaattttctagaaaattagttattcagatattctttaaaatattttttaagttgaaaatttgttaatttcagatcaacttagttaggaatattttacaaattaagttgattagttcaagatagttaatttgttatttaattaaattctagaaaattatttaagttgaaaattttgctattttagaacaacttaaattaaatattttttcaggtttttattttattatattttcgaaattttataattatttataaatggattttcgaaaattaatttttggaaattaaattaaagttgaaaa

SEQ ID NO: 155920 - DNA, 561 bp, Cannabis sativa
ttggatgggagatttgacagctaaggtcgaagatacaggttgtgtatcttgtgaattggtagcagaagatgggatattatcttttgcaatggtctcggaagtgagacaagggttgatgctactgagtttgagcacaacagagggtgttgttgctgttgttttattaccaggattaggtaatgtgggctggtttatatcagatgagggaatgtcatctgttgtagccacggtttgtgggaaatttccaggggtagtgtggcttataggtgtggtattgggagaggcatctggtgtgggaaatacaccagatcgctgtacgaatggttgagcccgatctaagggctgagaatgagatgttgggagagaaaaaaactggtttatggactggtgtgactgctgaccagttaatggaaaaatgttctcataaaaaacaacatctcgggattgaaatatttgtttggtttcaatgtcaagtaatgtataggctttcatgccttggggatatccaataaagatagaggcacgacttcgagggggaaacttgtgtctacttgaaggtaa

SEQ ID NO: 155921 - DNA, 665 bp, Cannabis sativa
attataatttatgtattattactacaaaaaattaaacttagatatttatttgcaactaatagttaaacttaagtatttataccacaaattactctactctttattttgttaaatgtgcaattgagctcttttaaaattatataaaatagtactttgaattaattttttatcaaaataaaagttaataataattcgatctagacttattataataaaactgagtatatttttgtactcaatggacttggagcctaacactatttctaatgttatactattattagtgtaatttagtatcgactctcatataacttaaaaaaaaaaaatttaaaaaatatttccaactaatcataaggcgttacttataaaaattgttagaaaacactattgcccaatcataaggcctaacactagtgtctagcaccttctcgacatgtcgcgttgcgattgactaacgatattatctaaaaattattatattaaattatatgacacccgataattagctagagtaatatcaatattgacacatataccctttagcatttctcttgaccaatgtaccaataggaatggtgtcttagagcatcaccaaggaggcatcaaatttggtgatgcagtagaattagccctccaacgtaacatcaaattttacactaaattgc

SEQ ID NO: 155922 - DNA, 636 bp, Cannabis sativa
  modified_base (205)..(227): a, c, t, g, unknown or other
  modified_base (475)..(486): a, c, t, g, unknown or other
cattgaatggtgtaacggtaaatttgtccttactcaatgtagatcatctatagaggatcattgattattatgattataatatatggataattcatagcgtatctatatcgtagagcatataaagcgttctatataattgagagtgcaattccaaatctatagtggtgcaaggaggaattagtaagttagagaatttacttggtannnnnnnnnnnnnnnnnnnnnnngctcggttatataggcacatggtatggtccccatactagttgagacaaaattgcttgtaatactcaattagttgattttaattaatcaattataattctaaatcagactatgtcttatttatgaattttcactaagatgtggcttgattgtgaaaaaaaataagattttagggtttctttgttaattaagagacttcgtggagtcttattaataaataatatgaatgataattttatttgataattannnnnnnnnnnnaaataaataattttggcatttatatgattgaaatttaaaaatatggcattgtgaaatattagataaatggttgagaaaaatagtgaaaatataactagtgttgggcccacatatggccggccactatagtcctatttttgctattatttt

SEQ ID NO: 155923 - DNA, 603 bp, Cannabis sativa
  modified_base (367)..(369): a, c, t, g, unknown or other
aaaacaaactcaagcacaactaacaatcacagcaaccaattcctcaatttaccatagaaatcatagtttttgagttaaaaagatccaaacttggttaacccatctaacatgcatcacacctattctaatccactcaattaaacacatttgtactacagaaaataacacataattacagcagcaacaacaaccaaaaacaaagcatgcaaactatcatctttttcttaaaactcaagaaaacatcaagaaggttactagaacttataccttagcttgaattacacatagaatggctgaaaatacttgaattgctaagaaaaactcccaaccctagcagcccaagcaaagccgagagagagagagagannnagagagagagagcttgagaggaagaacttctttaatttccaattttctaactttttgaataaatgataaaatatgaaaaaacctttcctttattttagctatgataaatcaaataaatcaaataattccaacacactaaatccaataaaggacaaaagcttattgggcaaaatggatattatgcccctccaacactaaaaggattaaaaggcacttaagggtatttttgggaaa

SEQ ID NO: 155924 - DNA, 500 bp, Cannabis sativa
ttttaaatgcggagttaggtagcaatccaagtattgtctggcgtagcatttatgaaactcaagggattgttcgaaaaggggcaaggtgtagagttgggatggttctcagattgatgtctttttggatccatggctcccagatgatgataatccaagggtaacatctattaatcctgctcttgttgatcaaaatgttaaagcgcttatggaaactgattcgctggcttgggatatcaacttggtgcatgatttgtttaatgaaagggatgctaatttgattcttagcatttacttgtcttcaagtcgtttatgtgatgcttggtattagagttgggaaagctcgggctacttttcagtcaaatcaatttataagctcttacaagtgagcaaagaattggggacacaggatgataattccatgttttggaatactctttagaagctaagtgttcccccaaaagtgaaagacttgttatggcaggctgctactaattgtttgc

SEQ ID NO: 155925 - DNA, 742 bp, Cannabis sativa
ctggcccccaaaacccaacccgcagcagaccttgcaatcaaacccagaccataccgcccttggtcgtcaaaaagtgcaccatgcacattaactttgacaaaagggaaatcaagtgctgttcattgctccataggtagtacaattggcccgcttaagcttacatctgtggcattaaatttttgaacattaaaccaatcaacataatttaactgagccattgccaccacctcccccgcatcagggtgtttggagttccaaaccaaatcgttacgatgagtccaaattgaccaacaaaccataccagcctcaagaacctcagtcgtattccacgatgccaaacccgcttcaaaccaacttgagaacaacattgcatcaggcgccacagcagtaattggaaccttgctctaacaactttgagcaaaagagcaccgcaccagcacatgcagagtcgtctcaggagcagcaagacagaacggacatgttgcagcaattggaacatgttttatggaaaaatgaaaccgagttgggagacttttggtagaagctctccacatacaattaagaacttttggagggagctgtaactgccacaagagccgccagaacccagagctatctgggatatctctgtttgattttattgattgaagcagagaatatgcactcttaacagtgaaaacccctgacgcatcatgtaaccagtaccacaaatcagaactcatatgactacttagcggaattt

SEQ ID NO: 155926 - DNA, 601 bp, Cannabis sativa
ctcatattttttttaacactgtttccctatcttagaaaaaaattaagagcactcctcttatatttttctctattttacatgattaataaaagtattgttttttggatgtttggtaatttattcgaaattgatttatgaatgagttgcatattttaacaagatttgatgtcttgttgttttttttttattgatttatagctatctttttgttttttataattatttttatgtattttttgtacaattattgtttagtttatgtgtattttctatagtgtatatttttaatttattccacacaattttttagttatatatatgtgcatttattttgttatttttatgtgattttcagaatattttttgttcaacaattatttttagttgtttttattcatgtatatttttttatggtatatatttttagttacttcctgatatttttttattgtatgtgtgttgctatgcgatttgaatacatatatttagtttatttttcttacacattttattaaaatacaatgataagattttttatttttttaattgacacaatgtgcagctgtagatattgtcatattaattgtatattacccattat

SEQ ID NO: 155927 - DNA, 593 bp, Cannabis sativa
aatcccccatatagcaaatgggttaggagaggtcatcatcctcagtttcgttggtggtacgcgaggtatatgtgaaaatctctaacacttatcacatttttttgacaaacttgtgggtgtcattattgattgttagttagtaatatccttgtctaatgatctttttttgatagactatgccaacctgcatgatccccacaaaagccttcatgaatttctttgatgatctcatttgcttctgtagggagaacataccaaagtagaggcattgaataatctcttctatacaatttgccttcaactattgtgtagcgaggcactgaatacaaaagttttcgtgcctcatttttgttagttgggagttgtctgtcgagtagatagttgattataggagtcatccatgtgggttagctatctatcatctcgatatcttccttttcagatatagttggcttgtttagcatcttcactagaaccaagtttagttcatccaagtcattctgtgaggccagtttttttaaggcatcagcgttagagttttggtctcttgggatttgctcgattttaaaataattgaatctttccaagttctt

SEQ ID NO: 155928 - DNA, 821 bp, Cannabis sativa
tcactaatttaattttagtcaaaacagtattgtgactataaacacatttaatcacaacaaattgtgatttttgtgactaatccctgtcactgatattttagtaacaacataggaatgatgatttataattattcaactttttactttttgtcacaagttttgtcgtgactaaaaataaaaaattttatagcgtaattagtgcaagcaaaagcaattaaagtgaggaatcaataagcaagtaaatcattaaaataaggtgaaataaggaagtaatatgtgtcaatttgtatatgtagttttttattatttgagattgaggatcatttgaatgatttcaataaggtgattcttgacttagagaacaatggaattaaggtcacggatgaggatcaaactatcattgtgctaaactctcttcccacatagagctatgaacagtggacaccatgatgtatggtaaagattcattgatattagagaaggtccaaaatgcattaatgccaaaggaattgaatagaaaaagcaaaaaagcaagatgaaggtgttggaaatggcttactaattcaagaaaaattgtccaagaaggagaacaagggttagaacaacactgggaaagataaatcaaaattcaactttcaaagaagatgtttcatttgcaacaaactatcacatctgaaaaatgaatgtccaatctgttatattatttatcaataatataatgtgcagaataaatatgtgtaacaaattaatatgtaacatatgacaattgtcatctttttgtaatattttggagagttacttgttactatgagtaacctcca

SEQ ID NO: 155929 - DNA, 917 bp, Cannabis sativa
  modified_base (37)..(61): a, c, t, g, unknown or other
tttagaaagttcttatttagggtgttaataaacatannnnnnnnnnnnnnnnnnnnnnnnntaaaataatttccaacagctttatgcatccaatcctgtatggtttctcgttaatacatgaggcaacaatttgtatatttttatctcgcataagaccttatagtcagcgagttgcaagtatactctgttatttctacatttaatgagttattccattaaaagtgattaccgttacacgcatcgatcaatattccccttaacttgacacatgtcctccactgaaatggtagccggattttgggtataacaattgccccttaaaaagtgctttttaataattacaaagggtatttttgtcataatcccttttggaaaaacgtgtcctttgattttggcagttgtacggttttgagggtcaatattagtataaatgaaccgtctttttatcttctgcctcactctcaaccgttagatttccaacgtttcgcctttctgtttactgggttttgagtataaaatggtggcttaggcttgccatattccataaactctttgttttggtgagtttcattcagaaattagattgtcatcctcttgccaagttggcccatctaatttcagaaacttattcctcaaaactcgaaacaccaaaatataccaaccgcttttcctctccgtacgttcccaaaaacttcaaacctcagtttaaattggaaacgatggattctaatactgaggatcttccgatcaatccaaaccaaggagatgcagttgatcgttatggacgttcctcacaagagattttcgagggtaagtatcatccctcccaaatggtggtctgatctggattatgatattttttttgttgttgctccattgatcttttatctctgtctctacatgaatggatagatttt

SEQ ID NO: 155930 - DNA, 801 bp, Cannabis sativa
aaaaaaaaaaaaacttaaaagcaagcttttgatatagtgacgctccatcaatttgattgttattaagaaaattattgaaaaaaaaaatgaaaaatagatacaattggacgtttttaatgtggttgtcgtaaggttatctagattttcattcgtatttttgtaaatgacatggtttgcctatcttgttgattctacttttcaagcgatatcatcatgtaatagattaatgtctaatttgtttattaagaaaagtttctcatttttctctttaattaagaaagaaaagaaataaaatagtactcctattgcaacctaatatattaaatctgaaagaattactagtctagatgatgcttatgtttaagcttttagagtcgctccagaactgaccccatcaatcacaaaactgacttatactctgcaagttgcagtcccaacagccatatttttgggaacccaatatacaacacctactgtttactgacctgctgcattaggatctcctgaagggttacacaaggaagaacatatctgcaagatgcatcatgaaatttgaccttaaggcctatgacgtttgttgactggcagtttatggaagatttgcttaggcttctctgcttcccttctcggtttattagttggataatgacctatctaaagggaacgatttaccactttttcttgaatggcagaattcaaggcaatttcaaggagaaaaagggctccagcaaggagatcctatgtctcctcttctttttgttttgataatggaataccttacaaggttgcttagctactatt

SEQ ID NO: 155931 - DNA, 622 bp, Cannabis sativa
tactataaggtctcccaaaggtaacagggtaccaaacctcgaagcataaatatcacatggtttatggaaactttcaattactcaactcgatagataggaatgagtagctcccgagttaaacaatacaatataggaacaaccatttatagataattgacctgtcaccactgatggactagcatcagcattagcttgagtcatggtaaagagtcgtcccgagttctgagtagtattcttttttcagctcctctttcttggcctgacgataatctctgataaagtggcccaccatgccacactggaaacaagtcttggcttgacattcaccctgatggtgtttcttacatttcggacactcaggataagatcaaaatgaagatctacggccttgacagccacctctgttttcccgaaactttctattaccctctaatgtttcgaaagcatcagccttccctttgtgatcagggttaccaccgtcgatccccttactaatattaccactagcaagagggttcgatgttgtggtggaatcctttgctgtctgctcttttgttacatgttgctcagcctcctgagcaattaaggctagctctaccattttcttgtacaaagtgtcatg

SEQ ID NO: 155932 - DNA, 646 bp, Cannabis sativa
atgaaattacaatatacctagttcttatatataaaattagtaaacatctcgtgttttactgtggttctaatgtttgagtttgtatctatgagatctgtttttatttatttatttatttttatagattttgagaacttgaaatttgatgttgtttctattgattattgggattgaaaatttaatttttcatacatgaattaaagtttgccttttcgttttattaattgaaaaacattagtagaaattttatggaatgaaaattttgaatatatgaaaatagaattgaaaaatagcatttaaatcgagaatcaaagtttattgttaatctcctttacaaaaaaaagtttattgttaatctttaaagataataagactggaagaatatggaaatattattttttatttcatttaatatgtatataatttttttttttgaataatatgaatttattttaattattttttattttttcaaattattttttctggaagaattattagtttatatttacatgtgacattttcttaatcaactaacaaaataataaattgagtgttaagtttagaaatttgagaatatcaataggaactacaatgatgacatcaactttatatgattggaatataaaaagaatgcattatgaaa

SEQ ID NO: 155933 - DNA, 542 bp, Cannabis sativa
acttcgattttttcatacttctcctttgattggcccgatgggcccgatgtagggcccgatggtgcccgatgcttacttgattttaaaattttttgtgtttacattttggagttgtccgatgagcctgatagggtcccgatgcatgggtcgatgcccccacccacttaattttgtttttaattttttttctgtttatatttttgcaacatgtatttataaattttgtgtcataatttttttatatatttttttaacatgtatttgttttttttttctctgcagtcttccaaagttcctcgacttttacttccagtgtctgaacattacactggtcgtgttacttggcgagggggtagttggtattaccccaaagtaaaagccaaatttgtggaaatggagttgttggaaagggtgaaggagggatcccctttcaacaatttttttttgagagagagccattagcgttttcaggtgctcttatccatcagctcttcatgcataagataaaatcagataaagatgatgaggtgcatttttatatt

SEQ ID NO: 155934 - DNA, 524 bp, Cannabis sativa
gtttttcgcattgaaagtttggcatcactatctatatggtgagaagtgtgagatttatattgatcacaaaagcctcaagtactttttcactcaaaaggacttaaacatgaggcaacgacgatggttataactggtcaaagattatgactgcgagattctctaccaccctggtaaagcaaatgtggtagcggatgctctaagtcgaaaaggaccagggcaagtctgtgaactaaagaagatttcagcagagttggctgaggatatgactagagcgggaattgaatttgtgattggaaaacttgcccatattaccctgcattctaatctattggaaagaattagagtggctcaacaaagtgaccttgagttgcaggggcataaggagaagttagaggccggatcgacaaaagacttttcactttcatctgatgggttatcacgatacaagaacaaaatttgtgtaccgactgacaaagatatcagacaggagattcttaatgaatctcatactacaccgtactcct

SEQ ID NO: 155935 - DNA, 767 bp, Cannabis sativa
cgctcttccgatctatatttgtttatttggccagctggaagtatttttgtaatattgttaccttttttggttaaaattgaaaaaagcccaaaaataaagtagtttaagttttttatattttttaggagataaattcataatattattttttttaattagaaaatgttgtggaggaatttagacaacgccaaatgaaataatatatttaaaatacaaacaagggtatgcgattactctacccagaatggcgagtattcaaattatggatacatagacgtactgtaaaatataaataacacaaagagaatatagtggtttagtcagattacggttggcttagtccaccgttgcaagggttgttctgtcttgtttatttcatgttgtatcactcctttgtatacaaagcaagtgtcctttgattacacggagattgatttaattatcaatttgtttgtacattgaacataacatttaaatcaataaaaatgtaaatacaataaatgaagattagtttcggcccaattcactaaatacagcaacgcatgcgaccttcatggtacgagttgtctgttcatattctcgcataagctcgcagggtcaagatgcgtgcaagactaagtctagtctaggatgtctgcgtcctatctgagtcgcatatacggacatctggtaacaggtcgataacttaggacatgcgagtccttatcgggttatcaaggacgttgggtcatccggaccagctggctgagtagagaatcgatctttac

SEQ ID NO: 155936 - DNA, 618 bp, Cannabis sativa
tccacacttgagttataaagctttaatttttattttaatgaaatcactataaacaatgattgtcctgtaatgttcttcaagactcaattcgtgtgatcttcctcacctacgatagggtgtgtgtgtcaccagaactgaaccgaacaacttgtggtgaatgtctttcttgaagtagagaatttacatttaaggctctttgaatttattaaatactgctttctagaggaagccacccatgacctcttgccatgggaagacaagcattggtggtaatgatgtattattatataagaaacttgtgagccatcttagaattaacattgagttacatgtttaacattagtgccaatctacagattaggtcctatagtatagactgaagagaaacaacaaaatcatctctacagattaggtcctatagtattatagatacataaataaataaaaagataaaatggaattaacaataagttaatcaaacaaacctgagattatatgtcctaaatgcaacctcattttataaatagatgtggtatgtgactaatcttgttccagtactcctcatttccactctccttggggtcgtactttttagaaaccagaggacacataaagatc

SEQ ID NO: 155937 - DNA, 565 bp, Cannabis sativa
agaaggatgatgtgggtgtggagcaaaaggatggtgaagggacgaaggataaatgggaagaggatgttgatgatgtactgagtgtcccttcactaaatctttcagaagacaatgtcgttgttccaattgagaaggttgtttctgatgagtcgtttgaggatatgaacgtctggggagcagaactcccagctattgtaaaagaggaagttgagcaaaccgtgaaagattattttgatgctgctgccttcgaaagattcaaagactctggaggaaaggtgattgggtcgttcactgtgaacaagggttattcaaatcaacagtacgaattcttccgttacattttctctagcgccaatgatccgaggtaatctcatgtttaatgattattgtgtacgtagttgatattagtacatttatttcgttgttgattatttgttttgcatttaagtgaagtgttagcccattttgggaaggttgaggtcgagcggaggaatttcaaatgcatgaaaccggagttcgatatatcaaatagtgtacgtaaaagttgccatttggttgctttgaa

SEQ ID NO: 155938 - DNA, 647 bp, Cannabis sativa
tatgtggaaaaaaaatatttttttcataaatattaaataatttaatattataaagtaaccaatccaaagtaagcaatccaatccgcacttttacggattggatttgagctattgtgcggattggattagatccaaaaaataaaatccgcacttagtatggattggatattatttgaccaaaaaagtgtagattagatcggatgaacaaccctaaattaggggctcaataaaacaagttagtgttaaaaaagttaattaaaaaattatacaatacaatagtaaaaagtccctacaaaataattatattttaatgtaaaataaatataaatatttttataacaattaaatcccataaattaaaaattctaaattcgtcattactactatgaatgctcactcggctcagctcaactcggctcggctcagctcggctcggctctaccaaagcccatgctgctttttctcctccttttttctgcctcgtggtaagacaagacatgctttatcaaatgaacacatttaaaaagacaaaaaacattgctatcgaaaaagtcctcaaaagttggactgtattatggaatgctcatcctttcattttcttttctttttaaccatttattattctcttctttctctttcttttcttt

SEQ ID NO: 155939 - DNA, 626 bp, Cannabis sativa
tctctctctctctcttttcgaacccttagaccagctaggattctgaagttgttcttcaatccttgccaatttctagcagtttttagtgaattcaagctaaggttagtttctaagcaactctccctttggtgttcttaaatttcaagttatagatttatgcatgttttgtgattttagttgctgtagttgttgttagtctttgaaatatgtttctgtaggtagaatatgtttagatatgttgaattaagcatgtttggttggctggtttgttcattgagcatgctttgagttttagaactcaagcttggctctttaatggtttgggtagttatttcattgcttggaatatgtctattggggtataatatacaggtctggaaggtttggtaaagtttagaatcgatttgattaggttttggaattttttaggatttttggtataaactggctaaccggttttacaggacctgtaaaaccggttacccggatttgctgctgggttccccgaaaaattcaggttgtcgatttgtgctagtttcaggtttttggttggttaattccctgctagtctagggtattaccttgttaagttacagtagatagggttttggtttaaaacctaagtc

SEQ ID NO: 155940 - DNA, 527 bp, Cannabis sativa
  modified_base (293)..(295): a, c, t, g, unknown or other
  modified_base (385)..(392): a, c, t, g, unknown or other
aaaattttaaactattatattgacactttattaaattttaatttatgtaaagtttttttgttcataatatgtaaataatgaaaagattgatattaacatatatgatttttgttattgaaaaatatgaataagttcataccatatttaaattttacatgggtataaatatatagtcatattttatgtataaataattacataatgcactattttttgtaaaataattatatttttacgttcaaagaatttttttttacattttgatggttttccaaaaaataacacgtaaacannntaaaatcaacaagaaaactacataaaagtaaaacaaaaataacatacatataacaacaaattaacaagattacaacataaaaagaccgtnnnnnnnntaaataaaatcaaaaaaatcgtcaaaaatgtttgaaaccgtatttttgtaattttgttgttgtttttttatatttttgtgaaataatcccttttatatattggcaaactcaaaatttaaaatgagggagaatata

SEQ ID NO: 155941 - DNA, 635 bp, Cannabis sativa
  modified_base (52)..(56): a, c, t, g, unknown or other
attataataatatttaattatatatttatttttaaaaaataaaataatattnnnnnttaaaaaattattaatttttaatgtttaatttaaattattattattatttattcaaagttaatttaaattgcttttatataggtatttatttttaagaaataattttacttacaaagtttgctatcaatttttttataatcttattttcgacgtgttaaatctttctgaatttttttaaaaatttacaagatgtcttaaataactttaatgtacacgaccataaaaaaaataaaataaaaatgtccctcgaatattggaacaaataagggtgcataagtgctacaattttagaggggtgcattttagaattttcctacgggctattttcaaaaatatgaaaaaaattattaaggttatgataaatatgacataaaaagtaaagggtgattctacaatgcaccttcttaaaaggggtgtactgatacatccttgacttgttttggtatctagaaaaaaatttagtcaaatttcttttcatattcatgtacattatagctatttaagataacctacaaaattttgagaaattttgaataatttacaatatagaaaataatgttaaaacagtctattttaca

SEQ ID NO: 155942 - DNA, 599 bp, Cannabis sativa
  modified_base (242)..(247): a, c, t, g, unknown or other
tcggagtcctcgtggggctcctccgtattcgaagttgatggtccagcccacgggtcgagaacttactgagggaacggcgggaacctgggctcaaattgtggcgttgtcctcctaaacgcacgctccatgactgcgtcgcgcttttgctcatagtcccacattgcgtgcaatcagtcacacatttgctgctgcactttctatagcaactggatagcattctgccaccccaaacttaattcttnnnnnnaatttaaaattccttcacttccacagccttcttcacttgattctttgcacaaagaaaagaaatactttctcaatttcaccatgataattatttaaactaattatataatatatatctaaattcttttctttttttttttcttttctttcttggggtgtcttcattgattttttttttcttttcattctttttcattttttttttcaattcaatctttctctttttttttctttttcttttggcacccccaaattacaaacatcacgcatccttcaaggagatagaagtcttttctcgattgacctcttctcccccaaacttcactccttggcctttcactaagaattttctt

SEQ ID NO: 155943 - DNA, 501 bp, Cannabis sativa
agggcataaaacccaacaggttccccggcctcactatagcctccaaagcgcaaaggccgagcagctccttcctcctcgacctcagagggactatccagacggacctcgccctaatcctctgtttcttggactttgacatccccctcataatcttcctcctcagcagcaggtcgggcctgttcagcgctcggcatcgtggcatggcaggccacgtgagggtcagtcgcaacaatcttctgcatggtttgttttgtgtgggccatcatcctatccctggacggtggttgattagtatgcctcgcaacagtcacagcaggagtggcaatgggaatgctaaaggcgacagaacttggatggcccacaagaatggtatcagctacgtctggccggaaaatatatgtccaattggatggcaagtaacgtctccaccccttcctgagttcgcaaatgaaatgcctgtagccttcacctgtaatctgatcggaataaaagtggtgctac

SEQ ID NO: 155944 - DNA, 725 bp, Cannabis sativa
attaatttcgtttcaggcatattattttagaattaatgtattttttagcgacgtggcaaggtattattgtaattgagatttattaaagtatttttataaatagtttatattttaagtatattattgaaaaaattactaatttttatttatttatttacttatttattttatgtattgtaagaatacactgtttgctcttcttattttttttttaactttttttcttttccttctctctcctatctttaattttataaagaatttctaagccacgtcattactcggttgaacgtaaaaaatatattattgtaatctatactcttcaatgtgaatatttcaaaatgtagaaagcatatatgttttgctatttctagaattactcacgttatcaatcatatatattaataagtagtaacatttttttaatcttagttaacaattgttttagattttagttaataagattatattatactatgataactaactagttatttctatatataataaatttagattatcaaaatatatatgcatattaagatcgttggagggatatttgttagaccataatatagtatatgtaatatagcatatacatacaatatgaaatgtgaaaaacaaattataaccatatcgataatatatgcaatgaaagatcgatatacctctagccattgatctttgagcttcaatccctgcgatagcttcggtattggagttcg

SEQ ID NO: 155945 - DNA, 766 bp, Cannabis sativa
aaaaatggcctaagtgggaaaaatagaagtctttggcatgatccccccaccgagtggaaggcatcctaaacttacaaaggtgctcatcaaatcctatgagcctacattgggtgtactctcaaacagaggggacatggtgaattactaaaggagacttactagagcctgaagtactggcagctggagcaccagtgttaggaccgggaccaaaggcttgggcctggaaggcctccgatctgtgccagctcccaggcgaaggcctcccggcagcagcctgggccttgatgtaagccaactcttgttccctcctgaagaggtacttctgatatcgctcctctgccgaaatgattatgtccacccggagcgcccttttcgcggccggagtcctgacattcgggcagatgaccttggaaagattaaagtcatccagcgactgattcctggatatcaacttgcccttccgacaattctccgtcgtgaccaagtccccgatgttgagggcctccttgtcgtaagtagagaaagtcttggcccactggaggaacagttgagtaggcgcggtcctcaggtagggagggatcctaacccactcagtgagaagctccgggtggtccatggcctggaagccagaggaaaagaagaagcggtggcggtactccttcacgtgcttttgaaaattataaggtattgggccctcattcaaaggatgggaccgaagtccataaaaaccatctttaaatttgtcccccttcttggggacagaaac

SEQ ID NO: 155946 - DNA, 540 bp, Cannabis sativa
  modified_base (474)..(498): a, c, t, g, unknown or other
atggtcctttgttttttgttaatttttaggcccaatattaggcacaatagggcccgatatatgggtccgatggtcctttgtttttttaatttttagacccgatattgggttcgataaggagcgatatatgggttcgatgggtctttgtttttttaattttttaggcccgatactgggctcgatagggcccaatatacggcccaatggccccagtaatattttaatttttcttttaattttttaatattttaatttttaattttttgtgatatatagatctgaaaactattttttctggtgttttttttgcagtcttccaaagttccgcgccttttacttccagtgtcagaacattacattggtcgtgtgacttggcggggcggtagttggtattaccccaaagtgaaagctaagtttgttgaaatgcatttgttggaaggggtgaaggaggaatctgttgggttttatgccctnnnnnnnnnnnnnnnnnnnnnnnnnagatttacttattaataaagatgagaaataacattttatgtt

SEQ ID NO: 155947 - DNA, 697 bp, Cannabis sativa
  modified_base (315)..(321): a, c, t, g, unknown or other
ataaattataagttagaaaaattatattttatatcattttacttatcacacatttataaatagtattttatatatttaaataacctagatatttttgtagaaattttaaaaaatgcttaatttgagatattttgatatataattaggataaatgttttttgttaattttttattcttaaaataataattgtctagcaagatctattttaaaattaatttatattattattttgattttattaaattataagattagaaaatgatattgaaaacatctatttggttatttttaaatcatttatcttattagatatnnnnnnnaatttgataaaataattcaaataagcctagatattttataaaaaaattaatttcaattttgaattttaaattttgcaaagatatttaggttgtttcaacaatcctaaattttcaaaatagttggttagttaaaataataatttaattatataaatatcttatttcacaatttgttacatggacattgtttgtttatatttaaattatttattcaaaacttaattttttaacaagcctattatttatctaatctaaattattatgattaatttgttggcatatccaattatctgattttaatcatagtttaattgtcaagagatcttataaataatttataacaggtaaattatatatttctttcatctatgtaaac

SEQ ID NO: 155948 - DNA, 604 bp, Cannabis sativa
ttgaacagtgagcatgctatcagtttcgatctccacttttccccagcccttagttttgatccaactgagagcttccttgacacctatggcttccacaacttcaggtagaaacgatcctcggttgcatacagctagagcatccaataaaaggcctgaggagtttcttgcaacaatgccatagccataagagccttccccttcaaagagagcatcaacattaatcttgattgtatgagattcgggtttagtccattgctcaaccttagagacattggtttcaagaaccgatgacaataagttttgtttatcttgagctttacgccattgatcaagaatagataatgctgatgaagaaacacgttggggagaagtgacttttttattccaaactaagttgttgcgagcttgccaaattgcccagcataacatagcaattcggcatttagtttccatatcagacgattgaaataaattgcagagccacatacctgctgtagtgttggaaacaatagctaccgtgggatgtgcatactgccagcaggaactagcaaaagagcagctgatgatggcgtgagaggcagattctgggtgacatttgcatact

SEQ ID NO: 155949 - DNA, 645 bp, Cannabis sativa
ttattttgattatgtatttttgtatggtgattataactaaattaattaattaaaatagaataaaatatattaactataatacagtcatatatataatttaggagagttattttaaaaaatatctaaaaataataaaaattttatgtttttataaaattcttatgttttttttttttttttaccttttatcaattttttttccttacaaaccgttgtttttaggttgttctaaaaaagaccgttgtttatacgttgcgaaaatatagcataattttacagcaacatgaaaacaacgttatttttcccctaaaaagtcacaaatccgtaaaattgttaaaaaaatcctaaaaaaattttgttgtcttttgtagttgttttgttgttgttttatagttgttttaatattgttgtctaggtgttgtataattattttctagtttcttaagttgttctttagttattttttttttttgttttattgaacacatcatttattatagttttcatgaagttatttttctggttaatttttgttgttttataatttatttagttgatttatagttgccgtgatgttgttttctcattatttttagttgttttcttattttttattgagaaaagtgtaatttttaactttaaaag

SEQ ID NO: 155950 - DNA, 1007 bp, Cannabis sativa
caatattaggttgttgttaaatcaacatacttaacatacttgcaaatcttgcaaatagatctaagatcctggataaatataattccaacactaggtccatcttctgcccctttggaagttccatggtccctggaaatagatgattctcaatattttctgaagataaagatgatgctcgaaagaattttgagaaaactccattttttgcggcccaggttggcaaattgtcaacctgggcgcagagctagccccaagtgtcaacctgggcgctaggccccattatttgtgcccattaactgttatttcccctggaaggacctatttcctcatttttgatgaagatggatttaatgtaaaagtcaaatattcgatcaaacacttggaatgcactcagattgacaaattatcaacttgagcgttgggtgctcggggtctcgggtgctcaaaaatcaacttgttccgaatctgattctgatgcctcaaacatgttcgtggtatgtctagttgatgtcttaatgcaatttttggccactttgcactaagaagttctcagaaactgaaaccctagttgagaaatgtcaacttgggcgctgggtggaaaccctaggtgcccaagttggcttccgggttgcaagttcatgtaatatcagctctcagaccttggattaggttgctctatatcttcatggtaccaaatattgaaagatagtgggttggattaaagttattgaagtctgaacttccatcccggagatcccgaagtcaacttgggcgtagggttagggtccccttctaggttgactgctattagggctgaacatttctagcgggttcaacccgaacccgagcaacccgcccgaacccgaaacggtgaacccgcaaatttttttttgaaaaaatgttcgggcgggtcgggttcaacccggtaccctttgggcgggttcgcgggttgagtttttaggaaatccgggtttcgggttgaacccgccaacccgcaatttaaatat

SEQ ID NO: 155951 - DNA, 583 bp, Cannabis sativa
tcatgtctttaccaatgcaagaaacgcttaaggcagagtggtacattctgaacaattctaatgaagtggagaagtatatcacgtaagatactttttgctttcttaatttagttttcttcagtcacgatcttctcttacaaaaatatatttatgtgtattgagcatatgaacgagctacaacttaggggtgatcaaaatcttgacacagttcaagagaacgagtttcccagttggttcaagtctcgagtaagtatttactttctactaattttacaattcaaatacaatttcttgtactagtattgattacatttttactcaatgatagatcaatcaactccgagcggttaaccctagggaagtattagatgagttatatgccatcgcaaattcctctaatccagcatgttattattatcctagatgtattgttaacagtgtaaaatttctagttgaggattaggatgacaatcgtaacacctaaaataatggtattttggtgcctggagaaggtggtaaaaaaaatttatagcatactcaaacaagtctacaagttcacttacttgaaggattgtagtgttat

SEQ ID NO: 155952 - DNA, 585 bp, Cannabis sativa
ttatcttagaataatctcttctctgatgaggcttttatttaaaaagtgataattaaatgtatcactggttaggtaccttaataagtatagtacgagagaaatattataaatatgttcactggattaaataggctaggtagcctattagttagccttaactcccgcgttgtctggagtatataatgtgtttcatgtctccatgctgagaaaatatgtatcaaacttgacccatattctgagttgtgacgatgttaaacttcagataaatttattatatgggaaaaatatcttgtcaaagttttggactagaaagaggaggtactatgaaatgagacaattccactagttaagaaagtgtcgtagaaaaaaaaaaatatatatatatatatatagcaagatagaaacaacaatttcagagttagaatcataaatacgggggtaatatcccaattagtttaaataaatttcgaggacgatatttttataaagagaggatggttgtaatatcccgataagcctaatggtaaataattagagtttatatttatattatgtgttaataaggtaataagtgggattatgatc

SEQ ID NO: 155953 - DNA, 821 bp, Cannabis sativa
tgaagagaactatattaaagacaacaaaccgaaaatctcaaattttgcactcaccgaagcacccccaaaacatatccaaatcattccaaacttcacatcccacatatataccgtatatacaacaatctttatgtaacagaaattaaaatcgagcccttacacgaaaaataccattaaagctcgaacttaagctttaaaatgttccaacctcaattttttaattcaaaatcacctcaaattcaacaagtaaacatcaaaactagtcccatagctaccaaagaacaattctataaagtcaaattctccataactactctaaatcacaaagtcactatataaaaccaatcattttcaacttaaaacgaaaccaatccttaccttaagctttctgtcttcgatgattaactatcttgctatgaccggagcttgaattactaggtttcgggttagcaaaaaaaaaataaatgaagggacagaaggtttcgtcccatgaaggagagagttttgttccattcttttcttttctatattaagttttaaaacttaatgtatatatatataactcatatgtttaaattttattaataaataataataatgatcatatatatattaataataatattaatattataaataaaattttatgaatagtaattcttttacaatttcttaaccactaagaaatcttaaatcttatggtatttggtcaactttgagtacctcaaaataccttaatatttctaaaatcaacttatctcaataatctcactgatattactaactcaaattgttgtgacatttttggcctccaatcgggt

SEQ ID NO: 155954 - DNA, 504 bp, Cannabis sativa
  modified_base (459)..(472): a, c, t, g, unknown or other
aaaacccaacaaatattacggcctaattatattggcgtattaaaagaacaaaattggggtgttcgtgaagacaagtatcacaaatagccccgcagattgggctaaggtaatacaattgcacaacataaagaggagagaaagaaattagagttgtcttaaaaagaacaagtagaagaggcgaaaagcaaaaaaaaaaaaaaggcccttaatggtccggggaaggtaaaggtgttactgagtcggtcctgattgggaaactagatagctcctccaactctaggtttgcattggtagcatcttgagcaaccctttccttgaccctaccggaagacaccctagctcctacaaattattgagaacttgaggcctgaacactaatctcctcatcaatatcgctataaaccgtgagaggaaactcctcgaggtatttgccgcgattaatttgaattagttatgaannnnnnnnnnnnnnaaaaatcgggatgatgaacctcatcacacgcg

SEQ ID NO: 155955 - DNA, 572 bp, Cannabis sativa
ttttccagtaaatgtacatatcaatttatttggctggcggtgccgagtagtcagggttttagttatggaaactttgaaaggaataagtatttggttgtaaaattttaatagaatctttgtaaatattttttgaagtggatccccaatcctaatttttataatgccaaaataaattttatgtcttaaataataagtaaattttaattaaaacacaattttcttttaaattgttagtttattattataaactaatttataaaagtacacatgtggcgtccctacgggttagggcgttacacactgcctaatcagtttttgccatgcctttacctacacatgaagtacatatatgtgagtcggcatactcagtaagaaaagcataagaacataacatataacttgcattcgtagcttaggcgtccatacacccaattacaaagtaattatcatgcgtccaacgcgtacaagtctcaagcgctcttaacaagagtacaaatagtttgttatattattttataatataataaagtatagattaaaatgtgataaatatatgtgaataatatattaag

SEQ ID NO: 155956 - DNA, 577 bp, Cannabis sativa
tttcggtttggtgaagatggagctatatttttgttttattaaaaaagttttaatgagttttgtattttaactattatatttctttcaaaaaaaaatatttgattttttttatttagttttctttaatttttatatatttaaatttcttttcaataatatttttttaaatatttaaataattttttagtaaaagattaaaattaaatgatttagaccaatgagaagataacacgtgtgcacttacctggcacttaacggccaggtacctacggaagtaccaaaactctaacagaaggtatttttaccgcaaaaaatacgacttaggtatttatctgctacttggagtaaaatttaagtatttttgccgcaaattactcttaattaatctttttatctgttttattttttagagttgataaaatataattttttaagagtaaaaaaataatgtaatgttttattgtaaattaattaatgtaatgtttattactattataatttattggatttaataaatatttattattaaagtaaatattcttattatattaatataataatataataataaagaata

SEQ ID NO: 155957 - DNA, 574 bp, Cannabis sativa
gcctgctctgagaggcaagcattcaggctttaatcttttcaattgcttcattagtccgttgaacagaatctggacctaggtatttcttctcccctgttccatcccaatgaatgggtgatctacactttctgccatataacagtttatagggagccatccctattgtactctgataaatgttattgtacgagaactctaacaacggtaggtacttactccaggagccttcgaaatccataacacaggctcggactgtccatcagtgtgaggatggaaagctgtgctaaactttagtttggtacccatagcccgatgcaaactctgtaagaatttagaggtaaacttcgaatctctatccgaaactatggattttggtacaccgtgtagtcttactatctctttaacgtacaagtccgcatactgatccactgagaaggttgtcttaacttgtagaaaatgagcagatttcgtgaatcggtctaccacaacccaaatagaatcaaataaacttgtcgttcaaggtaacccaaccacaaagtccattgtgatgtcttcccacttccgttcaggtagg

SEQ ID NO: 155958 - DNA, 672 bp, Cannabis sativa
aaattactaattagccaaataatttttactaaataactttcttataaaattatattaatttttttattaactaataaagtaaatgactttctgattcatcaaaaaaataaaataaagtaaatgactaattcttttttattttctacattggataaagattgatatttgaagaaaaaggaaattggatttttttcttgttttgttcttgcttcagccgacctccccctctccctctttctcaaaacctattttcttttacaacttgattttgttggaaattggtgtaatttggagctaattcttgaagcttggagttgagggattgttcttgctataatttgaggtagtaatttcagtttctaattgattttcccttgctgattttaatggttaaaaagcatgaataggttgaagaagatgatatgttgcatgattgtgagttcttgttaatttgagcatgtggtacttgaatctttttggttttatgtttgttgagcatggaatgagattctagggtattttttgggtttgatttcatgttatagttggtatgttgctgcttgaaatttattgggatgcatggttttgaagctctagttcaagagcttgaactttgctaagtcaaagcatgattttggattatttgttcaatttgaattttgagaattgttg

SEQ ID NO: 155959 - DNA, 859 bp, Cannabis sativa
  modified_base (108)..(116): a, c, t, g, unknown or other
gatcccaaacacaaactcggacctggattgggatccggatacgaactctaagtcgaacaaagacccacaccgagattgaaacccgagacctagatctggactgagatnnnnnnnnngacccaaacttggacccacactagggacactaacttggacctggatccgaacccagacttggacaaggactgagacaccaacccagacccaaacctggacccgaacccaaacccagacacagaatcagagtgtgggtctttgtttgagtccgggtcttagtccagttacaattttgggtctaggtcctggtcctactccttgtcctgttccttggtcccgatctgcttctagtttcggttccaatttcaagtcacgcggtacgggtcgagtccaagcatcgagtccctgatcccaagtctcgaggtgggtcttaggtccaagtttgggtctggggtcaggtctcagatcctgatccaagttctgaggcccaagttctagtcctagtttgggggcccaattcttgggtctgggtcccccatctatgtttgggtcctaggtcccgatgtgggtctaagttcgtgtttcagtttgggtttgggtttcaggtccaagtgtgggttcgggtcccaatcctagtctgggtcttggtttccggtccctagtctgagtttggttcttgggtcctgggtctggccttgattcttaggtcttggtctaggtccgggtcctggtctgggtctaagtcccagtcttggtttaggtcccaggtcacaagtcttggtccgggtccaagtcctgatatgggttttagtttaagtgtgggtttaggtttgggtcttgttacagtcccaggtctgggttc

SEQ ID NO: 155960 - DNA, 595 bp, Cannabis sativa
  modified_base (258)..(266): a, c, t, g, unknown or other
cgctctaacctacgacaagctgagaaaaaccggttttcacaccatgctgcaaaatccaggtaactggttttacaggcagtgtaaaactggttagccggttttacctagaaaacctacaaaaatcaaacccccaaccaaaacgtttccaaactcaaccaaactttccagacctactaattagacccccaatgaacatttctaaagcaacaaaacaacgctacacgcccagaattaaaatccaccattaaagctccaagnnnnnnnnncaaaactcaaacttggttaaatcaataaacatgcatcacaacctgcttaaatctacttaatcaagcatataataactgcagaaaacatccataaaccataacaacaactacagcaaccaagatcacctttttactttgaaaatcatagttttgagttaagaactccctacttgcttaaaatcaactaataatgcttcaaaacctattctatttcactcattcacacatgattaaacctctgaaaacaacacataattccagcagcaataagaaccaaaaactaagcatgcaaactatcattttgacttaaaactcaagaaaacatcaag

SEQ ID NO: 155961 - DNA, 606 bp, Cannabis sativa
  modified_base (27)..(29): a, c, t, g, unknown or other
gttaaaccaagaaatgccgttagatannnacttttaatatataaagatagatatatatatatatatattaggttgatgttacgtacaatgtatgtataatttttttttaattaggttaaattaggtgatgttaagtgcaatacatgtatgtttaattttttttttaattagataatgtattttttttcactttttgaaatagagtttgagattttgatctttaagaattttttttaattattgctacatttgtgtgtcatttgaatgtgattatatatatatatttaatatttttattaggtaacgtatgtgacaatgcatatattgtagtatactatattctcaaccaaaacccacataactaaatgtaggtgtatctatatataggttggattcgtaaatttgatataaatatttttttatttgcaaactttacgaaaaatatagtgtgtgaatcagtttaccataactaaaacagaaaataatcaattccttattacaagtttacaaccatttcaatttaaaatataaaataaataataataaagttaaaaatatggttaaaaatatttttaacatttttaattaattttttttatataaaat

SEQ ID NO: 155962 - DNA, 602 bp, Cannabis sativa
atggtaatgaatgattttttactttcatgatatattatgaatttaaaacgatgaatattgtttattgtgttgatttggatgtgttcattttggtttatgtttatttgatgaatgtatttgatttacaaatttttttccatgaaagtaatcttatttttgttttggaaatattttatttggattccttgtgaaaaattaagcaattttcatttttacggaactcaattctgatgaaaaacaaaggagatatggtcgtttgaagtttttggtgcatatggtgtcgtcgctcgacaccacacgcacacaggcgcacgcaggcattcggacaaggtgtttgtcggtgcatgtctaaagcctgccatgttgtctgaacgcccacccgagctagcacccagcacgcacacgaaggctgtaatgcagcctcctacgcgcgctgagaagggtgcacgcagcctgtgtgtgccctgcaagggtgcaaagcacccaaatccaattttttgaggatttttcacccaatttcagatttttccgattttcaaaccctaatttcaaaatagaatattatttttaatatatttaaacttaaatatcaaattttcaaa

SEQ ID NO: 155963 - DNA, 830 bp, Cannabis sativa
  modified_base (27)..(27): a, c, t, g, unknown or other
caaaacttacacaaatgaatgaaaaanacttctgtttctttattgatgttgtataaaatagattacattgaaatgatgttttatttagggcataaaacccaacaactttatatttacttaaaaaatgattattttattaataacttaagttaaaaatattacatcagaaatatgagttacaacatcaaattactggtagtagggtcgcaaatgttccacattccaatagttgtttatcagcaagccatttggccgagccaatttgtaaaccctagttcctactttcgcttcaatcacataaggaccctcccagtttgggttaaatactcctgtggatgcatctctcgtatttgcaaatacttgtcttagcaccaagtctccaacgttgaagagcctccttttcacctttttgttgtgttatacaagaaattcggctgcgatctcagtgaaggacacatgtcaagataaagggaatatggatcggtgcaatcactttttatggaataactcattgattacgtaagtatcagagtatatttgtaacctgttgactgtaaggtattaggaaaggaatcaatatacaaactggtgcttagtaaattagcgagaaatcgtatgacgctgaaagcaaatagagaggcatcaaggacagtatacataggaagacgaaagcgacacatatcaactgcgaaagcccttagtatataatgtacaaactaagagcaatagtcagatcgactcgagaccaagtaagcgaggtgcccatctcgctatgggaaggattcctgtaacttcatccagttaacgtcagtgagacttacaaccctgac

SEQ ID NO: 155964 - DNA, 564 bp, Cannabis sativa
tttcttctaattttgatcaccttttatctaattactcatatactatatatttataatatatcaatattttagattgattggtggtgcaataagcttcagtacgcaatatatatacaatatttgagaacacatgcaatatatttgtatgagtattgccatttgatattttaagaggttctccttttttttattattatttattaaattaaaatgtgttagatttcatattaaaatacacccattaattaggtgttgagagccttaagcaaaattaaaaataaggcttttttcttttataaaaatttaaatattagttaaagtttgacactatcaatctaattttttttaatataacagttaattttttattatatttaattattaagagtatttcataaaatgctatatattttagtattttttgtagaaaaataaaaaatagagtattaaaaataaggctaattagtcattttttcctctgaactttaacatgtactaaatcatgttccctaaacttttttagccgtaaagaattccccatgaactattaaaattattagattt

SEQ ID NO: 155965 - DNA, 649 bp, Cannabis sativa
aaagaatccaagtaaaggtaacaacagccaatctggaaaaccatctgcgaatttttctggtgtgcaggagggaaaagcttcaggacatgatggacaaagtggacaatgcaatgtgccaaatcaagatcttattcaaagtcttaccaatcaataccaacaactcatgagtctcttatctcaaaagcctcaagaaactccaaaaacttctacaagttcagatcaacccctcgtgtctcaattttctggtaagacttttcctattttgcatagtaggtggattatagacacaggagccacacatcatgtgtgtcctgatttatccttatttaccaatattaagaaaagtacatccctttctactgttaaccttccaaataatgcttgtgtgagagttaattgtattggtaatattcaactttcacctgatattactcttatgaatgtgcttcatgttcctgaatttagatacaatctattgtctgctccttcactaatcaaatctattggatgtcatttcaatttttctcttaatcattgtatcattcaggacagtaagaagactcgaacgattgggatgggtgatcgaaatggggatctgtactacttgaacttgtcacataattccattcctgctgccattttttctgtt

SEQ ID NO: 155966 - DNA, 1406 bp, Cannabis sativa
  modified_base (582)..(599): a, c, t, g, unknown or other
ttgagagctgaaggaagcatctgcaagaagacaacagtcttataagctaaagcaacaatggtggagactcgcaacacacgtcagccccgtcctcttaaagacgcccaaaaccctgaagatgaagaagtggcctcaagagtcaacgtgggctctgaggtacgaggagagaccaacgacgacgaatacgaagaaaatttcgacgagtaaaacgcctacgacgaaggtagttacacagaactactgctcttgagacaaaagggtgctaatcatgtagctgaaatcatgacctaaaaagagcaaaacaaaaagatgcaggaggtgatggtcgccatgcagaaagccatggagacagcagggatccacatacaccctaaagccatccctgcaggacttgaagaaacaccggaagagtcctcaccaagcacccaaaagcataagtccatacggtatccctctgaagggaacaaacggaaaaatcctacttccatcccggggaaaaagaaaaaggtgcaggatcagcgaaaggtccgctcagatttcccgatagggaacggtccgtagaggggcaaactccaaaaaggnnnnnnnnnnnnnnnnnntcgagaggaccgaaaaagcatttctgtgcaccaagaacttggagagagaggaagaaggaaccagagataccctcccgtggattgaagatatcagatcaacaaaaaacatggtgacctacgggatcacttggaccaaaagaaacatacaccggcggtctccacgggaacgctgaacgagggaatcatggctgagcttgccatactacacaaagatattgctcgagtctcccagagacaaaaaggggatgacttagactctgactgtgaggacttggaaccgtgcgccagacacattttggagggagaactccccaaaaactttaagatgcccgagatggcagcttataccggggattcggaccccagcgatcacttatctcggttcaaccgagtaatgacagtcatgagagttagcaatgacgccaaatgtttatgcttcccactaacattaagtgggtccgcggaggaatggttcaagaagttggaacaaggatcagtggactgctggaacaagttgcaagtaagtttccagagatagtttgtcgccgcgagaaagattaatctcgaagtcagtgccctgactaacatcaagcaactacccacggagacattgaaaaaattcataaagaggtttaaggaagaagcctcgaagactaagaaagttgatgacgagcaacagcttgcacttcttcaagcagggatccgtacagggactccattctggaacgaatcacaacaagaaggagctgtgaacctccaagatttccagaacagagtccaaaagtacatcaacttagaagaggccca

SEQ ID NO: 155967 - DNA, 886 bp, Cannabis sativa
tctatgatttgttttctgtgtatataatataataagtatattataaatatatgtttatcttaatattattattatttgtttctttcttgaatcttatttatgttttgatctaagtatagaacttgttctgtttcaaagaaaaaaagtatagaagttgttctaaaggcagtttgtaatctttcattttatcttataaatatatatggtagaaatttttaattttaatgtttatatttacttgttagtcgtgtgataattattaactgttatgattaattttggctacgtcttcaatcactcttgatcactggaggaaagctcaagataaaagtgctcttttatcactatcgtttgaaaatagtgatgatggggctgagctatggacaccacctgcaactaataacctcaagattaatgtagacgcggcactcttcccaaatgacaactcatatggctacggccttgtggttagagaccacactggtaagttccttgaggccaaaactagtcaattttctggtagctatccggctgaaatagttgaagcattggggataaaagaagctcttagctagataaaagggaaaaattgggagaatgtggaacttgagtcagacagtcttttatctgtgcaagcaataagaagtaaccaaaagatgtcttctatttttggaattgttatagaagattgtcgtatgttgtttttctctttaaataatgtaaagatacaatttgtcaaacgatcagcaaatcgagttgctcatgctattgcaaggcaatctcgatttaaccctggtggtttgtattttagagcaagatatctggcccaatttgagggatatcttgctttctgaatgctcttgatttaatgaagttgatatttcat

SEQ ID NO: 155968 - DNA, 500 bp, Cannabis sativa
tctgacctttcggcatcacgatactggagctgcttccggatatggacttgtcactggcgaaagcccatctggtcatggaaccaaggtgcgttcttggaaggtcctgtgtgacttgggcttggcccaaattatctttcttgggacctactagtgggtctttggtgctgacctggatttcacgtgtcccttgtcgaaaacacggataacatagcttggcattaaggagaattttttggtctttttttttaatgatcgtgtaccgtgttgaaaatagggttcaaatatttgttacactcgtgactgttttttcttatacacatggtaatgcttaaattttatttttggcatgataaactattcaaaaaaaattaaaaacttatgtcttaaatgactacaacatataaaattatgaaatagaaaaataaaaaataaattaaaatatttttctaaatgccgaaataaataaaaaataaataaaaaatacacaaatttttctttaa

SEQ ID NO: 155969 - DNA, 634 bp, Cannabis sativa
gggttcgggtttgggtgtaggtccaagtcctagtcctagttcggttctagttacatttgtgattctgagttcgagtttgggtttgagttccggttggagttcgagtcatagtctgagttggggttctggtccggatttcagtctaggtcaagatcaggctccgggtgtgtgttcgcgtcctgggtccttgtctaggttgggtccgagtccagggttccaatcccaagctgattctggattcatttcagggtctaagtccttggttctgatcctggtctctgttcgagttttggtccgggtccgtgtatagcttttggtctgattcttggtgtgggtttgagttcgagccgagtctgtgtcgggtttgggtccagctctgcacctatatctgggtgtaggttcgggtctaggtccaacttcgggtcctgagtgcgggtccaagtttcggtctgggtcaggatcttggtccaaatctaggtctagcatttcgatcccagtctggttcttggtccgagcccaggttcgtattgggatccctatccaggttagactcttagtttcggtctgggtacacgaccgtgtctgggcacgagttctagtctcagtttgggtctgaggctaggtctgtgttcgg

SEQ ID NO: 155970 - DNA, 575 bp, Cannabis sativa
  modified_base (41)..(45): a, c, t, g, unknown or other
aaaatacccttttagtacccctttttgttattttagtgtgnnnnngcaaaatggtcattttgccccaaggttattttgtcctttagtggactaagtgtaattttgctatatgattttattgtggtatgttggctgaagttaagtagagaaaatatcatttatttgttcattttactcaaaattagaaatttgaagaaaaatcaaagaaaagcaaaatctctttttctctctttctttctcctctttcggctttgagcagctggggttggggggaattctttgtgtgtttctagctgaattcatcaaggttcttgtggtctcaactcttggtaagtctcttgcttttgttcttgaagatttttttaaggaaaattgttggttgcatgcttgatttggttgtgttgcttctgttagtttttgatgatgtttatagaagtttatccatgattatttgagtggaatagagctacttgtgatgcatattagtggtgttatttaaagttatggaatttttactcaaaactatggtttttcaaagtgaaattgtgaagtttgttgttgttgagattgtttgt

SEQ ID NO: 155971 - DNA, 510 bp, Cannabis sativa
  modified_base (80)..(89): a, c, t, g, unknown or other
tattaaaaagtaaaaaatatataaagaaaaataagtggacagcagccaggcccaaggtatttataataataataataatnnnnnnnnnnataataataataataataggattgttaaaaagtagagaaatgcttaaaagttttagtggtgtttagagtatttctaatggtaaaattttaaatgatatttgatgaggtgaacatattatgtggtaaaatattaagatgctataccattgaagagaaaaagatattattctaaaaatttgcatgaatgtatgttatggcattgatgctatttatttattttttaataaaaaagtgaagctaaaaaatgattgtagttaaaaattaggatatatataaaataataatgtgtgggattataattatagtatttttaaagagtgctatacattgaagtgtttttagaagtacgagtgcaaaaaataatgtgtaagagagataaaataaaatattatatttttaaatgatgtgtaaatttttagca

SEQ ID NO: 155972 - DNA, 624 bp, Cannabis sativa
gtgcaagaatcccacagatggtgacattacgaataagcaaggaaaagaaaaaaaaaaaagaaggggtaaaaaccgagaaagacaaagtcctctataaacccttgaaggtcattatgtaaagaaaagatgggcctttaaaaaaaatgtaatacgcaaaataaaagtgactcaaacaccagaaaagaggaatctaacgtattacacagaaactcaagacgtaaattcccagaaacttcaaacatcaaacccagaaaaagcagatgaacagtgaagcatgcaatgaacacgaacgataaagtacgggatgcaaaaaacttacataaagctttagaactgggcattgttgttgatcggtggtgaaacgttgactgacaatagcgaaggaaggtcagtaagaaacctatggtgtttgaaggttttttggttcgagggtttctttctctctggaaaatttgaaaaaattcggtgaaagtctgaaagtaaccaaatgaagggagaatggtggcttttataggccaaaatgcagatggaacaggcgcgatcacctaccaatcgtgcggttaggaaggcacacgatttgaattcccaagatccaacggttaaattggtttgtcatcgaggcgg

SEQ ID NO: 155973 - DNA, 546 bp, Cannabis sativa
attaaaaaccataaaaataaaaatgtcctaaatttaaatgaggaaattatattgtataactactttattttacatgttttaaattttacttttattgtcatattctttaaaatatacctacttttatagatgaagtctctattgtacctcttaggttaatgtaaattatgtgttagacttaaacagaagatgatgatatattagacaacccactcacaaaaattggtatactttgatgaaatataatatgaaaatatttttaattaatgaatataaaaagattaaagaagtattcctcaacttatccgagttttaatagtgttaggcccatatattctcaaagcgggcctacaatcatttctcttataaataaggcatcagattcatatatccatccaatttgggattttgctgggaaagaacaacattatgggatctcctgtaagaatagctggtaagatatatataaatggaagaggtttcaatggttacatttttattgtaaccatcctggttacatttttttaagccattggattactattt

SEQ ID NO: 155974 - DNA, 557 bp, Cannabis sativa
taagaatagtataagaacaataaataaagactaaaacctagcttgaacactctaggtttttacaaaagaaactctctcctcacaaatatgaaaatataaaaaaagaagttaaaagagaaaaaatatttgactgctctctaggtcctatttatagaacatataaccctagagacagccacaaacatgatttctcaactgtacaaaactttcttaaaaaaattcctgatgtgcaacatcaaaatcggattctactgcaacagattaggacaagaaaggaaactttccgaaatggatcaagatcgcgaattgacctctaatacctaccagataaaatttatttgatctgctctaatcatgaaaaaatcgatatcatcaattagaaaaagaaaaagtcaagtttcctaaaaatagataactttccataagagaatttatttttttgtaagacaagtttcttaaacaaatgaaactaattgagaataaaactttccttggaagaaaagaacaattaaaggcacgaaattaacacaataaaatcaatttaattgcataaaaaa

SEQ ID NO: 155975 - DNA, 689 bp, Cannabis sativa
  modified_base (655)..(657): a, c, t, g, unknown or other
ccaaaaatagcatttctttatgtcaaatggaacagaagaaaacaaaacccatcactattaactgaataatactccaaaaaaaatacctttttataacagacacacacactttctaatccccatcattttcaaaaccctaaatcacacaacaatactaaaagtaggagagaacccatcaattccactttcaaaactgacaacagaaattatgaaaaggaaacttaacgtagtcagggggatcacctccatcgtccctgtaaaaagccataccctcgacactgtcccgtttgacttcaaccttcgatcgtctttaaccttggactgttgcgttttacaatcgaaccttcgatcttcttcaaccttcgttcatcttcaagtcgaaccctaagtttctctcgactctctcaagaaagtttgggatttttgtgcaaaaatggtaactgttctcttttcaaaaactgaggagcaattttgttttgtttttaatttaaatgtaaaatttaattttaattatttcatttttctttcctgatttagattataaatcaatttcaattaaaagttatttttttaataatttaaattgatattatttgtgtaaaaaatttaatatttaatttttattttaagagggtttttaatgtatgttgtggcnnngttaagtttaagtggtgtgagtgatgtggcat

SEQ ID NO: 155976 - DNA, 538 bp, Cannabis sativa
  modified_base (302)..(309): a, c, t, g, unknown or other
caacgaggagtacatggtccatgggtttgaaaatgttcaagatgagatggcacaatggagggcatacaaggattgttttggccctccaccacactagttttcttgcatattttttttttattttgcatatttactcttgtttttcattttgtttttggttgtgtgcaaaggcttcatgcctcttgaatgttattttgttggatgttatggttttattcttttaatgcatgggtaatgttgctgtattttttttctctatattttgtgaattccttgacaccctttttgatgaatcaaaaggnnnnnnnnatctattgattatttttttttggcataacctcaatttttttttttttttgtatcaaatcttttaatcataagtaaaaattgagggggagtttacaaaaatatgcaaggtaaaattaaaaggtaaaaaaaaatttcttgcacacattaagggggagctaatccaatatacattgtttaaatttttcctttcccttttcaaaataatcaaatatttgatatcatcaaaaag

SEQ ID NO: 155977 - DNA, 506 bp, Cannabis sativa
tcctcctcctcgtgcttttgtcactaaacaagaatttgcctatgatccgcaagcgtatgctacttctttcttacccaattaaactacaatatatatacactcataaataagtgttcccaagcaatatgggactagttatctaaagacttcaaaatgcacatcttcattttttaataattcataaatatgttccaacaaagatgcatgcatgtattctagctatcaagtcttaactccatgataaaattttagtaattgaataaattaatgctactttggtgtgattaaatttatatattttattactgcgattagtcttgtccccacgacatggttttgagtattttactcttgtatgcgtgatatggttttgttttattttggtttcattgttaattcttctttgttcttcagtggcttgctatcaaaccattgttattggttagtaataacaagttttctacgactgaatgagttattagtaatgcaattacatatcttacata

SEQ ID NO: 155978 - DNA, 915 bp, Cannabis sativa
atcaatagcacccaagagtacaattagccatgatatcactcttaaccgatactatgcccgtactgccgaactaacacactagttgtgtctctatgatagtgccaatgaatactctctggggatcatatcactcttaaccaatatgatatatgtactgtcgaatcgacacaatggttgtgtccctatgagatcaccaaaaaaatatacaatcacaaacacaacatgcatatagcatatgttctatacaaatcttacctcgtttccgtgctcacatgtgccggtcagcctgagtggaacagcagctcgacgctttacagggtcctaagccacaatatccaaacttttgatgagatacacgctaaagtatttcctagggacttaaaatcaaaactagaaattttcctatcgatggataacatgacaatatcctaaatatcacaaaaacatgaaaatctagggtacccaaaactgccacaaccggtaaactggatcccagcaggacaattggtttccaagcttactgccaggggaaccggtcgatcggttctactaggcaatgctgatacggtcgatcggttcagtacaagaaactctaaaaatttcaccacatgcccaaacttacccccaaatcgtaccaaactctccagaacaccagtatacactataatgaaccaaattcaagcaataaacctcaactcaaattaccttaagctaacctcagaatacaaattcaaacattaattctcaacacggaaccctaaccaagaaaatcacacactaaaatctcacaggaacttaaggaaatcaaattaagagaagctaagagattataccttgatgtaaagcactgaaaacctactagaattcctcaattagagctgagaaaaccataattcctgctggctttttctagct

SEQ ID NO: 155979 - DNA, 581 bp, Cannabis sativa
atctacacttgagattttctttggcaaaacaacatgaatccgagtccttagactccacttaatgtcacaaatcacctgctgttgattaatctgctcttgctgcctttgtaatattggaaacttagagtattagagtattgatttcgaaagtgtttggttctcccctgttcgtttcagtcctgattagtgttagtattaggattatactagtattagcattatactagtatcggttttataatgattaattttttaatctaagtattatactaaaattagtatttttaaccgtctctgtagtattagtattatactagtattaggattagtattagtattatactagtacaaatgtcttgtcttttgacatggttctatatttttctttaattggttttgttttattgatttctggcgttagttattggttcttggttctgagtttgttcggctgtccatggcgtcgagtagttatcagcgaatggaggcagcgaagaaaatggcagggatttttgtgccaaaatagcaggtgcaacctgaaaatagctgaatttgttggcataaaagaagctttaagttgg

SEQ ID NO: 155980 - DNA, 571 bp, Cannabis sativa
tctttccacccacccctcctcccgtcggttttccactcatctccgtcacatacgtcatatcaccaccacctcctgtcggtgtccctctcatctttgtctcatacgttagaccaccaccacctcccgtccgtctccctctctttctttctctctcttcgatctcggtataaatacatttatttatttatatatttttttatttattatatctacttattttgttattgtataaatttaatgtgttttaaagttagttgttattgtaataaaactaattagttattttattttaatttaggtaaaattataaaactaatgcaggaaacaaataggaaaaatacagatttttttgccattaatgacagaaaaatttgtatttttttttctcttttttttttacattctcgacggtttaaaactgtcgcctatattatagggcacggtttaaaaccgtcccctataccctgttataggcgacgattttaaaccgtcaggaagtccttattagcgacggtttttaaacgtcgcctattttgcacattttacgacagtcgtataggcgacggttata

SEQ ID NO: 155981 - DNA, 1196 bp, Cannabis sativa
gtgcacacgaggaagaattaataagtaggtggtatgtcaatttgttgtttgcgtatcttttcgttgttcttttttttcttcaaacaaacacattattttcttcttccatttatagttccttctctcctctcaaagaaacaatatatattaagctaattaagatttttggtttccaaattttgacatgtatcaaattatgtatcttgaacttttaaattagttaaaaatactacttgaactattgagattattagatttaaaattttttgtccaatattagtaaaaaaaatctaacatagataaaaattcatgaggtatgatttgatacttgtcaaagttcgaggggcatgatttggtagatattaaagtttaaggagcattgcttagtacataaataattactgaaatagtaaaattgaataaaattatacaaaagtctttaaatctaacaatcccaataatttaggagaatttttaacagtcagaaaagtttagagggcataatttagtatatattaaagtttagagataaaaatcctaattaacctatatatatattatgttcttattcgatatactaaaacgtaataatataccatcagctctaaactaaaattttgaaggaaaacaaaagcctacaaattttgatcctttcttaagataggaaaatatttgagattattgccacacgcttaccactcttgcaatttaataataataaaaggaaaataaagtagcttgtataataatggcaactttggtggtatattataattaattataatatatttagaacattattgaaattaaaatttagtttagtatgcttatacatgtaaagtatgactttttaataggagaatttttaaaaatactatttttttttatattttatttataattttaaagtctaaaattaactataaataaactataaacaaaaaaataaataaataaactcatgagacaactataaaaaaacgtttattatttttactgaaaatttatttttgtaaagaaaaaagatcaaaatgtaaaaataaaattttttccgtgttgatgtattttgtaatttttttttcaaattttcggtttattatgtaaatttttatctaatataccacccaattaaaaatagggcatttatattttgactaatttgtagcataaatacctaagtttaactttcaattgca

SEQ ID NO: 155982 - DNA, 615 bp, Cannabis sativa
tcaatttgggttgtggtagatcgattcacaaagtctgcacattttctaccagttaagacaacctttacagtggatcagtatgtagatttgaacgtcaaggagatagtgagattacatggtgtaccaaagtctatagtttcggatagagatccgaagttcacttctaaattctagcagagtttacagcgggctatgggtaccaaactgaattccactacaactttccatccttagactgatggacagtgtgaaaggacaattcagatactggaagatatgttacgagcctgtgttatggatttcgagggctcttggagtaagtatctaccactgatagagttctcgtataataacaattatcaaagtacaataaggatggctccctatgaattgttatatggcagaaaatgtagatttctcattcactgggatgagacaggagtgaagaaatacttaggtccggaatcagtacaacagactaatgaagcaattgagaagattaaaaccagaatgcttacctcgcagagcaggcgaaagagttatgcagatctgaaacgcagaaatgtagagttttaagtaggggatcatgtgttcctacaagtgtctccaatgaag

SEQ ID NO: 155983 - DNA, 570 bp, Cannabis sativa
aatctgaagcgggaaatcgaattcctgataaggaaaaataacccacatgtacagaagtatgtcaaggccgatcaaaatcagaggggcaaaaacaaccaagacttgctaccaccaagagtagatggacatctacaagtcattattggaggcccgcacatagttggagattcaggcaaagccagggagaggtatgcctggacagtatagcacgagcaaaaagaagtagtccttgtcgtagaagagaggaagccaaaactcccacaagcaggagagcccaccataacattcaatgatgaggatgctgtcaaaatcagatttccgcacaacgacctgttggtcatggaagtccagatagagaacaagatggtagccagaactattatagatcatggagcctcttccaacatcttattcaagaccacatatgaaaagatgggactccaactcaaagatctaacccctatcttctgcccgtatatggtttcattggccaaggagtcgcaccgctaaggcgaattcgcctacccctcactgttgggcaagctgcgacgagcataactataatggcac

SEQ ID NO: 155984 - DNA, 584 bp, Cannabis sativa
gggcaaatgttatacccaatttttggaggaaaatttgaattaatatgcttacattatcttaaaatttttctcctaaacttatacttaacataattagttatatatgacacttttttttgttttccccataataccctccccaattacatctatccactccaaccctctcttctcatcaatttcacactcttcctcacccgaatccctatcttccaccaccaccaaaaaaaaaaattcttctcttcactcattaatacactagaagctacaaccttccacactacaagtcaccacactaatccaccacattagaagctagaacactacaagctccatcaatgggtaagtaattaattttttttttaaatcttctttgttgttgttatatttaattaagaatgttgtgtttgttgcttgatctgtggattgttgctgctattttgctatttttttctgttaaaatgtttgatgcatgtgaaaactagaattttgttggttttctgcattttttttcgtcgggcccgatggggtccgatgctggcccgatgggggcccgatggtgggaaaaattttgttggcagggg

SEQ ID NO: 155985 - DNA, 919 bp, Cannabis sativa
aacaatgtcaatagttcagggggaatttttaacggccaaaaaagttcaggatgcatgatttggtatatgtcaaagttcggggggaaaaattgctaattaacatattatttaatagaagaatatatgaaaataaaattaaaataattattgaaattaaaatattttgttgatatgcaatatacaaaataatgtgaaaaaaaattagaagtaaatgtttaaaatttttttattattattaatattaaggtggatttataattttttaaggagactccccatataaaaatgacttatttgtattgattttcatgactatttaccattccaaagtttatccacatgatattagtttggtgtaatagaatggtaggaactgtaactatttatctcacaatgttgctaagtgggattttacccaccaggtgtatggatcgataccgatcaacttcgttccgaagaacttattgtgtaacgaccatgaggtctagttttatttaatatatttctacgcttatcctcaaaaaaaaatggtaataataatagtaatggtaatgtaatagaataagaatggtaataggaattgattaaaatatttggtttgtagttagaatgaacattgtaatcataattattgtgtttggtttagtatgagaatataatgaaataaaatttatattaaccaaaataactttattgcttttattttataattataaaatattcaaaaaaaaaataaataatatagacctttgtctttttttttttaactatatatttattaaaatatttttttctttctttataatggagtgtaattgtaatggggattacattagttttgatatgtgatcatctttacaatactcaatgtaataaccattatattgtaatggattacaaaagttaaaaaaaaaaaaaa

SEQ ID NO: 155986 - DNA, 823 bp, Cannabis sativa
acataaggtgttcatgatcaccttaacaaagcatggatgattgatcataatacgcgaggtactagattgatcggctacgagatcactataaccattgatgggacaactttgttataaggaacaatggaatggacacggaagtatggaggacggatcagaattttcaaaattatgcactgtatggtctttcaatgtccgaatggacatgaaagattctctaagaattcgctggccctacttgctcgtggaagaaatctatccttaacaccaactagttttggatatcaaaatcgtttgtgtagataattgttgagcgcaacataaggtgttcatgctcaccttaacaaagaatggatgatttatcaaaatctgtgaaaaaactagcttgatcgtctacgagattaccgtagccattgattcaactacttggttatctggaacaatggaatggacacgaaagtatggagtatggattagaatacgcaaaagtatgcactgtagtggttttcaatgtccgaatggacatggatgattgatcacaatatgcgaggtactagattgatcggctacgagatcaccataaccattgatgcaacaatttggttatataaaaaattgtaatggacacggaattatggaggattgatcagaatacgcaaacagtttaggtgctttaattgttcgaatgcacaaagaaggttctctaagaattcgctggccctaatagctagttgaagaaacctatccttaacacccactggttttggatttaaaaatcgtttaggtgtagatagttgtggagcgcaacataaggtgttcatgc

SEQ ID NO: 155987 - DNA, 534 bp, Cannabis sativa
aaattccttgggttcatggttaatcagcgaggaatagaggccaatcctgcgaagatcaggccattggtggaaatgccatcaccaaccaaaccaaaagaagttcaaagcctcaaaggtaaagtcgcagccttaaaccgctttatatcaagatcttctgataagtgcaaggagttttttcagattttaaaagggaacaaaaggttccattagaccgaaaaatgcgagcaggcttttcaaaccttaaaaatgcacttggggcaacctccgatcttgtcaaagccaatgaccggtgaagtcttgtccatctatttagcagtgtcagaatatgcgattagttcagtactagtacgcgaggatcaaggacgacaatacccggtgtattatagtcagattactggatgtcgagacgcgctacgcccaaatggaaagttggcatttgccttgataacatcgtcaagaaaattgcgaccttatttccaagctcacagtattgaagttttgacaaactaccccttaaggcaagttctggcaaaa

SEQ ID NO: 155988 - DNA, 688 bp, Cannabis sativa
cacggaagaagacgcaaagatggtatgttttcctcaccatgaccctctggtcatagaaactcccatcgccaacaagatcgtggctaggatactgatcgacaatgagagttctatgaatctattattttcagaagccttcacggtgataggcctcacggaccgggatctgtcgccaagcagttcccagctcacgggattcaatggaaccacacttatcccaatgggaaaagtgaggttgccagttaccctgtgtccgaacacaccccagaacacttttcaatatcgcacattcgtagtggtagactacccaactgcttacaacgcaatcctcgaccgaccggccctagtagacattggcacaattatgtctatccagcacttgtgtctgaaattccctactcaggagggtggagtacggaccgtgaagggtaatcaaggtgaggccaggcaatgttacaatgtcgcagcccacttaccagtattgatggtccatgaaggtatcaagccagaagtggcagaagaagatgagttggatccccgtgtgggattcaaaaaaattgtagatactatggaggacgtcgaggaagtgccagtgtgcgacctcgaccctaccaggatcctccggctgggaaaaagcctagaaccggaggaaaaagaaaaaattattaaagcactaagggcagccaca

SEQ ID NO: 155989 - DNA, 628 bp, Cannabis sativa
atatttaagttttactaaagggtaatttagtcttttgctaagtgtaggttgaggtggctgcctagcttagtgacatttggcaattagtgaagttaaggattaattagaaatccttttctttttggaaattagaggaattgaaagaaaaaaaacaaaaatagagaatttcctttctccttctctctttcagctgaagcaaaccagaaggaaacatccttcatctttgtgtttttctgagattcaactaaggaatcaagcactcttgaagctaaggtaaccctaaacactctttagctaagttttttcaaggttttaattagtttcatgttgtgattttaagaattggtggctgttagggtttgaggtgtttaggattcgaattttagggttcttttgagttggtttcaagttcttacagctggttttagtgtgttgtgttggatttatgcaagttggagctttgagttcaaagctttgatctctaatggcataatttgtttcattgagtttttatgtgaattactggctagattatgttgtatatgcattgtttaggtactctggaaagtttggtggcatttggtgaaaaattgagcaagaggtgaaaggtttggggagaactggtgca

SEQ ID NO: 155990 - DNA, 886 bp, Cannabis sativa
tataatttctaaaggtcggttattaaattttaaaaactgaccctaaccgaccgattttcacccctagtatttgagtattttttttttatttgagctatatatttgtttatttagctagctggaagtattttcgtaatattcttactctttttggttaaaactaaaaaaaaaaaccgtattaataatttaatattcatgcatatatcaaaattttcaacttttattcataattagaaatttctttacagcctttttagggcataaatcctaacagataaaatcaaaaaattcaacccgttcttgaacactgtgtacctagcaggcggcttcttccatttctcattttggtcttcatacaaccacaactcaggtcgtatttgcaagtcttgtaaatccaatttcgctttctctgtatcttttgacttcccattcatacttagaagaatacctagtaaactgtcacacacatttttctcgatgtgcattatattaagattatgtcataaggataaatttttccaatactcaagtttaaaaaatatactctttttcgaccaatttagctcttaagtagaacgtttttgcttgacactctcgaattatttgtgttttcctagcaaacagaattaaattctctccgattgtgctaaaatatcaaccccgtcaatactggaggtggtgctcttttcttagtcttcctatgtacttttttgctttcccttcttgggtcattaattcatttccaaaaaacgtctatgaccaacgtatatagtatctgattttactgttattgtgatattttgcacatgcaagtgcacatatcgtgacaagtagtaaactcaccaagagtgagatcgatcctacgaggattgtagttaagtacgtt

SEQ ID NO: 155991 - DNA, 1073 bp, Cannabis sativa
aactcgttcttcatcaactccttcccctgttcaaaagaaaagttctaaaatggggttgaaatctttagctaatagaaacaagggtaaacgatctgttgtcgaggaggaggactctgattttgctcctccattgtcataacgtgggcgagctccttcaaagaagatttcgaaggtggctgcacaggaaaaaattcctcaagatgatgctcaaaaaaatgatcaagatggagttggtcttcggtatcaggtttgatttcggtttctttttggtttagcccctttttggaatttgtttgtatttttcatttgtgtgctttgtgtttttcgattttactattctaggtttttcattttagcattttgtttggttttttaaggcttctatttttttagtttaatttattagttctttttatggattttttattttcatttgtttaatcttaatttctgtttcattttgttgtcttaatttcatttatttttttatctgcttggattttggaagaataggtcccatgttcctgatttaggtcctgaccctaaagctcctttaacagttgtggagattattgatctaccatctcagcagaaaaagtgagttgttgtttttaagcttattttatgttgtataataactatttaactattttgttttcctttctgggttatagtgattgcggagcatttgtggctgcatttgctgagttcttcatcaatgggaaagatgttccgggtgattttgacattgaattttatcgcactcgacttgctgccctcttcttctcgtacggtcaaaagaaaaatgatgaaagtattgatagcgaggatgagaagcaaagcaagtcttctaaattgaaaaagtacgatcatttttagggaatctttattgttcttggttgattttcatttcagacaatttttagttattttatgtttgtaggtactctatgcattttatattctggaactggttataaaagtttaggatatttgacattaacctttttaatatgttcattttttaaggttttaatagcaacagtgttatgattttacatttaattatgttt

SEQ ID NO: 155992 - DNA, 573 bp, Cannabis sativa
tggcatgattgcccaagtgcaattccacaagtcttcagcatatcgcctgtatagcttgagatagatcgcaccttcgatcctattaactcagcctcgaaggtgacgttgggatcctgaggagttttagacgtacgtggtttgggaggcgtgatttcgaaatccaagtcacctggttcaaaagaaattgtgacattgggtaaaaataaaggctttaccacaggaataaaggacacactgggtgaatctggtcaggccgcttctcgcaagaattggcgtttgcctttgcatatttcttgcaagaagtgcctgtagcgactagagaaatcttcctgttgggttctcactatgtgttccctagccctagcatcgtttagctctaatttagaggtgggttttgagggattgggtttgtatgggatggccaattctgtagggaactcaaactctaaaatttctggacgataaattcctaaactagagtgggacattgataccagtaaaaagcagtcccaatccctggaaagaattttatcaaaccagaaggtaatgagttggagatcttaaaacaaccta

SEQ ID NO: 155993 - DNA, 506 bp, Cannabis sativa
attttttaatatttaattaatgattataaatatcaaccattagatatttgatccaatggtcaagaataaaatacccatacatgggtaatacccattaagagcatacccatatatatatacagagtctacaatataagtataatcatttagggcatttttatttgtgtataattaaatttactattttacaatatatttacaaaaaaaactgatttacataatctaatacaaagtaagtaccattattataagtaatgtattgtgtctattaatataactaattatagaacttaccatatatataatatattaaaaagaaataaacatcatcataaattaattgcataatattcatattattattcaaattttaaattaaatgacgctaatcacttagggtgtgtttggaagtaactgtgtaattactaggtagagtaattactagggtagtaattacacattttaataattacactatattttaaaatgcaatgtgtgtttggata

SEQ ID NO: 155994 - DNA, 631 bp, Cannabis sativa
attggaaatatttaacttattttaatgttattttcagatttgagtcaataaaatagtagcatgtttggagcttgaaaatccaactcaatggatggtatttttgcaaaaataaaagcaaaggatggaagcccaattattatacttctaggaaaatagattcatttgattccactctgtcgtggttttccatgtgctcaacatatggactagatcatataagatgaaagactacacttgggcttcaagtatccagttggtccaaaagaaaaaataacaatgatcccactatctcacctgcatccaactgttcacatattctaccactcctcacaacaagtgtctatcacgtctcccatctcttcagtttttcaagccacttttcccattatactatgtacgaaaattccacctttataaacaatattttctctataaatagagaacaaaatcagtgtaaaaaaaaaaagcatccgattttagtagtgttattataccaaaattttatctttttctttccttcttctttattttactttattaattttggtgtaaagacaatgcctaatctagactaatttctttggcaagactcaagtgtaagttcatacaatttttattcttctaatatatt

SEQ ID NO: 155995 - DNA, 525 bp, Cannabis sativa
  modified_base (310)..(313): a, c, t, g, unknown or other
agctcgagttctgcttctgcagaagtccaggaggtcaagaatgaggttcatttggtgaacaatcatcttgctaccatggaggaggttcagcaacagatttccaagcagctgtcctccttgaacaagctttatagagaataagtttttctttcttttattgcttttgttggacatattactatactttcatgtttgttatctttggcccttagataaacaaaaagggggagtaatattttgttttttaactgtttatttttatcaactctgaaccctttttctagggggagttgtgtttggtacttgcgannnntttggattaaaagttagcatgtttgtttgttgtttttggttttcgattgtgtcaccaagggggagttgttatttgttcttgctaacttaaatttgcaggtacttatgtattaaaaaatattttgttcatctaaagtgccaaagggggagatcgtaaagtctttttttggcaagttagttaacaaaatatttttcctttatggtaagattatt

SEQ ID NO: 155996 - DNA, 517 bp, Cannabis sativa
atgaagcacctaaattataaaaaataaatacgaccccatagcaaaggtcacacaattaaattggaagagattgaaaaagtttatatagttagttaattaattattaaaaaatgaataaaagaccttagcaaatgccatatattaaattggaatagaaaaggaaaatttctatagttaatcaattaattattattattatcgattactcattattttcttaaataaaaataattaactaatttaattaaagaaaatagaataaaaagttaaataaaattaaaattttgagagaagctcatttgagcggcttgtttcaattatataaggtttttctaattaatatatacatataaaaataaaaaaaaataaaactatgtaaaattagacgacgctgcatcattgcgtcctaagtttttaccctttttttaaaaaaaaaatcaagttttgtcattagcaatttttctctccgaattttgacatatactaaatcatgctctctgaatttttttggccgtta

SEQ ID NO: 155997 - DNA, 934 bp, Cannabis sativa
tgtaagatgcacaactagattcatgggagcattacaaggttttgctcccaatattctgtctcagttaacaaatcaagtgcatactttctttgagatagaaaataccttgtttatactgagtaacttcaacactcaagaaatattgagcacccctaaatcttttgtgtgaaactaggtatgaatgaaagactcaaggggcgagataccttcaatatcattttcattaataacgatgtcatcaacatacaccactgacaaattaatactagtagttgatcttttatagaacacaaaatgaatagaagtactttttcaacaacctgactaaatttaccaaaccaagcacgaggactttgttttaatccatataaaaatttgcaaagacgaaaaactcgtcctaactcattttgagcaacaaacacaggaggttgttccatatacacttcttcctaaagatcttcatgaagaaagcattcgtaatatcaagctgatgcaaagactaatgatgagtaactgccatagaaatgaacagtcgaacagatgtgagtttagcaacgagagaaaaagtattacaatagtccacttcataagtttgagcataacccttggcaacaagacagacttttaaacgagcaattgttctatcttgattgactttaatcgtaagcacccatttgcaccctataacccgtttttctgaaggtaaattaaccaagtctcaagtaccatttgcaactaaagcattcatctcttctatcattgtagcaagccaaccaagatgagacattgcttcacgaacaattttagaaatagtgatagaatcaagagaagcaataaaagagaaagaagaagaggagagatgattatagaaaacaaaaaaaataaataagatatgtacgttggtgtttacctttacgtagtgcaatgggaagat

SEQ ID NO: 155998 - DNA, 668 bp, Cannabis sativa
taaaaatcacgtaatacgcctacggtagttagggtgttacctctagtgaccctcatgtggcaagggtaactaccagaaggaaagttctcaatgaccttaaggctggatcatttgatggagagatcatggatggaattatcgaagcatttgagaaatttgctgaaaatgaagcgagaaacaacttcgtcggggaagatactgaagaggacccaattgatacctctagtctagttaatctcagagcaaaaaaaattacttcaaggggtctcaaattgactcatacacgttgttcttcaacacctcaaatttctttcgtggcccctcctagtaccatctttgatcttcaattccaacacctagaaggaatgaccatgaacgacaaggactgtaacattgtgttcccctccaaggatcaattagctcataattttcaagagggattacgtgcttggtcttgacgtcatatcaattacagtggggctctccctctccataattttttttaaagatgtggtcgattactttggcattggccctaggcaattctcccgatggctagaggtgttcgcggtttgggtggtgtgggttgtagctattttttcaaaccaaactgcatttgcggttttaataatttttcaaaccgtaaccgtaccgcaagatcttaaaac

SEQ ID NO: 155999 - DNA, 706 bp, Cannabis sativa
ttcacattcttctttccatagctgacacttatggctatgagatatggcagatggacatcaagacttcttttttaaatggagatcttgatgagatcatttatatggaacaaccagaaggatatgtgctacaaaggaaagatcgaaaggtgtgcaagttgtataaatccatttacggattgaagtaagcctctagatcttggaatatcacctttaataagactattaaagagtattgcttcgaccaaaatgaagacgaagtctgtgtatacaaatacattaaaggtaatgtagttgtattcctagttatttatgttgatgacattctacttattggaaataatgtagaatggttatcaaacgtaaataagtggttagaccataaatttcaaatgaaagatttgggagaatcaagctatgttctcgggatcaaaatctatagagatagaaagcagagaatattagcactttctcaagcaacttatattaataaggtgttgaaaaaattctcaatggagaattctaagaaaggaaaattactgttcagacatggaattactctatgtaaggatcaatatccaaagactcctcatgagatggaggacatgaaaaagtacccttatgcattaatagttgggagcttgatgtatgaaatattgtgtacaaggcctaacatatgctacgttgtagggattgttagtcgttacca

SEQ ID NO: 156000 - DNA, 509 bp, Cannabis sativa
aagaactgagagtgagaaaagtgaaaagtcgtgagtcattgtcacacgaattagtattgaagacaatgaagagtctttttttttaatctaattaaaaaaatgaataatattacatttagtaatttataatacaacaacttaattaatgtatagtaatacttaagctgaatattgcggcgttttagacttagtaataatgaatagttttttttttctgaatgtaattactgtattattaatattaatttttttttcaaaaaaaaataaaagttacgagttacgggttacgggttacaacccgaccaaataaaaactgtttatccacacccgaacccgaaacccattttaggcttttttgggttcaacccgacccgactatacgggtttttcgggtgtcggtttttttggcagcgggtcggggcgggtgttcgggtttttcgggtgtgcgggtccaaatgtgcagccctaataaaggtcctaaattgtatgccaactactgcatctctgag

SEQ ID NO: 156001 - DNA, 525 bp, Cannabis sativa
taaatatacgacttgctaaaaattctccataaaatataacagttatataattatgtttcttttgttaggttttgttactttcattgttaaaaaattagtatttttatctactaaactttaatcaatacaaaattttgcccctttttatgaacaaaattattttaaaaattataatattctgttaattttgaaaaaattaataaaaaagtttttagtaataaacttgataaaaatattaaatttactttaaaaaacctaaattattcctaacaaaatattttcaaattttaatttatttataaactcatatcttaaaaaaataacaccaaagttatcgaaaatctaataaatttgtgcacaacattcaagttctagaattaatactaagggaaccaagattcgatccgttaggaaagttaggaatattctataattgttaatcatgttctcagccatacacattattagcttcccaaaataaaagttgtaagaatcatcttctctaagaaactaataacatgaaca

SEQ ID NO: 156002 - DNA, 556 bp, Cannabis sativa
ttcactatatatttgagaaactggtttccaacattactttatatttgtttatgtttaacagataatattattttaaaaactgttagttaaaatttatacaatgtattaagaaatcagtttcttttttttttttgtttttatttatttttaaattatatgtgttttttttactatatatttgagaaactggtttctaacattactttatatttgtttatgtttaacagataatatcattttaaaaactgttagtgaaaatttataatgtatttagaaactggttttatattcataattttcagtaatcgtttcatttttgagcgtgtacgtctaaaagtaaatttttcataatgtttatttttcgttttctttttgttttttgtttgtgaaacttcatactctaaatctatattaagtatgaacatttcattatgaagcaatgcatgatcatataattttggtatgaaatttatttcaatctagttttttttttcttttaagtttaaattggaaatgcacatattcgatgtatttttcttttgcagtatatatatgc

SEQ ID NO: 156003 - DNA, 776 bp, Cannabis sativa
attagatattttaatattaggcatattttaaattaaaggatagccttatctttatatttgaaatattatattaaaattatcttataggataaattaagtaatcaataaatttaaaaataacctagatattttttgttgatattctaaccataatatttttaaattctaaaataagttattttgttaaatattttattctttataaattataagttagaaaatgatattttatttcattttacttatcagaaatttataaatagtattttaaatatttaaatatcctagatatttttgtagaaatttgaaaaaggataaatttgagatattttaacatataattaagataattatttgttttttgtttattattttatttttaaaataataattgcgtaaccatatctattttaaaattatttattttcttattttaattttattaaattataagattaaataatgatattgaaaatatctatttgattattttcaaatcatttatcttgttagatatttgatttaattggataaaataattcaaataaacctatatattttaaattggtttgaatttttttaaaattttgaatagataatttaatgttgtttcaacaaccctaaattttcaaaattttgttggttagttaaataataatttatttatataagtaataaatatattatttcacaattcattacatggacattgtttctttatatttaaattgtttattcaaaaacttttttttaacaaacctattatttagttgatc

SEQ ID NO: 156004 - DNA, 720 bp, Cannabis sativa
gactgcctacgtcttcctatgaccggtatcgtactgattttcctaaaggcaatgcgtggccactactcacaagattagcccgtacatcaatcattcattccctccccaaacttcaatcgatttctcaacctcaaccatatcctttattagtgggtgaatcctccacttctgcagcagtcccacttcagggtaatcaaactcaaaacataacaaatgttgcagatcatacaattagtgctattgctaattctcacttggttcatagtgttacttctccattatttactccaccagttctttacaatgcctcattcactatgtccactgccactagccgaaacaaagacataatacacccaccatctgttgaatatggttcgaattcaaaggggaaaggaattcttacttcttgtaccagcagtgattcacttaaaataaacgtctatacaccagacattgtgaaagtccatctactgatatgcataaatctattcctatgatttttgccacttaccctccacagactaccccaattcagactacaacacaacataagtcactgtcgactactgttgttaccactacaacaaaattgattggtactactggtttgagcagaactcaatctgatgtctatggacaagaaaacgtacaacctaaccgtgttttcaaacgacaattcgactctaaatccacgagacaaacactcaaacggtgtag

SEQ ID NO: 156005 - DNA, 702 bp, Cannabis sativa
  modified_base (27)..(28): a, c, t, g, unknown or other
tctgtattaattagtaaatctgattannttgaaatgagttttatttagggaacaaaacccaacagttctttcatgtgtgggatttgggtcgagttttcgccatttcaaagaaatttttggtggtcacttggttggagtttgcttacgtaactagctggaaagggtgttatggactaaaggaagctttgacatgggacttacggtccatcaactctaacaaaaccataggtgacaggtttgttcttgctggtattgtcgtgggagagctattcaagtttccttggctctattttctagtattggggacatcacaaattgttgcaaagttgaacttttgtgttttactaatgccattccagagttggattttcgatacagggcgccaaatacaactccaacattctgactgtgcatccaggacatcacaaaataccacattattagcctggttcgttgacagaggtcgcgcacagcatggggctctcatgggtgatttcatcaatcaccttgaggacaaggcgaacttcagacgaccggtaatattaggccctaggattagtatggtgggctagcatatattaaacaaaagggtatttgagtctttgtattgggggtagtgtttagaagggaatacaatagtatatataagtgagtaagggagtagtgagggtatgcaataggggcctaagggctcccaccaat

SEQ ID NO: 156006 - DNA, 585 bp, Cannabis sativa
  modified_base (537)..(540): a, c, t, g, unknown or other
ggagactattaactgccgctatttctcaaaatttacttcaacacgtggtaattttaaataagtaaacgaatcagttaaaattagaactaacaatactacaaaaaacgtgacattggagactattaactgccgctatttttcaaaattagggactaatctacataaagtaaatcttttaaagactttcgttgcaatttttttattataaaattaacagagattttaagtttatacaattaaaaggagttttattttcactccatatttttataaaagcacctcatttaatcatctttattttatataagaaaaaattataatttctcctaatttttttctaccttcttatattcttaaaagtcatacatataaaataaaaataagatataacttaattaagacaaaaaaattgaaataaaaaattaaatgaaaatttatcaaaaaaataaatataattacaaataacttttttaaaaaatatttaaatagaataaaaataattattaatttttttttaaatatacagtagaacctctnnnnaagaatacacttgggactaagaaaataatattctaattgagaggt

SEQ ID NO: 156007 - DNA, 553 bp, Cannabis sativa
ctaaataaactatgaaaagacaactataccccagttccaaaattttgtgtaaatggttctttaaattatattgtatatttttttttttttttttttttaaatgtattgtatatctattttactttatttgatttaatttttactttcgttttcatatttttaatatctacccatttttatttgatttagttctttaaattatatgctagagaaagtgtgaaagtatattggacaactcactcataaaagtgaatattttaataaaatataatatgagagtatttttaattaatgaatacaaaaaataagtatttttcaaattatccttttattggatcacttttaatattttaaatatatttagatctgatcaaattatatattggatgttagattatactattcatccgattcaattaattttagtcatccaatcaagatgttggattggatcatttctatctattagatatatttcatatatatttattagtttaatttgggtttattcaatattttagacctaatatttttttggatcggattggatcca

SEQ ID NO: 156008 - DNA, 533 bp, Cannabis sativa
aaagaagagtgctcactcactcaactcaactcatcactacactcatttcaagaaaaagccttaattgacgagacattcgatttgacatttatatttttttcctatacgactgggtccaccctggctcccatggacccaccaatcgtgcaagacccacgtgcacaactgtcacttgtgtcgttctattaattgccacacaattcttacacgtggacacatcacatcccttcatttcgcacctcaccgtacgattttatttttatcattttgggtcccacctcttgaccaatgaaaatcataaacgtcaaaaaagtgggccccattttttcccacttaaatttatcttttagacttttgtccgtacggacactcatcgtgttgaatccattttattttaatttcttattttactaattaatttcaatttaaatggatgtaataatataatctctaatcattcagaaaaataaataaataaatatgtacaccacgtaaaatataattattaccattataatttttttcttaaaaaa

SEQ ID NO: 156009 - DNA, 695 bp, Cannabis sativa
catcttcaaagaaatctgattcagaggatattgatttgatgaaatctaagttggagatggtcatttcgaatcaagcatcattggctgaagacttcatatcctagaggtgctttgttgatcttaatttcaagtctgtaatgactgtaattaaggatattcaggagaaggttaatgccattcattgtcgtccttctgatgaggtatttaatcatagtttattgtttatgttttttcatgctttgtttttagtttctttactgttttatttaagttgcatttgtgttgtttgaatcagggaaagtcatcggatgaattagtaactcaagattctgatgctgatgatgatcatgatactgaggatgatgagaaggaactgcctgatcctgaaaatattaattccgactccgatgatggtgatgagttggttaaaggtggtggtgatgatgatgatgctgataaggttgttaatgatgttcctccttctgatgtgaatccttctgaggctgttggaggcagtgatgagagggctaaggatgttgagaagccaaagggcaatgagtctggattaaagggggacgatttttttgttgggttaagccagcttgaaatatatgatgatcaagttgtgttggctggcttggaggctgttcgtaaaatccatgtaagtgtatcttaatttgtttgcaagaaaatta

SEQ ID NO: 156010 - DNA, 1040 bp, Cannabis sativa
gatattcttgattattgtgatgtcgacacaataaaaaataattaagattgtgtgattaaataaaattcctatgatttatcaatacacagaattttactgaaaggataacctacaatgtagtttatttacaccttatggtctacaaaacaagtctttagatgtacttttcttaaacttaataataaacaaccgatgctatagaattgggttttatgccctaaataaaattctattttattgtaatcttaaatattcttttatcaataaagaaacagatttatttcattacttgtttaatgtgttatttggttcacatgtttatttcctgatcatttctttgatttataaattcatccaaatctttatcatattgatattcttgattattgtgatgttgacacagtaaaaattaattaagattgtgtgattaaataaattcctatgatttatcaatacacagaattttactgaaatgataatctacaatgtagtttatttacaccttatggtctacaaaacaagtctttagaggtacttttcttaaacttaataataaacaaccgatgctatatagtgtggataaataaaattttaataaaaacaccatatagcgtcgattattacaaaataatcgacgccatatggtgttaaacttttaataacaccacattcggcgtcgattattttgtaataaccgacgctataggggcacgcattggctgatcccctttggcgtcggttatcacaaaataaccaacaccatggggtttatataaccctattcagctctttgatttactcacttcgtcttctccccaaaaaaataaccactagccccttcatgaaaccctcgcctaacccgcctcccatcccccatttctctatttttcatccgttttttttttttaaaaaaaaaaaatgttgcatttttcacacccaataacatattcccaaagtttgatatcttttgttttgtttttcagggtaaactgagcttagaggtggtggttgtggtggttttagctccggctgccgctttt

SEQ ID NO: 156011 - DNA, 591 bp, Cannabis sativa
atacattttcaatactacaataattttattagttcaacacaaattaggaataacacaaatttcttaagtaacttaagtccatttatatatatatattatttattgtattttaattttcttattatgtttaaagtaaaacaagtactgatatgtagtactattggtgaagactacacatttattgttgtgataagactacacatttgttctctggattcaattcaacttatataacaattattattttttccaaatagtttgaagtacacacatggttttagtattgctttggtaagttttcttcttttgtgttagtgataaatacaagtttttgtccaaaggtttaacctatacaataactatataaaatggcctagttttttgctagatcacaattattattttatattttatttatattttaatcacttcatgcatgtaattttgtttttattgcttttaaaaacaaaattagctctaagtctaaaaccgcctttcacaagtccttacagagttattactacataaacattagaaattatttctatgtttatgaataattgttaattctaaaataattatttgagaatt

SEQ ID NO: 156012 - DNA, 625 bp, Cannabis sativa
  modified_base (65)..(69): a, c, t, g, unknown or other
  modified_base (136)..(136): a, c, t, g, unknown or other
taataattcaaggtccatcagtgatgatacataactttgtaaattcaaaattaccagaaagttannnnnctgaagaaaattctacactgtgttatctatatttcattttttaaaaaagaatgagagatatgtcttntgtttattcagatgtacttaataagcagtaaagaattcagtatcccttgatgagtaatgcatatagaaaataatgttgcataacgttttatgaacatagttcaaggaatttgggttgagtcaaatttactacacttgatttgaagatcaagacaatagattgattcaaatgcacaacttgttttatgttagtgcaagtgggagtatgttgggattttatgccctaattaaaacccattacaatctaatttgatttgttatcaataaaagattagaagtcatttatatttacatgttttcatgtttatggtttaatatatgtacaaaatctgttatgtctagaacatatagtcatttacaattacagtgatgtcaacacagtggaatgttattatgattatatgcttcgaaagacaaagtccctgtttcatcagcgctttggatgtacactgatgtgataatcagcgatgaagtgtacttacactttgca

SEQ ID NO: 156013 - DNA, 592 bp, Cannabis sativa
ggcataaaacccaacagctccagcattttttagaaaaatggcatgactttgtagcaatatagacccatatctgttcgaaaaattgtatgttcttggtccggtggctgaattttaatttgattgtaccccgaataagcatccatgaagcttaatatttcatgcccggatgttgcatccacaagctgatcgattcttggaagtggaaaacagtctttcggcatgctttgttgaggtctgtgaaatcaatacatactctccatttcttgttcgacttgggtaccagtacgggatttgcaacccaagatgggtttcaattatgaaattattgttgcgtagcttctctacctcttcctttagggctattgcttgctctttgtccaatagccttcgcttttgttgaactggtcggaagttgggatcaatatttaggatgtgcaaaattacagaaggatcaattctgaccatatcctcatgtgaccaggcaaaaccttgcaggtttactctctgaaattttatcaatgctgattttacttcgagcaacaaaccttttcatatttttagctttctagccagaatatctggatcgatctcg

SEQ ID NO: 156014 - DNA, 535 bp, Cannabis sativa
gcaccgagtctaggtcttgattaggattcaggtccgggtcccagttcggatctaggtctgggtgggaaactgggtcctggtctagttacaattttgggtcaaggtacaggtcgaagtcctggttccggtcccgttcctgggtctcagtctacttctgatttttgttccaatttcaggtcatagggtatggctttggatcaaggtttgagtttgggaatgagttcaggtccaggtccgggtttgcatcttggtctgggttcgggtttggggctgggtcacagatccagacactgactacggggtcgatccaagcccctggtcctgatctggaccctgatctcgcgtgctgctctggttccatttttggtgcggggtcacgagctaggtcctaggttcaagtccgggtctggggtcaagtcttgggtcccaatcttagttccattgcccaggtcccaatcttgattttggttccaggtcccgattctagtctaggtttgtgtcccggtgtaagttcaggtttgggtcctagtcgcgg

SEQ ID NO: 156015 - DNA, 621 bp, Cannabis sativa
acacatggtgaccaaaaaacaaagagagcggaaccaacgagaggctcaacacatggcgtataccttagaggcaaaggcacgctatgaccctagtacttgggatcccagcgtctcaattgaacgtccaaacagtagtttggagtcgtccgatgtgcaaagttacctctctctgtacgctcttggtgagggggtgaaggtagtcccagcgaagaaaggccaaaatgttggctctgccctagatgattcatgtgcctggacaaaatacatcgaggttggagcgaccttgccactccatgattactttcgagatgtggagaactactttgacatttccccggtccaaattgctcctcatgggtaccggccttatctgctttgttcataatatatcatcagaagggatggggaaggccttctcctcatgaaattcactacctcctttcctttcggacttgcccctctatgaaccattcagaatacttctacttcctgaatcaagagcagggtcaaccgtatgtttctggtatttgtaacacaaacggcggagacaagcatcggtcatcctacttttttacaacccccatggacactacccaccgtgctttcaaccatacgggtaca

SEQ ID NO: 156016 - DNA, 509 bp, Cannabis sativa
tcattattaattattaaatctgattaaatttaaggcacaaagcccaacagattaggtatcagaaaaattcaggagaggaacattgaactgcagttaagcatattctaaagtacttgaaaagtacaaggcattacgtgttagtctacaagggtggtgctttaaatcccgtagcctataccgactcagatttttaggcttgtcttgatgacaaaaaatctacatctgggatggtgtttactctagggggtggaacagttttttggagaagtgctaaagaaaccacaacgtctgactctaccatggaggccgagtacatatgctaaggaacttgtttggcttagaaagttcttcacaggacttggtgttgttcctggaattcaaaaaccactggttttacttttttataacactggatctattgccaacagtaaagagcctcgaagccacaagagaagcaaacgcatagagaggaaatatcacatcattagggaatatgtggcaagagggga

SEQ ID NO: 156017 - DNA, 924 bp, Cannabis sativa
tggagttagggcttgggaaaatgactggctactccgtctgcaaatcttcaaacggagcagtgatcgctgtgaaaagatgaagtcggaagaaactcgtagaaaaaatgtcaagggcagagatgacatgcaagtcttcggacagactcaatggtcattcttggcgaagaagcttaagagtttctcaaactttctaaaatgcaagaaataatgcaaaggtggttcgttttttcttactttatactcatgatattggattcgtcagattagaaagatttgatcctacgaacataattcaaagcagaagtagaaaagatggtcataaatcaaaggacatgagtcttttcaaaaagagggatcatgacgaaaataccttttgtaatcatgaaaaagctctttttattaaaaaagaactttttaaggggcaatcgtcatacccaaaattcggcgagcacatcagaagaagacacgtgtccagcttggaataatgaagaactcaagcaatcgtaattacacttgacgtggaataacaagttaaaagcataattaacagagtatatttataactcggctgattgaacagtcttatgcgagataaaaatgtactaactattgacttgtgtctagatgagaaaccatgtaaatgcaagtgtgcatgacgaggcagtaacctcgtcgcgtggaggagatataataacaatagaaatacttagcgtatattacatggtatacaaagtaagtataaatagaggggtgaatcaatgtggtagatagcgaggcgtccatctcgctgtaagatggcatgcacgcaagaaagatgatctcgacaccagaaatcgtagttgtcagaattaaagtaaaagtaatatcaaccttggaaagacatatgacgagctctagctcgccatcaaagttaactcagctcca

SEQ ID NO: 156018 - DNA, 527 bp, Cannabis sativa
  modified_base (386)..(391): a, c, t, g, unknown or other
ttcccgggattagggttttaatcttgtaacttacccgatttcataatgtgattagggcatccgtctagcacaagacttttccttcaggtcgcccagcacacttgaatctggaaagaaggtaagaaactgaatataatgtgtgatatcaatatatgagtgtatgtatatgttatgtgtatatgcatgcttaaagtgttatttgcactaccaacacttgtacagtatggtacagagtgcatcggtatagtgaatattggttaggagtacagtacagtgacaccagcacaagtacatgaaggtactgagtgtgtgttgtacatcactcagtggtactcagggcatgaaataaaccctactaacactcgtacagtgaggtacgtagtgtnnnnnntatagtggctataccctagtatggaacgttcttaattatctattgagccttgtaaataggtgtatgggcgcctagttacaagtcggaaattgtatgatatgttatatgcttttcttatggagtctgtcgactcaca

SEQ ID NO: 156019 - DNA, 554 bp, Cannabis sativa
  modified_base (272)..(272): a, c, t, g, unknown or other
aaaataaaatcaagcaacaactatgttaattggagttaagtgccatgatttttcaagttgaattacagttgcatcatcatttcataatagttttattcaatattacagatatttattttggacagaggaaaaagagaacacttggacaaatggttagtttgtgtaataaatttaaaacatttcgtaatagttgcatttcagttttttcatagtttcataacagtaataaaataaaaaatgacaaaaatagggttcagaactggaaatacaanacttgaacagaggaaaggaaatagaagtaagtttccattctattgcattacgatttcctaatagttgttttccagtttccagtacagcttgacaattgattatattgatctaatttgtaggtaaagccaataaacgagagcatgttcgaagtggtagaactaacaagatgcatgggtgatcaatctaaaggagaaaacatgcagttgcaaccgatttcaaattgacgaattaccgcgtgctcatgcgcttgctgtgataaaagagatgaacttgaatgttta

SEQ ID NO: 156020 - DNA, 793 bp, Cannabis sativa
tataaaagaatagatacttatctcatagtgtagctgttgatttatatccacacaaatatttaaatcttttgttgtattttttttaactcttttgttatatccaggacatgacatattgtagaatgttgtgatatatttatcataataattttttcttgtattcagaattttgcaacttaaattatattatatatatatatatatatattagttagaaataatttttagtttacattattttacgtaaagtaataaaattatattttatttgaaataattttaaacaaaataaaatataaatatttatcttcattagttgtaatgttgtcattaaatattggatattctcgattttaataatttttcttactccaactaatgctgaagatactgatggatatgtatgacttttttaaatatattttttatttttaatttattcttatctaccttgagaaatgttaaaataatatattgttataattaatttttttttgtaattttttttaatcttcatttattctataatatataagtaattatatttatttgagaaattactattttctcattgttgttgtttgttgtagttaaggattgattataaagttagttatttttgtcgttgacaaagttaaacctaaacataaaattaataaattagatgaagaaattattatctttaaaaattaacagtatacatatatgaatatatatattaaaactagcaaaaagctacgtgcgagacacgtttattaaattttatgctagtttttttctatgttatttgaaa

SEQ ID NO: 156021 - DNA, 651 bp, Cannabis sativa
tacgtttaaaaatcacataatacgcctatgctagttagggtgttacagatgggctcggtgtgaatacatgtataactattctctcgatacaaaactcaatttgagttgtctagacagataattgctttgggtcacagatgaaatctttcatttattgtaattctctttaattgaattatgttgtttaaggatcagcatgagaattaagttctcaaaggtaatttagcttttacaagatgtcgatcaattagaaagaacaatgacaatccttcaagcaagttgttcaacagttttttttgtccactgaccatttgaaaaggccttataacccatcttgttgtttgtaaagaatcattgtcttgtaatggactcatcatgtaacacttactaaatttataatgttgcattcaagaaacatatttatgttagtaaattggttatagtgctttctattaaattatagttgtgcaatgaagaatggattgcaatctccaatccacattatctctttattatgcatcaagtcgggctctctccactccttccttactcttgtgcgattgagtttcaatagaaataattttttatcataaaatgattgagttagataaaaaaaaaaaaaaagataaaaaaagaacatttagttttcta

SEQ ID NO: 156022 - DNA, 630 bp, Cannabis sativa
aatgtgaatgtgatatacaagctcacctgattaggtgatgtgatatatgggtgccaggttatggcacaggcttgcgtcattaggcaatgtgatatacaagctcacctaattaggtgatgtgattgatatatggatgctaggtttgcctgagtaggcaatgcgatatatgaatgttagactatggcatgcctgattaggcaatgcgacttatggatgccaggctacaccatatgcttgcttgattaggtaatgcaatatatgaatgttagactatgacatgagcttacctgattaggcaatgcaacatatggatgccaggctagatcataggcttgcttgtttaggcaatgcgatatatgaatgccatgctatggcatgaatttttgtgagtaggaaatgtattatgttgataccgatatttgggttgttcgtgtgaggaaactgcaaaaaagtcatgactctaaactgaaccattgttaggtttttttcctgtcggcaatgcttatttaggcacaggcgacagttacatgcgagtgccaggctatggcacaggctcatctatttaggcgatccattcctatcggcgatggttgtttaggcatgggtggtagtgacatgtgagtgctaggc

SEQ ID NO: 156023 - DNA, 647 bp, Cannabis sativa
  modified_base (322)..(325): a, c, t, g, unknown or other
cagggttcttgatttggttttcaattggatgggatataaagggtggccgactgattatgcaagttggtgtatttggttagctttgcgagggaatggctctttgcacaggattaatgcttctattttggcagaagtgattaaaattcttatgttcgacaaaattgtagaaaatatgctataaatacggttagaaataatagatagattacaatggaagaataaaataagatgaataaaaaacaaagacaattacaactctaaataaaatattacaaggacaatatattaaataaagaattataatcccaaagcacaaaatacnnnnaaaagaaaagagttacaactcaaagatacaagtaaatgtaaactatataaaagtatatatatatatataataaatgatatatagtagagatataaatagtttatatagagagtgtatatatagtatgtatataatatatataatactatatattcaaaatatattatatatatatgatagtatatatataggagagtttagaggagaataagagaacaatattaaatttgagaatagaacaaaataagaaagaagaacaaacacccaaagtggagatggggatcaccaaaagcttgaacaaagtttctacacctttgtccaa

SEQ ID NO: 156024 - DNA, 753 bp, Cannabis sativa
  modified_base (358)..(367): a, c, t, g, unknown or other
  modified_base (461)..(462): a, c, t, g, unknown or other
taccacatgcgttctgattgttttaatccatacaatgatctttgtaatttaattgagcacatttcttgattgcttgaattatatgcatcaagcatcttaaatccttcgtaaatatcactatcttgtgatccatataaataaattgtgactacatccattaatcgcataacgagttttttactcatagccaggctaacgaaatatcctaatgttattacattcaccacaggaaaataggtctcttcataatcaatacctggtctttgagaaaaaccttgtgctagcagtcttgctttgtatctcacaacttcatttttcccatttcttttacgcaaacatacctatttgtatccaacgnnnnnnnnnncttcaggtgtttggactataggtccaaatactttgcatttagcaagtaaatttaattatttgcttctttctattttgacattctttgatagatnnaggttcaagatcctcattttcatttataatttctggcgctacattataagcaaaaaatattgttgacaattacttcgagtctgccccattcttttcctgtattgatataatttattgagatctcattatttctaatattttcgggtatttgaatttcttcaagagatttgtttatgtcaacatctttctcgaaatttttagcatcatcattagggtcatcttaattatttgctcattttcttttttgaggatttttatttttggaattgactggtctaccacgtttcaaac

SEQ ID NO: 156025 - DNA, 500 bp, Cannabis sativa
  modified_base (439)..(455): a, c, t, g, unknown or other
cctaattatctgctaatttccaaacttaaactaagcggtctttacatcatcactccttgttgtatttgaaggttagtgtaaatttataatatattattgtagttttaaaaaattaaaatattgcctattagtagagagtttgatcaatatcttatgtattcatctatagtagggctgaacatcgggcgggtttgccgggtttcaggatcgcaagtttcgtgttcacgagttcacgggtttcgagttcaaaaaaatgaaaccgaacccgaacccaaatagagaacgggttggcaggttggcgggtttcaattgaccgggttggcgggttgacccggtcaactcggtcaactctttaaaaaaattaattttttattcaaataattatttcttgggaaattaatatactgtttttttaactttttttttcaaatttacggtnnnnnnnnnnnnnnnnnttgcagcgctagttgcaatagggttttctatacgattttttgttg

SEQ ID NO: 156026 - DNA, 684 bp, Cannabis sativa
taattatttaatatataagttacctgatttaatttatcaaattaattgtcaaaatattcagacaattaattgtggcagagaccttgatggaaggtctcacttatataaatatagggtcttgatccccgagctcactactcattatgtagtaaatctatctaaagagagtagagagagcttggaagcctgattactcacatcaatcagtttcttttgcaaatcaaagcttgtgtgggactaaagctcaaagattcaatgacatgaggtatttcgatccttaagttatatcgtgtatatattcgtttattccacattttatatacacattcatatattttatattatccattaacaatgtttgaagcttttattgggcgaaaatggggaaagttaggaattatgcagattgtgcggatgaatgaaagatgtactatagttaaattgttaatgagatattataatcaattttagtcaataatcaatataatgtagaaacctaaattagatttcataattaaaacacataaaccctaagagtttaatcataaaattcttcaaacttactcaataattttaaacatgcaatatatcagcagaaagagaatttaacaaggaataaaacccctaaagttttaagattaaacaacaaaaaatttaacataaaataataacgaaattaatatg

SEQ ID NO: 156027 - DNA, 713 bp, Cannabis sativa
ttaaaattatgatattaaaaaaaactaaaaactaaaataaaattaacatacgtgtgatttggcacgtaatatctatctaatatttgagtaaagttgtaatgtcttgattttctttcattataataaaacctctaacaactttatcatggtactagacactataagtacctcataataatactccaaaaaaaacataaccgacattacactgataatctttttatatataatcctttcatgcgagttcgtgttctcctggacactactaagcccctccaccgtggaatgaatgtccgatttaggaaactctcccttaccaaatggctcaaatttctttatgaaggtattcagaactattgctatcattgtggaaaacttgaccacactttcaacaagtgtgacaagtttcttcatcattgtgaccatcacccttttccccctagtttaagctataaggatgtccttagagcccctgccaaatccatttataagaagagtattttcgaattgtccaactccattccctttgaggaacaaccatcccttaccaaccttgaacaccataactctcaggaccaaacaaatagttttcttgtgaccactgttcccaccaccttccctgccactgtagcatcctctactttcattcatcgcactactgatccctaccccaacgttactcacccccaccagcctcaaacggtcaatcccac

SEQ ID NO: 156028 - DNA, 519 bp, Cannabis sativa
acttgtatattgtgtactctaattctttaaatagttaaaaattaacttataccatgtaattcaatgattgagttatttaaaatatgtaactatatagttaccaagacttatacaatgcactttaatggtgaaatccctatacaattataaaacataccttaattataatctatagattatacttaaatggttatgcatacatattttataaaataattttatttatatattgaatctcatatatataatgtaattaaatagtcatttagacttatacaatatactttaatggtgaatcactatacaattataaaatatactttatttataatctatagattatacttaaatgattatacatacatatttttaaaataatttaatttatatattgaatctcatatataatctaattaaataatcacatagacttatacaattatataacatactataattgtatttataaattatactaaatgattatacacatacatacttaatgaaataacttagaaa

SEQ ID NO: 156029 - DNA, 929 bp, Cannabis sativa
aaaaaaaaaaaaaaattaaaccaaaaaacccttataaatgtcccaaataaataaggactacctaaacacccctatagaaagtgtattataaatttttcggaaaaaaacaggaaaattccaaaaagagaaaaatattataatattactatggaccggcccatttaacatttataccgcctacaatgaaaaaaattacaaaaatatcatctggtctataccttaagccgcacgtaacgaacggagaagatgaagaaacctccatcgatccaatctgcaacgcaaccagaatgaaaccagaacgagggtaaaacaaccataaattcgggcaaaaattgattggaaaagaagaactcgaatgatctaaacaagaaaattacgaaaaaaaaaccagtaaaactgtgaagaaactgaaattaaacatttaattttgattttaatcattcaaaataactcaatccagaatcgaaaatccagattcaagcaatgtagatctgtattaaacagatctggagctccccatcgaatccaaaacaaggtataatatgaaaatttattcaaaaatgaatctacgtcatatacagttgcattttggttgattcgctagtttacaataggcaattcagattcttaaaaacaaaaaacaagatctgattctaattaaggaacgacatgttacgtataagcctatttttaattttttgtgttgccttacagttgcaatatcgttttaaaatagtttacaaattatgaaggagtgtcacttgacgtgtaccaaaaactagcagatatacaaggtacgatttatgtaagtggtggtaaattagttttataatagttggaaattgatctgattcaaataaaactgatgaaaaggcacaatgacaagaactatgttaaattgagtaaagtgttatggtttttcaagttga

SEQ ID NO: 156030 - DNA, 834 bp, Cannabis sativa
  modified_base (785)..(791): a, c, t, g, unknown or other
ggtttccagattttttttttttttgcttggtttccttttcctttttttttttttttggttcggtttccttttttttatgaaattcgaattttgttttttacttgctaatgacacaaagaaaaaaaaaaaccaagtagacaagctttatgaaaaaaaaaaattgggaaaccaatgaaaaacaaaaataaggaaatagatttgtgacacaaatagggaaactagaattcagcaataacaaattggagttttttttttttttttaaattttcgaatttcaattaaaaaagggaaactaattgtcaaaaaaatttggagacaagaaataaaccaaaaaaaattaagagttttgaatttttgattttttttaagaagaaatgaaaagcaaagacatgatgtttgacaaaagaaaattatcagaatgtggctctaacagttttcagatttcacaaagaaaaaacaaaagagatgaaacacgaattgacaggaaagtagaacacaagttaaacaagattatagaacatgaattgaaaagaaaaacacaaaagatggataggccaaacccgatgatgctaggctttgataccaaatgatacgaaccacaccaatagttgtgatgaaactcgacactaaatatggcagactctaagaattctcaaaatttggatgaggaaccgcaacccaatgcttagttaagcattaaccttggtatgaaggaagacgtcacaaacggtgttggaaatctatttgataagtcaggttgaacgccacaaggaatactccttgannnnnnngaatagttctctcaagaactcaagaagaaaacctctcaaaatt

SEQ ID NO: 156031 - DNA, 719 bp, Cannabis sativa
ggtgggggaatcatgccaaagaatactatttttcccacttgggccatttcttgggtcggtcccggatgagctctggacctccggcgcccattcccgtggatcattcagtccacttgtcctccagctggtttatcccctcggacaactttcttggggatgacgaagccagcactgtagttcaagactttgctagggctgaattagagagtcagggtaggattagttttattgctttgttgttgggcgcatgccttcttatgattattctaacactttgtttatttctttattgcagcagccaagccaatggaagatctcctggctaccctggccgaggcctacagccttgatgcttctctgcttccggcctcatcccaactggtgacaatcgggaggtcctcgtccagtgcccctttaggcacaatagtcttgatagacgaggagggggaagtcgaggaggatgagggcaagattgcggccacccttgagcgcaagcggaagggtaaaatgattgagaccgagccttccaaccagccccgtaggagggacactccagctgttagcgctgactccaggattccttctgaagcagaggagtatactgtgccgcacggcatcgttctcaccccgatccccacagacgaggaaaggcaaatgctccgcatcgccaaacataactacgccctagaggagttcagccggggacatgctgaggtgga

SEQ ID NO: 156032 - DNA, 804 bp, Cannabis sativa
tatatgttctgtacttaatagaatcaacatagaatgatttctaatctttattaattagtaaattttattatagtgaaatgagttttatttagggcacaaaccccatcactctctccagccatacaatatttttttctctctcatgcgattcaaattgcttagtttctcatgcaatcaaaatcaatcaccgaagatccttcatcaaaaaattagtttcttcatcaagaaactggttttttcatcaagaaacatgttttttcataaagaaaaaaactaattttttagtgttttaatttatgatttttccagcgataataccaatttcaatgacttttttggcaccaatagcaaccccgacgacttttttaacactagcagctatgcagacaacttttttagcactgacagtaaactccgacaatttttccagccccagtgacaaataaaattgcttaaaaacaaataaaaatattaaatatggactttgaaaacttaaattacacatatatatatgtcatatcaaatataataaaaatacttaaaaataaaaaaatatcacgtaaattagtcaaacataaaaatgccatatttaattaaataacttttaaaatctaatttccactattatatctaacttactctattattttgggcctagaccggcttggactaatgggcatactagtggctagtgaggtgaatcttacttaagtaggtcaattttactttattttgcattcttgggcctggactttatgggcacatttttcagtattgggcttaccttgggataagttgaaaaat

SEQ ID NO: 156033 - DNA, 511 bp, Cannabis sativa
ttagccatagaatgatgtgcttaggagagttaagtcgactccacacaatggtagtccaatgctctttagttacatcaggaacaagtttaatttttatacccttgtgcaatctagtatttgatgcttgtagcttccctgtctcctctgtcaaacagttcattcaatctctcctttaaagtgaccaatttcctccaatgccagctaatgctttagcactttagcaccgtagttccaccaaatctctcatttgatatatagatgcaatgtactcatttaaccaacaatttttcctctttcttagcaacaacccacacatatttgaacatactttattccaatcagaaacctgtttaaaccccaacccctggtgatttgggttgacagactttgctctaggtcacagcagcagccccagttaaatgatggttgttactccataaaaatcctctacagatggtctctatgtctctaacaatacttttagaaaaccattttttgactccaatagaaa

SEQ ID NO: 156034 - DNA, 657 bp, Cannabis sativa
  modified_base (615)..(616): a, c, t, g, unknown or other
tcgacagaaacttgattatagtgaccccaacggcgagctgtaaccattcttatatccgagatcaacaagatatgttttatgtcgattgcagatatgaagaaatctgttgacttgccagggctatgagccttgctcctgttagatgggtggactatagggagcttcctcgtagcgagatcaccatctcacattcttactcttcgagctgattagacttttacacttagtttgcttgttgcgacttagggtatgtgttactcttctcaggtgccttgctattctcctttagccacatatggtttcttgttaataatctatgtaccagttcgtacattgattcctcgcctaagactttacagtcagcaggttgcaaatatactctagtacttactcaattaatgagttattccataaaaagatacggcaccgattcacattctctttatcttgacacatgtcctctagcctaatttcgggtataacaattgccccttaaaaaattcatttttagtaaaaagagctttttaataattacgaagggcattttcgtcaaaatcctttgttgaaaaggatgcctcctttgattctggcggttgtatggtttcgaagatcatnntgaatcgcctattcatattctgcacgattcccaaccattag

SEQ ID NO: 156035 - DNA, 572 bp, Cannabis sativa
aaaaaaaaaaaaaaaaagtcccacattagattttccctacatatatacgaagaattgactattacaataattcatcatttttcattttattttattttttaaaagaaaaattctctattgtaattgtttatattacttgctttaagtatattatttaaattttaatgaatctactcatagtaaagtagtgattgttacatataacgaacatgtaaggcaaattattctattagtatacgtatgccatatatgtttgtatagtaattattctttgcttgattattttttttatttgaatatttttctaataacttttgttatccttaactatttctcatctttaaattatgtatactaatataataaatattctcccactctattctcttcttaattctctcatttttctatttttttattttactttaaattttttatttttttaatttttttaattttttatatactactttaaattctcactgttgaccgaggttttcggcaactgttaaaatataaatataataatgagctgtaagaaagtgagatgaagactttttacgtggttgggg

SEQ ID NO: 156036 - DNA, 516 bp, Cannabis sativa
  modified_base (468)..(487): a, c, t, g, unknown or other
gcctttggttatgtatttgacgatggggtccatccagtttggctttggctcgattgtacccactgtacctttaactttgatgcttggttctgtgaggcactcaacgggcaccacccctagtctctcaacctcgctgtctgatgccaacttggccaaacagtctgcgtgagcgttcttttctctggggattctttccacactatactcggtgaattcatggagcaactctcgacaatagctacgtacttctgtttaccaccagttgcaaatcgctgaagacttctactctcgtggctcccacggtttttgctaattttaatactacgatcagggcttcattattcagcttcattgttaaaagtcaggaattcaaaatgcagggccgcctggagccaaagcccgttcatagatatcatagctatcccaacaccagatctgttaacgaatatcttgttgggttttatgccnnnnnnnnnnnnnnnnnnnntataatcaaatttacttattaatatagat

SEQ ID NO: 156037 - DNA, 595 bp, Cannabis sativa
ttatatcattcactaaacttgttatgatgaaagctacgctaccaggattaaattttactaattgtgcacaataatcatgcagaataacatattgatctttaaccgttccatgtatcttggccatagctttgttcttagctcgataaaaagtccaggagttgagtttagagtacttaccctcaagatttgctttcttgaaatcaccaaatgacatggctagatttgctctgaacttctccaagaactcttttgtaatccaatcagcatctactagcttgttctcccataaaattacacagctgtgttcttcctcaaattttttgattcgcattgtagtgtaatcatctctcatcctccgagcatacattaaccatttatagccttctcctttgcatacaactctaattctcaacctatcattattaatatatttgtactacctgtcaatgctgatgaaatgctcatttaatgcttcactcaattgctcaacagtagggaattcccttcccaattcaaacttgatatttttaggcttgaagtgtggatcaaattcaatgtgtttctttttaagcactggtccatcttcttcatcact

SEQ ID NO: 156038 - DNA, 689 bp, Cannabis sativa
aaacacacattgtattttaaaatacaatgtaattactatacagtgtaattactaccctagtaattacactacatagtaattacacaattgttttcaaacagacccttagttttcttttttaataataatggttacaaacacagaattttttggtttatgagaaattattgagtgattttttttaacacttttaaaatatttcaaatctattttatatggttgtaacagaattcttggtttaacttgttaaatattatttaacattttctttttcttttaataaaaaaaataaacggaaagttaacgtgaaacttcaaatgttaaccattgtataactgttccttacgattaacgtgttcctcccttcattcactttttcctaacctatatcgattaatctgcccactgtctacagcaataaggagattttcctaagagagctcattagcaactcctctgatgtacgttttctctctccttttattactgatgctctaatatttgtttgtttatttataatcacacagacacactcgcacatacagtttatatatgactttgatgttaatttacatgcactcatatatttaaaatgtaaattgtttgattttaaattatatctttgtttgtatgttagatgattgtgaattatttatcagatgaacaaactgttagaaattattttacca

SEQ ID NO: 156039 - DNA, 597 bp, Cannabis sativa
ttagggcataaaacccaacatcacggatgccttagctgccaacaaagaggacatctccctatacggagacattatcaaacaaattcagtcagctttatctcatttccccaatgccacaatccatcatgttaatcgctcaggcaaacacgtttgctcatgaaaataggtaggaatgtagtttaaacatatattaatgcccctgtgaattttcagattcaaacttgggttttgagttataattttataattaaacctacatctcgaaaatttaatattctggcagttttaagatggaaccttcgctatgccataagttaacgtcttggttgaaatagatttttgtatggggtttgttgaaatttacagattttgtttcaaagtgtaattttacactagtttggttctgtttggtaaaacattaaagaaatggtagagggtcacagttggccaaaaatcttttttttgacaattctaaaataatggaatttttgtcaaataaattaaattaatgctaaaaatggaggaaaaaaagagaatgagttttaaaataaagagaaatgtaagtaaatggccctatttttaactctatagatagtt

SEQ ID NO: 156040 - DNA, 625 bp, Cannabis sativa
atgcttttatatttatcattatgctaattttaatattttattattaaattttagttaacatgttcttttgcacttgcattatattattaaattttaaatttaccttagtattattattattactttatattttttaataaattattcaatgagcattaaatgacatattaaattttacatcaagatttacaattatacaatgagcattgttattaggcaccaatagtgctcaatacattctacaggtggtgccccacgattgattagtgatattctctaaaagttattttcttaagttatatagaacccgatacttaatttcaccaataataatatgacattgaggagggtgccagggacagtggtgccttttagcaattcttttatgcaattaagcaccatagtaaaaattaatgtaaaaatgtcacaaaactattttttgtgtcaaatatagctcaacttttatgtctctcattagagagagtcttatagcataaactaaactagagtaatccctatattatattttagggtaaatggcggcaaaactcccaaaacttttattttggtttcatttaacccccaaaacctaaatttgggcggtaaaacccccaaaattaggaaa

SEQ ID NO: 156041 - DNA, 516 bp, Cannabis sativa
catcaagaaattggtttcttgatgaagaaaaaaaaaaccagttttttggtaatttttctggccacaatgtcaattctgacgaatttcccagagtttactgtcggtactgaaaaagtcaccggagtagctgccggtgtattagtcgtcaaagttgctaccaactccagaaaagtcgtcagaattgccattgtcggcagaaaaatcaccaaaaacttggtttcttcatcaagaaaccaaaaaccagtttcttggtaatttttccagcgactatgccaattttgatgacttttccgaagtttgctgtcggtgccgaaaaatttgccggagtagctgctagcgttagaatagtcgtcagaattggcattgtcaacggacaatgccaatgccaaaaaccggtttcttggtactttttcagtgatttttctggcgacaatgccaattctgacaaattttctgacgctgacagcaactccgacgacttttccggcacttaccgctactccggcgactttttcg

SEQ ID NO: 156042 - DNA, 907 bp, Cannabis sativa
ctatcgttctacttgcactgaactttttaagctcaaatgttggtagtaaagccctccaaacggctgaactgttaacaaatttaaggtgacatttattttttacaattaactgtcaacatggattgtttatgtatacatttttatacatgtggcacgtgtatattagtacatctaatattattatttcaaaattattaaaaaatatttcaaaatttatgatattttttcttttttaatattctatttattattttttataattttatttaattttaaaataaattttgaaacaataatattgggtggatcaatataaatgtctcatgtatacaagagtgtacacataaacagtccatgcatgatggcagttaaccaaatgacaccttaaatttgctaacagtttagtagtttagaaagttttaccgctaaaactttagcttggagggttaagtgcaagtgaaacgatagttggaaaaatttagccgccaaaaactcttacacattaatggcttgtttggtacgtcgtattatattgtgttagattgtattagtattattttaatacaatactatatttagtattgacttgtattaatagattatgtaaaattataatatattttcaataaactcgactccaacaccaactacttgttgattccgagtctagctcaaaaattagggttgactccaaattctttgtaaatattataattcaagttaataattaatacaatacattattttatccttgtatggtcacaccgttcataaataacataacaatagtaaaataattttagtcgggacaatttataaaatttgagtaaattattattaagatagaaagttactaaaataatttttatttaaaaaactgaaaatatctataaacctcacaacaaaa

SEQ ID NO: 156043 - DNA, 620 bp, Cannabis sativa
aggactatgaccaggacctaaaccaaaatcagaaccaatatcaaaacccagatataaacctaaacccgaaatgagactcggactcaaacccgaacctagaacgggacttaaacccacacaataaccaggacctggaccaagaatcaggatagggaccttggaaacagaactaggacatgaacctagttaccgacccagacccgtacttgaacctaggacccagctcgtgtcccgataccagagcttggacaaaacctgacctgtagtcggtgtcttgatttgcacacgcacacagacacagcacccgaaccctgacaaggacctaaacccacacccggaccctgacaaggacctaaacctaaaagttgacctgaacccgtaccctgtgacccaaaattggaaccaaaactggaagttgaccgggactggaactaggacttcgacttgggatcataacttaaattggacctagatccagaaccgtaacatgacaaggacccagactaaaaatctgacctagaccggaatggggagctggacccggatcccaacccaaacctagactcgagaccccaacccaaacatgaactcagacccaaaatggaaccagactagggaca

SEQ ID NO: 156044 - DNA, 527 bp, Cannabis sativa
gcttctactagctgtcgtctcttttatcaccaattgtaattgactcgatcaactttgtttgtataaaaaattattcctatgaaactaaagaaattttggcatgtactattatatgtttatatcttgtgttttagttaattaatcaagttggtatggcttgtgatcatttattttttacttggtatgtacacatatttacattgattttgtaaatattgtcaaaattaaatgtattctattttattcatgtattttttttttatatatttaaatattttaatattatcctaatgtacctatttacattctctattaatatttactttttcgattaagtgatagtcataaaatttatgtatttcatcttatttactttcttattaattttaatttactatttgacatctattataataataatgataataataaaaataaaaatttcattcaaaaaatctcttatagcaccccaataataacttttattaatatatatgattacattaatttataattaaatatataaa

SEQ ID NO: 156045 - DNA, 521 bp, Cannabis sativa
ctaggctatactcaatacaccacactatctcaatgacacacatatttcgaatagacatggatatagtataatgaacaaattagcaaattattagaacttattcttgatcctatatttttgttccaattaatatgttgttgaagtaatagaaattgatactaataaagttcttgaacatagtatcacagtaccttacttgagtgggaaaattttaaaattcaaagcccatctttatttggatgacactagtgatagcttactatgttatgatcatgataggaaattcaaaataaaactgagaaagtaaatctaacaattcatatggatagaaataacttatcagaattatgagaataagatagaagaatttcgtaatgtctattcgaatgacttaggcaaaacacctagtcctcatgaaatgatttatggtattttttatgattacttaatcttaagcaagtattttacattaatgttaatactagaatgctatgttgatgacttagtttagaaggaactta

SEQ ID NO: 156046 - DNA, 581 bp, Cannabis sativa
tttttattaactgtttatttcctttctttatttattttcttcctacttttgctatttttcttattttaattttttctcttaatttatttaactaaataaaagtaagaatttaattttaaagtacttaactacaatcctcgtgggataaacctcactctttgtgagtctattacttgtgaacgatatgtatacttgcgtattgaaaataccacaccaagtttttccacatgtgggcaccactgtccgcccatttaaacacctacactccaccagccacacgggccgcgacccagccaaagtggcattgcggcccgccccctttagcatgcaaaaatatcaattttccctcacgtgggcctgtggtttcctacttcaatgctaaataggattttcagcatgtgtatttttctatctttttagtctctcaatgcctttataaggagtgaatttcagttgattttgtcaagcaattcagaggaaaataaacagtagaatatagagcacgaattctagagatcaactgcaatattggagtcattcttcaaaggattttcaacattatttttttttctctattttct

SEQ ID NO: 156047 - DNA, 619 bp, Cannabis sativa
atccacataattattaatatttataacaattataaatttaattttcgtcaatatctttctaatgtaatcaatctgaagtcactttctgacatgaatataaaaattgtaacaagtatggtcagaaaagtcaaattattactaaatttgattttgacgacaattttaatactattatttttttgtacctttaaaaaaaatagtatcgaaaatttcatttaataaaatagatagttatatatatttaccttagttatatataagcttatatatatgaaaaaaatttaaagtgaggcattaaaaaaggactctatttggggcatttaatataaacttttaattggcaaagtttatagtaattctatgtctttaacatatcgtataaaagatatgtattaaactcttcgttgttgttgttaatgagaatttaattttttttaaaaaaaaaaaaacatatcgtatagaaactatggagtgatggaaagtgtcaaatttattttgaattttttttttataaatcggatccacactttaacgtgtcttactacaaatatttttctggtctattacttttaaaatatatatatatatgggtatgctcttaatgggtattaccatgtat

SEQ ID NO: 156048 - DNA, 531 bp, Cannabis sativa
caagcctcaaaggttcgacctttgctttctccattacatgtttcggaaacaggggtttcgataatggctctcaaaatcactgtttttcctaataagggattttgtattggcctcactactcatcatggtgttgtagatgggaaatctgcaactatgtttataaaatcgtgggcttacttatcatctcaagaaaatccccaattgccgccattgttaccagaggagcttacacccttttatgatcgaactgttataaaagacctatctgggtttgaaatgaaggtgttgaattataggataggaaatcctggatcagcctcgtaagaaaattgtagaaacaacccaaaaaaaattgaatttaaactctttcaaagccctaatcttgatgaatcatatagagcaattttcgaactaagtcgatcagatatagataaactccgtcgaagggtatcaaacccaaataaccttcatttatcttctttttttgttcttacttacgcttacattttcgattgttttctcaaagcaaca

SEQ ID NO: 156049 - DNA, 796 bp, Cannabis sativa
tttattccattccattcctattcttattcctactcccattcccattcctatattttcattcctcctaaccaaacgcctccttaattttagaagccaaaacaatgctctaaaatagtatatgattttagaagacaaaatgatacaatcaatgatggtgaacaacaccaaatttcataggaccatcgcaaactatcattttggccatctatgaataggtcagggtcgatgaagtatttgggcttggcttaggatggaaccctaggaaaatattgttttggggaccacttttaattaaatgtacacatcgattatatagatggaagtgttattttctatccaaaggtaggacattgacacttattcaatttgttcttttctcattatgagtacaatatcgtcactctttatagcacctaaaaatagcataaacctcttacagaagttgatggactatttctcttgggaaggagaggatctttcagggtctgaacaactagtagtagaggtgggcaacatccaatccaattgaccgatccagtccaatccaattacaaaaaattggatgtccaattataattggattagattggatcggttattgaatgtcaatctcaaaatccaattaaaaacaatccaatccaatctaattacatttatatatattaaaaaattatttatattcatttgtataataaaaactaataaaaattatatattaattatatttttagtgactttttttgtgaaatttgtaacacttggttgttctatgtgtttattttcatgatgttttgtt

SEQ ID NO: 156050 - DNA, 540 bp, Cannabis sativa
  modified_base (320)..(320): a, c, t, g, unknown or other
aatttaaaaatgtctcaaaggtaaataaatttaacatattaatcctaatacaatactgtctcaaaattaaactaaattattcattaacatcttcattaagatctccaattataaattcttgatccaaattattatcgttacgagtccccgaagcccgtggcggagaaggcacatatgcttggtttgatgataaaccaagtgttaaattaccgagctcagcttggttgaaaatgggagttgaataaaattggttctcctgcgatgaactcctaaataatccaaaatcagccaaatttgagccgagcagaggagactctganggtgttcggtataagaactgattttccaatggcaaaccagactgttgttgctgttgaggaaaagattggggttgctgatgcaaaaaaatttcaaattgctgctgtgaaaaattttggaattgttgtttcgaagacgaaccaccaggcgactgcgactgactatacgtttgaataaagttctcaaatcgtgggttatataaatgagcacgttgttcaggcg

SEQ ID NO: 156051 - DNA, 688 bp, Cannabis sativa
aagatctttaaccacttatcttaatgtttttcaacattgctagaaattcatgaaatttctcacacatttcaaatttctttgcacaaagtaaaatctagtgtgatcgtctaaacaatttaacgataactcatatccacccatgaatgtacatccatatatgcaaatatagatgatcttactttcaagtggatataggcatatatccctttgtagagaatgatcttgtcaaaactactatgacaagatgcaaatgccatatatatattaattgattgttgtggtattttgatgacttaggtctagttataataaagagttcttagaatagtccaagtggatcctggcacagaatactaaactcatattccatatattaacatatagtttggatccattgacaaaaaatggatattaataacttgtgaaagtcatactgtattgtccaatgtattctaggaaactgaaatttaaaatttcaatttggaatctaaaatttaaagttaaagacttgaatttataccaaattttcatgagtaattattctagcttggactaccactaccaatctaactctaagtttaatttgcctaaagtcattatctacaagtatgagattctaagatcgaggatttttatcatttcgggatagaatgtcgggaatatagtcatctgcgccattcaatttcat

SEQ ID NO: 156052 - DNA, 679 bp, Cannabis sativa
  modified_base (44)..(54): a, c, t, g, unknown or other
  modified_base (200)..(220): a, c, t, g, unknown or other
  modified_base (480)..(502): a, c, t, g, unknown or other
acatagtctaattttagaataataattgattaattaaaatcaannnnnnnnnnntgcaagcagtattatcacaactagtaagggagcatgggcctatataaccgagctttcaataagtagatctagaatttaacaagtaaattctcaacttattaattctgccttgcaccactatcgatttagaattgaatagcactctnnnnnnnnnnnnnnnnnnnnnatgtaccaagatatagatacattatgattatccattgttgcaatcctaatagtcaaagatcctctgcagatgatctacactgaatagggacaaatttaccgttctaccattcaatgtattttatccttaaaatactaagctacttataaatgatatttcagtaaactaatctaactactgaaatgagatctcaatcatttatctctatcaagccagcctcaaaggaaatcatcgtttcatttttaaatacttatagaagnnnnnnnnnnnnnnnnnnnnnnnagcgctcccactcaattgaacttccatgttcccaagatgtaaatatccgtctgaaccatttgttagcttccacgaataacttgaagagaataaacaatacaactaagctgaacataactatatcaggtttaagatccatagacataagatcaaccattgatattgacttagaaagat

SEQ ID NO: 156053 - DNA, 635 bp, Cannabis sativa
ggtgttaaacaacatacttgttagtaaatctaagattctggtaaaatatttccaacaatatgtgcatgagggggagccatttttatgttgcactctttactccttaactcaaattttgtcccactgagtttttatgacaatgtttttaatgaggcaacttgcaaataattatgattatgaaatgtatacatataaattgcattcttttttttttcccatagctcaagttctgtttcattgagttttcctgacaaggtttttaacgaggtaactttaaatcatgttaatatacttgtattttatgaagcaagtagagaatgtgtgagagtgagatcattacaataacatattcgggaaacatatggactaactcaataaagaagtatcaacctaagcagtactttatgaagataatactgcttgcatcgctcaactaaaagaagggtacattgaaggaaatagaattaaaacacattcacccaattcttcttgatacatttcaagagaatacatattggtgtctaatatatacaattaagtgtcaatcttgcaaatttattcatgacgttattaccaacatcaacatttgaaaaggcgacatataagatcgaaatttattgattaaaagatcttca

SEQ ID NO: 156054 - DNA, 1203 bp, Cannabis sativa
aacatattgttgggtcgtccagcactgatcggactaggggcaatcagtttgatcaagcacctatccttgaaattctaaacactagaaggtgtgggagttgtgcatggcgaccagatgctggctcgcgattgctatcgcatagagctacaacatagaaaagactttcattagttgatggcaatcttggcagaagaaactgaacaaaaagacgaagatctagacccctgagttcaaaatgaaaggaacatgctaaaaccaattgaagaattggaagaagttattctcgacccaggaaatcccacaaaatgtgtatacattgggaagaacctggacgagcagctcaaatagtagctaataagctttttgaaggcgaaccaggatcagttcacctggagccatggagatatgatagggatcgatcctaatattatctgccatcatttaaatgttgatccaagttacccagagaagcgacagaaatggagacccttggattccgagatgcaagtggcactaaaacaagaagtggacaagttgttagtcaataactttatacgcgaggtgttctatccctcgtggatagccaatcctgttcttgtcccaaagcctaacagaacttggagaacttgtattgatttttctgatctaaataaggcgtgtccaaaagattgtttaccacttcccaagatcgaccagttagtggatgcaactgctgggcacgagcttatgtcatttatggacgcatattctagatataaccagatgaaaatgtacgttccagatcaagaacatacaagcttcataacaaacatgggactctattgttataaagtcatgttgttcggactgaagaacgctggggcaacatatcagcgattggtaaacgaaatgttcacaaaccaaatagggcaaaacatggaggtttacgtcgatgatatgttggtaaaatcgacaaaaagtaaggatcatacttcagacctcgcggaatgctttaatatattaaagaagtataacatgaagctaaacccaaaaaaatgttcctttggagtttccttaggaaaatttttgggattcatagttaacgcgagaggtattaagaagaatcctaaaaaaatcaaggcatttatagacatgccatcaccaacgaagcctaaggaagtacaagcactgacaggaagaatggttgcacttaacagattcatt

SEQ ID NO: 156055 - DNA, 598 bp, Cannabis sativa
  modified_base (433)..(436): a, c, t, g, unknown or other
gaaaaggcacgaaccttttaaggtcgagctttactacgccggtaaaacaatttttttttaattaataaattaattataataattataatttaatcaattgtaaatataaaattatgttttatagtaacatacttaaaaaaatataaacattatttatattaaagattacaaatttttccaatcgaactaatataacgaaagttttgtactaaaattagtaagtaatgtaaataaataaaacattataagatgttcggaaaaaaaaagtaaagttctaattatgatataaaatatgtaatgttctaaagacgagtaatgtcatcatcgttgttcctttgagtctcgggaggatgcgataacgattcagcaccaggagcagtgaggaatggtggacgatccatcagaggcaagttgaaacccggcacagctcgannnngatactcaaactgatcttggaattctctgaggtagagatgttgtgtttcatattgctgcctcgtatactaagttgtctgctctgcttctttcactttttttgtaaggcctcgtattgttccatagtaacagtcagtggggcagaagaattcatggcagatgc

SEQ ID NO: 156056 - DNA, 578 bp, Cannabis sativa
agtcgaggtcctagtaagggtcccgatctaggttcctgtcccaggtctcaggtcccagtcctagtcaaggtctcggtcctggttttggtctaagtttgggttatgttttgggttcagttctggtctcaggtccgggtcctagtcacagttctagttttgattttagttttgggttttgttccaggtccgggtctaggtctaagttggggttagggtccgagtctcagtcctagtccgggtacgggtttttcggatccctttctaggtccaagtctgactccggatctaggttcgggtattgggtctggtcccaggtttgggtctgggtatgcgtttgggtccgggtttgagttcgtgtccatgtctaggtccaaatcccaatttaggtcaggtgcttaatttgggtccgggatcgagtcccgagtttgggtttaggttctagtctaagtcctattttgggttcgggactgggtccaagcacgagtttcggggctgggttctggtctagttctgggtcccagtccaggtgtgggtcctggtcacgttcccggtcctgttccagggtcctagtcatgttc

SEQ ID NO: 156057 - DNA, 656 bp, Cannabis sativa
gcaacaactccagcccccacactagacttgaccacaaatgagacgaaccagggcgatccttagcctccagaatggacacagtgggaaaatatttgtactttaacacccgggcggctaaagactccggtgattggagcatacgccaaacttgtttcgccaccatagcttgattaaaaagtctaatatccttgaagcccaatcccccctttgacttaggttgacagacactctcccacttgacccacgcaatctttctcttatcattctgagtaccccaccaaaattgtaagataatcgaacgaagcttatcacaagtggccaccggtaactggaatatactcatcaaatagtttggaactgcctgcagaatagctttgattagaatctccctaccacccgcagaaaagaaactcctcttccaaccacgcacccgtttctgaaccttgtcacaaatactagcaaaggtccgctttttattcctcccaataacagttggcaaccccaagtacttatcatgagtagcgactgaccccaagcctaaaatgcccaatacacttgcacgatctgccggcaaaacattcggactgaatgtaatagcagatttttcaaaattcacttgctggccagaagcattctcataacactgaagaatccga

SEQ ID NO: 156058 - DNA, 1004 bp, Cannabis sativa
tcggtaactcctcagaggcaaaaccctctgcatcatagaaacactgatgttagtagtagcaccggaatctaaataccaagtgtttcttggtactgaagctaaatttacctcagaacagaccaaagtaagaaatgtacctttctttgctcgccatgcaatatacttagcacattccttcttcatgtgtcctttcatgttgcaaaagaaacaaccatcatcactgttggtttgagtttgtttcttatgtgcaggacctttatccttagcagcctcattctttcttttcttgcccttatctttagaggtgcttgccaaatgagcactttcagtcttctcttgcttcaatctttcttcctcttgaacacaaaatgaaatgagctcattaagagtccatttctccctttggcagttgtaactgactttaaattgactgaattgtggaggaagagagataagcactaaatgcacaagcaagtcatccgaaagctcaagctttagtgccttcaactttgaagcaaggtgagacatttccataatgtactcccttatgttttccttgcccttaaacttcatggaaataagtttctttaaaagagtacttgtttccgccttatcgctttttgcaaagcgcttctcaatttcagcaaggaaagttgtggcatcggtgacctcctcggacaccgcacccctaaaagcctcaggtatgccgcgcttaatgatcataagactcatgcggtttgaacggtcccacttctcataaatcctcctttgctcggaggtactggtatccgtaagagaagcaggacgatccatccttaatgcaaggtcaagatccatgcagccaagaacaataaaaatgttctccttccagtccttaaagttattaccatataggaccggcaccgaattaaggttagcagatacactagcaacagttgaaaagaacaatacaattacataaataacatgctcatataagaatccaaataaaataataaattcaa

SEQ ID NO: 156059 - DNA, 523 bp, Cannabis sativa
tttttatatctctcattagagacaatcttaggacagggcgtaacatgtttgaaagtaattggacaattattaaacattctaattatacttcatcttaaaagataagatatgtttaaatgtgaagtattaattatatataaatttttatttttatatttggcaaacgagttactaagggctagtttgacacagctgtgctgtgggaaaaagtagttatagctgtgctgtgagaaaaagcagttgtagctgtactgtgagaaaaagctactgaatgtttggtaaatataattttaaaagagctgtgagttgaaaaagttgtatataagtgtttggtaagctaaatgattaaatagctgttaaatatataattactaaaataagtatgacatttgttatctaatttatttaaataattttatacgtattgatatatttataaatattatttattatattataaattacgataatttttttataatatttaattcttttatatatttatataataaaataataaatt

SEQ ID NO: 156060 - DNA, 791 bp, Cannabis sativa
agtgtaatgatgttcagaaaaaattattttgaattggcataatagtaattatttatttttgtaatgaataaataatttttccaaattaattaataggacaaaaataaaaaaaatttaagtcaaaatttatgaagacaagatttgttaagattaagttattgggataaaagatagcatctttcccttgaaagacaagagtagggacctagcatgtcttgtccctatggagtttttttttaaggttaattaattatttaattaatttaattagataaatatttaatttaaaaagtggttacatatatttcaaggttgttgagatattctctcaagtagttgagagatttcctcataaatattagtaactgaattcggttatagatattatttatttaaataattaaatatggtttaattaaaaggatttaactactataaatggaaagtctgatttcagaaatcaaaacatcactttacactgtaatttttaaaattaagtgagaaaaagaaaataattttctctctcaacatacaggaagttttgaggataccctgatagtcttcacgaggtatttattctaaacttgtaatttattatttttatttgatgtactcacatctagagatctattgaaatatagtactttaataatcagataatacaaaacccttacgtttcatacttgatttagtactataaaaccaacaattagtatcaagagcagttccatgaatgtgtatacattaaatgatatgtgagttttatgcaattatatatatgtgatatgtat

SEQ ID NO: 156061 - DNA, 548 bp, Cannabis sativa
catggtaccttgaatcttgaatgtctattcgttattttgccttttgtaaggaaattatcatttttcctcttaagcatattttcatcattttataacagatattattaaatttgattgtaagtttcagcaacttatatcactgcattctctatgacttttgcttgtttaggtgtcatgaacaaatatacttaaatatataattaatgttcatcaaagagtgaaggcagcccctgcacttttctcttcctagtgcttatttgatctttttatacacttaatttaaatagccagtattgctattttttctcttcttacatgtgtatagtcatctttattcagagttgattattacacatggagtttatttaattaaattacaatacattacaaatcacaacaattataacaattacaaagcataatacattacctaaaaacagtttaaacatacgtgcaattgcacgtaacttttacctagtataagttaaaatgtaataaagtggtattaaatgtttttaaaaagttagtaattttaatgtaaataataa

SEQ ID NO: 156062 - DNA, 504 bp, Cannabis sativa
atctcactatctgaggctaacttagccaggcagtctgcgtgagcgttcttttccctggggaatctttctactttatagtctgtgaactcgtaaagcagttctcggactatcgctacgtacgcggccattctttctccgcgcgtctgatactctctcgacacctggttcactaccagttgggagtcgttgtagacttctactcttttagcccccacggtctttgctaatctcaatcctgctatcaaggcttcgtattcggcctcattatttgaagccaaaaagtcgaaccgtagggatgcttggagtcgaagtccacttggagatatcattgcaacccccgctccggatccattcttgttggaggctccatctacaaatactttccatgccgggatcgatggtgtcggtatgttcacggttgcttcggcttcattacatgcggtgatgaagtctgctagcgtttgtccttttatggaaatgtggggaatgtagtgtaagtcaaat

SEQ ID NO: 156063 - DNA, 510 bp, Cannabis sativa
tggaggggcaaaatggtcattttgccacatatgtatttttgtcctatagtggacttgaatacatttagcaagttgtttaatgttggctgatattaatttaataaaatgaaataagaggattcatttacttcatttttacaaaatcaaaggaaaggacctcatttttcactctctctctctttctctctttcgaattcacctagagccaactagggttcatcctttttcttcagcaattcaagtgttttcagcagttcaaagtgtatttcaaactaaggtataagttctagtaattttcttgttgtgttcttgaattttaaggaagaaaatatttacatgcttgatgattttgatagtggtagctgctgtgtatgttgttgttattttctgtggtaaaaggagtggattagaataggttttgatgcatgttggttggattgaagcaagtttggaatttttaactcaaaactttagtttttatgagtaaaatggtgatttagctgctgtagt

SEQ ID NO: 156064 - DNA, 576 bp, Cannabis sativa
  modified_base (303)..(309): a, c, t, g, unknown or other
  modified_base (470)..(470): a, c, t, g, unknown or other
aacgctttatatgttccacgatatagatatgctatgagattatccattttttatcatcccaataatcaatgatcctctatagatgatctatgttgagtaggaactaatttaccattacacccttcaatgtattttatccataaaacacttagctacctataaattatattccagtgaactaatataatcactgaaatgagtactcaagcatttatctctgttaatccaagctcgaagggaatcatcatttgacttctatattcggatagaagctatagaatctgtatctatgattagcgctcnnnnnnnattgaactaccatgtccttaacctatatgtcacgagaagaactatatggtcgactttaacgaacaaatttaagaacacaaataatacaactgaagtagaacctaacaatctcaggattaagatcacttgatctaggatatcaactaggtgatattgaattnaatagatattacggtaagtttatctataatatcccggaaaatatattaatattttaattggacatattttattaaatatgtgattaagtgagtattagagtaggat

SEQ ID NO: 156065 - DNA, 563 bp, Cannabis sativa
atgcccctacttcggtgtgttctcctcacaaaagcaaataaaatcattagagaaattcatgaaggcttctatggggatcatgcgggttggcaaagtctatctaaaaagatcattagacgagaatattactggccaacgatcaataaggacacacacgagtttgttaagaaatgtgataagtgttagtggttttcacatatacctcgtgtaccgccaacagaacttagaatgatgatctcgccctacccattttctatatgggggatcaacctaattggggcattgcccactaggcaaggaggagctaagtttgtggtagtagcagtcgaattattcactaaatggacggaggccgagcccctcgtctccataacctacaagaaagtccttgactttgtcatcaagaacgttatctgttggtttggaattctcatgaagatagtattcgataacggaatctaatttgatggtgacttgtacactgaattttgcgagaggaataaaattatcaaaagcttctcatcagtatccaggcctcaggcaaatggacaagtggaagtcgt

SEQ ID NO: 156066 - DNA, 596 bp, Cannabis sativa
aaggctaagaaggaagtatcctcagtccagaggacagacaagggaaaaaacatttcccagtagggaatttcccaaggcggggatgaagatgtggatcctcgacttggggaaccaagcagcaatgttggactgtagaagagttagaagagatcgagatcgatccagatatcacgaccagaaagttaaagatcggaaagggtttgttgctcgaagtaaaatcagaattgacaaaatttgtgagagcaaacctagacgtttttgcctggtcacatgtggatatggttggaattgatccttctattatttcacatgttctgaacatcgaccccagcttccggccagttcaacaaaaacgaaggctactggacaatgaacgagcagtagccctgaaggaagaagttgaaaagctacgcaacaacaactttataattgaagctttctacctggcttgggtcaggaatcctgtattagaacacaaaccgaacaagaaatgtcgagtttatattgatttcacagacctcaacaaagcatgcactaaagactgttttccactaccaaggatcgatcagctcgtagatgcaacagcagggcatgaa

SEQ ID NO: 156067 - DNA, 660 bp, Cannabis sativa
gtcatgcactataatatattaggagcccacataaaaaataaatacagattttcttaataatttttaagaatatcatttatcatttagtaagagctaaaaaaaaaaaaatttgccagtggcccatttcagctcagggctgaccatgttatcccatttttcgcactatgacgtggcagtatgtactagtgacatgtgtctgtcgttctttatacttggctagagaaatgttccgaacagacttcaagcaacacatatgcacgcacagtctgcttgaccgagcagagtaaaggacagataatccaagcaaggagtgcagttatctctccaagccgtgtattaagacttaactacttcagagttaatatcgtgaagctcaagtacataggcaacccctacaatcatgggattgtatcaaagagatacgcatgctgtctcaatcccccattttatgtattctaaatatgtaatatatgttcttaccaattatagatattgtaagcaaaaggaaaacattccctcatgcatttagccctataaacagtgatctatcttcactataaaaggaattgaaggaattgcttcagagagagatctaagagaaaacactcagagatttcattgtgagagctttgagagaggaaacattgtgttctttgttct

SEQ ID NO: 156068 - DNA, 607 bp, Cannabis sativa
ttcctacatggggatttgcatgaggatgtctttatgactctacctcctgggtatagtcctaagggtgagttgccacctaatgctgtttgcaagctaaaaaaagtctttatatggcttgaaacaagcatctaggcaatggtttgagaagttctcgagtgctctaattgaagagggttttcatcactcagccaaggatcactctcttttcattagacactctggaaataatttcatcatttttttgatctatgttgatgatgttattctagcttccaatgatttaccacagctggaagaattgaaaataaggctgaataacagattcaaactcaaagacctaggtgatctaaagtactttcttggattggaaattgctaggtcggccaaaggaatattcgtttcacaaaggcattatgctcttcaacttcttgaagaacttggacaccttggaacaaaaccggttaatactctcatggaggctaacttgaagcttagtcaagaaactaaagatgatcccttggctaaccctattgggttttgtgccctaaataaaacccatttcaatataattagatttactaattaataaagatcaaaaatcacattt

SEQ ID NO: 156069 - DNA, 508 bp, Cannabis sativa
  modified_base (180)..(181): a, c, t, g, unknown or other
gactcaccaaagaaccagactaggattgaaatgttggacctagatctggacggagatcctcacccaaacccaaacttggaccaacgctcgggacctgaacttggacctggacccgaaccaacacccagatcggggtcaagacctgcacacaaacacaaacacagactcagacccgaactnnacccacacctagaatcaaacctaaagctagacccggacccggacacaaactcgaacccagaccaggatcagaaccaaggacttagaccaaaaaactgattccagactcagatcttgattgcagccatggactcggacctaacctagaccaagacccccgatgcgaacccacacccagagcctgatatggaactagactgaaatccagacctgaaccaaaactcagactgggacttgaactcaatcccgaactcaaaagtggacccgaacccgtacactgtgacccaaaattggaaccaaaagcaaaagttgaccgagactggaacta

SEQ ID NO: 156070 - DNA, 567 bp, Cannabis sativa
aatgcaagaaacaccatcagggtgaatgtcgggcaaatgcttgtttctagtgtggcatggtgggccactttatttgagattgtcctcaggccaagaaagaggagctgaagaaaaacactactcagaacctgagatgacttcttactatgactcaggctgatgctgatgctaatccgtcattggtgacaagtcagttatctattaatggttgttcccatgctgtattatttgactcgggagctactcatttttatgtgttgagtagagtaattgaaatttttcataaaccatgtgatatatatgcttcagggtttggtaccttgttaccttcgggagaccttatagtatccactaggtagattcgatcattgtctttcttgattgacagttgtgaattaaccgccaatctaatagagttacaactttctgattttgacataatcctaggaatggattttctatctaagtacggggtaacgattgactgcaaacggaagatggtggtgtttgagcccgatagtgctaacccggtagtgtttgtgggtaaagttcaggggacacgcatac

SEQ ID NO: 156071 - DNA, 506 bp, Cannabis sativa
ctacacaaacaaaaactatgcacacactttcttcttcaaatatattagaactaaatatctcacattatttataaattatgtaggtattattcatataggttatatatattattcttactatgctatattttcatccaagatttatttttatgggtggttgattaatttcttaccctataagtttttatttatttttttaattttaatgtcttactctataagttttttttttttttttcatctaatatacaatctattatgtaatacataataatatacaatttattataaattgattttattttaaaaattttacatatactattctatatttttgttagctcaaaaaagtgttcaaactaaattattttaaatgaaactaggcaaattttattttttctgtatataagaaaaaataaaaatcaaatgagatgtcatcttatgatcatttttgtattatttatctattttataatatgtcttctaagtgacgtatatttttaatt

SEQ ID NO: 156072 - DNA, 542 bp, Cannabis sativa
tatatatatatatatgtataaaggtcggttttagttttttcggtcggtttattaccaaaaaaaaaaactgaccattcaatggcaattttaatcgttagcagatttttcagtttttcagttccaccagcttcagttccacaggtgtttggtaaatcgatttaaacaattttatttacactttaaaaatttttaaaaatattttattttatataatatttatatttttaatcgtactatttttttaactttttctcttttaatttatatttttaaaaaatatacctatcaaataaaataaattatattataaatttcaggataaaaaaataaaaaattatattaaattttcaaaaaatataaatattttaaaaataatttttaaaaattatttatgtttatattttttttaataataaattatactcagatgtaaatagaacccggcataaaaaagaaaaattttattttcaccccaaaattttttaaagacactttattataataatttttattttataaaaaatttatatctttaattgtac

SEQ ID NO: 156073 - DNA, 524 bp, Cannabis sativa
  modified_base (99)..(109): a, c, t, g, unknown or other
tgtcccctgagttctcatctatacaaaaaaaagaaagacaacacacaagatgagtgtttgctcggaatatcgtacaataaacaagcaaatatgccgacnnnnnnnnnnnaacagattaaagaacggctatgttcaaagaaaattcaaaactcaagaagtcaaaaattttcttgagttagggagaaaaagttcatgaagcttagaataaggaagatgaaagacggatgttatgcagttcagaaacaagcattatggctgtaaacccgcatgaggacatgataaagaagaatcagagaggtttctaagcctagggtttcctaaacaattttctacagcacagtagaaggagcattcaaaatgtaaacatgcaaagataagcataaaggaaatcagaaacttattcaagattcaaatgtgtgggttcgagcaaagtctatccaacaagcagcttgtacgaaggcacttcggtgactttgaaaccaagaaattttcttttcgctctgaagcttacttagcaaagaagg

SEQ ID NO: 156074 - DNA, 558 bp, Cannabis sativa
atagtcaagaagcttaaaaacaagatagagtagtatgcaagattgcccgagcaagactcaaaagttagtcatcacctcataagccttttattttagacataatatctttcccttttccaagcacgggagaaggtggccgagcaggggaactaggctccctaatgcgaattgcatgttcaataggcctgggcttggctggaagtttcttcctccttttgagcggagtcacctgctcttcctcggcttcatcttcaggattcaagggctcctgagcatattgcttggccctttcacctcctttcaacttagcctcgtgcttcagttgaatcagctgattctccggatgagctcgttcagcccgtccagcaccacatttcctcttcctccccttcaatggcttaggaatgaaatcctttagatagagcccgtacttcacaaagttatcctcagaggtcaattggatgatatttcggtcttccatcggcaactgagcaagcttttgagctctatccctaagagtaagagtaaggggagggcggtgatatgttggaatctact

SEQ ID NO: 156075 - DNA, 894 bp, Cannabis sativa
ggacattgatctttggggagaaagcggatccacgtgctcggtccaactcgaggtcattgttcttctgactggctaggccttggaaaatattttttagttcatccaactgtgctgcacgaatggattaacttgttcagcctttttgctgactagggtcacgtcaggatctctttgagcgggattttgaacacgacccctggctgaataattggtgcaacatactgctcgtctagccctctccttctgttgagatcatctctgagatcatgagctgttcccaatctattaaatatagatacaccaggttgtctcagtgactggttggtttgaccgagcagtaggccggaaccgttaacttgggcggagttattaggtatgacttctcctaaagaattacatcgcttggcccacaggcggaacctgtgaccgaggattgagcagatgactgtttagggtttgagaagcgttcacggcttgatcttcgtctgactcgcccaacaggatgatggttgtaggttgctagctggtagcctgataggctcttcgtatcagcacggtgccctgtcttgttcagtcgtcaatggctgcttgctgagccctcaatgtttccatctttttatccctccattcagcgaacatacgcctttgctcttcaaatgcaagattcaccacagcacggagctcctcctagtaatgacgcaaggtattagtatgaccttgcatgagtccaagagcagcatggaggttctggatcttggtgtcatctccaacggttgttcaaacatttgttgctggcagaactccagtattgggaataccctgattggctcctgaactggtatttcctgtctcttgcacaccaggcgcaattccactcaaaggagtcgttacacc

SEQ ID NO: 156076 - DNA, 560 bp, Cannabis sativa
  modified_base (493)..(510): a, c, t, g, unknown or other
tatattgtatacattcatatatatacatatattgtttcattcatttaagcatgataaatattttgaaaaacaagaatctcgaattttctaaaaagtattccgtgaggatccaaatttttaattgaaattaaagttgacgttttacgtgttttagatgtttaaaacccaccttgatctctatatttttttatttggataaattcggggttaaaaacatgtgatttcgtcgtcggaaaacctctttttggacccacatgaagaaaaacgggtcaaaatgacccgggttggctaaagaagatgacccaaacgacgtgtcgtttttcaagttttttggctgctgtcgtttgctcaaataacatgtcgtttttccgtcgttgtgggcagaggattggaaaacaacgtgtcgtttaggcagtgcattttttcaaaaaatatgtatatagaaaaaaatttcgaatttttttataattttttatttatttggaatattaannnnnnnnnnnnnnnnnntaatttagtcaataaattgcattcagtcaattttctatttttgtttaata

SEQ ID NO: 156077 - DNA, 507 bp, Cannabis sativa
tatatatatgacaataaattatttaactatattttctaagttatttcattaagtatgtatgtgtataatcatttagcataatttataaattataatgaaagtatgttatataattatataagtctatgtgattatttaattacattatatatatatatatatgagattcaatatataaattaaattattttataaaatatgtatgtataaccatgcaagtataatctatagattataaataaagtatattttataattgtatagtgattcaccattaaagtacattgtataagtctagatgactatttaattacattatatatatatgagattcaatatataaataaaattattttataaaatatgtatgtataaccatttaagtataatctatagattataattaaagtatattttatgattgtatagggatttcactattaaagtacattgtataagtcttggtgactatatagttacatattttaaataactcaatcattgaat

SEQ ID NO: 156078 - DNA, 663 bp, Cannabis sativa
ccattttgcggcgcttttgtcagacacctcgcacttcggggtcaatgttcaagcaatgacacatgacctgcggagatattccgaccatatctgaatttttccaagcaagaacatcaagattttgtttgagaaaagtcgttagctgttctcgctattgaaaagtcaatttagaaccaatttttaaaacattactattatctatggggtctataggtacctcaatagtgtcttccacggcttgggccgctgcggcatgatcgaggattcttggatccagatctagtccatccgtatgcagcacctcttcgatcctaagaacctcctggcgaggaggtggtgcctccgatatatagatgacatttattgacttcttttctgcgagtttgactgctgcattatagcattctcgcgagtccgactagattcctcgcacagagcctactccagcgagagtagggaacttcatcgtgagatgatagattgatgttacaatcttcatctccttcaagattggtcgacattatatgccaaatactggtcaattatcgcgaagtcaaccattgacttgcctgttacaggggcagttcccaaagtaatcgggagtttaatcatctctttcagtgcaatgacgtcgctggtaaaaccgtatatactcgacgttac

SEQ ID NO: 156079 - DNA, 627 bp, Cannabis sativa
attattttcttggtcccaagtgtattcttgaatagaggttctagtgtacttgaaaaaataaatatgttagtctttcataacgttggtttccacacacagctggtctttggaattaaacaacaaataagcagccaccacactaccaacccacttccacttctcctccaactatataactttacctttccgctgacaccacttttaaagtctctattagaatatctatagtagcatcctctaaaaaaaaaaaatccaaaaatataatatttattttttatattattttgagtactattacttttaaaaatatttcaataatataatactctttaaaaatatattattatttaatatattacttttttaattataaatacattattaaattaaatttaaataaattatatattaatataaatatacataacataaagtttaaatttgttaaagaaattacactaactttttaaataataaagataaattaaaattaaaaataactcagtcttaaatattttggagaccctgttctaatttaaaatttgagcccctaaaaaaaatataatttataaataatattattcagtatatattttataaaacactaaaaaactccaactatttata

SEQ ID NO: 156080 - DNA, 525 bp, Cannabis sativa
ctatgcaacctttctctccaccagccaatgcaagctcgacacttgtctgctcctcctttaatccgaatttcagcagcaaatgcatgtgcgccaagtttcgtctcctccttcaatctgcctttttcaaattattttgaaatgcaatttcaaaataatttataattttatatattcctttgcatttatttggctctcttcactatttctctcagccaataaattgcaccttgtatattttaccattttaccctcacctacctcatttatgccaagaaatctctagaaaaaatattaaaataattaatttattaattattttaattcacccattttgactataaatagggaagagatgagacttcttaagacatctctttacccctttcggggcacctctcttacaactactacacatctctctttattgtaatttttagagtagagaaactatagcaaaatttctcttcacttttcttctcatatttctttatgagaatgattagcataatggtctaatcttccttg

SEQ ID NO: 156081 - DNA, 856 bp, Cannabis sativa
gtcgattgaactggggcagttcgagataacataccatcctcgaacatccatcaagggccaagctttgggtgacttcttgatagaaggtatgactccagaagagattccacccgtacagcgagacgcggaaacctggaagttatacatcgatggtgcatccaacgaaaagggttcgagtgcagggctaatattaatatcgccagaaggttttaagtttcacatgctctgaggttctaattttacgcatcaaataacgaggctgagtatgaagccttgatcgccaacttaaagatagatgaggcgttgaaagtcaaaaacctcatctgtcgtagtgactcgcaactgattgtgaaccaagtcctcggggaataccgggccaaaggcttaaaaatagggaggtatttagagaaagtttggaagaacttggaaaaatttgattactttaaaatcaaacaaattctgagagaacataactccaacgccgacaccttagcaaaactggcctcgcaaaatgacttggatgaattgaacttagttccggtagagatgttgagtgagccaagtatatgtgaaaatcaagacgtcgagatgatagacaactctcctacatggatgactcctattagcatcatttactcgacgagcaactttcaaatgacaaaaatgaggcacgaaaattattgtattcagtgcctcgctacacaatgattgaaggcaaactatatagaagagggtactcaatgcccttacttcagtgtgttgtccctacaaaagcaaatgaaatcatcagagagattcatgaaggcttctgtggggatcatgcgggctagcaatgtctgtctaaaaagatcattag

SEQ ID NO: 156082 - DNA, 542 bp, Cannabis sativa
  modified_base (485)..(491): a, c, t, g, unknown or other
gagagagagagagagaaatgattctttttctatttttgtaaattgagtataattaaatgattttatttgaattaaaattagctaaggataattataaaaatctgattgtaaacttaaatccaaattcatataagacaaatagctaatggggcaaaatgatcattttgtcccttccacactaaaaggcataaaaggtcactaaggggtattttggagaattctaaaatcccgactattcctgacatttctaatgtctaactttattatcccgctatactaaaaatacgaggatgtgattctaatagccaaacaccgcgttctaatgttgccagacacaatacatgcaaaaagtatgaattttctatttgtgacataaaaatgcattctgaattcaaataaattatcataaataattaattcaatactaataaataattttcactcttaaattctaattatttgctaatttccaaattaaagctaannnnnnnttacaattatcccccccttaaaagaatttcatcctcgaaatctaacctgaa

SEQ ID NO: 156083 - DNA, 585 bp, Cannabis sativa
  modified_base (393)..(430): a, c, t, g, unknown or other
aaatagaaatcaatgataaagttaaatcatagaataaaatatgaaataaatataaagatatttttgataatgactatttttcttaattctttaaaacaaaattaaaaaaatagtggtttttattgcaatacctagtataacacaatcatgatcatgtagatgtagtgtagtactagtaattgggtagacaattctctgagagcagttaaccgactttctcagtttatccccttaaatctagtgtataaaaaagaagagaaattacaatcaaattcttgaataactttttccctttgaaatagggtttttacatgtcgtatattgaattttagcattttattacttttataatgtcacacggtagaaagaggtacaatacatataaaaagaggnnnnnnnnnnnnnnnnnnnnnnnnnnnnnnnnnnnnnnttaattgattaataaaagaggtatttttcgtttgctacgctgtattacacttattgtattgtataatattatattgaattgtattttatataatatttttatgtaaaactatacgtggtattaagttttatgagcacctaaatatataatatttt

SEQ ID NO: 156084 - DNA, 628 bp, Cannabis sativa
catggcttcgtcatgtccgaattttggggcatagacgaggccgtgaggatcgtgcgggatttgtctgccaaaaggcgggcgttcaaggaggaggctcaataaagggaggcccttgcagaggcaaagttccgggagtaggccaagcaaagggaggctgaggcggaggcgaggcaccaggaggcactgaaggtggagggcgaggctacagccagggccaaacgtgagattcgggaagacagggaggctatggacgagatggctgccaagttgaagtccttagaggagttgcaccaggcggacttgcagtcaacggctgactgtggaggtgaaggagctacgggatttcagagatcaggccttgaaaaaggccaaaagagatgagctcctgacccccgtcgtctgcaagcattgcgtcaagcgctttgatgatggcgtctatatggcctggcagtcgaatggccagagcatcaaacttgacttctatcccaaacctaaggaagctcttgctaagttctgggagaagaagaaaaggcttgatgctttactcgaagagcgcaggggccctcgtctgttggaaatattttactaggatctagatttactgccaagtatgttttattaacatcct

SEQ ID NO: 156085 - DNA, 614 bp, Cannabis sativa
acccaagaatagcaacgccttgtcatgcacgagcatccaatctcattatgccactactgataacaattgactatttaatttgatgatcgcccattaagggctattaagagaacattaatgccaatccaaaatatttagcataacctactacaaagacccattaatccaaatttcacgtacctccttactcttttgaaagataacggtggaggcctgtctttgaagagaacggtggagttggatagtttcgaatagggcgatggcttcacctttgaaggtctttccctacctctcaactcaccaccaacggcgacggtgctgttcagaatcgaagatgttttggctttctttggtggccttcctcgtggtcaatctgcaaaagctaggaatctttggcttcaatgttgatggtggagagaaaaaatctataagttttggtggtctttgggttgtttgtttcgcacgaagaggaaaggttctgaaatgtgaacacattagcaagcacgaagaggaggattagggctaatttgggttttaggattgtaacgccctaatgctaaggcacggtacagtgctttttcaattcttgtgcaatctttgtgaattttaagaag

SEQ ID NO: 156086 - DNA, 572 bp, Cannabis sativa
ttaatcaacatacttgtgagtaaaactaagatcctggtaaaataatttccaacagcttggttatggtactgttggacagagtggccatctttggcagagttttctcaatgttgttcttgttgcctgatgtgactgtaatcctttagttgcatcagagaaggcaactcaagacattaaaatccagttagggatccttgctggtcaacttcttaacttacttggagtccgagtccttgccttagaagccatcaaatgccctacacatcaccagaggaaacaaactgcccaagagatcctaaggcggaagcatgcacctcctagagcttcccaggactcagaggatgcatgcgcactacatgtctacacgtgaaagatcattgggtgtgctgcacatcttcaaccctctttctcggaaaggaaggactgcttgaagtctgctttactcccaatgactctttcacccattgatattttcgagcaaaatctaagcttgaatttttgtgcaacttcaatcttctgtcccggaagtcgaagcttgcctcataaaaatttaacgtgactctcgcatgcac

SEQ ID NO: 156087 - DNA, 510 bp, Cannabis sativa
tctggtgtcccgagctcctgcgtctggatatcgttttggccatggacctaaatttttccctgagtaagttgctcctataattgagccaaatgcacatattcaagaaattattgtatgaattatatatactaactcattagtagtactcaattaaggattaatatatacttactatctttttggcaattttcttgtcgtaatccgtgacaagttttgttctcttggtctgagatttgatccaaacacggtggcgtgggagatcttgaacgttgaggtcctttttctacattattttataacaattaaatgagtgtaattatattttaaagtacattattagaaatcattgattacttaccacatcttcccttacgttcaccattccactccgaccacttcgatgtttggattggattttttttttaatgttctatttgcaccttactcaattcctacaatgcaaaaaaaaaaaaaaaatatatatatatataattagatacatgtacttgt

SEQ ID NO: 156088 - DNA, 522 bp, Cannabis sativa
tcctataatatatatttgtaataatataatatttatagatatagtatttattttcgagtaataattaagttaggatagagtttaaagtttcaaaatcctgccaatggcgctctctatttctccaaccacagtctattttttagttaaatagttaaaatagagagtcatttttttttttattttggctcctgctctttattttaattagtatttgattattttaattatattttataatttaaatttaatagatataaattaatttaataaaataatgaaaaaataatgatacttttgattgaaatgttattaaaaaaatttaacaaaaaagtagagagatctctatttattctctattatagggagctagggtcggccctaggcatatttttataaaaacacaaaaaaaaatcacatgaaagtaacataaaaaataatatacaaataataaaaatctacaacaaaataacaagaatacaacataaaagtactccaaaaaactatattttatgtaaataaaat

SEQ ID NO: 156089 - DNA, 896 bp, Cannabis sativa
ttatgctacctgacaaggtgagcccgcgacacgccgcggtactacaaggtagtgtcgcggcccgcctattctaaactacgaaaaattaggtttttttttttttatcttttttagctatataaatgccatttctcaacacttttcaactgagagtacaattagaagcgagaagtggttctaaagacttttaatatttattttttgaagagttcttcctaatcctctgtttttcttatgctttaaattgttatcagatatttttaatgattatgagtagctagactttttattatggtgttaatggagattgctttgacacgttattttggttttaatatgatttagttttttcccaattttttatgtgcatctattttattcatacttaattacttttaatcgcttgaacaccaattaaatattttatgatttcaatgcaaaatttgagaagcgagtattgattatgatacagtaaaatagacatagatttcgataaggatgagagtacctatatagtttatgtaacatttatgaattttatgcttaatgtctcctatgtgtttaaatttatcacaagaatagaaaatttgcatgtaggttgagatttatatgtcctaggatgtacatatatttctttgttaaatccgctatcacatgaaaattagactttaagaattaaattatgttaaactaggtaaaatagattcaattaaaattaattatcctaaactttaatcattgttaatttcacattaattatttatttattttattttctttttagtagaaattgaacatcatttcttattttttattgtcaccaaatagaattaagaatttaattgtttggtaattaattacagtccttgtgagatcgacctcactcttgtgagtct

SEQ ID NO: 156090 - DNA, 550 bp, Cannabis sativa
tacaatggaaacctagagtgaaaagcaagcacactcaagatgaatagaaacaaattttggctcaaagtgtgtgaagagtgtttgttggattttaaaattggaagctcatcaatctcacttagatatgttaggtgtatgacataaatgctcagccaacttatatttttgagtaaaaatcaagtttatacagtgttagggtgaaaagtagccgtttatacccgttagcacgcatttcaaaataaattctgggaaaaatggactacctattttaaaatggactacctattttaaaacggactacctatctgcgaaaaacggactacctattttcaataggtaggccaaaaatcaggcaggttcaaaacttgcatttttcggtactaaaacgcgcgtaactctttactcgattatccaatttcagaaataccaatttttttctcttagttcaacaaaatgtgatttagaaattcaatcaatttttttattaaactatcgtgtgagaaaacttgttgcacaagttagtgaatgggccaaaatttgaatttataaa

SEQ ID NO: 156091 - DNA, 598 bp, Cannabis sativa
ttcgtcgagaatgagttttaagggtgcctcgccctgagtcaaccacatggggtcaggagtagtgctctcgtaggttggagataattgtttcttgcatacctctcggggtcttatatgtatatgcttccatgtattatttttacttttacacacttagtaaatttttgagtgtgtaaatgtcattgttgcttctacaatttagctacatgaatggttgtcccttgattacacttcctttcttgtgcaccatgaatgtacatatgtatgccttctttttgctttagagctatatggctctattactatatgctactatgtgttaactattggaattaggagcatataaaatccagaaaatcgaaaaaaaccgttcaaaccgacctacctaacactgttagaaccgaaatcgacaaaaccgaaaactgaaaaaaccgctaacggttaaaaccgccattaaacagtcggttttttttggtataaaccgaccgaaaaaaaacgaaactgaccgttatacatatatattaatttattaagttttttttcatgtattatagttactaataatataataaacatactatattattttttttattaa

SEQ ID NO: 156092 - DNA, 549 bp, Cannabis sativa
agctgacggagatagggggaacaacgggaggccatgcccacccctaatatactttgttctttttaaaatttgtgtgcatatgaactgtttggttaaatctctcaataacctgtatgtgttgtaaaatgttaattgtgtgttttataatatgtaattatactatttaactcaagcttgcctaaacattactaatccaaagatacccatatgatttctagtgtaattatatttcttgtctattaattcaaatttacatgttgatatgttgatttgcttattcaaggttttggtctgtcttaataaagttcatgttgtttcagtacttgcaaaatatggacgattgttctgtagtatctcctgtttgcatctttattgactattttagaaatgaaataatgaatctgaagtattcttagaatgaaaagaatgatgtatgggtcatggctagctgtagcaattgcttactgtttttaggttggcatgaggctaattaggatgagaagttacttttaagaagttatctatctttgaattttgattagataattt

SEQ ID NO: 156093 - DNA, 541 bp, Cannabis sativa
  modified_base (230)..(230): a, c, t, g, unknown or other
cccagccgttagatttctcaatctttggctttcttatcactggacttcgtgtataaaagggcggctcaagcttgtcatttttcataaacctctgacttctttaagttaaatccattttcagaatggattacttccttcctgccaaaatgtctcttctgagttcagaagtttatccttctagactcataatacccaaatgcgccaaccattttccatttgttcctacaganttcaagcctcaaccggagctggaaacgatggattccaggggtgaggagcttccaaccaatccaaaccaggggaaccccgtagcttgccatgaccgatccttacaagtgatcccagagggtatagatcttatgagcaatctcaaaggtcctcctcaggctgatgaagaattcaaaaggaatattggcatggttttaggtgaatctgggaaggaagtgggtgtggtttctatcggagaatccagccaacccaagactctaacctgtgccaagagatctttgtgtcagcctctctctggtgttgagaaatttcc

SEQ ID NO: 156094 - DNA, 538 bp, Cannabis sativa
ttggttgttcaccttcaggaacatcagtttccccaggttgctcctcttgtgtgttgtggggctcctcttgtgtgttttgggggtcctcttgagctgtctcttgccttctggctcttgagccccgaggtctatcgcaccaccttctcactccaggatcaggctggttttgtgtgttgttttcttgtgccgccctggccgcggttgcctccctatccaactcagcatttcgtttgtttgcctcagccaaacattgttaaacttgacgattttccaactcgacaaatggtacgtacctagtggggtcataggcaccctgacttacaggcgtagaactgatagcatttatgttaggttcctcattcctagcgtttgggttttgttcctcatcatgttggcttcttcttgaatgcgttgatcgtgttgaacacgttgttcttgcattgggtgacctctgtgaacccataggctcttttccaggatgacgagtagtctcttcagggtgagtgttgtcgttttccccattatcagccatggagaa

SEQ ID NO: 156095 - DNA, 561 bp, Cannabis sativa
taaggtgtacattaaaattaatagaaataagcaaattaatccctaaaaaacgcttgcatttaaataggaatttataagtaatataagaaagaaaaatgaaaaaattaactaaataaagaagcttaagaaaaaaaagattgataaataaacttcatataggctgccacatagtcattgttttaacattccattatatttatactagtaaacaaagccgcgcgcagttttaaagcataatttaaatatatatttaatatcatatttatttaattaattataattttttaaaatatatatttatatatacaaaaatatataatgaaagtgagaaatttatacattttttaaaaaatttgtatttataaagttatgtttgtataacttgctttatatttatgaaaaattttatttcaccgcacaaaattataaatgcaccccaatatgaaagaaaaaatataaactaaaaatagttttagaaaattagtgttaatatttttttagaattttcttttttacattattttgtgttaatttctttgtctattatactcatattatatc

SEQ ID NO: 156096 - DNA, 500 bp, Cannabis sativa
gctgccgaagtatatactatatactatcttggattgtatgattagagagatatctctgctcgtcgcattaccgtttccttagagcactctcaatagtttctctactctattctttaaaatactttattaaaattctatttttctttttactttatctcacacatttatattacagcatacatcaatttctctatatttttttctatatcattaaaatattatatatttacatatattttatttattaaaataaaaaaaaatatgaaaatgtaaaaagaataataaaaaattaattaatgtaatgaagagagaaagaaaaagtataaaatatgttttacctcttcactatttatgagctaaatgtagaaaattcttagctaagagtaaagtatttattggagcttaattttaagctcttagctatttttttttttttagcttttagctattatagctcacttgttatgagtgctcttagatgtgatattaaattgaaaaat

SEQ ID NO: 156097 - DNA, 573 bp, Cannabis sativa
tcgttatgtattcaatgatggggaccatccagctgggttcttgcccaaccgttgctatggcctcttttactttgatgcttggctctgccaagtgttccacgagtactaccccaagtttctcaatttcactgtctgaagctaacttagccaggaagtccgcgtgagcgttcttttctctggggattctttccactttatagtccgtgaacttgtggagcagttcccggactattgctacatacgcgaccattctttctctgcgcgtctgatactctcccaacacttggttcattaccagctgggattcgctgtagacttccactcttttagcccccacggtctttgctagtcttagccctgctatcaaggcttaatattcggcctcattgtttgaggctgagaagtcgaaccgtagggctgcctggattcgaagtccactcgtagatatcattgcgacccccgctccggatctgctctcgttggaggctccgtctacaaatactttccatgctgggactgacggtgtgggtatgtttgcagtagctttggcttcattacactcggtgatgaagt

SEQ ID NO: 156098 - DNA, 518 bp, Cannabis sativa
tcgctaaaaataacttgtcctcatgcatgtgttgcaacagttagtcagaatgtgagcatgtacgcactttgctccctcgtactacacaaaagaaacgtggaagaagatctacaatgcaacaatttgtattgttggcgaggaggatgagtgggtactatcggaacacattaagaacataagagttggggtactagtgaggaaaaaaccagtaggtccgcctaggaagagcaatataggtaaaagaccgatgaagcgtcaaccatctaatggtcaggtgctagtagaacctcgtcattgttcgctctatggcagttcaaggcacaacagagctacatgcaaagctcgagtttgaatttttttctctaatagtttcttagccatcaatattagttacaaagcttgagtttggatcaaatttatgtcttgtattgctggttgttgtttaacaggattgtgttggccatgttcattggattttgtgccctaaataaaacttatttcaatataataagatttac

SEQ ID NO: 156099 - DNA, 698 bp, Cannabis sativa
cgtcggtagcgaatttcgcgaaaaccgacgcctaaagggctttaaaaccgcctctaaagggtgtttttgtagtagtgctactcaacttaggtttatattcttaaaaactacttggtaggtgtaagtgccatcgttgggtcgtctttataacaaaattcaaaatataaaattatatctggttattagtacagcttaataatacacaactttaatgtgaagtttcttggaatctgatcaaatatttcttaatgtacgctgtcaattattgttgtagaaaatccatatcgttattatcacaataaaagatacatgagaattattgtgaattatagctgtggcgtttggtaacacttttgttttttaatttttaaattataaaataaaaataaagtttttgtttttaaaaattttatctttaaaaaataaaaatacgttctgtaacagtttttgtttttaaattttaaaagcagaaaacattaaaagtgtgttttgtaaaagtcatttttatttttattttttgattttatttacgttgggtctaggtttggggtcgggttcgggttcaagtcagaggtcgagttcagcgctgcggccgtaggggatttaggtccgagtctgatcgaagtccaaaatattagttaagaaaaaaaattgtttaaaaaaaatattgaaagtgacttttttttgtttttaaaatt

SEQ ID NO: 156100 - DNA, 659 bp, Cannabis sativa
aaaaaaaaaaaagccaaacatcctccaagcctttcacaatatgtactttgtatatgttatatgatataagggcccgtttggcccaagattgaattggattggactaaaaatgattggaatggattggattatgctaagtgtaatcctgtgtttggtcttagaatggactagactatttttaatttttacagaaataataaaaaaataaataaataaagaccaattaaatgtaaaacatattaattttaataatgattataacataaaatttaaattttaatagtaaaagtttgaatcataaaattaaataataagcttttgtaaaaaaaaatatcaatatattaattaaataatgtaacataataaaaaaaacaaaaaattataaaataaaactatttcaataataaagaaatatatgtcaattaatattataaactaattattttattaatttcatacaaatattacttaaaatttttatataaatatttgttgtttaaataatattattttaaaatttaaatagcttatatatgatatacaaattttgataaaaaaaaaaacctatacataaatattctcttctttcatttaaattctttttaaatctaaaatgtatttacaaaattaaaaataaaaaaaagattaaaaaataatcg

SEQ ID NO: 156101 - DNA, 776 bp, Cannabis sativa
caacatgggactttactgctacaaagtcatgttgtttgggctgaagaatgctggggcaacatataagcgattggtgaatgagatgttcgcgaatcagattggacaaaatatggaattttatgtcgatgatatgttaataaatcagtaaaaagtttgagtcataccacggaccttgcagaattctttgaaatattaaagaagtataatatgaagcttaacccgaaaaaatgttcctttggagtttcctcaggaaaatttatgggattcatattcaacgcgaggggcattgaagcaaactctgagaaaatcaaggctttgataaatatgtcatcaccaacaaagcctaagtgtttggcaacgcttaggcttaataggaaggatggctgcccttaaacgattcatttcgaaatcaattgataagtgtttgccatttttcaataaattgtgaggaaacaagaaatttgagtggacagaagaatacgaggaggcctttcagaatattaaaaggcatttggcaacgcctctagtcttggagaaaccaataaactggagaaacgttactcctctatcagacaatcttagaagacacgattagtgcagcaatagtgcgagaagaggaaaagcaccagcaacctatttactatattagcaaaaggttactgggggcagagtcgacgtatcccctcttgaaaaacttgctttatgccttatccatgcgtctcgcaagttacggccttacttctaggcacactcaataaaagtgttaactgatcaac

SEQ ID NO: 156102 - DNA, 802 bp, Cannabis sativa
gacgaccacccaccaccaccgacagcagccaccgaccacgcacgaccaccacccgcaatcgcggatatgaggttagtttttcctcggtcggttttgggttttttcatatctgaggttgaagacatcggacctcctattggtctgatgccgtccgatggtccgatggggttgtgggttgggtccgatgggttgtgggttgggtccgatggggtatgtgggttggggtccgatggtcattctcgtggggttggggtctgatggggtatatgggtagggtccgatgggttatgtgggggtccgatggtccgatgggtggggtctgatggggtatgtgggtagtgagaaaaaactaaccttggacatattccccactgtcggtggtcaataccagtgatggtggtggtcgtgcgtggtcgtccggtgctaaaggtggtggcaggtggtcgtcggtggtcgtcggaggtgaactggtggtcgtgggatgtgggtgtaggttgtgcgtgcgtcgtgttcagcgagagggagagagaagttttgagttttttatttttttcaaatgggaggggtatttgtgggatattaggaatgtggtcatatatgaccaatattattaagtatgcatttaggaaaaaaattttaagatcttgtaagaatggaatttcaaatttcccaatatgaattgaaaagttttattaaaaagatcacacccatagccatggtgcacttaatccaaaagtccaaaagacccaatatatgagtgaaaacttagaatcacatcacatatgaatacatatgtcaaata

SEQ ID NO: 156103 - DNA, 574 bp, Cannabis sativa
tttttcaatagattttcaatacttagatcgatctatagtactatacgaatatagtaatatatttagaattcgaaataaacaccgaagaaatgaaaaatggaaaaaaccaaaccatggaccgatcgatctaaacagtgctattcattaggattacttttagagttaggttggaggtttttggtgaaaaaattgttagacatttatatgtataatataaaatatatgtatgtgtatatgtatgtatgaatatagatttgtatgtgtataaaaattacatcatatttgagttttttaaagtgccattggagatgacccctctctctctctctctctaaatctattttctaaataattataaaaacaattaactcaaatgattattgccaaataaattaaatatatatcgatgataattaaaataataataacataaatagtcaataaaaaataacaaaaatatattagtattattattattatttttgaataaattcagaagattaattaattaataatatcgttcaaaataatagattgcactttagatgtgcaatcctccaactgaagcacatga

SEQ ID NO: 156104 - DNA, 608 bp, Cannabis sativa
agccaaaagagccgcttgtgattcaggaatagtgtgccaaaaaagagccacttatgatcgagtcatgcatgattggtgacaaaaaaaaaatagttaccatcctgagggggatgttagagagtcctacattgataatatgcagaaactaaataccatacataagatccatgtaccttaccatgccatacattcacctattcatacttcttcaaccatacacttttgtattctaactttgttaaatgacaaaatgaattctctattttttaaaatggtacagtaccctgagcttaattttttactattttttttttcaatataactaacttgaagacaattcctaacacgaatatataaatgcagaaaatgtaaccataatacatctagattgaattattataaggttttattttgaccaaaaaacagtttaaggtactataaaatgcaaagtcatttaacttattagacatatgacccaataacaattagtaattttttcaaaacatataatccaaaatagtattcatcccaaaataaataatattcttattttatttagggaaatttgattttttatacttagaaaatcttaaatttttttccctaaa

SEQ ID NO: 156105 - DNA, 578 bp, Cannabis sativa
  modified_base (57)..(61): a, c, t, g, unknown or other
  modified_base (310)..(322): a, c, t, g, unknown or other
  modified_base (368)..(373): a, c, t, g, unknown or other
  modified_base (426)..(426): a, c, t, g, unknown or other
  modified_base (525)..(531): a, c, t, g, unknown or other
tttgactgaaggcaagtgttctcatcatctttcaatttgaggccatcactatctatnnnnnggcaaccacctaggtttaggtttgaattattttggcattaagaaaaataaaataaatggtataatagagcaatagtggtcgatcataggatgtggccccctacatttcaatttttccatttttccaactatttatcttatttcctcaaaatgccatttttaaaatttagccacttaaatgtcaaaactatttattttaataattaaaattaattataaaaaaattgccatttaacatatttattaattnnnnnnnnnnnnntctcttaattaacaaataaactatagaatctcttttcttcacaatnnnnnnctagcttagtgaaaattcataaaatagacagtctaattttaaaattataattnattaattaaaatcaattaactagaatttaccaagggaattctctaacttattaattccttattgcatccaccacagaacttgaaattgcactctcagtnnnnnnnaatgctctatatgttccacgatttagatacgctataaacatttaacc

SEQ ID NO: 156106 - DNA, 711 bp, Cannabis sativa
  modified_base (648)..(669): a, c, t, g, unknown or other
ataacaagctggttttctagaaactctcccactatgacaaggagtcgtgaccttctaaaccggaacattagtggtagatttctcaattgtatcaacttgtattggttaaaccaatggagtaggattatcctctatttgagtagaagaagatggaacattatttggagttatatctgaaagtatttcctctaacactactttactttgtagcttgaagttcttaatatagtcatctttaaggatggaatttgttaaaataaatactttatcatctttgtgactataaaatagtccacccctagtctccttagaattcctaacaaacatacaaacttcaattcgctcttttagtttgtcatctttctttcttaaggcatgagcagggcatccccagattttgtaatggcgtaaactgggtatacaaccattccataattttaaatgtgtcttagggactgatttagatagaacaacatttaaaatgtcagttgccatctgaatagcatatccccagaaggacgtaggtagagttgaatagctaagcatggacttaaccatttttaaaagcgtgcaatttcttttttcgataactccatttttttgtggagtgctaggggcaatctgttgagattcaattccaagttcaannnnnnnnnnnnnnnnnnnnnnatccatatattctccacccttattagttcgcaagatctttaa

SEQ ID NO: 156107 - DNA, 812 bp, Cannabis sativa
tcaagcctcaagtctcgtgacaattcggactcatatgaagactttttgaatgagcaatgtaattattttgagattttagctcagcaagaactctattggaagaacgatcaaaacaattttggttaaatggaggggacaaaaatatcaaatattttcatgccaccgcaagatctcgtaaacgaaataatcaaattgtccaacttcagcatagtgatggtgtttggagaggctggaattcaggtcttgatcaggtaataattgattatttctcggttctttatactactgatcatgctatttgtggctctgttgtcaatggtatacgtcgctcagttactgctaaacaaaacgacatcttgctctgcccaatcacagctaatgaagtaagcagctttccaaatgcaccctgacaaagctccatgacctgatggtatgagtcccggtttttaccagaaacattgggacacagttggcactgatattattaagcttgtcatggacttcttcaacaatgaatgcatgtcgattggtcttaatgacactcacctagtgttaattccaaagaagaagaacttctcctctatgggtgatttgcggcctattgctctctgtaatgtctcctgcaagattatgtcaaaggtccttgccaataggatgagagtgctaattgatcatattatctctcctactcagagtgcgtttattttaggcaggcttatctcagataatataatgatagcctttgaaattatgcactacctcaagcgaaaaacaaaaggcaaaaaagggttcatggctatgaagcttgatat

SEQ ID NO: 156108 - DNA, 565 bp, Cannabis sativa
agggcataaaacccaacagtcgatgctttccttttctggtccatggctgaaccactacttcccctgctaaagcctaatgcaggaggggtaggagccccgccagccactggagtcctagctgactcaatcatgcacccaactgcgcctcagatcgcagtgctttttccaccatctcagcataggtggttttgtcgtctgtagtagtcatcaggtcatgtttaatcttaacattcagtccatccaaatacttttcctttttacttaaatcggttggcacaattcccgaggccaaccttgccaaccgatcaaactgcgttgtgtactcaatgacgctcatgttctctttctgggtgaggtgattaaactcttttctgttggcacttctgacggcctcattatagtacttcgcattgaaatgttcctggaacttttcccaggtcatcatcatgacatcgtgtatcatagataccatgtcccaccataccaatgcgtcctcttgaaactaaaatgtggcacacgccaccctgtcattcccggtgatgcccatgaagttcaatatcttggt

SEQ ID NO: 156109 - DNA, 632 bp, Cannabis sativa
atccatggctaagttcacttttttggttttgttttcagattttgtggggtcttggtcttgaattttttttctttaatggaaacatttgaccaaatttaagatgagcttaattgttttctgttttaggcacacgtgaagctcaagggtaagaaagaaaatagtttcttttttttattctaattttttgaatattgatttctatttactatatatctaactacccttatctctctttcatttccttgataatatcctcaccacattctacactatctcactctctcatttttttttttttattttctccaagttttattttttcttttacagtgtgaatgatcttttagggtttccaacctctaatggcaagtcaaagaatgtcccaatcgtcaaagagactagttcgttattcatttttttgtaactccataaccgtcacttacaccatcaccatctgaggccaaagctccaccttcgtctgctgctccagtatgccttgtgctcctgttaccgacaaaaaggaggagaagttgctttacttttgtctttggcttccttgatagacaaaaagggggagaagtgtttatgagctttattttccgctacttcgagagtgtggttgcgttgaactc

SEQ ID NO: 156110 - DNA, 515 bp, Cannabis sativa
  modified_base (455)..(477): a, c, t, g, unknown or other
aggttcactcttaatgggtattacacataaatgggtaatattagaaaaatttgagtttttatgattaatttttctatttaattagaaaaatttctcatgtttacattatttgggctgagattggttcgtcagttgaaaaaataataaaaaaaaagttttccggcaaaaaaatgataaaaaaaagttgactttgacttaaatatttttcatataaatatatttttgatatagtgtaaaaagatgtatttttttaaattttctttgattaattaactaatttaagcatagaaattcaaatttctctttcattattcgttatcggaccaaaatttaatggtttaatatttttaaaattaatatctatatttaaatttatttagtacctattaatgggtaatacccattgaaaattattctaattctaaaattacactatgtctagtttatgaattttnnnnnnnnnnnnnnnnnnnnnnnaagaaaagagattctatggtttatttattaattaagag

SEQ ID NO: 156111 - DNA, 633 bp, Cannabis sativa
gaactcaaactaagacccggacacatacccagacctagacccacattcgggaacaaaaactgaaacttgaactggaaccgtactgggatctttgaaagggaccgaagcttcgacccagatcagaaccaaaaaccgtacccaaccacataccctaaccgagaccgaaatacggacctgaacctccccccgaacccaaatcaagactcgaacccagactcagacccaaactcgacctgaactcgtaccctgtgacttgaaactggaactgaaaccagaagcaggacccaaacccagaccctgacaaatattcaggactcgaaactagaaactaaaaagaattgcaagactaggacccggacccaaacctagaaccaaactcagacctagccccagacccaaaccgagaccaaaactcaggcccaaacacattcgtgtaccagaacgggaccgagacctggacccgaacccagaccaggacctaaacctgagacccgatcccaaacccagactcggacctagatagggatctggacccgaacctggacttaaacccaaacaagccctagaccgagattgaaactcgagaccttgattcggacagagaccctaacccagaccaagaccaggacccgc

SEQ ID NO: 156112 - DNA, 543 bp, Cannabis sativa
attttggaaaactttccttagaactcaatctccaacattgtactgacgaactccgatgttcttgttaaaatgttgagctactttatgttgatacgctacgacccttatcaatgcttgttctctatgttcatctaatgtatcgagcgtgtgagccatatcctgctagtttttagcatctgttgtgtgttcaaatcttgtggttgggagccgtacctccgcgggaatgactgcttctgttccataagttaaggagaaagttgtttccttggtggaagtctttgccgtcgtcctgtatgcccataacacccctgggagttcgtctgcccatcttcctttggccttgtatagtcttttctttaaagatgccaccactatcttgtttgttgattctgcttgtccactcgattccggatatctaggtgttgagaaggagagttgtattccccatttattacaaaagttttgaaagtctaggcttatgaattgtgagtcgttgtcagtcactatttcttttggcacaccgaatctgcatatgacgttctt

SEQ ID NO: 156113 - DNA, 809 bp, Cannabis sativa
attcttgactggtttaaatgaatcctatgcttcggttcgtgctcaaatcttactcaacgaacctataccaaatctgtcctgagtgtttgcaatggttgtttaagaagaacgtcaaagatcactaggaaattctaattctattcccttggctgctgcgtctagctctaccaatcccccaagaaccaagaaacctaggccttcttgctccaattgtggcaaacccggtcatcttgtcgacaagtgctactttctccatggatttcctcctggttatggggacaaaagaaagcaagacaaaggcaaagccaaatccaatgttgctactgtcaacaaccagaaaaatgaccatgacagcagcaaaggtcctactgatctatcctctcaacgccaacaactaatttctttgttgagccagcaatggagcaacaccactaatgcagaacaacctgcaacagcacctgctgcatccaatatggcaggtacaaattctcactccacttcttggattatggataatggtgcaactcaccacatgtgttgtaatttcaagtatttttcatctttttctagtacaccattccctaaatttgcgtccttaccaaatggacaatctcttcctgtccacaatattggtactgtcaagattaactcaaaaataacactacagaatgttctttttgtaccccaatttcagcttaatctttttttcataactgattacatgctgaatactcttaactcagtgttgtttcatcaaaatcgttgtgttattcaggatcctacaatgaatgtggtgattgggacagctg

SEQ ID NO: 156114 - DNA, 654 bp, Cannabis sativa
tgtctttatcgtcgcacagctagacgttgaccgagttcttcatagtggcgctagaattatggcggacttggcttgatcaaatggacctcccaagtagagctttaaccgctgcccgctaactttgaaagtatcggggctttctcctttcagctgcaccgctccataaggaaacactttgatcactgtaaattgccttgatcaccttgactttagcttaccaggaaacaacttcaaccttgaattgaaaagtagaacttgttgcccaggtttaaactccttcctgactaagcttcggtcatgccactttttagttctctccttgtagatcttagcgttctcataagcctcattccaaaactcccccaactcatccaattgcagtaatcttttctctcctgcagcctttaaacccatgttgagagtcttcatagcccaatacggcttgtgttctaattccaccggtaaatggcaagcctttccaaacaccaaccgatatggtgacatcccgattggcgtcgtgaacactgttctataggcccacagtgcctcatctaactttcttcaccagtctttccttgatctctgcaccgttttctccagaatcatctttatttcccggttagaaatctcagcttggccattactttgcggatg

SEQ ID NO: 156115 - DNA, 522 bp, Cannabis sativa
agggcataaaacccaacagactttacatgacttcgaccagaccggtggttatcccaagtcatcttatccccttgaataggcatattgatgagaccacacgagtcaacaagattagagatgactgggataaaagggtcccgacccgaggaaccttccctttcagaatcactgagaacaaaattcgtatctcccaaaataagccacgggccaccgaacttatctcccaacctcaagaattcagacctatactttttcttagcgttcatatagggagggccataaacacatgagaggagccacgagtgagttggggggtccgaatacactaacccggagatatggtttcgagtactagataaacattcaaaactaaatcccgatttccaagccaaaataatgcctccagctgcaccagtcggaggaacacaaatattaaaataaaagtggagatttttaagagtacgtgccagaggtttagcatccacttttagctcggacagaaacacaaaatccggagagcga

SEQ ID NO: 156116 - DNA, 510 bp, Cannabis sativa
  modified_base (28)..(45): a, c, t, g, unknown or other
  modified_base (89)..(122): a, c, t, g, unknown or other
gacattaattccgctgcatcaatgtaannnnnnnnnnnnnnnnnntgtgtttaatttatcgttttagaacgttcatatttagggtgttnnnnnnnnnnnnnnnnnnnnnnnnnnnnnnnnnngtaaaataatttccaacaacaatttggcgccgactgaggggccctgacaaactgaatcaagagcaaaggacacatattcaataccatagccaatttggaagaaggaaagattgacgttcaagcccagatagctactctcgtatctcagatgagggaaaccaaggaaagcctcagaacggtacaagaagagaataaagcatttcaggaagagaatgctctgctgaaatcaaaggtggagatactaaagtccgctcaacgtagtacgacgatgtctcagtcaaggtttcacgttccaattctatccatgccatcccttgattccactccgactacaaacgtaggccaacatccagcggtcatgagaacaccacaaaaccaaacaacacac

SEQ ID NO: 156117 - DNA, 624 bp, Cannabis sativa
  modified_base (579)..(581): a, c, t, g, unknown or other
ttttttatttagttttgttcaaatattcttttataataagtcaatattgtttgtcatcgtttaacataaaaaattgtacctaattgcaacaaaatattaaccttttgtattagttttgaggtattaaaatacaacaaaatattaactttttgtataattatcccaaaaaaaaaaaatagaaattaaaatgtagcaattaagaagatttgagtattatggtcgcaaataactcttaatccaatatgtatacttataaattaataaaatttatttgagctaatattttaaattaaactatataagtgatctaattaaatgagtccaataaacatcttatttagttgaattttgtaatgcataatacctaataataaagggtttagccccttaacatcttatttagttgaattttgtgatgcagtttttgattattttttcaactaacccacacatgcagttttttcattttctcaaaccgcacccgcaccgtgaaactaaaaaatcgcaaaaatcacaccgcaaaaaatagtgcagtgcgttgtggtttttgcggtttggagtatcactaaataattaaannntcacaaatacaacaaagtttgagcaacacttgtcaaaaatacc

SEQ ID NO: 156118 - DNA, 683 bp, Cannabis sativa
agacaaaacactacgagtcccaaacgcaactggaaagcaactggacataatttgtcactacagaaaataatagttcttacagtatacaatatttattttttattttgttatgtataatagtagtatataattttgttagcataataaatacattttaatgtatgtatataattttattggtatgctacatatatttaattattatttttatatatttgaattgtataatatattatttatttaaaataatagttaattagtttttattttattatatacaatggtggtatataattttgtaatcatagtatatatactttaattgtggtatataatttagttagtgtagtatatatatattagtaatttctttgtggtatataattttattactatggtatattaattttcagtgataagatatattaaatatcattctatatatttaatgatctaatatatttattcgtttttgttacaatataataacatgcaaaattaaaaaatatatatatcttaatttaattattatatattattttttcaaaaaaaaaaatatacagtaaatatattgttacagtttttgttatagtgaggtttctctcacctagaaactcgagaccagacccctacttagaggacacgtatactcagattttccaaagaaagctgagatgtccctg

SEQ ID NO: 156119 - DNA, 584 bp, Cannabis sativa
aggacgaggtctcctacctcgtttttgaccatgctagagagaatgcttggagcagattttgcatttggatgatcgaaaccaatgcactaggttgattgtcaacgtgggcgctaggcccattaccaggtcaacttgggtgctgggctcaactttcatgccctcgagattatagttttctccctgaatttacttgtatctttgttatttctgatgataaaaaaaaatgcctgaatacttttttttgagaatatgattgaaaacagctcaggttgacaaaatatcaacttaggcactgggtttagtttctgggcaccatatgactccgtttgattctgagaaatacttgtatcttaatctttgatgaaaacagagaatgtactcggaagacttctcagaaaaactccttagaaatggcccaagttgacaaaatgtcaaccttggcactaggtcccccttctaacgtctaggttgatctatttcttccccgacaacacctatttcctcatttttgatgaagacgaagaaaattctcgagagttctttagtttgatgcttggaagtgccccaggttgacaaaatgtcaa

SEQ ID NO: 156120 - DNA, 812 bp, Cannabis sativa
ttaattatcaaaccattctccactaatgtaattacacacaatctaaagatcaataagactttataggcttataacgtaagtttagggtgaaatgtagataaagaaagttaattttgggctcaaatcacaccatagcataaatctacaacattctctcaaaataattcctatttgtattccccaatcacttccctcaataattcaatcttgtattttttttcataaaacttactatttccccacacttaaattgttacaagtattcatttatttttcgacgtatttctcatcattttattaatttttttttaatgaaatacttacaacttacaaatatttattctatgtgaataataattattttcttcatcatcacataatcatgaatattctcccctccataaaactctcacatatttacaaatacataaaatatagtgtgaaaaaggatgaataagaatttttttttggctcaaaggttagtgtatagggttaaaagaaaaacaagatgtcaacatttggcttaaattgggtaaaactaaggaattaacaaataaagtaggcttgaaaagctcaatcgatccaaaaaaaaaaaagttgcctatatcatatctcaaaactatgtgtaatttattgatttcgcctcaaataattatcaaacaagttctagagtgcttgagactttaaattaaaatttaaacatgcacttatctttccagacattagcaaatatgatatttcaattgatgtccaaaagttttaaaaaaatcaagcttgggcagtaattcattgtaacactctaactagcatag

SEQ ID NO: 156121 - DNA, 534 bp, Cannabis sativa
tcgggttgtggcggcaaggggcacaatttaaggacatgtggcagcaacaagacaacttctgtgagtaattctatactaccgctactattatttggttataatgtttatcttttctttcaaattagctactatctactattattggtccacttgaaacttataaattgattactgctaatgctactatctactgctactactactatctactgctaatagtacttaaacaaaaacatatgtcttaagctaattcaataaatcattttaactttcaacaagctctagtacttaattgatcacagtacaattcctcactttcttagcttggttttcagtattctcaatagcattagcaactttcatcatatcaatttctcttttgtgtagcccctccttatgcattaaatcaaaaattagttttgacattcagtgcagttaatccaatccaaatttgagtgtggtttaatcttatgaatgtgaaatattgaagggacatgatcaatcttatgagactatacatagagtaaatgcaac

SEQ ID NO: 156122 - DNA, 659 bp, Cannabis sativa
tttgtattcattgagttctttgattcactcgttaaagtttctctaagaagatgattcttataaattcttttttgggaactttataacatgagtggctggaaacatgttatacaataatggaatcaaaactttctgaaatgatcgaatattagttcccttatagtgttaattctaggagtatttacagttggattcaaatttataattagattatagattaattgttcatattcaattaatggtacataagaaataaatagataattagaaaggtaaaatgataattttgaccaactctaattatgaactaattaataattagagggcaaactacttatattgattatatcaattgggctactagtaagagttttgtaaatataattctatattgtcaaagagtgcaattctatatgggaaatttgaaaaaatatgcataaaataccctactattttatgcctaaactaatgcatttcaaatttttaaaaaatatgaccactttataataaacccaaaaatacccctcttattttcagacctcaaccctctctcttcctctatctctctcggttctctctcaacatctcaccctcatcaaaattgaacctacccctcaccgcctacacagacgaccaccgtgagacccgactacctccga

SEQ ID NO: 156123 - DNA, 1012 bp, Cannabis sativa
aaggatgccgtcgttacaaattacaaattagacatctttaacggtaaaccggtgaagcctggatttttatgcaagtattgcaagtcttacccacaagccaaacaattttaataatttgttattttatggtttgtggtgagttttatttaatgtttattttttttttatgaacttttatttaatgttttttttatgaacttttattttaatgttattttgtgttattttaatgaaatgttatgttattttgtgttttatttatgtttttttttttttttcaattatcgagttcaaaaatcgacaatacatcgacattgcatcgatatatagtcgacactattggtcgacatactatcgatagaatgtcgacatcttctaaaataacttgtgaatgtcctccatcgacattctatcgacatatcgtcgacaacatgtcgataatagtcatcactgaccttgattggcagaatatcgacaattacagaccaaaaaataccagttccaacaaatacgacacatataacaattttaaactacataaagtctaacaaaatgcttaaaaaacaccacttacccattgtaatggtgtaagattcttgagtgatattggggtgtgctttggttttccaccaacgcccaccgagaaacaaccattcaagagggaagagagagagggacgagagagtgggacgagaaagagagaagttttttcagttttttctagagagagagagtagtgcactgcacgagagagagggaaaagagagagaaagaggcaatttcagtttttaacaaaagagtaaaatggaaagttcatgtaatcaatggactaaatttgtacaaattaatgtaatgtataaattttgatatggggtattttattagggtcaaataataaaatttccctaaataaaatagtgtggattaaattaagggctcgtttggaacgccgtattaagttgtattgtattgtattatattgaattgtattttatgcaatatttttatgtaa

SEQ ID NO: 156124 - DNA, 598 bp, Cannabis sativa
cctttgggcaagtaattacacatatagccaaccaaaataaataaaatttagtgataaaataatcattaaaaattaataatcatagatgagggaaccttaagagagccaccgactctaattaccgtccatgtacgatccataccatatttgaccaactgcacatcctacctcctttacattcttgagagctcatctttgtctcagtagagtttttcagtggcatatttcgatcctctttcttaattgcttataatatatcgataataaaaaaaaaataaagtgtctactataacacattacttttgcatcaataatcaaattttataattttagaacaataaataatgaaagatgtaaaagtgagaatattggtggagactacatatagtcaagatagatcaaaataagagagtcactatgtctaacaggacgagaagaaatctaaatttttttctatgatttatagatttcgaaaaatcataaaaaattattcttaataattttttgactgtataattatcattaaattaataataattattaaacgaagtcaacaaattaattaaaaatcactaaaaaccagaaatcaaattctaat

SEQ ID NO: 156125 - DNA, 505 bp, Cannabis sativa
gacataagctttaggaaccaactaacatatctactagactaatgtaaaaattcaacatattgaagtaaagtgtgagacaaggaaatacttttgctccacaatgatgtttacacaaatttatatattacatattaagccatataacactttgaattttttatttttattttggagacatttctattagaacttggaatttaataaagttatgatcaagagaaaaaaaaacaatctatattccaataagaaattatttaactaaataatggacatttttatgttaattcttctttagttgtgttgactaataatttttttggttgtcgtgttgtttttaaaatttattgtttggtgtcacagttgtgtgtaggtcgagatggataataagaaattgatagatttgataaaaaaaaatttctgagcagagtcgcaaagttgaagagttacgtcagaaggtgtcacttataaggtcaaacatgtgttgtgcctatgatctttatcgttt

SEQ ID NO: 156126 - DNA, 794 bp, Cannabis sativa
tattcatagagaggatttggcgggtcggttacatggactatctttttgtcgaagtaggctacaggtttcctctgacgaaactcttgtatttttctgaagcatctctggtggagtgtgctcgatttaaggagttattggataaatatgcgtctagaaaagcagttaattttcataaatcaaaaatatgttttggtaaaagagtttataggagtctacgtagtcggctagcttcgatgttggaagttaaggttatgaataactatggaaaatatttggggctacagtcttttgtgggctgaagcaagaaggaattttttaaggttattaaaaatagagtctagcaaaaggttcgtggttggaaggggtctgtgttctcgatgggtggtaaggaattcctcgtaattctccaagcaatgccaacatacactataagtttgtaacaccctatcctatagggacgccacgtgtgtggttttataaactagtttagtactaataaattaattaattattaaaaagtgtgataatattaaaactttactaaaataaaacactaaaaacgaacatcataatgacactaaaattatgtttcggggatccctgttgtaaaagttttacagaaaggctaaatacgacaacaagccaatgtactaaatcaaaatacatggcagatacactcgaaaaacaactcatgacaatttagcatgcaggccggtagggtcaatatgtatattgctagagaagactgtcacctcatgattgatttagcttttctttgcctttacctgcaccac

SEQ ID NO: 156127 - DNA, 530 bp, Cannabis sativa
  modified_base (497)..(497): a, c, t, g, unknown or other
aaatcgatctaattcaatgacaactgatcgattcagttacaattgatcgtcaaacattgaatatctaattttttttttttgagagaaaattgaatatctaattttgattggatcaaattagatgttatatttgaatgtccagttgcatcaaatcgaatgttggatggggtgtccaaaaatataatacatccaacatccaatcgaaataattcatatttttatttaatttgaacgagtaattagattttatgttgttatacgtataaaaaatatatatataaaaattaacattaaaattttatttatttatttagattggttggatctaattccatcaaatagacattggatctaaaatattgaatgaatctgattcgtttcaataaatactaggtctaaaatataaggtaaacccaaattataccaattaggggtgttcataaaataaccgatccaatccaatccgcacgatccaatccaatccgcaaagtgcgganatccgcacttgtgcggattggaaaattcaaaat

SEQ ID NO: 156128 - DNA, 681 bp, Cannabis sativa
ttatcagatacattacctaattaagaaaatttaaaacatttaaaaaatacgtatatataatcatatccaaatgacacatcaatgtagtaataactaaatttttttttctcaaagattaaaatctcaaactccatttaaaaatttgaagaaaattatattacctaattaaaaaaaattaaatatttacatcacttaattgaacctaattaaaaaaaaaactaattatatgtgcattgcacgtaatatcaaccgagtatatatatatatatatctaatatgtataagtgccaggttgttgaagacatcaaatggaacttaaagactcgaatcaacctatttttgccaaagaaaattaaaagtgtagatagggattggttttatgctttatagatgtattgtgtaaaatggaagatagttgagtagagggaagtaaagagaaatacattgtatagatttttaggcccttgtgtgggtgctattatggtgtaaatatgtttgtgcaatacaactcactgatttatcgaaaaaaatatatgtataacaactaatgaagtagaatgaaaaaaaaaatatatagaaaaggagtttaccacaccatgtgtaacgccctgtccaacagggacgccacgtgtgtgcactttatttaaaataccaataattatataagatgtaattatacta

SEQ ID NO: 156129 - DNA, 664 bp, Cannabis sativa
  modified_base (48)..(52): a, c, t, g, unknown or other
atttttttattgcaatttaagttagctagttgcaataggaatttctannnnnaatttcgtaaaaatacaaaaaaaacttaaataaaaaaaaaaaaccctaaaaaagaggactacgaattacaacattttatgagttaattttcatgttcaaaattatataccgtaatattatttttttaatttttttcatagtaatattcattatagttctaatagtaaattttttaaaattaattctgaataatttaccatttcaaaaataaattttttaatattttatagtgtgtataaaatacttcaaattaatttttcaacattgtaaactattaaaaaatttacaagaataatattataactataacaaacatcattataaaaaattaaataaaaatattctaacatatatattttcagatacaaattaaagaagaaattataataaaaagtgaatggtacgtaacattcttcttcttcttctaataataataataataataataggagtatatatagtagtaattaattaccacgtgagataaattaattaattaattaatttaataatattatagctagaaagagcttgaagttgaatactgaaaataataataataataataataataataataatagagcttatataggtgccattaatataggt

SEQ ID NO: 156130 - DNA, 1025 bp, Cannabis sativa
gatcttttttgaactgcatatccaccaaatatttctccaccctatcggttcgcaagatccttaaccacttaccttaatggttttgcaccattgctagaaattcataaaatttctcaaatatttcaaatttctttgcataaggtaaaatctagaattgtctaaaaatttaacgataactcatattcaccccaaaatgtgcatccatatatggaatacagatgatcctactttcaagtggaaaaaggcatattttctctttgcagagaataatcttgttaaaaccactatgaacaagatgtaaatgccatagatacttaaactgtggttgtggtcttttgatgacttaggtctagttacagcaaagagttcttagaatagtccaagttgattttggtcacaaaatacagatctcatattccatacataaacatacattttggatccattgacagaaaatagatattaaacttgtgaaagttgtactgtaatgtttaatgcattcttggaactgaaatttaaaatttcaatttggaatcgaaaatttaaagtcaaagacttaattttatactaaatatttcatgagttttattctatcttggacctccactactaatctaactctaagcctaggttgccactagtaagcataaacaagtaggagattttctaagatcgaagatttatatcatttctggatagaatgtcgagaacatagtcatctgtgccattcaatttcatagaagaacataggatggcatcagaagcaaataatttataatccttctatccaatgatatactttctaatcaaattctaaatgtaaaagctaaaaggaaaataaaggataagtttgattaaaataagaattcaacgatatccagtttaggcgagagtaacagttattcttattttaataatattttcattgtatcatattataaacactagtctaagttgtcatctttggatgtacaactagatgtcgcatttacaaatacttatctgtcgagatctaacactattat

SEQ ID NO: 156131 - DNA, 548 bp, Cannabis sativa
tttggagagctcttgcctagcggtggttgctcgagatcatggtggattggttagggtgactacagccaatttgtagttttctgacgcttttcgtgatgaagccgcagcttgttgtttggctcttgaaattgctaagaacaagaggtgaattttgttattgtagaaagtgattctaggatagtgatcaattctcttaatggtattgaatctaggtgggagattgataactactctaaacgtaaggttttgtaactttatgacttataatgtggctaggtggacatttacccgcaactaatatgattgcctggacatagcgaccatgcttaaggaacttttttgtaatgacatgacatctaattgttaatatatatgcacgttttccttaaaaaaaatattagttattattattgaatttttattaatatcatgggtaaaaaaatttaaacggctcgaaaagcacaatatgttttagttttattatatgtattagatttttaaattattatttttttttctattaaaatgttaattgtatatataatttt

SEQ ID NO: 156132 - DNA, 697 bp, Cannabis sativa
  modified_base (159)..(164): a, c, t, g, unknown or other
  modified_base (339)..(367): a, c, t, g, unknown or other
tattaaatattatttttatcaaatgcatataaatttatactatagaaagaaaataattaaaaatatataaaaaataaaaattttatataacatacatttttttatatatccacagttctgctacagctgctttttctcacagcacagctacagctgctnnnnnncacagcacagctgtgccaaactgaccctaagattatttagaggtaacgttttgtaaatagttaatgatattctattaaagttattaattaaaattatatagaactcaatacttaattgcatcaatatataacgagaagataatgttctcctttcatcaaataataataataatannnnnnnnnnnnnnnnnnnnnnnnnnnnnaataataataataataatagggttgttatatttatatacatacatatattttttttgaaaacttaaaaaaaaaaaattagaatttaggttaatttttacaaaaatattgtctcacagaattttttcaaaaatactgtatttttataaaacaacagtagaacacaaaacaaaacaactaaaaacaatagtggaacaactaaaaaacaaccgttaaacaacagtgaaaacttaagtcactacacagtataaaacttacacagtattttttagaaaaaatacagtatttttaaaaaaattctgccccacaatataaaagtaaaaaagttaaaa

SEQ ID NO: 156133 - DNA, 505 bp, Cannabis sativa
attttaagaatacaaatttaagcacaattccttcaagtcatacaaggtaaataacatattcctatgccatttaaaaatcacacttttccaaggtgacatttatgcatcattcaagtaattctaataaccttatttttttcaaaaattaagattagcttgcaacttactaatggtgaccaagcaaaggtaagctattacacaataagcactcttgaatgaataaaattatttcactaaacatagcaataaaatatgaaatcacaatttctagacaacaaaataattctagaaaaataaaaattaactcataatagattgtgaaaacattacatagtttaaaagaaaagatagatagaaataaagactcatttggagcttgtcacaatactccaagttcctcttctaaattcctcttcttcttccccttaatttttgccaatctcaaaattaaaatgttaaactaaaaccctaaataataatcaaataaaactctctctctctctct

SEQ ID NO: 156134 - DNA, 573 bp, Cannabis sativa
gagttctcaattttaacaaagcaagatcatggaagagcttcatcaacagttttacaatagggttttgataatttttctaccatgttatcaatgatatgtcgatactatctcaataaatgtatataatttgatatggactatacttcacgatggtttatttataggttctcaatgtgttctcgatagttttgccttagtggttttgttatttttgttattctaattaattttcttttggtttgtattgaattataagattgggtgtgtttttggttgtattgtatgatgttgttgggagcattgagggttttaattagatttatgaaagcgaaggaagtatgatgttgatggttaaaattgacacaaccttacaaaaaatgtgagacattttatatgaagagttggagattgaatcattggcgtatgatttgaaattggagatttgtatgttgtacatgaaaggccaactggttacgcccgaggttattaagaaatcacatcaactaagagtgtgttagagaagaccaaaataatgccaaacatatataatttatgccattatttatgataaag

SEQ ID NO: 156135 - DNA, 795 bp, Cannabis sativa
tagacttcttctctgcttccagccgacggaagacagcccgaagaactcccctttcctcttgaagactattcacttcttttgagaaagtggcgatggtagcttcaagttgatcataagcctcgaggtccatagtcaactcggttactttcctctcagcagtaaagagcttcttgttgacttcacctagctccatacggacagctcttagtttcaccaaagagtcattagcatctttcctggccaagtccacctctacgctcatggtctttgacatggcagcgttcttggagacaacagacttagctcgggaataggtgtaagccaacttaagaatagcctacacagagaaaaaacattagagtctgagccaagtaaagaagaattaaaggaaactgtcaagaaagactcaccctggtaaattccctcaagacacctcccatcagcagctccagggatgattcattgtcagcgccggccagctggttactcacctcaggaattaaccggttgatgtcgtgagtaagcatctccttgcctctcttggattctggatgcactagaaaaggtggggtaggagcccgtgtcttctcagatctgctcttggccagctcagatccgcccttcgactgtttaggcctctccgagcttcctccatgagaatctttggacttagcagctttcgaagaagaagggtcaacgacagttagctcctcagaaagatcaataacctccccagtcggtgccttttccttggatggggttgcctctccacccttagatttcttggtcggagga

SEQ ID NO: 156136 - DNA, 590 bp, Cannabis sativa
gttcattattaaaaggaaaaaaactaaattctaaacaaaatattatttatgtagatatctaaactaaaagaaaagtaaaaaaaaaaaaactatctatatctagaatataatataatataatatatatagtattatattatattataaaaaaaaattgagaaaagatgataataaaaaagctaaaagaaaaatatatacatatataaaaaaaaaatcttctgcaacacgcagaaaaaacataaaaaaaaagtggcaaaaaattaaaaacctaaaaattttatgaaattaagataataagtgttccaactctatctatttcatattttttagttaatattatttaataaacaaattaaaagaacaaaaatcagaatatcactaacattttattttttataatttattaggaaataaattaaaaattaataatatcactcactaactaaaccgtataaattcttattagatatataatataattataaaaatctatatattaaaactaacaaatctatacatatatagcttattttaaaagagaaataaaaattaaaaattttaaaattaatatttagttgaaataacaataa

SEQ ID NO: 156137 - DNA, 706 bp, Cannabis sativa
  modified_base (57)..(62): a, c, t, g, unknown or other
aatcgttaaactaagaatcgttaaaccaagaattgtcgttagatagacacttttaannnnnnaagatatatatatatatatattacgtatcaagccatgctataatcataaaaacttttataattgtgttatagcagaaattaaagaaaaaaattaatatttatttattgatctaagaacatgttttggctaaatatataccaacttttactattttagttctttttttttttatcattttttctttttaattatttttcattcttctgtctttaatttgtctgtgtgaaattattggatatatatatgtgtataaattacgtatttttagtttaatttacactaatacaatataagcatttagcttttttgttttttttcaaccaattttataaaaaaaggaagttaaagagtgtgaaaatacccgcattaatatttagaggtgattttttgataaaaaccgtagatatagaatttatgtatatatatatataccgtcggttgggggttggagaaaaaatgaggattttttattaactctgtgacttcggttatatggtattaaccaacgccataggtgtcgcctttgtcgaaacgtggcacctatggcgtcggttaataatatataaccgacgccatagagttatatatcagaaccctatgtttcgtctttctcatttcaccatcttcttcagcacgaagaaca

SEQ ID NO: 156138 - DNA, 540 bp, Cannabis sativa
  modified_base (232)..(236): a, c, t, g, unknown or other
aataaccagccagacccaagaaacttctaacttttgtaactattttcggtctcggctaatccctgacggattctatcttccctggatccaccttaatttcgtctttgctaataatatgcccaagaaaggacacctgaaatagccaaaactcgcacatcttgaatttggcatacaacttgtgttctcgaagtcgttgtagaaccatacgaagatgttgctcatgctcctcttnnnnntgagagtacacaaggatgtcgtctataaatacaataacacaaatatcaaggaaatccttgaataccctattcatcaggtccataaaagttgcaagagcattggttagtccaaaagacataaccagaaatttataatgcccatacctagtgcgaaaagccgtctttggaatgtcctcctctcagattcccaactaatgataacccgattcgagatcaatctttgaaaatattgttttcccctaaagttgatcgaagagatcgtagatcccaggtaaaggatacttattcttgattgtcagtttat

SEQ ID NO: 156139 - DNA, 790 bp, Cannabis sativa
  modified_base (597)..(610): a, c, t, g, unknown or other
gttgttcccaacctatcgaacatagaagagcctggttgccttagcgattgattcgcttggttgacaggtggaataacaccattattctggttggatctgtcaggttggctcctcctgatgaattccaggacaaggtctgcccgtttacctcttggttcatgagttgaacttgtaatcggtgattgggcggctgactgttagttgtctgggaagtattcatcgtcgggtcatcctccatttctcccaggggaatgacgttcgccatttgctgacctacagtttggtaggctcttcgtatcagcacggtagcttgccgactacgatctttgatctctgcattgtgagcccttaatgcctccatctccttatctctcaattcagcgagcatacgcctttgttcgtcaaacgcgagatttacagcggcacccagttcatcctgatcatgatgcagagtgttgctacgactctacatgagtctgagcgtggcacggagattttgcaattcgtttgcatctccgatggtcgtctgagcgttggttccaggcaaaacagtcgtgttatgaacaccctggttgtgtgcggaactgttattcccannnnnnnnnnnnnnaggcgcagtttcagtaacaggagctgtttaaccattcaccacggttcccgtctatccagggttgacagcaggtggaacccttgaacaccctgggtcttgtaatgtcggatccagtgtctgtgaattttcagggtcagacaagcctctacgagtttccaccatcgtgttgagtgtcgaaaa

SEQ ID NO: 156140 - DNA, 522 bp, Cannabis sativa
attagaaaccagaagaatagatcccttactctctctcaaacaacttacattgataaagtgttagagagattctcaatgacaaataccaaaagggcagtgatgccttttagacgtgatattcgtctatctaaggaacagtctcccactgatcctcaatagatagaggacatcaaaagggttctttatgcttcagtagttggaaatataatgtatgcaatgttatgcactagaccagacatttgctatgcagtaggaattgtgagcatgtatcagacaaatccaggagaggaacattggactatagttaagaatattctaaagtacttgaaaagtacaaggcattatgtcttagtctacaagggtggtgctataaatcccgtaggctataccgacttatatttccaggcttgtcttgatgacatgaagtctacatctgtgatggaatttactcttgggggtggcgtagttgtttggagaagtgctaaacaaactgcaatgttagactctaccatggaggcagaa

SEQ ID NO: 156141 - DNA, 649 bp, Cannabis sativa
gtgttgacaaagaagaagaaatttggggattatgatactgtgagcttaactgaggaatgtagtgccataatttagaagaagctacctccaaagcttaaagatccaggtagcttttcaattccttgtgagattaatttgagaagtctttatgtgatcttggggctagtataaatttaatgccactttcggtattcaaaactttgggtattggtgaattaaagcccacaacaatttcgttacaattggcagatcgatcattcacttatccaaggggaataatagaagatgctctaattaaagtgggtaagttagtgtttccaactgattttgtggtactagacatggaagaagacaaggatatgccattgatccttgggtgccctttcttagcagctggtggtgcacttatagatgttcgaggatgccacttaaccttgagtgctaatgatgaagaaatcaagtttgatatttataattcttctaatcaatccgatattgagaatacatgcaatatggttgagtcttgtaattccaacaaagataatcgagagactaatcataaagaaaagacaaagaagcctcgaaataaaaagaaaccaaaggaggagttttcaataggtcaacgagtgttggtgattcattcaaaatt

SEQ ID NO: 156142 - DNA, 541 bp, Cannabis sativa
agaacacatgtataatgtaatccataaaaatagtaccaactaatatttttattttcttgttttattttataatatacatattaatctaaaattttaaaagttttttatgcattcattattattttttatttatatattgattagtacaatttttaataaatatttcttgtttttgtttttgtaagaaatgctgatttttttttttttttgacatgatggtggtagcttttttaatagtggatattttttaaaataaaaattttgtgtgtgatgattttgttgcatctcgctcttctattttattggactgctaactcatcttagttctcttattagtatgatattattcgctttgggtctaagccctcacggttttattttcagaaatttataaaaatactcaaatttgggttaatttttacgaaaatactatcacactattgttgtgttcagaccattaaggtagtgttctactaggggatctaacgagtttcgtcccttcgctaatggcctctaagagttcaaattccagtattgtata

SEQ ID NO: 156143 - DNA, 737 bp, Cannabis sativa
ttcacaagagttaagatagccttatgaacttctttaatctcatacttctagccagctaaggaaggtatgatgtcaagcattgttgactaatgtagtgcaccaagcagtggagacacaactaacaatgaaaaacatgcacatagtctgtgaattctaaaagatctttctaaaagatctaccataaatacctttcagatagtgatgtagagttcataatcaagttagctccaagagtactgctgtaattgtgaaggctccatacaaaatggaaatttacgagctgtagaaactcaaagtatagctacaagagctcctagacaaagggatcgttagaccaagttgctcaccttggggtactctagtacgcttttttaagaagaaaaatggaagcatatggatgtgcatagactaccatgagctcaacaaggtgaccatcaagaataagtaccattttccaaggattgacgatctctttgatcaattgcaaggcttgggtgtgttctcaaaaatagatctacagctgaaggtttggaaggaagacatacccaagacaatattccgaacacgatatggacactatgagtttttgggtaatgtctttcggtctaacttatgtcccagaagccaccatggatatgatgaatagggtgttcaaggagtacctagataagtttgttgtcgtattcattgacgacattcttatctactccaagactgtggagcaacatgaggaacac

SEQ ID NO: 156144 - DNA, 504 bp, Cannabis sativa
tttaaaaaataaaataatcaatttgtaaatttaaacctcaaaatatcaaaattaataataatctattgaaaaataaatattattactttaaaatatgatttttaagttgaaatatatttaaaaataatattttattttaaatttgggtttgaaaattggcaaaatcggatttttgggaaaaatccccaaaaaatcagattttagggttattgctgccagtaggctgcaagtttcgaaggctgcagatagggtcatacgcgctcggaaggacggagcccagaagaggtttctcggcggatgcagcctcttggaaggaaacgtgcagggtcctcgtgtgcgtggcgcacgggttcagacaaagaattgtctgaagcacgcgagcggaatgagcctcctgtccgagtgcacgcacgcggatcccaggttgtccgagtgcctggtggacatcgatgcacccactcgacagccatggcttccaatcttccaaaattcataactttttca

SEQ ID NO: 156145 - DNA, 978 bp, Cannabis sativa
  modified_base (257)..(257): a, c, t, g, unknown or other
  modified_base (597)..(598): a, c, t, g, unknown or other
  modified_base (944)..(947): a, c, t, g, unknown or other
agagtgattgtcttaagaatttaatgataactcatatccacccctgaatgtacatccatatgtttgaaatagataaatatacttctaagtggatattggcatattttctctttacatagaatagtcttgctaaaaccactatgaacaagattcaaataccatagatattatattgtggttgtcgtcttttgatgacttaggtctagttacaacaaagattcttagaatagttcaagtgaattttggtcacagaatanaaaactcataatccatacattaatatacagtttggatccattgataaaaaatagaatttaataacctgtgaaagttatactgtagtgttcaatgaatttcaatttcgatttggaatttaaagtataaagtcaaagacttaaatttataccaaatatttcttgagtaattattctagcttggaccaccattactaatttaactctaagtttaagttacctctagtaagcatatataagtaggaaatctttctaagatcgaggatttatatcattacgggatagaatatttagaatataatcatttgtgccattcacttttatagaagaaaatagagtgacnnataagcagatgatttataaaccttcttgtccaatgatatactatctaagcactttcataatgaaaaagctaagaggaaaactaaaagataatttggattaaaataataatctaatgatgtcccatttaggtgagagtcaaagcttttattattattattttataaacttcttcattgtttcagcattttaaaaactagtctaagttgtcatctttagggatgagtcaactagattttgcatttacaaaatacttattaatttgtcaagatctaacactattatgtttgtcgaacgaatgacaatctattgaggattgtcccattaaaaacaacaaaccaagttagnnnnacaatgaagattcaaaatttatactacataa

SEQ ID NO: 156146 - DNA, 698 bp, Cannabis sativa
atactttcctttatattaatatatgaatttatattaaattttaattccaatatgcacacactaattaaaataaaaaaaaaattataactaatcaggcaagattgagatattcaattccaatcacccatgacaaaataaagtgaatgtaaaactactttatttataacttagaaatacaacacacatatcatctacaaaccatgtgggactttcgctaaaaagaaaaaagaaatcacaaaattatactaaattcagtacttctaaaaaaatagataaaataggtgaaaaaaattataagatacctcacctactatatactttcctttatataaatatatgtatagatattaaattttaattccaatatacaacacacatcatcatctgcaaaccatgtgtgggacttttgataaaaagaaaaaacaaatcacaaaattatactaaatttaataattctaataacatagataaaataggtgaaaaaaattataagatgtcatctcaccaactttatactttcttttatattaatatatatttatatttaattttaattctaataaaataggtgaaaaaattataagacaccacctcctctactttatactttcattattattaatatatagatttatattaaattttaattccaatatgcacacactaattaattcaaaaaaaaattataactaattagg

SEQ ID NO: 156147 - DNA, 762 bp, Cannabis sativa
cttttcaagtgttgatttgagattgtaagatgctccaaccccgacttatgataagaattatcaattgtcaaatcctcaaggagtgggaggcttgtaatgagctcttcaaatgatgactgatctgtcataccccatgtacaacttgatagtgagagatttttaattgccttatatgcagacagattattttcccgaagaaagccctacaaagaaccaaagattcaagatttatggcttcaacttgaagagatacattttgtaattcaagtgtcacgaacttgaggcttgaactttgtactcggagcggattatgaatataatacgaacttaatgacagtttctcaagggaagggcaatccgtgaaagacttggttagcacatcagtagttacattatttgaaagccgaacattttccaatgataatgatttcaaggatggaaaaccatatgagtaacccaactcaattcccctcaactccaaaatggtcaaacctcttaagttcaacactgttttaggtaagcagtagtagtagtaataaccatcattctcacattttcctggttctaagtcaacactcaaatattccttgactttattgtcaactgcaaagcttaatcatttatctaggctgagactcttgcttcttagacaggattgtatatgaagcttgaaactaattagagctgaatcagcaataaaatacatacctttcttgcggtgttccaaacaattgtcaacataattttccaacttttgaaatt

SEQ ID NO: 156148 - DNA, 641 bp, Cannabis sativa
tggcactattagactaatagtgtagctgattttttttcctttttaaatgataaaaataaatattaaataaggaataaaaatagattggtaatatttaaaaaaaaaaaaaaaaaaaaaaacaacaaaagaaaggaaaaaaaaaatggaccaggcataaaaaaaaaatcagaaaaaaaacgctagaataatatattgatcaatatctgtaattggttgagtacattatttataggggtttttttatttttacatttcaaacttctttttttttttttttttgcatttttatataattctataaagaaactcctattgcaactagcgctgcaacttaaattgtaacaaaaaatcgtatagaaactcctattgcaactagtactgcaacgattttagaaacctaaaaaaaaaattaaaaaaataatatagggagtaattccccttatttatatctgggtatgcgtatttttaataattaaaattatttttgttttttttttataaatatttctaaaaacacgtacatagatgaaaagtttcctttcttaattatatagatatagatagggaaatttacatgatatactaacttttatcatttttttacaaaaatactgcgaagcggtattttttacttttttact

SEQ ID NO: 156149 - DNA, 521 bp, Cannabis sativa
tatttttgttatttttttttttacttgtttttaaattatgttatttgtatgttattttgatgagatttcgtcaaaaaataattaaaaaaatctgtataaaaaaagtaaaacataatctgtaaaaatgtaaaaaaaaaaaaatcactttaagagttttgtgtaaaaacctatattagacatgatgatgtgtgataaatattatttatttttatttttaagtgggattatattatttttaattgtatagttaaaattaaggggttttttttttcatttttacactttaaaatagtttttcttttttcttttttttttttttgcatttttatgaaattctatatagaaatccttattgcaactggcgctgcaacctaaattataacaaaaaattgtatagaaactcctattacaactaaacttgcaactactttagaaactcaaaccgtaaatttgaaaaagaaaaaattaaaaaataataatatataaagtaattcccctaaaattaattataatatatattt

SEQ ID NO: 156150 - DNA, 631 bp, Cannabis sativa
  modified_base (296)..(312): a, c, t, g, unknown or other
agagacagagacaaagagagagaaagactagagagaaagggtttgcttaatcttgattttcttctaattttaaataaatgaaaataaaatgaagcttatctatctatttttcagcaataaaaatcagatccacttaattaaatataacccactaaagacaaaataatttccttggtaaaaagaccattttgcccttcacttagccaaaaagtcataaaaccaactacgggtaatttggtcaattctaaaatctccactattcttgattcccaatatctaactatactgccccgctnnnnnnnnnnnnnnnnnatgtgattctaatagccaaacaccacgttccaatgttgccaagcacaaaacatgcaaaattatgaaattctatatgacatataacatgcattctgaattcaaataaatctccgtaaactgataattcataactaacatgcaagtttcatatttaaaccctatttatctgctaatttccaaattaaagtcaagcgatctttacaggaaacgaggtaagattcgtataatgatatgtatatgtgattacatgtttaacgtgcatgtttattaagcttgttagattacattgatagcagtatcaatatgcgtagagttttat

SEQ ID NO: 156151 - DNA, 505 bp, Cannabis sativa
cttcaagagtgtgtttatatggctcaaccggccggattcaaagatccaaatcatcccactcatgtttgcaaactccacaaagccatctatggcttaaaacaggccccccgagcttggtttgacaagctcaaacactcacttcaacaatggggattctataattcaaaggccgataattctctcttttttctacgaaagaatggcaaacttactctcctcttaatctatgttgatgatatcttattaacaggagaagatgttcagttcattaatcaacttatttctcaattacatcagcaatttgccttaaagaatctcggtccagtgaggtattttttgggttttgaagtcacaagaaatcagtctggcatctatctcactcaagctaaatatgcatctgacttacttgctcgcaccaacatggatgcagcagccccaacccctactcccatgtgtccaaacacaaagttaagtgccacccaaggcactccaatggacaacccaa

SEQ ID NO: 156152 - DNA, 788 bp, Cannabis sativa
tttattggcaagttgaatggttatcaccaatggaatgatgtgaggatatttcacgtttttctcatcttcctccatgaatgtaatgttaggttcctcagttttcacttttttggaatgttctggggcaaagaccgactgctcattctttatctctttcacatatattttttgggcgttattgctttcccctgcgatatgcagccctccagaaataaccaggatgtcctctccttccaccggaataggttgtaacccctagttgtttgggttatggggcatactgggctggttgtatccctagccctgtcttttcacggactgtttaaaatggcctcgagcgatgagactttctatctcgtccttcaattggcaacattcgtcggtcatatgcccaatatccttatggaattcacaatatttattgggatttcttttgctcctcgaattcctcataggctcgagtttgtcgaaggcaaccttttgctcatgtgcgaggtaaatattctctcgagtttcattaagctcggtataaatagtatagcatgtatttatcatgcttcttttgtttctttctatcctttgacggttccttaattctatcctttctcttccgaccagaagcccacgagttattgattctcgtggaagcagtaactgttgaagcattgctgggtttgcttcccgagcttattgttaataaattcatttcctttcgagcttcttccttctggacaaacacctgagccctttcattgaactcagtgatgcttctcaccggacgtccttgt

SEQ ID NO: 156153 - DNA, 613 bp, Cannabis sativa
atgggattccatatgccttctccgggagacatgtcccggatgctgcttcattacataaggacttagcaaatagtttggattataagttcctcgatccacgtgtacttgtctggttggtccacgtatattgggcaaaatcagggacaacagttgtcaaataatatattttaaaataatgctaaatcaattaatattaaacatattgtatccttctttttgtttgttatatttttattttcttaattatataaatactaattaatatgtaattaattagctataattaaactaggagaaaaaagtttttttccttttaaaatagaaataaatttataacatcatactactaataaattttatatttaataatataaataaaaactgagattctttttttaaaaaaatacaactaataaaattaatcaaataatacaactattttaaataacagctaacaattaagagattagcattattatttcaaaataagataatcatttttttcattcattcaatttgttacttatgaaattcttttaaatagattttttttttcactaaattcatttaaaaaaattaattgaaaaaataactatcactattattaaagcta

SEQ ID NO: 156154 - DNA, 548 bp, Cannabis sativa
  modified_base (43)..(67): a, c, t, g, unknown or other
  modified_base (389)..(400): a, c, t, g, unknown or other
  modified_base (485)..(496): a, c, t, g, unknown or other
ttatcgttttagaaagtccatatttagggtgttaaacaacatnnnnnnnnnnnnnnnnnnnnnnnnngtaaaataaattccaacacctacatgattcgaagagcagcatgtagattctggattttagtgtcatctccaagggttgtttgaacattggtagcaggcggaacggctgtgttatgaatgccctagtttgctactgaactagtattcccagtctcttgcacacaaggcacgatttcatccacaagagtcgtcacactgtgacccgcatttgatggttgtctgatatttacgattggcggaacccttgtgtttcatgggttctgtagtgcaggatccaccgcctatggattcgctggatcgacctgttggaaatattttaccannnnnnnnnnnnactaccatgtatgtttcattaaaagggttcaagaaaaccttacttttgggtgcaccagagtataatgactccttctgttcagatnnnnnnnnnnnnattcctttttgtagcagagcatcaccaagatctgaatttggatctctttctc

SEQ ID NO: 156155 - DNA, 940 bp, Cannabis sativa
  modified_base (323)..(328): a, c, t, g, unknown or other
  modified_base (497)..(497): a, c, t, g, unknown or other
  modified_base (693)..(693): a, c, t, g, unknown or other
aacttctaataaataaataatataattctataaaattgtattgtgcatttagtttttaataaataaattatttataataatatgaaataagataatatatttataattttactatatagtagaattatatttataagtaactattgttataatccaaataatcaaagatcttctatagatgatttacaccgagtagggacaaatttaccgttctccccctcaatgtgttttatccttaaaacacctagcttcctataaatgatatataagtaaactaatataattactaaaataagatatctttcatttatctctattaagcnnnnnncgaagaaaatcatcatttcacatctatgtctagatagaaactatagattctgtatctatgattagctctcccactcaattgtactatcgcattcccaagatgtaagtattagcccgaaccagttggtaagctttaatgaacaactttaagaacacaaataacactcttnagatcgaacctaatcatatcaggattaagatctttttatctaagatcgacttggtgatattgacttagaaagatataacattaagtttatgatatctttaccaaatttaatatcgatctagtctaatgaatactccatatatctgatactagtaaactttactaatgccccagagaggacataacacttatccaangtgtaagtaaactttatcattgattatcacatcagtgtaaatctagtgcactgatgaatcatgtggcatatgctttgaaacatataatcacaattatctttcactgtgttcacaacactataattgtggataattatatgttctggattgaataaaaattgtatattaaaccataatcatgaaaaacacgtgttaacttaaataacttcttatcttctattgatgacaaataagattatattgaaat

SEQ ID NO: 156156 - DNA, 570 bp, Cannabis sativa
ttacttctttgcagaaatcaagatttcccatgaatatgttgtagtaatcaattttttttcaaacttcatgtaatggtaagtcacgatacggtaaagattctttctatttgaaaattagaaatatgttgagatcaacattatgtacaataattcttgtgaaggtattagaataatataaaatcaaataagaactaaccaataatcgacatggaagataccaaaaggtggagcaactaccactctttctcatttcttcctccattaagaatagagaaatcatagtaataacctactaaaaaactaattattgttcattccatactattgactgagttatcacattttaagatgtatttatttttaccgataatttaacccaaaactctggtccaaggtatcgaaagtctgaacgttgcagataattatctccaaacactactatcagatcactatatatataaaaaaatcaaaagaaaaaaaattagataaggattcgattttttgaaaaaaaaaagaataaaaaaaaagaattaattataacctttgttttgagtccgaaaatatgtactc

SEQ ID NO: 156157 - DNA, 635 bp, Cannabis sativa
attaaacacatcccagccgaaatacacaataaataataaaatatttttgtcaaataattatgccaaaaatggaattaacatttgtcaatatatctgatggattcttacatccttggatcttctccagtattaacactttatctaccaatagagatctaatgaaatgataacgaagttcaatatgcttggttctggaatgaaatgttgaattctttgcgaagtggatcgcactatgactatcaatgtccaaaatattattctcatgcttgaatcctagctcagttaacaaaccttgaatccatatcatctctttgctggcttcagtcactgtgacatactcagcctctatagttgataaagctacaattttttgcaattgagacatccaactaacaactgtatttccaactgtgaatatataacctatggtacttttccagtgatcaactttgcctccaaagtctgcatctacaaagctttgtacttttaattcaccttttccaaagtacaaacacttacctctggtgcctcgtagatacctcaagatccacttcactgcttcccagtgaggttttcctagatttgacataaacctgctaacaactcccactgcatgtccaatatctggtcttgta

SEQ ID NO: 156158 - DNA, 500 bp, Cannabis sativa
attgtaattcacaattttgtatatacaatcaaatagatcaatttgcataaaaataataaaaaaaaaatagtagaagatgagagagcggttgggagagagacatgtatacacaatcaaatagattaatttgcacaaaaaaatagaatatgggagagcggttaagagagatagaaatatataggcttagaattttatttatgatagtttttatttatagaaaagagtagatattttagttttttaataaaattaaaaatttacatacataaaaataacatcatacgtgttattaattaaggataagatattttaggtttttaagaaaataaatatgcatacatttttttgtataaaaagaaaagccacgtttttttgtttaaaaaaaacttaaaaattattaattaatataattattaataaaaaataataaaaaaatataagaaaataaataaatatttataaacctaataaaaaactaaaaaaagagagaattaaggaga

SEQ ID NO: 156159 - DNA, 502 bp, Cannabis sativa
agtgcaggaatcactcaaaattccattacaacttcaattcaaccccaaactctaccaaactttccaaacctgttatttagaccataaagaacatatcccaagtagtaaaatcacctaacacgctcagattcaagattcaccatgtgagagcaaagtttgagctcttaagctcaaaccttgaacaaacctcacaaacagccaccaaaacatatcaatctaacttagataatctcaaattaacttcagaaacaaacttaaacaacagcaataactacagacttaaacttacaatttcatgcaaaaatcacaacttaaagctctttaaaccaaagaatgagaagctagaaaccttaccatgacttggatacacttaaagcttgctaaaacctccttgaattgatgaagaacaacctcaaaccctagctgttctagggagctcgagagaaagagaattggagagagaaaggtgggtttttcctttattttgatttttaatgtaaaa

SEQ ID NO: 156160 - DNA, 788 bp, Cannabis sativa
atgggtaagtgtttttcttagtaaatagtgttgttttttgttgtattgtatggatctaaacgttgttagctataatttgtgacttttgtgtccttgaaattgaggtagaaattgttccgaatagtctgtgtttttttgggttttttcattttttgcgattttatgcgacattgtatgatgttttgtgcgatgtcatgagaaatctgaggttagagatgacatgattaattttggcgacattgtacgattttttgtgcgattttgatgttaagcgatttgtgtgcgatatgtttgcagcattatgcaattttgttatgtatgttttattgtgcaacattatgcgatattgtttctttgttgtgcgattattgtgcgatatgatacttctttatattatttttgtattaggcgacattgtgcgacattcgtagtagcttgtgcgatttattgtgcgaaatagtatgctgattatttctgtttatttgtttgtatttctttgagacagattcaactgtatttgtgcatggactgtatgatggcgtttggactgtagagggtttcaaatgggtatttgattcttcaaaaagtaagacattgatgtttgacattgactctacactaaaaaaaggtgcgtgaagttttgcatgaggaattggaggtggacccatttgtgcacgaattgaagttagaaattctttacatgtacatgaaaggcactaagttttcgcctaaggttttagtgaaagatagtcaactacgagtgttcttgagcatgaaggcaaaaatga

SEQ ID NO: 156161 - DNA, 515 bp, Cannabis sativa
  modified_base (41)..(48): a, c, t, g, unknown or other
  modified_base (312)..(319): a, c, t, g, unknown or other
tgtattgacttaagatcaaggagaaaggttccttttcttannnnnnnnacaacagtatctctgaatatgtattcttagataatatctttagggtatactctctgaatattttgcccagtgaacatgcatcagtatttatagggctgtgaacttggagaggaagtgtttcccctctcgttacaatggatatatgcagaaagattacacgatacatacagtatacactaatcgtgggataaatgtggaatacaatgatcgtgggataaatgctgaataccctgatcgtgggattgtgggtatgccatatctctnnnnnnnnatccccaagttatagggatttcgttgatgactcaaaatgcgaaagctgaattcgctaagtgttggttgtcctgtgcggatttctgattgcttttctctgggcatgctagcgaggcatcctactcggactgtaccctccgagcagatactccaagtggcttccacgtccctgttaggttttgtgcccttaataaaac

SEQ ID NO: 156162 - DNA, 750 bp, Cannabis sativa
tcttgattttctttcattgtaataaaatctctaacaactcgtgtataagagccattagtccgtaggtgtaagggcccaatgaatacttgaagcggggacgttacattaatagtactactatatatataaatataaatataaatcattatgaatacaaatctattctcaccaactactaccaatccttttcatttgtaaaagttcaaattcaatcactagtaaactaacaatttaacactatagctagtatatatattcgaataccataatattatttatgtacgtagtgatcggttaaatttggtatttaattacactaactaactaattaactatatatatattataggctatgctttattataaagctttgtaaacatgtcacaatagcatgattccattgattataaagtttcatttttattttttgtttatttcataagaaaaaaaaaagattattataatggaatatgatcatgacccaatgttttgttaattaaattaaagctgccatttattatacagaactgtacacgtagagactatatgtgtagtgatttaattatctattaaaaattggagaaaaaaagcattgacaaagtactacccaatcaaatagtaacactatatatatacacgtattatttataacatatttggactttggatcttctgttttgtaaaaattactaattagactttctattttgttagatgacaaaataagctctatatttttcaaaatagtaa

SEQ ID NO: 156163 - DNA, 660 bp, Cannabis sativa
aatgactacactcaagactcataaggcaattatgtcctaaacaaaacatataataattggatatatgacaagaaactaagtcaagctttaccctccttagcctccacagaaaaacagtatacggctcgagttcatattcaactcgacgactatgaatatcttactgtaagaagtctctagggtcagtgacatagctggtcaatgcagatgctgctgctgtgtacggtgaagcaagatatatctcaccttccttgtgtcccattcggcctgggaagttcctatttgttgttgacacacaaacctgcaatgaccgaccacgctccagagttataaaatggacattatgtccttaactaaagacaaggttgtgcaaagtggactgttttaatggttaaaagagaaacaagaataacacttgagaaaataacttgccttaggttcgttcatgcatgcgtaagtgtcttttggaccgcccaaacaagcaccgcaactagggctagcgggtgtatcgcaaccagcctcttcaaatatctgggagcaagtcttccctatagatcttggcactggaagactatataagtccatccacacctgtagattaggatgtgttagacaaatttctctcctcttatggataactttaagcaaccaattatttta

SEQ ID NO: 156164 - DNA, 555 bp, Cannabis sativa
  modified_base (345)..(356): a, c, t, g, unknown or other
attaaaataaaataaaataaacttcaaaaattattctaatttctgttgatctaaaattaataaataaattaattttcaacaaaaataaaattttcctatttaattaaatctcttaagaaaaatatcaaatatttaagtgtcttgaattaaatcaacataaacattaattttctatttaataaaatatatctagaaaaatactataaagtctacttagaaaataactatttagatatttcataaactaattacttattttctaattaaaatataatatatgttagtctatttattttaattaaatcattaacgaaaaattataactaaatttaagttgatctaaannnnnnnnnnnnattattttcaacttaatctaattttcaatgttgaaaatttcaaaatatgtacatttaaaataaatgtattttgaaatttatatgaaaaaaaagattatcaaaataaaataaaatatactctaaaaattattctaatttaatttcatctaaaattaaaaattctaacttgaatataattttttatttaattaaatttatt

SEQ ID NO: 156165 - DNA, 570 bp, Cannabis sativa
caaaacataaggggccatcccgattgttcgagggtcctggtcacggtcttagtcttgttcgaggatcctggtctggtgattcttcttcaatatccaattatgggtcccaggtctgggtcagggtccgggtttgggtcctggtctgggttcgggtcctggcttgagtcccagatctggatccttatcacgtgtctcggtctggttctggttcaggtcctaagtcccagtccgagtttttgttcgggactgagggtggggtgcggttctaggtcatggccccagttctctgtcccgagtcttttccatgtttgggtctgagtttgggtctacgtttgggtaccgtgtccaagtctgggttgggattcgggtctgggtcccagtttaggtctaggtctgggttggagtacggctcctagtctcgttacggttccaagtctaggtctaggtcaagttaaagttctaggtctatgtccaagtcctggttctggtcccgttcccgagtccccgtctatttccggttttagttccattttcaggtcatagggtacgggttcgggtctaggtttgggt

SEQ ID NO: 156166 - DNA, 572 bp, Cannabis sativa
gccacaagtcaaaatcattctcgtttttatagtctacatcttttccaattttatcgtcaagaggacacaaaccagcaacgtaattaacaactccataaccagaactatctttaaaacttgaaatcgaagagtcaaactccataaaagagacgtcaaagctattggtttcttagatttcttcttctcaacaagaggagtttggtcaatgagaatatgatgatcttccacaacttgaatattagaatcaacaaaaaaacttgttgtacccatctaagtatgtatataaaaacaaataggggaaaaaaaatataaaatcagtcattataaaacaactgttgagctactaaacaaaaacggtaaaacaaccatacgtcaacaccaagaccatgaccttccttaaactcaaaattttcagaatccctggttaccagaatcaccaccaaaccccctgaagacatctatttttttttttcttaaaacaaataattagaaaaaaaatctaaacattcacaaccattaaacaaccagaaatcatcaacaaacagcattaccataatctcaactactttcac

SEQ ID NO: 156167 - DNA, 504 bp, Cannabis sativa
  modified_base (200)..(204): a, c, t, g, unknown or other
atgtaagtattgagaagatccatttagtcaactttaacgaacaagttaaagaacatgaataatacatttaagccagaacctaactatctcaagattaaaattattgatctatgattacctaagtgatatttacttaaaaaagatattatggtaaatttatgatatcttttctatgtgaatatcggtccagtccgatgtannnnnatacatccaatacaagcttactttaccaatgtcttagaatagacatacctctatctaagtgtaagtaaattaaattgttgattatcatatcagtataaatcatgtgtactgataaatcatgggaataatagtttaatcacataatcttaattactttccactgtgtagacaacacaagaatcatgaataacaatgtgataaggatttaaaataatttatatatcaaacaaataagtaataaccatgaaacaaacatgtgaaccaagcattatattaaacaagtaataaaataattttgtt

SEQ ID NO: 156168 - DNA, 568 bp, Cannabis sativa
aaaaatactctcagctaaataaaattacaaaaataccctttcggggttagcggatattacaacgtccctgttggacagggtgttacatctatagtgaagtaagttccgtgaaaaatatattgcggttggatggctagcaaatattaatatttagatttttttggttttgtatttatagttttgtttataaatattgaaaatttaggaataattaattttaagatgttatgctatcgaatttttggaagcataattttttcaatttgattattatttattttaaatatatattatgaattaaattttttataaaaaaatagttagatttttactaatattatatatgagtgcactcttaaggggtattgcccacgaatgggtaaaatcaaaaagatttaagtttttatgctcaatttttctatctaattaaaaaaaaaaaatctcatttttacatcatataggctgagcttgttccatcgataaaaaaaattatataaaaaaaaaattaacaaaagaaaaaaaagaaaaaaaaaatgagtttgacttaaatatgttttttttttttttt

SEQ ID NO: 156169 - DNA, 927 bp, Cannabis sativa
aaaaaaaaaaaaaaatcctttttattaaaaaatttaattttaaaaataattaaaaaacttaataaaaatattaaaccaattaacaaatattaaaaatattaaactttgattaatgcaattaacaaatattaaatttatttaaaaatttaaattattttgaaaaaaaaatatttcatactttattttatttataaacacatatcttaaaaaatcaaactaaaattattaaaaatccaataaataattttaaaaaaaactaagagcatgtttggtattgttttctgttttttgttttcaataaattgtttttagaaataagaacaaaaaatagtttttgaagtttttaaaaacaagttatgtttggttagtgtttttttaaaaacaatattgactaaaagtgagaatataaaacaatttgtgccaaacaagtcatgtttgctccttggaaaggtcgatgaccacctcggctggtgccttccctttggatggggttgtcttgccgcccctagacttcttagccggaggagataagcccgagcttcctcccactctcttctttagagcctcaagctttttccgagacatgtttgcacgaaatgaaagcaacatggttaaaaaaaagcatgaaaaatatgaaggcatgataataagaaggatgaaatcaagatggagtaccctgcactttggcaggggcatctgcccgaacaactactgatggggcatcgtcatctgacgagtcttcttgctcctctaggacggctttcccctttcctgctacagggtggatgcccgagcaggcagattgggctccctgatctgaatcgtatgttcaatggggcggtgtctcctgctcttcctcaacctcatcctcctgcttagaatgctcctgagcatactgcttggctcccgcacctcccttcaacttag

SEQ ID NO: 156170 - DNA, 739 bp, Cannabis sativa
  modified_base (589)..(600): a, c, t, g, unknown or other
tcgagggttggatgaacatatcgctcgggatgtgattgttgcttctaaacaaccgggggttgctcgaacttatgctcagatagttgaactggccctagcaactgagggtgcagaagctcagatacgaaagaaaaatattgctagaagagattcatggaagcgaacatcaggtgctggttctggtaggggtactgatcccggtgaccgtaagaaaagacctagtgaattatcagctacaggcccaaacaaaaggttcaagggtaaccaaggtttccatcctggtgggaacgaaaattggcggacttctcctgaatgtccgaggtgtaaaaggcgtcaccaggttgagtgtcaggccaggacctgtttccactgtggggtggtgggtcacatgaagagaaactgtccacagctgctacgactagagcaaaggaaggatgttacaaccgctccttctcgagtgttttcccttactcaggctaaggctgatgctggtccttccactgtgacaggtcagctttctgttgctagtaccttattgactggtttaattgattctggtgcaatgcattcttatatttcaagtagaatnnnnnnnnnnnngaatagacctagtgatgtgctttctagaggtttttgggacgagttggttatctccagcaggtgggtgagatcccttccagtatttgtggaaggaagggagtaattagttgatctcatagaattgaatctggaggatttt

SEQ ID NO: 156171 - DNA, 588 bp, Cannabis sativa
  modified_base (390)..(390): a, c, t, g, unknown or other
taaaaatttaaaagacatacatacaactacgagataaaagtagtgttgtaaataggaaatttgaatctatatgtatatatttggtgtatattaattttttgaacgcaagcgtactaaaattaaaaaaaaaaataggcataatttttattcatacccattatactattttttttctcttctaactcccccatccatactttctattcttatctatagtgatggtgctccgatgcaggggcggagccatgacctaattactatgggggccaactattaatttttatttgaaaaaatttatagtacacctctagctaaaaaattcgttttgacatctaagaaagttttttagtctattttttttcatgatcgcgtactttgtagttttctcgnattacttgtaattttttaaaaaattctgaataatttatagtgccaaaaaataaaattcaaacaattatttaccaaacaaattaaaaaaaaaataatcatgcgtgcaacaaatttttttaaccttatttttagcactgtaaacaattcaaattgttgtaagaatttatagatgactctaaataaatacaacctacgtaa

SEQ ID NO: 156172 - DNA, 566 bp, Cannabis sativa
  modified_base (501)..(527): a, c, t, g, unknown or other
gcctagagtactctcctatcccattctcattttcattaagaattttaatttttattcccatttattttccatcgagaatgggtggagcgggatagagctagaaatcctctaataataaaataaaatttataataaaaatttaaatataactacataaaaattaaaatattacatattaattattattcaataaactaattattatctaaaacacaacttaaaattcattatactaatactaatatactagtaaaatataaacataaattataaattattattagaaacataaaataaaatatcaaacgggttcccgtcgggacaggaagtgtcgtctccgcccccgccccatttaacattcctatgagaaaaatttgtatccccaataaaaatatatcccttgctattttttgatatgtaaaaaattataattttgttgtttttttaatgatgatttatattttaattagtgaagatattttgtaaatttttaagaaattnnnnnnnnnnnnnnnnnnnnnnnnnnntttttttttcttcttattattatttttttttgaaatcaa

SEQ ID NO: 156173 - DNA, 548 bp, Cannabis sativa
  modified_base (45)..(46): a, c, t, g, unknown or other
  modified_base (164)..(169): a, c, t, g, unknown or other
  modified_base (209)..(212): a, c, t, g, unknown or other
  modified_base (305)..(315): a, c, t, g, unknown or other
  modified_base (361)..(377): a, c, t, g, unknown or other
  modified_base (522)..(522): a, c, t, g, unknown or other
attcccgacattctatcccgaaaatcctcgatcttagaaatctcnnacttgtatatgtttactttaggcaaagtagacttagagttatattagcagtggtggtccgagctagaataaaactcattatttatttggtataaatttaagtttttgactttaaattnnnnnntccaaatagaaattttatatttctgtttcctagaatacannnnacactacagtatgactttcacaagtttttaatatccattttctataagtggattcaaactttatgtttatgtatggaatttgagtttagtatnnnnnnnnnnngatccacttggactattctatgaactctttattgtaactagacctnnnnnnnnnnnnnnnnncaaccacattcttatatatctatgtcatttgaatcttgttcataatggttttgacaagatcactctttccaaagagttaaacatgcctatatccacttgaaagtaagatcatctataattatatatggatgtacattcaggggtngatatgagttttcgttatattcttta

SEQ ID NO: 156174 - DNA, 583 bp, Cannabis sativa
agagaggttggcacaaaggtcttctggtgcaggtttgggtcttgggttggttggattctttgatagaaaccacgccaacattcctccttgattcacccaaaaccacgccaactttctcctttgattccttgtcagccttaggaggacctctaggatcgctcgcaagttctatatccaaatctgtaaaaaaacaagggatcagtggagcaaaaaacaaagactccagttcagactgccatttacaagggctaatacttactctcgacaatcacttttgaggatcgcccataacaatcaatggggttccctcggtttggattgatcggaagctcctcagccttggaatcttttgtttccaattcaaattgagattcgaagttcctgggaacgtatagaaaagagaggtagttggaaaattttggtgttataaatctagaggaacaaatttctgaactcagacgaggcatcttgatgagagaataacaatctaatatcaaaatggatctcaccaaaaaaccagaagtgtgtggaatatggcaagcttaagccaccattttatacacgaagtccagtgacaagaagg

SEQ ID NO: 156175 - DNA, 559 bp, Cannabis sativa
  modified_base (421)..(429): a, c, t, g, unknown or other
agttcgattctattctagttctagttccatttgccatttgccattctgattctgagtttttgagtttgggtttgagttcaggtcggagttcgagtcttggtctgagttcgggttaccgtccggattacagtcttggtccagatcaggctccgagtgtgggttcccgtcctgggtctggtctaggttgcgatcgagtcccaagttcgaatcccgatctaagtctggattcagttcttagtctaagtccttggtcctgatcctggtctaggttcgagtttgggtttgggttcgagtctagctttgggtctgattctagttgtgggtttgagtttgggtccgagactgtgcccgggtttgttttcaggtgtggacccctatttgggtctaggttaaggtccaggtccaagttggggtcccgagnnnnnnnnnaagtgggtctgggtcaggatcccggtcaaaatctaggtcgagcattttgatccatgcctgggacttggtccaagtccaagttcctatccggatccctatctaggttcaagtctcagttccggtctgggta

SEQ ID NO: 156176 - DNA, 537 bp, Cannabis sativa
tcatcctgcaagacccaacattccagagtagtgtgaccaatatctttatggtacttacagaattttttggggtctctcttgtcgcgatttcccctaatcgggggaggcctcttgaacaccccgttctttttctcgatggcgtagatatggtctcgtggtactgcgagctcagtataattcacgaaatgcggtctgccttttcttttcagcgaggactccttctttggaggggacttggccaattttgggcttcgctgtctacgtggacaacatcttcttgggcttcgacctctggaatttttccctcggggactgcgggatcgtgaccgcaacacttgtgacttacgcttgtctttgcttttctccaattctgccagagaattctcaattctcttatgcggtttggccatggcaaagaactcgactaacgattcaggtctccgagcctgtaactccctccaaaaatcgattcttggcaggacacttgttattaacatgcaaacaaacgaagactcgggagccttctcaacttttgtt

SEQ ID NO: 156177 - DNA, 510 bp, Cannabis sativa
tgttaccaacacaagtaccaagggcacgtagtgcatgtggtacaacactcagtaactcccataagtcaataatggccctaccaacactagtacggagtcagtacttcagtgcatgtggtacatcggtcgtacttctgttaagaacgttcttaaccatttagtgagtcttgcatatgggctcaggacggcttaagtacaaagtcagtattgcattgtctatatgtattttatgcatatcttacggagtctgtcgactcatcaattttctaccttgtgtaggtaagggaaatgctaaggtggaggagcagtgagttggaggctcagcaaggattgtacatatagcggcagtgcaacctggagggttttagtctcactgtattttgagttgccttttgttgtcgctaggagacttataaaaaaataatactatgtaaatttatgtatatattattgggattttatgctctaaataaaatctatttcaatataatttgatttgttatcaataga

SEQ ID NO: 156178 - DNA, 689 bp, Cannabis sativa
  modified_base (51)..(61): a, c, t, g, unknown or other
  modified_base (362)..(366): a, c, t, g, unknown or other
agaaaagcatataacatatcatataataccgacttgtatctaggcgcccannnnnnnnnnnacaaggcttaacaaatgagtaagaacgttttaagtaggatacgaccatgtaccatgtaccacatgcactcagtataccatcgtactagtgtaggtaaggtatgaaccgcaccttgagtattgttaagtgttgtaccgtagacaccttgtaccttcccgtacaagtgctggtaaaaccacgatgtactttcagacatcatacacttcaccaatgcactctgtaccgcaaccatacaagtgttggcagtgtatgaattacaacatataagcatgcatatacactaaacatatacatacattcnnnnntccatatcacacattatatacagttcttaccttctttacagattcaagtgtgctggccgacctgaacggaaagtcttgtgcaaaatggatgtcctaatcgcataatgaaaccaggtaaatcacatgatcgaaaaccctaatccatgaaacccgaacccaccactctaggttatgttatacattctatggattacactaactcaagaaatagagaaacatccaactacggcactggaatgcatgagaattgagaaaatggaacattcgagaaaccctgcaaaaatcggctaaccggttttacaggtactggtaaaaccggctag

SEQ ID NO: 156179 - DNA, 604 bp, Cannabis sativa
aaaaaattaaaaaattaaatttttttttctttttcttcttccttcttcttcttctttcttctttcttcttctttttctgcagaaaccctcccaccactagagacccaaaaccccccgaatcatcatggatacagaaatgttagggttacacaaaaccgatttcagagaagagaacagtttcgatttcagtatcaaatcttgtaactcgcgattgaacccttgagagactcggtcctcgagctgagtcaagagcttcactaactcgtcctcgttatgctgagacggttctcgtagacatcggcttagacactcggcgctctctctgtcaatccaggactggatttctaacttaattgcggcggcgactcgcgataaggagtgagtcgtgagtcggcgagttagaaacgaggcgagtccgtggcgggcacagcacaacgggagagattggggagaggaggaggtcagggttttgggtttcggggcttggggggtttgggtttcggaattttgggtctccggtggtgagacggtgcttcggctccggtggtgagacgagagagagaaagagggctgggaggggttttgcagaaaaagaagaagaaag

SEQ ID NO: 156180 - DNA, 1137 bp, Cannabis sativa
  modified_base (376)..(380): a, c, t, g, unknown or other
attggagccataaaaggtattagacttagcaagggaggttcgatcttttctcatatcttttttacagatgatcttatccttgtaggagaagccaatttaacggaagctaaaggtttgtggcattatttggagaatttttgcacctagttaggacaaaaagtcaacaagctcaaactttcatttttttcagcaagaatactttggaagtgatgaaaagagggataagagatttccttggtattaatgagccggatgaaaatattaaatatttggggcttctgttaggatttatgccctgaaaagcctgtaaagaaatttttgattattaataaagagttgaacattttgatatatgcatgaatgttaaattattaannnnnattattgaataatttatattaaatatcaaaaaattctttattaatatatgacgttgtggcttgtagttgtacagaaaactaaaaccacttagctatgaataaaaaaatcagcaatatattaaagtatggaatctttaattaatggttgctagtatggttcactaatgcctattcttcgatgcaagtaatcttgattcggattacagatgtagtatgacatcaaagcaaagacattatatataatagagattatatatgacaataaccgatatgaataaaagtatttttattaacatgttgtttactataaagatctaattcatatcataacggtgatcaatagtagatcggcttaaatcttgagtaatcatgaactcatgtccatgttattagtttttttgattcactcgttaaattttctcagagaagatgattcttacaacttttattttggaaatctaataatgcgaatggctgggaacatgatctaaaattatagaatcataactttcttaacggatctaatgctggtttcctttaagtgttaattctagaactagaatgttgtgcacaaatttagatgggatctaattatacttccactagtgaattaatggtattaaaggataatgaagcaattagaaggatcaaatagtattttgacgaaaactaattacgaaccaacacatggagggctaatcactagaattgattatatcaataaacactctggagtaaaactcagtaaatataattc

SEQ ID NO: 156181 - DNA, 705 bp, Cannabis sativa
agagtttcaacctaatacaccatgcacttgtggtgcaatgaaagtatttcttgactatcacaatcaaagtcaagttctccaattcttgactggtttgaacgaatctatccgttcgtgctcaaatccttcttaatgagcctatcccaaacttgtctagagtcttctatatgattgttcaagaagagcgtcaaaggacccttggcaactcggatattccatcccttgcttcgttggttcacccttcttcatccaccaatcctccaagaaccaagaaaccaagactatcatgcttcaactgtggaaaaccaggtcacttagttgacaagtgcttcttcattcatcgctttcctcttggttatggggataagaaaaaaatgacaaaggcaaaacctctgatcatcaagcttctgccaatcttacttctatgaaaacctcagctactcaaattcaagttgatctgtcaactcaatgtcagcaactgatttcacttcttagccaacaactcaatcagaatgcaccccccacagaccctcacatccctgctgctgcttctaatatgtctggtaacacttatactactctctctaaatcttagattattgatagtggtgctactcaccacatgtgctccaatataggtcattttacttctttctttaaaattccatttcctagacatgttactttacctaataatactaatat

SEQ ID NO: 156182 - DNA, 614 bp, Cannabis sativa
  modified_base (43)..(51): a, c, t, g, unknown or other
  modified_base (346)..(349): a, c, t, g, unknown or other
  modified_base (382)..(396): a, c, t, g, unknown or other
agttcaactttcacaagtgtttaatatccattttctgtcaatnnnnnnnnnctgtatgttaaagtatggaatatgagtttagaattttgtgaccaagatccacttaaactattctcagaactctttaatgtaactagacctaagtcattgaaagaccacaaccacatattttataaatctatgacattggtatcttgttcatagtggttttgacaagatcattgtctgcaaagagtaaatatgcttatatccacttgaaagtaaaatcatctaatatcacatatggatgtactttcaagggtggatatgagttttcgttatatttttaagacgatcactctagatnnnnccttatgcaaagaaatttgaaatacttgaaaannnnnnnnnnnnnnnagcaatgttgaaaaacattaaggtaattggttaacgatcttgggaactgatagaggtggagaaatatttggtagatatgcagttcaaatatcattaagttgattttttgaattatatccaaacttaccactcccgaaattcgatttccattttgatgatagtataaggtctatgattagttactaccaattgcctaagtccttctagggatataccat

SEQ ID NO: 156183 - DNA, 517 bp, Cannabis sativa
agattttacattgtactcctgtcatggttacacctgagcacaatgacatgttagttgaactggttgttgatgatgaagtcagacgagctctctttcacatgcacccagataaatctctggggccggatggtatgacaccgggcttctatcaaaaatattggactacggttggtagtgatgttaccaagtttgtgaaggacttctttcttgaaggatctttccctagcaaggtaaatcatactaatattgttcttattccgaaaaagaagcaacctgtggtgatgactgatgttcggtcaatctccttgtgtaatgttctgtataaaattatttctaaggtgcttgcgaacagattaaaaagtgttctgcctttggtgatttctgacacgcagagtacatttcttcttggtcgtttgatatctcataatgttatggtctcatttgaaattatgcattatctcaaacgaaaaagaaggggaaaagatgggtacatggctattaaacttgacatgagtaa

SEQ ID NO: 156184 - DNA, 507 bp, Cannabis sativa
taacttttacaaaacataaggtctaaaatgctatttaccctattatatatgataattatagaaaaaatagtaataaatatttttttagtataataatatttagtgttgtgattagaatgagaataaattttaacactaaacttggcattgatgtgacaccaatttttttgaataaaagcgtaatatcataacggtaaggagaaaatcagaatagagtcgtacaactggtgggtaaaagcccacttagccacattataggcaacaaaattagaggagctactaacattagtaaaattacaactaataaaagagggagaagacttagtacaaaaagagacatagttctcaagagtccaatgggaatccttcccattgagagcattgataactagcctcgagtcactctccacaattacaaattcagatcctatttccaacgccaccgagacaacaaaacagcaagccgcaacctctccacagagtgcatctgagaaatccaaccgagca

SEQ ID NO: 156185 - DNA, 642 bp, Cannabis sativa
  modified_base (588)..(600): a, c, t, g, unknown or other
aatgaagcgattgttgtagacatggtctttatgattttgtttgcttcctttgagaccacttcatcagtaattacattagcaattaagttggtttctgatcaccctcaagtgctagcacaacttacggtatttatgtgagctttttttttttggtagttattaagttcttgagttttgaaaacatgatcactttccgactaatcatgaaagattttggctctaatctcctcacacttgtaatttgtgatgttcttattttatatttcttttttgtaagagctgaaatattagattttgagctacagtttgctgtgaggggcgagatcagaagctaaattaatccttttcaggtaggtaattggttaggatgaatccaaacaaaacatgaaacaagtttcaacaaaacgaaacagagaactaacatagaaaatgtagtgtgctttgtttaagagtatgcactccaacaaattccacctctttatcttagcctctcatgtactagaactagaagttgtccttatattattaggtggcgtttggttttgaagaatgaaaatataagaataggaatagaatggaataaaattnnnnnnnnnnnnnaaaattgataaaaaaaattattaatttttttcaaatcttgca

SEQ ID NO: 156186 - DNA, 668 bp, Cannabis sativa
  modified_base (139)..(150): a, c, t, g, unknown or other
  modified_base (299)..(300): a, c, t, g, unknown or other
aaaaattttgttatatagccatattttatataaaatagatataaggcaagactatggtaggacttagcataagttttcaggtaaataccattttgaactatgtgttttgaaaaaattattaattggaccctctgttttnnnnnnnnnnnnaatagaccctgtattttccaaaatagtacaaataggtaaactgatttttttgtcaaaataaaatttaataataatctgatctaaatgtattatgacaaaactatttacattttctgtatgtatccgtgttaggaattgtcttcaagttnnttatattaaaaaaaaagttgttaaaaattaagctcatgatcctatttttaccattttagaaaatacagggtctagtttgttatttaacaaaacagagggtccaatctgtaacttttgcacaacacaacacatgggtccaaaatggtttttaccctaagttttctaccgatagaaaaatattttttaccattgattttaaatcatgtagtcattaagatataaaaggacgacttgtatacaattaaaactttatacatattataataatatttaattatatattttgatacacttcttaatgggcattacccatgaatggttactaaacaaatttaactataatattaattttaaaaatatcaaaccat

SEQ ID NO: 156187 - DNA, 798 bp, Cannabis sativa
cctgaagttattggaaatgataagtgtgcaagatactttttatctacacttgcgaagaatcgagatgaatttattcctttgtttgtgactttgttaaagaagaatgtatgcgtcgatcctagtcccacaccaacttttgttaaggaaaaccgtagcgaggttgggagttttgttccagaaataaatccagaggtgttggttgccaatgtattacttgaattaaacactatgatgtcgagtgctgatattgtagcacaaatgcccttcattgatggtttttttgatggtccagactgttatgttgagggcaatgatggcataagagacgaccaaggtacagaggtccctgctgctgtagctttgaacttgactccactatcgtaccaaataccactgaggccaccgacacagaaaagagtgccccgtagaaaaaattgccaaacacctgctactcgtagtagtcgtccaggcaaaaccagtaatgctagaggaaccactgacagtacatgtcctaataatgatagagagaccaatgatattagtggtcctactgatgctcgaggaaccaatgtgaccggatttagcaatccgttttcttcttcgacaagttacggtaaattcaaggagaaaaatgtatacaagagaagacatcaaagatcatagtcattatatatctataggtggcagagcaggtgcggagttacatgtaggaaagtttttttagagacaaagagcatttaaagatggttgttggcttgtatgcagtgaagaaagggtttgactactacgttaggaagt

SEQ ID NO: 156188 - DNA, 536 bp, Cannabis sativa
  modified_base (506)..(510): a, c, t, g, unknown or other
gacctttaattacttcaacctttgcctatataccataatggaagtgggacaagattacaatgaactttgttaatggattgccattgacactagggatgtacattggtcagtttagtcggtttatactacatattttctaacccaatgtaaagatcgggttgtaaaattctacatgcaacctgcccaattaaaaaaaaatcttaacccgaccgacgatttggacggtttggtcaggttaacccgcccaaaccgaattaagaggggttttttctcagtttcaactgttcaataggcacacacacaccatagaagtatatacatatcacatcatacatgtttatgttaaagtttatatatgtattaatgtcaatttaagaaatttccacagaagaaaactgggcaaaaaagttaacatgagcttgaatcaaaattctgttggaaatattttaccaagatctagatttactaccatatatgtttcattaatatcctaatatgaattctannnnnatgaaataaacacataagggttcaag

SEQ ID NO: 156189 - DNA, 562 bp, Cannabis sativa
cagaaagaacgtcttaaaattgttgagtaaactggtagcaaaataaaagaggaacgatattaccgaatgaagaattctgggttgagtcgcgaactaagtgactctctttaagatgttcgcagcactgcccaagagtgtgcaagcagtcggaaattgctggtcgtccccaggataaaacagcccagtcgttgcactgtattggaaccccactgcactgtagagcaccgtcgaatacacccaaaaaatttgttatcgcagatggaatttttaattttatgaaaactgtatttttctcatacgaaagagatgtgttcttcccatcagctcaatcgcattatataggcgaatggattgaataaacatgacgggaagaataacgttttttgaagtgggtgagttggtttttgaacgtgtcccgtaactgatacgactaagtaatcagttttattaaagacgtttcttatttaaattaacaaataaaaaataattattttattaaataatttttctgtaaaaaataatatacaacggacggcgcgcgcgcgcgtgtgtggtgggtcaa

SEQ ID NO: 156190 - DNA, 560 bp, Cannabis sativa
tactattaattctcattaaaaatatacaaaaaataaataattttatttatattattttaatatcttacgaatataaaaaaaattcattaatgaatagtattaatgagtagtaaagagttaattaaaaaatatagtatttattgtgggaaaaaatttggcccatgatatcttttgtgctaaattcggcacaatttttagctttgatcaaattattatttcattacatcgtcattgaagttaagttttagcaaaatgttctaaaaacggaaaattcactacatttatagctcacctttagagatgctctaaattattttttatttattaccacttattaatgtaattaataattttttacattttatttatatatttaatagaatttttatatacttttaataaaaatttaatacttttattgactttattacacattttaatcaaaaaatggattaattttatcataaatgtattggagcactattataaaatttaggccaaatataatattgaaattagattaatctttaggttatttccctttcacatttagcaattca

SEQ ID NO: 156191 - DNA, 624 bp, Cannabis sativa
catgaccaactaattcacaaacgatcatgattgtatcttgacatgttatgtggcacaaaagtattttgcttacctcgagttttgattcagatgtattggttgacctgaatggagaaagatcaacaatcttgcaccttatgtcacaacaacataaagaacgattaatcacttgccctaactctatctaggtccttaattcatcaccgtaagttcccttatcgatcactagagtatcaataccctaaatatcgagaaaacattaaaaatgggggttctaaataatactaaaaatggtaagctgtttagaaaatggcaagccatttttggggtttcttagcagggaaaatagtagaccgtaattccaaacaatctgccattttctataggaaacggaaaacctagagtttcaacttctaactagttataaaagctatagattctatatctataattaacactcccactcaactgcactaccatgttcctaagatgtaagtattgggctgatacaaatgttcaactctaacgaacaagtcaaagaacacatgtaatacatttaagtcaaaacctaatcattttaggattaagatctataattaacgctcccactcaactgcattaccg

SEQ ID NO: 156192 - DNA, 703 bp, Cannabis sativa
attggagatgacaccgaaatccaaaacctccgtgctgctcttggagttatgcaaggtcataccaacaccctgcatcatgatgaggaggaactccgtgctgaggtaaatcttgcatttaaagaacagaggcgcatgttcgttgagtggagggacaaagagatggaaacgttgagggctccgtaggcatccattgcctactagaccaaacaagccaccgtgttaatacgaaaagcctatcaggctaccggacaacaacctgtaaccgtcatccccctaggcgagacagacgaagatccagcgatgaacacctctcagactataaatggtcagccgtccaatccccggtcacaggttccacctgtgggccaagtggtaggcggacaaaccttgtctagcaattcatcaggagaagtcatacctaataattccaaccaagttaatggtatcgaccagctaattggccaaaccaaccagtcactgagacagccaggtgtttctatatttaatcgattaggaacggttcatgatcttagagatgatctgaacagaaagagagggttggacgaccagcacgacgcaccagtcgttcagtttggaacccgcgctcaaagtcccgctcaaagatatgctgacgcgactctggtcaggaaagaggccaaacaagttagtccagccgtggaggcacagttggatgaactaaaaa

SEQ ID NO: 156193 - DNA, 609 bp, Cannabis sativa
cagttcatattatattattaaatttatgaaaggaaaaaaacttctaaaaagtaaaacaaatacacaatttttaagaatataaaaaagaaaattgaaaaaaaaaacttaattttaattagttatgatgtcattttgtcgattgttttcattattaatttttataattcaaatagcaaaatatgctttcactcttggcaaaaaaagataaaaaataaatatatactatccaaaaattaaattaaaattttaaaatatatttacataaacttttataaattaatttaatttaatttttattaatatttattgcttttattatgttgaactgttgatataatatcttagtgaaaaagtatatattttatgtttacccaaattttgacgacgatgacgtgtcaagaatagcaccgcgtggcacaaaaataccaggactaaattaatgaagaaggtgtaaagtcgtgactattgagatgcccccacaacttgggtttagaggggggaccccccctccccaccaaacttgggtttaagggggggagcccccccctctctcaagttgggtcttgagggggtcacctaactatgatggtggtcatcccccctcaacga

SEQ ID NO: 156194 - DNA, 543 bp, Cannabis sativa
caatccagtccaatcctgcgtaccaaacgggcccttaaattaatgttgactaatttcgaaggtatcttcgctaatttttgagagattaatagctattaatataaatcgtacatcatataaactaaaattttaactaaaatttaaaattatatacatatattccacttgattttaaatttaattgattggtaatgttagattttgagagaacaatactatatcaaatgtcattatttcaacatatttatttagcaataataaaaaatattttttgtttttttaacccatttttgcataaattattttactaaaaattgttgaactttaattcaattgtacacaaaaatgtaaatatatttgtaaaagtaatttagtaattttattcaaaagaaaatactaacgaaaagaattattttttgttagcataattatttatatgctgtgaaatttaaattatattagaggaaaaaaaatgaatacaatgtgttgtccctgattttgcccaatatacgtggaccaaccaaataaggacacgtggatcaa

SEQ ID NO: 156195 - DNA, 518 bp, Cannabis sativa
ttttagaatgtcggtttggtggattagtaaaattaccataatgcccctaagttattttaaaatttaagtttcttggagggtaatttagtctttctttagaataggtattttatgttttaattgtttatgggctaacttttaaaaaaaaagaccaggagctatacaattccacatcatctgggggaaggtcgtatgtgatgattctgagactatataggtatgagactacatagttgcagaggacttgaacggattgattgggactacctatattaacaaggtgcatcttgttttttggtagcccatcacaaaagaactccacggttaagtgtccttgacctggggtgatttcattttaggaagttttctcaagaagcgtgcgagtcagaacaaagcatgttgggaacactcgagttagcctgaagggtcaatcgtcaatctaggaagcggccagagtggcatacctgtgtataagagtcattagtccgtggggaaaggcccaatagaggctcaaagtg

SEQ ID NO: 156196 - DNA, 506 bp, Cannabis sativa
atttgcctatttattgtttgatatcctggccaaacactcagctcgtgtgttgtcttatgtagatgaaccctggtgagttttggggaggtgaacaccgaattaaccaggatttgctccaacttctatacgaggatcaacctcgtgttcgtgctactccgtcctatgtaagtgacgaactttctaactcaagctttgaagattgggaggtgagtagtgatcgttctcctattccagaacccgtgtgaaccaccactattactccgagcagatcgcaagagaaggatatggtcgcttcatttgggaattgaagaaaggttggaggcattatcttccgtccaactggacatacattgtccgaccaggtgttgctgatacccatcttgttcgtcgtccaaattctggtaactttggcatcccaattgctgtccctgccgtcactgttgcacgacatacacatcattatccgtccaggaggaggatgatggcccgcacaaaacagacgatgc

SEQ ID NO: 156197 - DNA, 841 bp, Cannabis sativa
aatattactcattcatgggtaatacccattaagagtgcacacatatatatatatgggtgtactattaatagtattaatcatgaataggtattattaggaaaatttgaatttttatacttaatttttctatctaattagaaaaatatcttatttttacattatatggctagggttgttgcatcggctaaaaaatgttagaatttgggataaggtgaataggatttcatctcaaaatcaattggcaatgggtggagtagctcattcatcttatatattctattatattttcacacgatatgaatgtgagactctctaacatcctccctcaagatggtagctattttatttgctcaccatcttggataactcgatcataaacaatttttttttctcactatccctgatcagaagtcttccggtagatatcaagttaatgcgaatgtttggaacatgcctaacatctttgagaattaatttgctaccaacactagttttcaagcaaatatctctaatacccacaatcttcgatgcattattgttttccattctgacattttcaaaatcaccagtagtgtaagaagtgaagaaaacactacgagcaataacatggaatgaaatgccaaaataaatcacccaactacaatcttgggttgcaagactaacacaccaatcatcatatacaatgaaaacatcacctttagtggaaactgtattagtctctttctcatttttctttccttgattctgctctctttttaatattctacaattccttattaagtaacctgacttgttacaatgataacacttgatatcttttcaagacttggatcttcttcta

SEQ ID NO: 156198 - DNA, 629 bp, Cannabis sativa
tcaaatccaaaacaaggtatgatatgaaatttttttaaataataaatctacgtgatatacagttgcattctggttgattcctggtttacaataggcaattctattttttaaacacaataacaagatctaattctaatcaaggaacgacatgttacgtataagtctgtttttatttattggcgttgccttatagttgcctatcgatttatatagtttaaaaattatggaggaatttcagttgatgggtaccaacaaatagcagatgtacaaggtacgatttatgtaaatagttgcaaattagttttataatagttggaacttgatctgattcaaataaaactgatgaaaaagcacaatgatcactactatgttaatttgagttaagtatcatggttttcaagttgatttacagttgcatcatcatttcataatagtttaattcatttatttgcaggaatttattttggacataagaaaaagagaaaacacttggacaaatggttagtttttgaaataaatttaagggtatgaccattaagtgatttttgcctaatattttagtcttttttaatctatataattcagccctaagccctagttgaaacactataaaatgaacatgatgctct

SEQ ID NO: 156199 - DNA, 577 bp, Cannabis sativa
tttattcaaactcaacatccttggaaacctgagaataattaagcgatatattagcaacgagcataaaaggactaagacatgtagctgagtatggtcatctcaaaagcattgagttgaggacctaggcagggtttgttttgaatctggagaacagaaccagtggctctcagaattgttcaaaatataatacaagatttcagtgacgaacatatataaaagttttaattttaatatccaataaattcgatctgaaatgaaattaagatagagttttcaaattaaatgaacattgataatagagttttaaaccgtaataagagcatgtttcagatgttcttttcaagtttcacgtcaagtgaaatagatttaatataaatattaaacaatagattcaacttccaatgaaaacgattgaaaatacaatctatagaaaaagtaaagaaaacagaaagagtaatacgagtttctgcatacctttttcagatcatcttaaattttgatccttatcaatgaaatcgataccttagtcaatatgctcactgttaggttatttttagtattaattttagattaagtt

SEQ ID NO: 156200 - DNA, 557 bp, Cannabis sativa
agagacatgctcaaccattatgtgggccggtcgatcccagaggtgaacgaacaactgactggtgcggacaatgacttatccttggagttggtcttaggaggagtcatgaaggagctttcgtgggtaagtcctttctcatttcctttcattcttctttaactagttcagattttaatgtctttttccatacagactggtttgaagatggcctacgcctattcttgagctaagtcggctgttgtcaagaatcttgccacttccaacacattgtaaatggatgcggacttggacaaaaaggaggctgaagatgcgcggactcaacttgagaatgtgcgggcaaaactaggagaagtcaacaagaaacttctagctgctgagactaaagttgtcgagctaaccagggacttgcaggagatgtcgtcaaccgagcagctcgaggcaaacaatgcttctttgtctcgggatattgctagtcttaggacgaaagagagggtctttgaactcttcttcgtaggttggaggatgagaagaaggctaaggaggaggaacttgaggct

SEQ ID NO: 156201 - DNA, 550 bp, Cannabis sativa
caataagcatgcccttcctctccgggagctaggcatataataaagcatctctgggaggaggaggatatactcaaacaattacctcgcatttaatgcagtatggggaaaacgtcttgaaacacccataaaaggacatgtcagacaacgtaagcctcgtttacggtaattacacagtaatcaaaggggctagtaaccccattatgaagaattacatcaatcaaggaaagataaagactaatctcacctaatccctatggtaccaatgataggttatgcatgccctattttatatctcttgggaacttgtgctcatacattactagcactcaaagacaagctatcccttttgaactatccctaccaatctctataaatactcttgaaaaaaatgggaaaggggatcgataaaaggagagagaaaaactcaccaataacattttttgtataagaactttcattaataacaaagactcgtggactacggcttattaatgtccgaaccacgtaaaaatcacctacattaattatcccaaagctctcattattatct

SEQ ID NO: 156202 - DNA, 536 bp, Cannabis sativa
  modified_base (314)..(314): a, c, t, g, unknown or other
gatagttggatatagggtttatttaatcttaaattaatttaatttatttaataatttcgaaaaataaataaataataattttttttcggaacataaataataaataaagtaattaaaaaaaattaaacctataattttgaaaaattaggtttcaactaacctaagaatctttttcaaaaaaaaaattctaactacttttcaaatttcatgttattttaaaaaaattaaatattcaataaaataaaatgataatttagtatcatttttctaattttataatttaatttaaataaataaataacaaaatttaaaanttagcataatatcctatttctatttaaaatatcatgattaaactaattttattttaaatttaaacaaggtcaatttattaaaaaaattagaataatataaaactattattatctgaccttaatttaaaaataagataaaataatcaaattttaaaaataaaataattaattaagccaaaaattagatttttacctatgttcaagcttcaaattttactaata

SEQ ID NO: 156203 - DNA, 669 bp, Cannabis sativa
ccgtgagccaagcccatcaagacaatataaaatataaataacatgttcatcacactatataaacagtaatgccactctcatattcctgtatgacacagaccttcatgttacgctcacatgcctatttatgtctacgtagcgtaaacctacgtgttgcgctcacatgtctaaatacaataaggccttagaattgttcatctcggttctagtaaccgagtccaacctagttatgccttgaacacataaccaacatattcatatattcaacatggcatagcattcacacaacatatataactagggtaataaccctaggctattaaaccgctcatgttagggtaataaccctaatcctgattactatttactcacatatataatttccaatataagtgccactacgcataactctacatgctaactactatcttacctgatgtcctgcaataacagagattccaaatccccgggtgccctgaccaggtgccggtaatcctatttacgaattctgggattttcacaaatagggttaaccccttattccatattcataaaatatattcattgttgggttttgtgccctaaataaaacccattaaaatctgattagttatcaatttaagagatttgaagtgatttatgtttgcatgtatttttcatgcttatggt

SEQ ID NO: 156204 - DNA, 515 bp, Cannabis sativa
atattagatttatgtcgcttacaaatttaaaactttgggtacttatgccgctatttacccttttataaatacccaaaaagaggtgttcatccaatctaattcgtactattttatttatagtgcatctgatctgcactaagtgcggattttatattagaattattttataaatacacaaaaacaataaaaaaattacataaatacagttgtacggaattttaaatatttttacgatttaatttacagaaaatatattctttttatgttgtactcttgttaatttgttgttactttttgttatctgtatgttatattttgttattattttgatattttttggatgatattaatctgttaattttatgtagttttcttgttgtttttaaagaaaattgtaaaaatatgtataaaaaaaaattaaatataaaaatgtaaaatttttacgaaaaattgtgttttatgtaattatcttttttttatattttgaatccaattcaatagatcggaagagcggt

SEQ ID NO: 156205 - DNA, 724 bp, Cannabis sativa
cataaacctcgttgattagcaatgggctgcacagtacgtttaaaaaatcacgtaatacgcctaaaatagttagggtgttacagcaggaagctgaggcatttgaggttcctttgagacaaatacgtcttttcatgacttgcctataaatacctcttttagtgacttgcctataaatacctcttcagagcgaaaagagaaattcttggcttcaaagttgccgaagcgccttcataaaaattgtttgttggattgacgttgctcgaacccagacatttgaatcacgagtaagtttctgattcccctttatgcttatccttgcatgtttacatttttaatgcgccttctattgtactgtacaaaaatgtttaggaaacgcgaggcttagaaacctctgcgattcttctttatcatgtcttcatgcggttttacagacataatgcttgtttctgaactacatgatgttcgtctttcatcttgcttattctaagcttcatgaagttttttgccctaactcaagaaaatttttgacatcttgagtcctgacttttctttgaacatagtcgttctttaatttgttgagtacttctggtaggcatatttgcttgtttatcatccgataaatagaccaaacactcatctcgtgtgttgtcttttgtagatgaactcaagtgagtcttgggaactcggacatcggatcgaccaggatctacttcaacttctgcac

SEQ ID NO: 156206 - DNA, 645 bp, Cannabis sativa
ggaacaatgccaaaaatatatagatcatttcttagactgaataagcatctttcctgcaactttaacattccttagtgccctttttgacttttagtgtgggaggggcaaaatgaccattttgcccccattagccttttgtcattttgtgactttagttaagttaattaaatctgactttaagttaattaaggttatttagttgaataaaacatagtgtatttatctcattttcaaagaaaaatctaataaaacgaaaactcattttgctctcaaattctctctctctctgtctttcgaaatccctagaaccagctcgggtttgattttgttctttaaatcttgcaagtttccagccgctctaagtataatccaagctaaggtaacctttgagcaactctcctttttagtttctttgagttttaagaaaaaaatttttgcatgaattgagttattagctgttgtggttgctgtagttgatttttcttgttttcagaggataaaatatgtttagataggttgatttgagcatgttttaatggttgtaagtgagtttaaccaagttttgagttttagaactcaaacttggcgctttaatggtggtatttgtttatgagcttgtagaagtgttttgttgctttgatattg

SEQ ID NO: 156207 - DNA, 675 bp, Cannabis sativa
aaaggaggacgtcagacttactcctatactgagtgcccgcgttgtaagaaacatcatcccgggacttgtaaccggagagcttgcttccagtgtggatcggtggggcacctcaagaaagattgtccccaattgaagaaagaggaacctaaacctgaggttaagcctgccccagcacgtgtttttgatatcacgctggctgatgctgctgccagcccttcagtggttacaggtcagcttcttatcaacggtcatgtttttactgttttatttgattcaggtgctactcgatcttatgtgtcatcgagagttctttatcagcttgatagacctagtgatgtttttgagatgggatttggtaccctgttgcctaatggggaattagttatttcaaggaagcgggttagattagtgttaattagaattgaagacaggggattgagcgctgatctggtggagttaccattggccgagttcgatattatactcggaatggactttttgtccaaatactctgctagtattgattgtaaacggaaaatggtgacttttcaaccggagaatgaggaaccattcatctttgttggttcggttcaaggttctcgtgttccaagaatctcagcgttgaaagctagggatttgttacgcagtggatgtgttggattcctggcagttgta

SEQ ID NO: 156208 - DNA, 557 bp, Cannabis sativa
gaatacatttatatataattcacgttttatgatcataagtgactaaaatatgtattatatatattttttataaaaaaatattactacacaatatattacatagaatcatcagagggtccaattagtaacttttgcaaaacacaagatctaaaataatatttacccttttgtataatacaattcagttagtaaaaaaattatacaaagctagggtcaaatccgcgcgaagcgcggcttagttccctagtttactaatatatgcaagtttcatagactaataaattaattggcgtatatcattaggtttgattatagttcactctatttaaaaaaaaaatgttattccaacaaacagaaactagtaggtttattggcaaatataatggtagactatatgaaataaaataaattatcgttccaatatacgaaaaaaaaattatttcaatttgccaaaataaattaataaatttattagcatatacgatggtaggctacacaaaaaatgtaaacaaagaataaaaatttgtttcaatatgccaaaataaactaataagttt

SEQ ID NO: 156209 - DNA, 1089 bp, Cannabis sativa
tgttagatttaggatcgaaaatcgttagatctaagttttgagcaaaaaaatagatttttctgtcaagcccgatggtggttagatagtggtccgatggtggcccgatgcattccaattgttaaaatgagtaaaggttgaagacgaaggtccgatggtagttcgatggtagcccgatgatatggtccgatggtagtccgatggtggcctgatgccttcttaatgagctaaataaatgaagtttaacatctataaatgtagaatatggtctgatggtagtccgatggtggtccgatggttgcctaatgctactttatttatgtacaaaaacataaaaaacattaaaaagaaaatgggtagtatcaggccaccatcggactcctatcggaccaccaccatctaaaaatataatattttattttatctctctttcaaattatttttgacactcttacttctaaaaacactccaatatatcttaatttttagctacaataactttttagctttaattttttattaaaaaaaatgaatagcattaatgctacaacataacatccatgtaaatttctagaatgacatctttttctctctaatggtatagctaggggtgttcgcggtgcgggtggtgcgctctttgaccattttttcaaatcaatccgcacatgcagtttttccaatttcctaaaccgcacccgcaccacgaaactaaaaaactgcactgccaaaaatggtgtggtgcgatgcggtttctgcagtttaaactatcaccaataattaaacacagatacaacaaagcttgagcaatacttgtcaaaaataccacaagacttgaaaataaatatgaaaaaaaattaagtttcaataataatacaataattaatgggctttgggttggacgttcacatattaaatataaaaaattgatatttttataatatacggtggggtgcagtttgaaccgcatattaacaatttaaaaccgcaaattgcacacaccgcacggtttaggaaaaattcaaactgcgaccgcaccgtaaagaattttaaaccgcattttttttgcgctgcgggcggtttgagcagtttgat

SEQ ID NO: 156210 - DNA, 537 bp, Cannabis sativa
ttgttaaaaattcttgtaatttttcttgttctgtttcattattttcttagacacgatatttgctcttaagtgttgattggtgctttatgtgtcttttagtattgttttgttcgttcttggcaacaaaattttgggggcatattttgaaaaaatttaagaaaaagggggcatatttttcgattctttggattcttttcttttatttttttcatttgtggaaacatgtttgtattgcattctttctattgtgtttcttttatttttggagttttggtcgtatttttttgtgttttaggaaacttgttcttaattaattaattattttgtggtttcctttttggtggctatttcggatttggttaggtctttaattcatagattttgtggggatatgttgtttcctttttccatttaaggtaaccttgactaatttttaaaaaatcttgttggtttccttttttctctccccacgtggtgtctaaggtaaggaagttactttcctttttttttttcctgattattgggtaattaaaattg

SEQ ID NO: 156211 - DNA, 663 bp, Cannabis sativa
  modified_base (175)..(188): a, c, t, g, unknown or other
ttttaataattaattattctattagtattaaactagtttataaaatcacacacgtggcatccctatatgttagggcgttacacaatttataccgagcttaatgaaactcgggaaaatatttaccttgcacatgagcagaatgtagccttcagcaaacccgagcctatgaggaatnnnnnnnnnnnnnnagatcttaacaaatattgtaaatttcataaagatattgggcatacgaccgacgaatgtcgccaattgaaacatgagatagagagtctcatcgctcaaggccattttaaatagtatgtgaaaagatagggccaggaatacaacgagccccatcagcctaataacccaaacaaccaggggttacaacctattcctatgggaggataggacatcctggttacttcaggagggccgcatattgcaggggaaagcaataatgctcagaagagatatgtgaaagagataaagaacgagcattcggtctttgccgcagaaccttccaagaaggtgaaaactgaggaaccccccattacgttaacagaggaagatgagaagaaagtgagataccctcacgtcgatccgctggtcataaccattcaactcaccaataacaggatcaagagagtgttaatagacaatgggagctcggtaaatatc

SEQ ID NO: 156212 - DNA, 502 bp, Cannabis sativa
ggggccgcgtagcagcacccgccgttggttcatcatcagacatggaggggaccacagcatcatccgaggcaatggctctagcacgcttaagcatgctgcgcatagaacctccaacttgtgtagcatgacgcatgaaggtcggcctaacaacaggggaagtggcagcaataggaggggggcaagaatcattaatcacaagtcctttatcccctcgggatggagggggattggttggaggagaaatcataggggccttccctttacctttatcagtgtgagtggagatggaaacagagtcagtaatgataggagcagagaatctgacagagaaagatggtatagcatggcctgaagtaatttgagtggctggcgaagaagagaaaggtgaagcaggctgaggagattgggtcgaaatacgaggatttgggctggattgaggagagtccacatggagaaattggtcaacagcttgttgcaaatcttgagcatcggatgtaggatg

SEQ ID NO: 156213 - DNA, 652 bp, Cannabis sativa
tgatctttttagatagactttgccaacctgcatgatccccacaaaagccttgatgaatctctttgatgattttattcgctttttcaaggagaacacaccgaagtaggggcatcgaataccctcttctgcatagtattccttcaattattgtgtagcgaggcactgaatacaataatttttgtgcctcgttttcgtcatttggaagttacccgtcgagtaagtaattgataataggagtcatccatgtaggagaactgtctatcatctcgacatcttgcgtttcacatatgcttggttcgcttagtatcttcactagaactaagttcaattcatccaagtcgttatgcgaggctagttttgctaaggcatcgatgttggattttcgttctcttggaatctgttcgattttaaagtaatcgaatatttccaacttcttacgaactttctctaaatactttactatttttatgtctttggcctggtattccccgaggacctggttcacaatcaactgtgaatcactatggcagatgaggtttttgactttcaacgccttggctatctttgagccggcgatcaaggctttatactcagtctcgttatttgaagcatcaaattgaaatctcagagcatagtgaaacctaaagccttc

SEQ ID NO: 156214 - DNA, 638 bp, Cannabis sativa
  modified_base (579)..(602): a, c, t, g, unknown or other
tggttataattagaatagaaccagttctataacagtgttacaatgaataaaaataaataacacgaaataactcaaaccggttatataatataacgaatgtgtatttttgggtagatatggtatgagtgtaattatttggtaggttggagcatgtggaatggatgtttttgtttgagttgttttatttaactaatttttgtgtgtgattttttatcttagttgcgtaacggaaccagttttttggtctgaaatttttaactagttgataaatataactggtttctttatactatatttgagttattgtgtgttattatttgtgtttatttattttattatggaacgagttcttttcatacttatgcctcaatatgttttggaatagatccccattttttttaaaaaaataattataactaattttatgaggtattatgtgttatgatatattttgttgtgaaactagttttgtttttaatttatgtttgagtattttaggaactgattttctctttgtttttttaattggaatcggcttgatcaattattgcgtcttacttgtttgtattcattatgttnnnnnnnnnnnnnnnnnnnnnnnntaaccggtttgagttatttcgtgttatttattttta

SEQ ID NO: 156215 - DNA, 570 bp, Cannabis sativa
  modified_base (155)..(155): a, c, t, g, unknown or other
  modified_base (204)..(208): a, c, t, g, unknown or other
acttttatcagaagtacatgatgggttttgcgacaaccatgcagctgggccgagtttatccaagaaaattctaaggcaaggttatttctagccaaccatgattgaatactccaaggcctatgttaagaaatgtgataaatgctagagattttcanagatacctcgtgcaccgcccaacgaactaactcggatgcaaagtccttnnnnnttcgccatttggggaattgacctgattagacagttatccaaaggcaaaggcggagtgcaatatgcaatgtttgcagttgattattttaccaagtggacggaagacgagccgctggcaaccatcacgtccaaaaaagtgcaagacttcattgtgaaaaacataatttgtcagttcagattaccatacgagatagtctcggataatgacaaacaatttgacagtcaatcctagggctgttcatccgatccaagccgaacttttttggtcaaacaacatccaatccgcactaagtgcggatttcatttttttggatccaatccaattcgcacaatagctcaaattcaatccaatccaatccccaa

SEQ ID NO: 156216 - DNA, 576 bp, Cannabis sativa
ttatacggtatattattattttttaaataatattcaagttctattttttattgtacttttgctgtaacatccccacttcaagcctccattgggtccttacacccacgaatgatgactcttatacacgcgcacgtcactctgactgtttcatggaatgatgactgcccttacaaacaaacacgtatgagtattttcagcatgctttgtcctcacttgcacgcttcttgagaaaactttccaagaggtcacccatcctgaaattaccctagttcaagtatgcttaacagtagagtttgttcgtgataggctaccagaaaacaagatgcaccttgttgatataggtagtagtaccaatcaatctattcaagccctcttcaactgtgtagtcccatacctatacagtctcagaatcatcccacttgactttctcaggcgttgtgagattgcacaacttactcgatattttcccttatggatcacgggactattgactgtcacaatcaccccttacaaggtcaaacgaccttgtcgatcacacttccggttgggtcaagactctgataccatttgtaacgt

SEQ ID NO: 156217 - DNA, 649 bp, Cannabis sativa
atagaaatttcatatttttgtatgttcagtgcccgacaacattggaacgcggtgtatggctcagtagaatcacatcttggtattttactatagcggggcggtattgttagtcattgggaatgtcgagattagtcgggaatttagagtttttccaaaatacccttaagtgactttatgacttctggcttaagtgagggcaaaagagtctttttgccattggtagtttgtcctttagtggacgtagcttatttgagtaatttcatgttttatgctgatattagttgaattaagcaaaagaatattatttcattttcaagaaaaaaatcaaagtaaggaaggaaacatattttctctcgtctctctctctctctttcggccccctcagagcagctagggtttggcttgattttttgcatttcaaggtggttttagcaaggttttagtggtctcaagttcttggtaagcttcttgtagctttctcttaatttccttaagttgtaggaaatgaaattttggatgctttgaagttttgtttgctgtggctgctgtagttagttattgttgtgttctgaggtttaaatatgagttattatgttgatttatgcttgaattagaggctgtttgaagggttagtcaagttttgagtttt

SEQ ID NO: 156218 - DNA, 518 bp, Cannabis sativa
ctctctctctctctctttcggttgaggcaaaactagggcaaggatcaatttttccttcctaattctctgaaattaagctagggattcaaggaggggcaatcaaaggtaaccatagaaccatagtttttgttttgaaacattaaagtttagtttgaacttgtaattttgggaatcagtggctgttatggtttgggatgcttagggttcgaattctaggcttcgtttgagttgattaaggattctagcagctggtttgattagttgatttgggttttgtgcaaatttgagcatagaaaccttaactttgatctttaatggcatgttttgattcagtgggtttttctttggtttattggctggaatatgctgcttataccctaattaggtactctggggagttttgcaaagtgtggcttaattttgaggtcatgggggcatttttcgggttcccagcacagaaccggaattctggttctgggggacctgtagcaaccggtcgaccggttggtgtcctggaa

SEQ ID NO: 156219 - DNA, 547 bp, Cannabis sativa
atagaggccctcgcaaaggaatgaaccgctacatttgttaatcgttttacaaaatgaaaagaaacattacgcaaagaacttaacaaattcctacaatcactaacaattttgccaaataaagaaatcataaccatagagctacggacagcttgaacaactgaaaggcaatttgtttctaaagtcacatgaagccatgaatgatccttgatccaactcaatgcctcccggactccaattgcttcggccaccaccggagaaatcgtgccatgaaacaactttgtaccgccttcaacaaagaaaccactggaatctctcgccccaaaaccaactccacaggtagaagaatcattaaatacagtcgcatcaacattcaccttaatactattaacacttggagcactccattgctcagccccatcccccggaatgaacccggtgaacaacagctcattgtttgaaatctgagcaacacgccattggttaaggtagtttgttgcatatgcaatgatgccttcgatccccataaccttatcttgccaaactttat

SEQ ID NO: 156220 - DNA, 547 bp, Cannabis sativa
tttactctaacaaaacacaaaccttatttttcgagccctaattttttagcttcccaattaattttagtcttaaccccagatgaagaaaatgaagatgaaaatggagaatgaccactcaaataaaaatgaaaatgtaaaagatagaagtgaagttggaagtgagaaagattgttatattattagtcacttcatttttaaagtttaataatattttaatagaaataacaaccgattatccatttgttttatactagatatccctatatttatcccaaacaaacatcaattaacttctcaatctaactactacagtacatctacggattatatacccaaaaatgcaatatcaaacaaaatcgtgtctttgtatatatcaataataatatcttaacaataagaagttagaagaaataaataataagaataatttatatgaatattctttaaatttaattatataatttagactttataagcataagagttgcctgtatatatgaaaagagaaatcataatataaaaattaatatttttgtaatatataatg

SEQ ID NO: 156221 - DNA, 595 bp, Cannabis sativa
gaggcagtgtctggaattaatcaaggattataattgtgagattatgtatcatcctgagaaagccaatggggtggcggatactttgagtagaaaaggtcccgagcaggtcttcaatactataatgataactcctcagttagcctcagaattgttaaggttgaaattgaatttttggttgggaagttacataacctgaaacttcagtcagatttgttggaaaggatcagaaagacacaattggaagatcctaagttagttgaaattcgagatgaggtattattgggtcggcctaaggatttctcaatctcgaatagcgggatgctactttataaactttgagtttatgttctgaacaacgatgagctcaaaaaggaaatacttgatgaggctcatactacaccttatttgttgcaccgagaaccaccaaaatatatcaagatctggaacccaactattagtggtgtggaatgaagaaagatgtagtggattatgtgtgtaaatgtctaacatgtcaacaaatcaaagctgaacacctgaggccgacatggttactacaaccattagcacttcttgagtgaaagtgggaggatattac

SEQ ID NO: 156222 - DNA, 575 bp, Cannabis sativa
tttctcagggattggcagaggttgaagcaatcctgcttcttgtcttctttctgtcttgtttgttggcatacaagacaggtcttcacatacacctctatgtcttgctccattttccgccaaaagtaagacttcgatagtaaagccagcatcctagccacacccgggtgaccagcccacttagtatcgtgggtttctttaagcaattctcttcttaaagtgccactgtttgatacaaataatctgccacccttggcataaagaagtccatcttcttcctagtaccgcaccagttctccatttcttgcttcctcaagaagcttcttgtaactaggttcgagcagtgactgctgcctcactcgattaaagaaagttgtactcacctgagtcaatgcaccaacaaaagcctgtacatctttttcggctaagtgcatcagccacttgatttgcttcccaggtctatgcacccatacaaaataaaattttaccaaatactcctgccaacaagtttgttttggggttagcttcttcttagatataaagtaggtgtgtgccacattatccgtcaccactgtaaa

SEQ ID NO: 156223 - DNA, 561 bp, Cannabis sativa
  modified_base (27)..(30): a, c, t, g, unknown or other
tgaagactataactgctaaaaaagcannnnactttgttatcaaaaacatagtatgtcgatatgacctgcctcacaaaatagtcttagataatgggaaacagttcgactaggaagaattcatcgacttctgcaaccaacacggagtcgttaaaagcttctccgcaatggcaaggccacaaacaaacggacaagaagaagtgatcaacaaaatcctaaaggtcaccctaaagaaaaagctgctggcctggaaaaacaattggcccgaagaattcccaagagtgttatgggcctaccggacaaccccaagaaccacgaccggccactcgccatttttaatggcgtacggttatgaggcaatggtcccggtggaaacgttattcccatcccacaggagaacaacttacaatccaacaacaaataaggctttattacaagaagtgttggatcaaattgaagaactccaggatgagtctcaaaatcgaatggcggcttatcaaaagaaggtgactaagtactttaactctaaggttaaaagtagaaaattcactattggtgatatgg

SEQ ID NO: 156224 - DNA, 891 bp, Cannabis sativa
  modified_base (590)..(596): a, c, t, g, unknown or other
actctctggcatcacacgatggtgacatgtaaaaccaactttacatacctacttgcaagagatatgccgaacagagcaccacatatatttgcatggacaaaaccttcttaaccggggaagtgagcaatccaaatagcacgcctacacgtagcagttgcagcacttgcatcgtgagtcacaagagaaatccctataattttgggatcatatcacagagatatggcaagctgtccaaatgccttgatcaatgtattctatatttaatgtgtaatcttggcaattatatctgttgtaatcagaagggaaacttcttccccacagtttatagccctataaatagtgatccattctcactgggcaaagggtcgaaaaacttatctaagaatccatattcagagatattattttaaaagctctaagaggaggaatcatttcattctttgttcttaagtcaatacaaatcaaggggagtaggctattaccgaactgctcggggccgaacctctataaaactcttgtgtctttatttattatatttatactacttgtcgcttatgatttaaaatcactgtcgttggctaaaagcgagnnnnnnnttttggtgctttcattgagagccagaatctcaggatcactctttacttcaaatctaatcataaacacgatggtggtacagactcgtagaggcgtggttgatctagcaaatccacaggcagcggatcctacactgtagaatctagggaatgcaagggctccaccagccacaaatcccgaacaaccatcgactgtaggtcaaggtgtgacaactcctttgagtggaatcacgcctggtgcgcaagagactggaaataccagttcggcaaccaatcaaggtgtaacaccctaactacc

SEQ ID NO: 156225 - DNA, 634 bp, Cannabis sativa
tatgtgtttagttcatcgttttagaagttcaatattaggttgttaaatcaacatacttgcaaatagatctaagatcctggataaatataataccaacaatgtgaaccccgctgtgttcactagtattttaatgaactagtagtttaagggaggagcgtccccttgtgcgcttcagtgttttttctggtttaatgaaatttcccttttagcaaaaaaaaatttctagatacaacaaattaacacatgaataagggcaaaccaggaaatatcaatcataacaatcccattgaacgctataacaaaaataattaaactaagactttaatattgccccttctgtttttttttctcatcttttgattcctttaatagttcgtttggtatgtcgtattgtattgtgttggattgtactatattgtataagtattatttggtattgacttgtattaataaattgtgtaaagataatatattttcaatacactcgacccaacacaaggggtgtgcataaattgatctaattcaatgagaaccgaccgatccaattacaaccgaccgccaaatattggatatccaattatgatcagattgaattggatgtatttttatatatataattggatcggatcggatg

SEQ ID NO: 156226 - DNA, 1039 bp, Cannabis sativa
atggaaaattcatgcaaacataaaggacttcaaatttcttatattgataactaattagattgtaaagtgttttatttagagcacaaaacccaacaaaaagtcgccccgagctctgtgtagcattcttcttcagtacctctttcttggcctgagaacaatctctgataaagtggcccaccatgccacagtgaaaaccccacactcgctcggatggtgtttcttgcatttaggacactcgggataagatcagaatgaggacccgcggccctgacggccacctctgtttccccaaaactttctattacctcctgatgctccggaagcctcagcctttcgtttgtgttcagggtttccactgtcggtccccttactgacattaccactagcaggagggctcgatgctgtgatggcatcctttttagtatgctcttttacttcatgttgctcagcctcctaagcaatcaaggctagctctacaactttcttgtacaaagtttcatgtgaagtggtaatcttcaagtcccgactaattgtggcattcaatcctctcacatatttctgttacctggtgaaatgtgtgggcaccagatcaccagcaaacttggacagccgatcaaactctagagtgtactcggccactgacatcttcccctgagtaagcttcacaaagtcctccatgtctgaagttctcacaacaatgttgtaaaactttttttcaaactgatttttaaactcttccaaggtcattacactgacatcccgggtttgacccttaatctcccactagacgcggtcatgatcttgaagcatgaaggctacacagttcactctctcaattcccgtcatccccatattatcaaggatacgggtaatagtactcatccactgctcgacctttattatataagtacctcccagtaaagtcggaggttgcatcttcacaaaccgctcaaatacagaatctctgtggggaaaaataaacccatggttacccaccactggcacaggtgctggtggtaacacttgatcaataggggca

SEQ ID NO: 156227 - DNA, 505 bp, Cannabis sativa
tatactttaattagataacacaaagtaaattataattaagaaataaataataagataaatagaaaaataaatagacaaacaacgatatttaatcaggaagtaaaaaaacttggagcattgattttcctatttcaaactatgaatctcaatttaccgattatcccaatttatcctataatttgtagtttcaagaatcctaatgtaacctatcaacctctctcgaatgatgatagatttaacttagaataactaacacaatatctctattaaatgttaatcaaataagcactcataaagcaatatgattctctttaaatgaaactcatagaattagtgaaattttttcaatctcacactttttcatatgtcatgcaattctaagtctgattttagattactagtctcaagtgtaaaacctaaattctccatactaattaatggtgatcaagcattaagaagatgataattagcacaaaattgtagaaacaaataataagaacaaata

SEQ ID NO: 156228 - DNA, 597 bp, Cannabis sativa
tgaataatgggtggttaagcttataaatggaggttattgatcttccaaacaacaaaaaaactgaaggaaaatcgaaaatcaagttaaaataaagggaaaaaagagagggaagagagtgggatttgattgatgtgtgatggggattgcacacgtgtctgtgcatgggaatgatgagtgagtggtgtttttgtaataaaacaaagatggtaagtaaaaaagttgatgtaggcgtgtaggggtataaatgtaataaaatgtgcaaaatagatttttggtgtaaaaatttcttaaagatagatagagaatcttcattaaaaaaataaaaagaaaaaagaagaagaagaagaaataatactatgagagagagatgtatataaaataatattcattataaaaaaaaaaacgtgagagagagatgcatatagaacaatatataaatctatatataatatatatggaggaggttctaattgttacattttgattgtaccatcatggttatattttttttagccattggatcattaataaatggttgtgattaatttagaaattaaataaaaaaaataaaaatgacctgtaagctgatattaacct

SEQ ID NO: 156229 - DNA, 573 bp, Cannabis sativa
ttgtttttcatttcttcttcattaagcattgtatagttttttttaaagctactataagtgttgaaaaattatacaatgcatgtccttaagaaatgattgcatcagtatatttttatttgttttggtatttgagagatttttttttttgtttaatttttataatgatcgtgtacattatatatatttaaaatatcctataaaattttggaaaattcaaaaaatttaacacgtcgaaagcagagttcaaacaacctattatacgtttgactattttatttgatacatgtatgaaatagactgttaaagaccgctttttatattgtaaattattttaaatttctcaaaattttgtaaaatatctcaaataattataacgtacgtgactataaaaaaaaaatagactaaaaaattatcttaatgccaaaataaataaaagtgtatcagtacacacctcttttagggaatacattgtaaaatcacccataactattttgttgggtctattatatcttatttgtaagtgctctaaacttacctaaataccaatattattaacaaaaaataatttatctc

SEQ ID NO: 156230 - DNA, 583 bp, Cannabis sativa
tggtaaaataattccaacatctaggagccatctgaaaaaacaaaaaacaaaccaatattactgccaaaaaattttaaaaatggtcgacatattatcgacattctgtcgacatgatatcaacattatcaaacagtgaacaccaacatgatttcatcgacaacctgtcgacatattgtcgacaacctatcgatactaacacacatatggcctacaacaacaataacaacaattatcgacaatgtgtcgagatactatagacaagaggtcgatattccaaataagtgaccactggaactaagcaatccacactatcgacacattgttgacaacatgtcgacatactatcgacaagatcgatattaacaaacatttaaaaaattcacatcctaccatcgataaaatgtcgacatactgtcgacacatcatcgaaaattaagggcaaaaataaactcaaccctcagtcgacatcctatcgacatacacatgaaatcctatcgacataacaaaacatcaatacaatacaaacagacaccaattctatcgacatcctatcgacatacaaacgatatcctatcgacataca

SEQ ID NO: 156231 - DNA, 663 bp, Cannabis sativa
tgtaaacatgctaaaactatttggggacattcagattttaattttaactaccaagcagctagtaggatgaaagagggggattttttgatgtttctgtcaaatattcacaccaagtcggatatggaaaaaattatatgcactatgtggtcaatttggtcggacagaaataacatcattcacaataaatcccctcaacaaccagcaactatttatgctaaatctttagcatatctcaaccactttcagcaagtatcttcaactaacaaggctcctccaattgcttcctctgttgcagctcatcagccatggagatctcctccttgtggacagctaaagatgaacgtggatgctgcagtagacacaacacaaaatcgaacagggattggatcaatagttcgtgattcatctggttcagttgtggctgcaatttcaaaatcaattgctggaaacttaaagtcacacgaaatggaggctaaagccttgtgtcatggtcttcaataggctcgaaatttccagcttcaaatcaattatgtggaaactgactctgtcatggttgtgaattctattactagtttagccttctaagaatttagcatttaaggatttaattcatgatgttaaaagtcaattatcttatttccctaatgtttgtgtatctcatgt

SEQ ID NO: 156232 - DNA, 624 bp, Cannabis sativa
gatatacttattgaaagctcggttatataggtccatggtctcctcactagttgggataagactgcttgcagactcagttaattaattttaattattcaattataattctaaaattagactatgtcttatttatctaagcaagggtttaattgtgaagaaaagagattttagggtaaatttattatttaagagactttgtatggtctaattaataaattacaataatgataattttatttagtatttaattataattattaaataaataattttagcatttataggattgaattgaaaaatatggtattattgaagaaagaataagtggttgaaataaagtggcaaaaatctaacaagaaactggttcactttaagtgtacgaccataagtgatttttgcccaatattttattcttttttaatccatataatttagccctaagccctacttgaaacaatataaaaaggaacatgatactctcactcatccaactaatgtcaacttgactattcaaccaacctatatgaaagagtttcttccttagtgatttcagctccttcattgttcttcacattcgaaacccatagtgaatgagtgccatgcccacacataacaagtcaagta

SEQ ID NO: 156233 - DNA, 583 bp, Cannabis sativa
ctttgtccttcaggtaaccaaaaacaacatttttatttcttcccattgtacttggtaaacccaaatatttgctacgctcagccgcctcctggatgcccattcgattacatatgacttgtcgagtggaagaggaggtgtttgtgctaaaatatattgaggacttgtcaaaatttactctctgaccagtagccatagcaaaaagttgtaacaattgaagcacacgagttacttccccatttgtggacttacaaaagagaaagctatcgtcagcaaaaagcatatgagtcaccaaaggagcaccatttgtgactttaattccatgaatccaccttttttcctcaaaccttctgataatagcagataagctttcagcacacacaaggaacaaataaggagaaataggatccccttgtctcaaacccctacttggaacaatcggccctatagtatgtcccgaagtaacaatatgatattgcacagaggataagcacccataaataagtctaacccacttgtctgcaaaccccatttgtctcatcatagcacacagaaagtgccaatcaactctatcataggccttgct

SEQ ID NO: 156234 - DNA, 507 bp, Cannabis sativa
agttggagcgtgaaatagctgccgtaaaggcagcgctgggagatgatacccaaaatcaacctgaccttgggaaaagagattcacaggccaaacctcacagctcatagaccaaggggcagaggataacccagagatatactcaagaccctcaggaaatgcaacctgagggaactgaggaaaacttggagacacaacttgagatacgtggaacatcggacgaaaattgccaacccacaattcaggctcatgagaatgaaactcgtgcaaacccttgtaggaagaaaaaggtgagtcaaatcttgagaggaagggcaaggtccgaccacaatcatgacaagagtgatctacgagaacatctgaacctgaagaagcctgacctctatcaacaacttggttcaaggaagaaggattcattccatttgcgaatgagggagttggagaataagttcagagtgcatcaagtcacgaaacctaggagacaatcggggcgcgatactgttggaaaac

SEQ ID NO: 156235 - DNA, 549 bp, Cannabis sativa
ttttgtaaaccaatatgatgaatatattcaatatttagtttgaaaataaaaagaaaattataaacaccattaataattgtaaacatatcagctttaaaaaatattgattgaccatctaacttgatatgaaggcaaacaaaaagtattgaaattttaaggcatgctattatcaactaatcaattactttaacagtatgtttagtatcttgaaaactaatatcaagtaacaataaaaagttatgtttgcaaattattaaagttatattaacaaaattatattattttaaaaaatttattagttattatttttgtttcgtatactaatcagtttgtatattaatgtattttaaaatacatttagtttacaatattatatcaatatcatatatatatatatatgagatatatgaaaggtaactaattagtaacttatttatgaaatgtcacattttttcatttaacgtgtataaaatttttttatatgtatatttgaattatgtgtaaactaattgttttgtatttcatttggtgtgtagtttcttcttaagt

SEQ ID NO: 156236 - DNA, 874 bp, Cannabis sativa
attatttattatatgaagataaaacaattaattatattgtgtcaaaatttcaataataaataatatcttagagcaaaaaaaaaatatttattttatttttttgtaaaataaaaggtcccattttaaatttcgccctaggcctctctacacattgagacgataggaaactcaaattctaaatcttctggacgataaattcctgaactagagtgggacattgctacaagcagaaagcagtctcaatcctggaaagaattttatcaaactcaaaggtggtgagttagagattctgtaaaaacctacgtattacgtgaaccctagtatggacctaggcacagtttgaccctaaaaactaccaaaaccaaatgaggtggcaacgatacaaacaaatttaagcagcaaataaacacaatataacagcacaaaaaggaagaaagcaacttactgtttgaagttagggcttgggacaacgattggttactccgtctgcaaatcttcgaacaaagcaaggattgctttgagaagatgaagtcggaagaaactcgtagaaaaaatgtcaaggatagagatggcatgcaagtcctcagataaactcgatggtgattcctagcaaaaagcttaaagatttctcaaactttctaaattggaggaaataatgcaaaggaggttcctttttccttattttatactcctgatattgggttcttcagattagaaaaaggtttgatcctacggacataattcatcgcggaagtggaaaagatagtcatttaatactgatgtacctcgaaaccgcacaaccgccaaaatcagaggacatgcatcttttcaaaaagaggatcatgatgacaataccctttataatcattaaaaa

SEQ ID NO: 156237 - DNA, 503 bp, Cannabis sativa
aaatcttcaaaatagttgttatactagaacataacaattacttattttagttattgtcaatttctctattttctcaaaatcatgttttatacaaactattctatttttctggtccatatacacatctgtattattctctctcaacaagcaaacaagtaaatatagtacaaaaatttatgtaaaatttgtaaaaataaatattgaagaaaatattttccaatttaatttttttaaccaatcacctgtttacttaccaccaccaaacaagaaattcaagcactaaatgtaacaaaataattcttaaaataagaacaaagatcaaaaaaacatagctactcattttttttctttgtccaaccataaaatcaaaacaacttaatttatatttctttaactttgaaaaaaaaaaactcatcaaaaagtgttagagtgaaatatcactaatgaccctcataatttaataaatttctattgttggtgtaaggataaagtagtaatttaaa

SEQ ID NO: 156238 - DNA, 1017 bp, Cannabis sativa
  modified_base (639)..(645): a, c, t, g, unknown or other
  modified_base (951)..(954): a, c, t, g, unknown or other
aaggatttcattcctaagccagtgaaggagaggaaaaggaaacttggtgcttgacgggctgaacgagctcatcaagagaatgaactcattcaacttaagcgtgaagctaagttgaaaggaggtgtaagggccaagcaatatgctcaggagcccttgaatcctgaagatgaagttgaggaagagcaggtgactccactcaaaaggaggaagaaacttccggtccagcccaggcctattgaatatgcaattcgcattagggagcccatctcgcctgctcggccgcattctcccgtgctcggaaaagggaaagctattatgtctgaaataagaggcatgtcaggtgatgatggaatttcgagtcttgctcgggtaaagcatcttgcatactactccgtcttgtttttaagcttcttgactattgtgcttttatgtttcatgcagacatgtctcagaagatgattgatgctctgaagaagagaattggcagaagctctagcgcatctcctccagccaagaagtctagaggcagtgaggggacctcttctaaggaaaagatgcctgttggggaggtcattgatctttctgatgagctaacggttgcaaacccctctaccccaaaagttgccaagtctaaggagnnnnnnngagggagttcggacaggcctgaacaacagagaggtgggtccgagctgatcaagagtggacccgagcagatgcgggccccttcgtcaccttttcccagaagacccgaaccaaaagcctgggactccaactgtttaaatacttcttcttttatccttttatttttatattatcttattcggccataaggccttttctaagacatcatgaccgaccaagcagtctttaaacttggaattatttttcattttacagacaacgggctgaccggacagcctctgatcctggtattacgtgcttttgttatcnnnnatgaatttcattctctatttataatcatcgtgcaattgtgactgttttatctttaccaaatgc

SEQ ID NO: 156239 - DNA, 1049 bp, Cannabis sativa
cattttgttgacgagtacttcatgatggaaggcatgggcaccacctacactcgattccaatagatccccacatatcaccgccctcccttcacacttgccctccaggatagatctcagaagcttgctctgctgccgcgtgttgccctaaatatcactttgttgacctccgaggataactttgtagagtacgggctttacccgaaggatttcattccttaccctgtgaaggagaagaagaggaaatctagtgctggacgggctgagggagctcatcaggaggatgagctcattcaactcaagcgtgaagctaagttgaagggaggtgcaagggccaaacagtatgctcatgagcctttggatcctgaagatgaggctaaggaagagcaggtgactctgctcaaaaggaggaagaaacttccatcccaacccatgcctgttgaacatgctattagaatcagggagcccagtctacctgcttagccaccctctcccgtaccaggaaaagggaaggtcgtcctagcagagataagagacttgtcaggtgataatgatctttcgagtcttgctcggacaaatgcttcttatgaagcgcaggatactccgtcttgtttttaaacttcttgattatcatgcttttatacttctgatgcctttgttcttctaaccatgttgattctatcccgtgcagacatgtcttagaagatgcttgatgctctggagaagagagttggaggaagctcaagctcatctcctccggccaaaaaatccaggggcagtgaggcgaccccatccagggaaaacacactgactggggaggtgattgatctttttgaggagctaactgtcgtgaacccttctattccaaaagatgctaagtccaaagattctcgaggaggaagcttagataggcttgaagttcgaagggcgaatttgagctggctaagagcggatctgagtagatgcgagctcctactccacctttgccattgcacccagaagccaagagaggcaaggagatgcttactcactacatgaaccgattggttcct

SEQ ID NO: 156240 - DNA, 646 bp, Cannabis sativa
tggtttacatacaaacttaaacttgtctccactagagactagaggcaaagcaaaccattaagtcatcttcctaaacaaagaatacaaggagggttggtaaactcgacaaagaccgtctacatatagcttggagaaagaccgtctacacatagcttggagaaagactagctacacatagctcaagaaataccgtctacacatagatggtctcgacctctacatagacctcattctccacatcagaagatcccatttcatgcagccgagacgtcattcccagcctcaagaaatttctcaatacttgagagaggttggcacaaaggtcttcttgtgcaaggttgggttctttagtagaattcgagaccatgcccaccagtactactttcttcctggattccctatcagcctcaagaggacctcttagatggctcgcaaaatctatatccattcatgtggagacaaagttaaaagatcaatggagcaacaaaaaataataatgtgtatgatccaattcaaaccaccattcacaagggataatacttaccctcaaaaatcacttgtgaggatcgcccataacgatcaacagagctcccttagtttggattgatcagaagctcctcagccttggaccatgggtctatataac

SEQ ID NO: 156241 - DNA, 577 bp, Cannabis sativa
gaaataaattatgatatataagatgaatgagctagtcctcccattgtcaattagttttgagatggaactccatccatcttataccaaattctaacagcccatattataaaaaaaatcataaaatgtataatttcatcttttagcacaaataaaagtaaaatgacaacaacaaagagaaaacgacactaatattataaaacgtaacaataacatagaagagaatgacatcgacatgaacaaggggattattttgaggtattattttagccaaaaaaacatgaataaggggataatgacaagaatctcaaacggacaacatttggttggttggaaggaataaacacatcaataaagatgataatgagaataagaataagaatatgaatgaaattaaatcaaatttaaaatgtatacaaaaattattaaattttttattattatcttttctttcattttaaaatgaaatagtcattgattatatatatatataaaaaaaaatagaataatcattacgctaaaatgatgaaaaaattattctaatactttaaaatgtaaccaaacaaaataataaaatgaa

SEQ ID NO: 156242 - DNA, 575 bp, Cannabis sativa
caagttctccaagttccgttgggttttgggacgagaataggattggctatccacgagggataaaacacctcgcgtataaagtcgttgaccaacaacttatccacttccagtttatgtgccccttgtctctcacaatctaagggtcttctcctctgcctctttgctgggtagtttggatcgacatttaagtgatggtagataatcttagggtaaatccctatcatatctccatggctccaggcgaactgatcctggttcgcccttaaaaaacttattagctgctatttcaatttctcatctaggttcttcccaatgtaaacacacttcatgggatttcctgggtccagaataacctcttccagctcctaaattgatttccataaatttctttcatcttgaaccctaggatcaagatcttcatccttcttcttgccttcttcaatcaagactgccattaattggtgaccagctatcctgtgttgcagctctatgcgatagcattcgcgagccagcatttgatcacctcgcactactcccacacccactggtgtttgaaacttcagggataagtgctt

SEQ ID NO: 156243 - DNA, 880 bp, Cannabis sativa
  modified_base (36)..(56): a, c, t, g, unknown or other
  modified_base (325)..(339): a, c, t, g, unknown or other
  modified_base (477)..(496): a, c, t, g, unknown or other
  modified_base (620)..(624): a, c, t, g, unknown or other
aacacatactcatgcaacaagttggatagttggatnnnnnnnnnnnnnnnnnnnnnattaattaatttatttaatattttcgaaaataaataaataataacaaaaaaatatttatttttcggttgaaataaataattaaataaataaataaaaaagttaaaattaaaactacaattttgaaaaattaggtttcaactaacctaaatatcttttaaaaaaaaatgctaactatctttcaaatttcatgttattttataaattaaatattcattaaaataaaattataatttaatattctttctctgattttataatttaatttaannnnnnnnnnnnnnnaatttaaaagttagcataatatcccatttctattcaaaatatcatgattaaaataatcttattttaaatttaattaaggtcaatttatttaaaaaaaaatagaataatttttttaaaaaaaaatatctgaccttaaannnnnnnnnnnnnnnnnnnnatcaaattttaaaaataaaataattaattaagaaaaaaagatacatttttacctatttcaaattcaaattacactaatatcttaagttaattttaaaaaatactaattaatttaattctgatannnnnatttgaaatatgaaaagtaaaaattaaaatacaaaaatacacaaaaaatcggaaattaaatccatgaaatagcatgaaaaatcaaagaaaaacgaaaaaattgcaagtagtagggatggtatgcaaatagggccaaaaacatgggcggaatgggctggtttcacgcacaaacgtgctgccagcagcatttccgcgcgcacaggggtgtgtcaccacccctgattttttcccgatttttaaaaaatcataactaatt

SEQ ID NO: 156244 - DNA, 684 bp, Cannabis sativa
ttttttttttttgaaaaaataactctagattgcaacttgaagattattattattattattattattattattatgaataagttgaaattttttaagccaatttttaatagaacattaaaatattaaatttgatgagttaaattaaatttatttcaaccacactctaaaatttatccctcttcccacttttgtggagataaggtagaaattattttccatgaactcctagaatgtttcagggctcgatctgtatggaaacactcttctgtcaaggtctttttcacctctaatcaaaaccgagatatcaatgatttctatttccaagacttagaacaattaaataaggaggatttcattttgcttattagtatcctttagcatatttgaaataccaggaacaatactcttttcaataatcgatttactaacaatatggatgttaaagattttgtaaccaggttttttgtaggactataaggaagctcaaatttttaatgtaaaagcaaaggattctcctgcagggagacaacgtttaaaagctcacacatctacttctgctcctgccattcccaacaactgcatttgtttgaatgcaaccctagatctgtgacagtcagtagtcccgtgatccgtaagggaaaataccgagtaagctgtacaatcccacatcgcctggggaaggtc

SEQ ID NO: 156245 - DNA, 540 bp, Cannabis sativa
cgaaaccaaactctgagttgtatttgcaaaaatataggcgtcgacattaaccttaatactatctccatgtggtggctgccactgttcagcaccgtcacctggtattagaccaggactcgggtatgtaacatttaaactctgagcagtttgccattgattaaggtaagttcttgccgacaacactatactttccacactcaccaatttgttattccacactctgtcgttccttgcattccaaagggaccaacaaagagcaatcaaaagtttcctctgatctgcatataacaccagaaaattcgaagagcaccagtcgaaaaaattgtcctgctgctggtgcatcactgtaccaatgtcgactctgttccagcaaagagcagccgctggacaagacacaagagcatgaaatgttgtctcctcgtggttgttacaaacagggcagaccagagacacatccacacgcctcattcgcaactgagtcatgattggaagacaaccttggcaggccctccacaccatgtttttcatcttcggaggtga

SEQ ID NO: 156246 - DNA, 532 bp, Cannabis sativa
atgagataaaaaaatatatgatatatattatcattgaacaaatatagtaaattccactttattttattttatttttaggtgcagatgattcattgaattaggatactaggttgatgttatgtgcaatgcatgtataattaatttttttaattagattcaataaggtgatgttaattgcaatacatgtatgttttattttttttaattaggtaatgtattttttttttaatttttgaaatggagtttgagattttgctctttaagaaattttttttagatattgctacattggtgtgtcatttaaatgtgattatatatgtgtatttttttaaatttttaaatttttttaattaggtaacgtatctcataatgcatatattataatttacttattcttaatcaaaactcacataaccaaaactaaatttgagtgcgtctatatatataggttggattcgtaaatttaatataaatatttttttatttccaaactttacgaaaaatatggtgtgtgaatttaatttaaaatata

SEQ ID NO: 156247 - DNA, 687 bp, Cannabis sativa
ttttcgttaaccaaattttagcctaatagtgacaatctcacacagaaaaataaaagctgtaaaataaaaagtatgaacacaaaggattttttacgtgattttacagttgaaattctgcatagtccgtgagtcaatcttattagatttctgatagtttttcagggccttttttgtatgattttttcgtccctcttttgatccaacctgccactatttataatcacatactaggcagttaatttacaaagttgaccgtaatctttacaacgatcatcccctgaaatcatgggatctgattagatatcaattaagtaaatgcaatttttatttaaatttcacacagctgtgaatatcccgcttttactaggtcaaaatgaacgtgtattaaatatattgtaggccatatcgtattggaatgtctcgctgggaatagagtagagttaatcttgatagcaaactggagctcgtcatatgtctttccaaggtggataatgcttttaccttaaatttgacaaccgcagtttcgggtgacgagatgatctttttcgcgtgcatgccctcctacagcgaggcggacacctcactatctctcgctttggttcacccatctgttatacttagtttgtataccgtacattatacgctaagtgtctccattgtcattatatctcctccacgtaacgaggt

SEQ ID NO: 156248 - DNA, 526 bp, Cannabis sativa
aacctattttcaacataatttaaacaccagaaccagaaaaagaaaacactactcaacaatagcagcaaccacaacaacgatcatcaacaatttacttaaaaaaccatagcttttgtaccaaaaattcacaaacttaaacaagagtaacaagcatgcattacaacctatctaatccattcaattcaagcattttaatcacaaaaacaacaacaacaactaacagcagcaacaacaccaaaaactagcatgcaaaacatcaccttcttccaaaattccaagaaacttaaaagaaagctatagaaatcataccaagcactttaacaagcacttgaataatgcttgaaaaatcaagaagaattcccagctctagcaatccacaccagccgagagagagagagagagaggaaaaagcttgagtttttttcttctaaatttctaattttttactttgaatgaaaagagagaaacatgcaaatattaaacctttatttcagccaacataaacccacataattcacatattttt

SEQ ID NO: 156249 - DNA, 599 bp, Cannabis sativa
tgtttcctgacttagtcaattttttgagttattttgtgactttaagctaactcgctccttttattgtcgcagatagaccagctcgacctacacttgacgtgactcacagagagacagctgaagttctcgggagccttcctgtacaggatcacgactggcgattattgtgtacgacttcaaagctgcgggaacacaagttgattccagagaacgcgagtcttcaaagagaaccagtgtacaaggagccatctgagaaacaacaggagcgaatagacaaacgcctctctaaacaaacttctcgaccaacatcaggtagcatatcgcatgcataaactagtgtgttaaagtcttactattattggtacttattattattttttgttgttgttggtgtcgcagaaatgactttcttgaagtccacacccatccttaacctcaagccaaaatctagaacagcgacaacttcccctatcgttcctcagaagaggaagatcgatgtggtggtcacccctgtcgcggattcttccaagaggccaactaagggcacgcaagacaatgggaaaaaagtcgtgattgttccggctgtccgagttcgcaac

SEQ ID NO: 156250 - DNA, 805 bp, Cannabis sativa
  modified_base (108)..(112): a, c, t, g, unknown or other
  modified_base (684)..(687): a, c, t, g, unknown or other
  modified_base (748)..(749): a, c, t, g, unknown or other
ttttcctatcactagggtttttccttagaaggacttaggcaacggctagcaactaatcatagacttatactatcatcaacacgcaaatcgaatttttggggaggtaannnnngatataatttaaaaatcaacttaatgatctttgaactgcatatctaccaaatatttctccacccctatcaatttggaagatctttaactacttaccttaatggttttccaccattgctagaatttcatgaaaattttcaaacatttcaaatttctttgcataatgtaaaatctagagtgatcgtcttaagaataaaatgaaaactcatatccacccctaaatgtacatccatcttcgaatatagatgatcttacatcagtggatgtaggcatattgactctttgcagagaataatcttgtgaaaaacactacgaacaagatacaagtaccatagatttataaaatatgtggttgtggtctttcgatgacttaggtctagttacaagataaagtttttagaatagtccaagtggattttggtcacagaatactaaactcaaatccacacataaacatacagtttgaatccattgactgaaaatggatattaaaaaaaacttgtgaaagtcatactgtaatgtgtaatgtgttctaggaaatagatatatgaaatttctatttggaatctaaannnnaaagtcaaagacttaaatttaaccaaatatacatgagtaattattctctcttggaccaccnntactaatctaactctaagtttaaattgcctatagtaaacatatatacaataggaga

SEQ ID NO: 156251 - DNA, 756 bp, Cannabis sativa
  modified_base (33)..(68): a, c, t, g, unknown or other
  modified_base (175)..(181): a, c, t, g, unknown or other
tttcattggtttagagaattcatatttaggatnnnnnnnnnnnnnnnnnnnnnnnnnnnnnnnnnnnngtaaaatattcccaacaactgccctcagagccatggtaagaatttactttcatgaagtatggatttaaaatgacgaatgttgtttgtgtgttgatttggatgtgttnnnnnnngtttatgtgttatttgatgatggatagtgaattacgaaatttttccttgaaaataattttattttcgtcctgaaaatattttatatggattccttgtgaaaaattaagcaattttggtttctacggaacttgattccgataaaaattaaaaaagttatagtgttttgaaaattgggttcaaggtggtgtggagtgggtgctcgtgtgcaccaggcactcagacaaggcgcgcggaatggggcacaatctcgtgtctgaaggcgtgtcctgcccgtgtcttcagacacgacatgctgtgtgcacgcctaggagatcctgcatctacggaagcattccgcccatctcaccctgccactccctctcctgcgcgcggaagggctgcttgcagccttcgtgggctccacgtgcagccctcctcggcagttagccaccaaaccctatttttgtgggattttttaaatttttttcgaaatttccaaattttaaaccccaaaaatcaaaataaaatattacttttaaaatatttaaacttaaatatcaattttaaattcataatatttattttttaatagatt

SEQ ID NO: 156252 - DNA, 696 bp, Cannabis sativa
gagactcccatcgccaacaagattatggctagaatactaattgacaatgggagttctgtgaatttattatttaaagaagccttcacggcgataggcctcacggaccgggatctttcgccaagtggttcccaactcacgggattcaatgggacaacacttatctcaatgggaaaagtgaggttgccactaaccctgtgcccagacacaccccaaagcacttttaaatactgcacatttgtggtagtagactgcccgactccttaaaacacaatcctcggtcgaccggccctggtggactttggcgcggttacatcgatccggtacttgtgtctcaagttccctactcaggaagctagagtagggaccgtgaggggtgaccagggagaggctaggcaatgttataatgttgccgcccacctaccgatattgatggtctgtgaagttattgagcctgtaacgacagaagaagatgagctgaatccccgagtgggatccgaaaaaatcgtagaacctatggaagacgtcgaggaagtatcagtatgtgaccttgaccctgccaaggtcctccggcttggaaaaagcctagagccagaggaaaaagaaaaaataattaaagcattaagggcagccacggatgtttttgcgtggtgccgaggagacatgaccggcataagtccccatgtcataacccatgtc

SEQ ID NO: 156253 - DNA, 531 bp, Cannabis sativa
  modified_base (154)..(159): a, c, t, g, unknown or other
aatatctaaaattaagcaatattttaaatcctaccataattggaaatatttcaaaaaagggaaatatttaaaattggaaatatttcaaattggaaaaatttaaatttggaaaatataaaattggaaatatctaattttgggaaacaatcccatnnnnnnttggatttttggggaaaaacccacaaaaatcggcttgggaggctggctgccaggaggctgcacgtccagcccaggaaggctgcacgcagcctcgggcgcgcgcggacgaggagctttgcagggtcaggcgccgagttttctcggctggtgcaacatccgtgtgcggcattcttcagcgtcatgcaggatcgtctgggcggatggcagggtgcgtgaccaagcctcacgcgcgcggatgggcttccagtctgagtgcctggtgctcacgagcacccactcgacaacctagaatcctgattttccaaaatttataactttttcaatttttatcgaaatcgagttctgtaacaaaaattgcttaatttttcacaa

SEQ ID NO: 156254 - DNA, 696 bp, Cannabis sativa
ttttactgttttttaattaattaatatttatataattttaaaaaaaatacaagcaaaaataataactattaaggtctaaatttttatatatttatataaaaaaaaattcttatccattttaaaatactctttttttctttaagtatatttatacaagtatgttttccttttaaaaaaaataagaatgtcactttttagagtaatttataatttagtatatttttttataaatatttattataatattaattgagttgataaatctatacatttatataaaatatgaaagcttaaataaatctaagtaacattctatttagctttaaaaaaattgtgagagtttcatatatatatttttggttgtataaaaaaaaaaaaaaaaaaaacttcatatgttatgaaccctatcacattattgttgtcttttgatatattttttgtgatgatcatgacataaaaataaaaaataaaaatagttagtggtatgaattgtttctcaaatgttttctataaaagaatcatcaaaacaataagataaattaaaaataaataaaaattaatctttggaataattaagttaaatgatgatttaaaacatgtgtatatatataaatataatgtgagttacaaaatattatattatatgaaaaatgaaaaattattaaatttaaattttttcactcatgttacaaaatt

SEQ ID NO: 156255 - DNA, 864 bp, Cannabis sativa
attttgcattttcggtgcccggaaacatggaatgcggtgtatggctcagtagaatcacagtttaatattttagtatagcgaggcggtatttttagacattgggaatgtcgggattggttggaatctatagttttcccaaattacccctaagtgatttttatgacttatagtatgggcaagggcattatggtcttttgcctattgagtttttgtctttagtagggatttaatttttagtttgaatgtgatttttatcaatattgttggctgaaattagtttttgtaaggttatgctatctcattttctcaaattaaggaaaattggaaattagaaaaaaatcaccttcttgcaaactctctctctgtcttttttgttccatcctagagcaactagggttgcttttgttcttcaaatattcaggatttcagctaggttttaagtgattttggtcaaggtaaggctcttagctcctatcttcttgttttcttgaattgtaagaaaagaatttttgcatgctttgagtttatgcttgctgtggtttctgtggtcaattgttgttgtgttctgaggttaaagcatgtttgattgtgttgatttaatctagttatagtggttgttggtcggatttaagtaagtttggtgtttgaactcaaatcttgaatttcaatggtgaaatggtgttttagctgctgtagttgttgtttgagtttgggtttgttttcttagattatattatgattattttaggtgatttaagtaggttttgggtggcttgtttgtgggatgagcaagctttgagttttgaactcaagcttgactcatcaatggtggtttttgtaattatgcatgaagctttgttttat

SEQ ID NO: 156256 - DNA, 707 bp, Cannabis sativa
  modified_base (598)..(608): a, c, t, g, unknown or other
ttagtttgtcttttagtggatgttaaatgtggaaattatatgtttattaagttattgttttggctgcaagaggttattacttgcttaatagctttttatttcatttttccaaacttagaaaaagttagaaaaattctcaaaagttggaaaaccctctctctcttttcctctctctattcggcctcttggtgcagcaagggactttggatttttccttgtgatttcaactctctttggggttcaattcaagctaagttagcttctaagcattttttctttaagtttgttgaattttgatgaaaatggtataatgcatgcttgattttgatgtgttcttgctcctgtaatttgttgtagttttcggaggtttaatcttgttattttaagtagattagaactacttttatgcatgataattgctttgattctagattggaagtttttagctcaaagtttagttttcaaaggggaaatttcgaaatctgttgctgtgtttattgcatgagttagagtttgtttctgcagtgtttttatgcatgattatgtagttttaatctacttctgaggcttgcaattgagctttagccaagtttgagtnnnnnnnnnnnagcttggagctcacatggcactttttgattctgtgaattctgggtgatgttgttgctttagaaatgttatttgggtcatttagaacaggtctggatgtt

SEQ ID NO: 156257 - DNA, 828 bp, Cannabis sativa
atttctttgactcatattcacgataaattttggatcgattttcaagagactgcctgaatattgtatggagtgtaagagaattggccattctttcaacaaatgtttgatttatctcgaaaaaattgacaatggtgaagaacctgaacttgagtaccagccatttatcaaagattctgctcttccaacttatgatcgaaatgttagaattattatcaatgagcttaataccataaatacaatcattaactatgtgcttaatatttattctctactataatggtatagttaataattaattaatgtattagaggcacataaaagcaccttaaaactataattggcctattaaattataatctactactaattatactcattagcccaataagcctaataaaaccacttaaggttaggtgttggatatataaggggttaatatgtgttagtatgagatgagagtgtgtgtggtgataagaaaaagggttttgctttcataagctcctcttctaccatcttgggatacattgaaggtttttagatcatagcaacaatggagaatgcaaatatgggaggtatgtgtttttttcttttttaatattatttgtgatgctctaaatagagtattgatcttggttgataattatgagtagtaaagattagcatttaatgtgtttttggttagctcataatctatagaaaaattaacaatcggtatctagagcaatatttgattttagagcttatgaacttaacccattttgttttatgatttattttattttcggattaatatgtttgttaataggtaatgtgagattaaatgttgta

SEQ ID NO: 156258 - DNA, 520 bp, Cannabis sativa
agtccaagattcctttcattcgattagccacaaccttagaggcaattttatataaaacattgcaaagcaatatcggcctcatgtcgctcacttgagacgggtttttcttcttgggaattaagacaatgtgagtatcattaatatcagtcgggaagctaccattattgaagaaatcccgaacaaagttgaccacatccgaaccaactatgctccaatgcttttggaagaatgccggggtcatgctgtcaggtcccggagatttgtccggatgcatttggaataatgcatttcggacttcatcctctgcaataggcatcaaaagctgtgcattttgttcactggagacagtcggccgaacaccatttaggatagtacccaagtcaatgtttgatgaatgaaacagatcactaaaatagcttgtaatgactgcctctaaccccgatccccaattcacccatcagccactttcatctttaagttgctcaataccattattcctcttcctagtacttgcaacaga

SEQ ID NO: 156259 - DNA, 902 bp, Cannabis sativa
aaggtaagaaatcgggtatgtatgcaaaagaatcttaccataaaagaaaaaatattttgtcaactaatttgccaaaaaaggactttacaaaatagaaaaaatttattaagatactttcatgtttcgaatccccttgcctctttttttctatgtgtatctacattttatttattaagaaaaatgtagtggcataagtacttaaagtttaaagtttgtaaatgtcataaacctaatgtttatttttagcaccataagtactcaatgtttgtaaagttataatttttctctaatttcgtcagtacagtctctatgttaatatattaatatacaattgttgcttttatatatatagtagttaaatagaacaaatttgttgagtttctttcaagtttcgaattcggccccttgctcttttatttttctatgtgtatctatattttgtttattaagaaaaatgtagaggcataagtactaaagttttaagtttgaaagtgacataaatttaatatttatttttcgcggcataagtactcaatatttgtaaaactgtaatttttctttaattcggtactgactttgtgttaatacaccgttaaaaataaatattagctttatgccgcttacaaacttaaaactttagatgcttatgccactatttacctaatatattaatatacaattgttgctttcatatatatagtagttaaatagaacaaatttgttgagattctttcatgttttgaatccctttgtccttttttttttatgtgtatctacatttcatttattcagaaaaactaaggaagtataaggttcaaaatagatttgaacttatggctactaaaatatactacaaaaaatcttatttttagtcacaacaaaacttgtgacttaaagtaaaa

SEQ ID NO: 156260 - DNA, 550 bp, Cannabis sativa
tgtgacttttagtcaaaacaaaatgttacttgtgactaaaagatagtatttagatacgaattgtcactaatttagttttagccacaatataactattgtgactaaaaatacttttagtttttgtgactaatacctttagcaacggagcttttaataacaacataagaatgataatttataattatatagtcataaccttttcaattttacttacaagttttgttatgattaagattttttgtagtgtatgtaaatcacgaatattaaagatagtacactttcaagcacgaaagttaaaggtatattgaatgagatcgagcatgaggataggaagtcccattcaacaaaatttaatttttctttgtaattatggattgaaatggattgtcattactttacttcaatttccgaccaaagaaacaaaggtgcaaaataaaataaaaggaactgttttccattccttttaaaatgcaaatataggaatgggaatgggaatagaaataggaatgggatggaataaaatttaaaatgtataaaaaaaaattgataa

SEQ ID NO: 156261 - DNA, 879 bp, Cannabis sativa
  modified_base (51)..(63): a, c, t, g, unknown or other
  modified_base (309)..(324): a, c, t, g, unknown or other
  modified_base (553)..(554): a, c, t, g, unknown or other
  modified_base (720)..(740): a, c, t, g, unknown or other
atattttcattattttaatgcccaataattcctaacctaaacctagtggtnnnnnnnnnnnnnatagtgatggctcacacttgttaagagattgaaaacaaaattttggccttcagaaaaattcaagccatcactttcccttctatagttgacctctctctctctctctttccttcttcaagttttcgaaacccttagtgatagagtagtgtccacacacatcaagtggtgcctcaatcatagtctggaagattgtgaagaatccaaactaaagagaaggacatccgggctcagatcttggtgatactnnnnnnnnnnnnnnnnacaagggttagagatctgagcggagggagacattatattgtgctgccaccactgtaaggtttcttatactttatatgtgtttattttatttcgttttagaagttcatgtttatgatgttaaaataacatacttgtgaatagatctaagatcctggtaaaaataaattctaacagctacccttagagccatggtaattgatttaattttaagaaatttggacttaaaacnntttgtatgtgatttggatggtttcttgttgatctgtgtgttatttgatgattgattgatgtttgtaaaagtttatgacaaatatttgaattttcgtttctagaattattttttttggatagtttggaaaacattaagcaattgacttttttacagaactcaatttnnnnnnnnnnnnnnnnnnnnntgattttttgaagatttgaaaaaggacaaggtgaccaccctatcccacgcgtgcgcggatggcccattcactcggccagatgcgtgttcgcacatgattttgtccgagcaacacgcacaggggtgtctcataccccatt

SEQ ID NO: 156262 - DNA, 523 bp, Cannabis sativa
tagaatctaaattatttgataactcaaatttggggccatcacactatgaaattgcaatttaaaatttgttcattctatattattaattgttaatctgatttaatagtttataagaatctatttaggttaggataatgatttaagggtaatttttttttattcattgtgcataagaattatcaacttgatggttcactatttatttatattttatttttttggtggtgataaataaatagtttatgtgaaaatataaaaaagtaaaaaaaaaaaaaaagtgagcttagaatgaggattaatcctcatttccttttcttgtctcactaacagattatgtgtttttcatattttttaattcacctcaggttaaatgtatggcaacaccaacattggaaaaatattttaaaagaaagcttgagtcaccaggttctacgagtaagaatggagacaatacaaattcagtttgtgtggatattgatcttgatgagcttcaaacagatccagggttaagaattcctatttc

SEQ ID NO: 156263 - DNA, 552 bp, Cannabis sativa
aaacgtaatccctaatctccgatcaaaaagtttttcaacttaatacccagaagttgtatttatacccagctaaaccaagaaacccgaaatggacagcagttaccatctgaacaattaaaacctaaaatatctttgctgacgtggactaacactaacagtacgaactccagacaaaatactacgagtcccagacgcaactggaatgcaattggacataatttgtcactacagaaaataatggttcttacagactaacttgagtttgctttgtaaacaaggatggagattgtttagtcgtctggactcacttgtcaacaagatttttaaaactaggtactactgtaatggtacctttttaaatgctgagttggggagcaatccaagtttcatgtggcgaagtatttatgaaactcaagagatcattcaaaaaggggtgagatgcagagttgatgatggttctcgaattaatatagtgttggatccgtggttgcccaatgaagataatccaagagtaacttcgaataatcctgctcttattgatcaaaatgttaa

SEQ ID NO: 156264 - DNA, 515 bp, Cannabis sativa
  modified_base (173)..(175): a, c, t, g, unknown or other
acttattcttgatcctgtatttttgttccaattaacttgttactgttgtaataaaaattgataccaataaagttcctggacgtagtatcacagtaccttgtctaagtgggaaaattttaaaattctaagaccatctttatttggatgacactagtgatagattactatgttannntcatgatatgaactttagaatatatctgagaaagtaaatctaaccattcatatggataaaaataacttatcaagaaaatttgcaaagtctattcgaatgacttaggaaagatacctaatcctcgtgaaatgtttttatggtatctctaatgattacttaatcttaagcaaatatagtacattaatattaatactggattgctatgttgatgacttagtctagaaggaacttatagtttcagactaatataattggtcacaacaagatgtccctgagaaccaatagtaagaggctaagtgtacacttgtgtacggacttaaccagactcctactgttgagt

SEQ ID NO: 156265 - DNA, 889 bp, Cannabis sativa
  modified_base (851)..(854): a, c, t, g, unknown or other
cagtacccccaactaaaataagacagtgtcctcaatgtctaaatatgtatatgataagaacatgagatgagaaatgaaaaaatagagaatatgcacagtgatgattttctaacaaaaacaaatgatagaaaataaactaaaatactgaaaataaagaaagcaattaaagataggaccagtagtgaaagaattcactaaccttggtaaatcgggccgtgaaagagcgtttcctccccttcaggtggtgttaattctaaaaatggtttcaacctttgaccattgactttgaatacattaccagatttaaaattttcaatttcaacagctccgtgaggaaaaacagtacgaacagtaaatggaccagtccatttagaatgtaacttatcgggatcaaaatgaatgtcccaatcaggaggtcgaaataacttttgtggtccagagagtgattgtgattctctaggaattttcacagatcgatcggctaactgaagtgtcaaagatgttggtttcaattcccctagaccaagttgcttataaacagaataagacaacaaattcacattagctcccaaatcgagtaaagttttgtgaatcacatgatcaccaataatacatggaattttgggacaccctagatctttatgtttaacaagatttttatattgaattatggagttgacttgttctgttaaaaatgcttttctcagaacatttgtgtttgtttttgtagtacacaaatctgtcaagaatttagagtaggcaggtatttgcttaatggcatctaagaaagagatatttatacttacttgcttggatacctctaagatgtcaccatactgactacctctttnnnncgggagcaatctttgtgggaatggagcttttggaa

SEQ ID NO: 156266 - DNA, 601 bp, Cannabis sativa
  modified_base (222)..(238): a, c, t, g, unknown or other
actggcctcagagccatgataattgatttactttcaagaaatttagacttaaaacgatttgtgtgtgatttggatggtttcatattgatctgtgtattatatgatgattattgatgcttgtaaaatttaatgaaaaataattgaattttcgcttctaaaattatttttattggatagtttttaaaaaattaagcaatttacttttttacagaacttaatttnnnnnnnnnnnnnnnnngttatgattttttgaagttttaaaaaaagatagggtgatcacacacaccccacacgcgcggaaccgagtttctctcggtcaggtgcgtgttcggacaaggttttgtccgagcgacacgccaagggatgtctgatatccctctctgtgcgcgcggaaatcatgcagggacccctggcgccaagttttctcggctgatcatctagtgggcgcgcgcggatgagtatgcaactgcataccatccgtccagctcacattttttgttttcgattttcttcgatttttcatgttgtttcatggaattaacttccgatttttggtgtagttttgtattttgatttttactttcatatttcaaatctaatt

SEQ ID NO: 156267 - DNA, 698 bp, Cannabis sativa
tattctagatattgtatggaatattgaacaaatcaaatacaataccaaaataaaattagttaaaaacttctcaaaagctccaagatttaatcatcaacccagtacaatagccaaaatagtcattatccactaaaataaaatattagccacaaaaagagtagaaaataaaatgagaatattcgctgaagttgttatcgttgtcagattatcattaaaaaattcgttgaagttgtcttcataactggaaagtcaccattgttagaaattggagttgtcattggtgttagacgttggaatttgatacactgaaaccagttacaataatcagctagttaaaactataatgagaaaccaattattcaaaacaaccgaatcaaaaactaaaatattagagccagttatgtaaaacaacaaaagtaataactaaatagggaaaccaattaccaatacaacctaaaataatcaaaagataaattaaaacataaaaactagttttcttttaaaaaaaaaaaacaaactaacaattaaattgcagaaaccaattatattagataaattgaaacataaaaactagttcttagaaaaaaaaaataaaacaatcaaactacagaaaccagttacattagatagctaattaaacaaaactaacaattaatatagaaacaaaaacataagaagcctaaaataataaaatgata

SEQ ID NO: 156268 - DNA, 667 bp, Cannabis sativa
gagagagagagagagagagttgtagagagaggtgctttctagactttttccttatttttcttccaacttaagtaaataaaaccctttgtttttttttttatttaattagattaatctctaatcagcccacactttccacaaagacaaaagaggataaaaataacataaagattattttaccctctacacataaattgaaagtttaagattattaagagtaatttggtcattatctatcctcgctaacctcctgacacctccaatgtctaacaatggtaccctgctatctaaaacatctaagtcatatgaaagtgtgactctctaatgacccaacgtcgctttccaccgcttccgagcacaatcatagataaacaaaaaatttacataaataacagaataaacatacattaacttaaataaatctccacaatatgcatattatataataattaaatctcatgtataaaccttaattatttaataatctaaagtattaatcataagcagtctttacagtttatacttctcatattattttaaataggatggaaattgaggtaacacaaggaaaatcaaaagcagtttgggattcaacaacacatgagaaatggattgatttagctgtagaacaagtgagagctgacaatagaaatggatcacatttaag

SEQ ID NO: 156269 - DNA, 562 bp, Cannabis sativa
cggaggaggtgactttttctcatcggggtaaaagaccccgtttggcagatctttttgcttatattttcttccctttttgagaagctaagaatcccaacttctaaaaaaagattataagaattttaccaaacagagccaaagtgtcatctattccgagatgaactcgtccttaagccaaataacaaacggagccatataactcgtcatctattattattagagatatgttttgagtttgtatcagacatacatttaatacatttaatgattcttttttagcggtacaagtattcaatgttagtatattataattttcgtcggttggatttcattaacatcttaaacaagaaacatgtaagacacacctaaattattagatctagacggaaattggagtctaaaatgaggaagtctgactacaaatttaagacactaacagagtctgtaatgacgaagttagacgaaaattacagtttactaattgagtacttataccgttaaaaataaactcaaaactttaggtacttgtgtcaaagtatcccttaatgttatttattagtca

SEQ ID NO: 156270 - DNA, 606 bp, Cannabis sativa
tttgtgggaaaattacgactaataatgcagaatcaaataaatgaaactctaaacaatcaaatgattagcaatgacaagattaacaaattgagaacaataatcgtatgaaaaataggggtgaatagagtaatgaaaaccagaaataataaatgcaaaaaataaagaaattaataccaagatatatactggttcaagttcgatagatcgatatgatctatggctagatctactccagttctagaacaccaccgtaatcttcctttattgattgagcaagaataggtacaatacagtcgagacaagattctctgttgagttctcactaagtgtttcaactctcacacttacacccaagaatcttcttcatctataaaagattcttcttacaaaacacaaacacaatctctctcttttctctgcacctctctccctacctctcaatcttttctctctcaaactctcaatctcatctctctgagatcttcttcttcttttttattccagtctctctaaatgataagtgaatgtggtatttatagggttaggatcaagatcctaaagtcggtgactataagaaacgaggttgttaagttaattagaaataac

SEQ ID NO: 156271 - DNA, 558 bp, Cannabis sativa
gcatggggtcttcggggacaattgggaagggccgtatctcatcgcagaaaaggttggtgacgtaacgtaccgactcgcagaactcgatgaaactgcgattcgaagggcctggaatggcgagagcttaaaattttattattaatagtactcgcattgtatagtttatactcgctgtgtatttatacttagtcattttttataaatcctaagtatatgggtatatgtactattgattagtaaagatgaaaagttatgaaagttatgaaatttttcaagtttctaaaaattttctaccttaatacttattactccaagttgtagttaaggtcgcaatcaagatattataaatagaaaaaaaaacgcgagtacccgtgtgctgcgaaaatgttatagatagatatccccgagaggatataaagtctttcaaaagaaacataaacgtaaatttattcaagtacaaagcgcgagtacccttgtaccgcatatatataagaaaaaatagagagtctaacacaagtaaatattaatagaaaagaaaaagttaagcattgggagcag

SEQ ID NO: 156272 - DNA, 564 bp, Cannabis sativa
  modified_base (284)..(288): a, c, t, g, unknown or other
tgtaacatatttcataacttagacagaggattctactcgtagtaggtcgagcagatagtaatgaagcctaaagtcttacatagatggtaggatgtccgaacaagatcatgggtagatattcgaccagctctatcagatagatagcttgcatgcacctattgggaatattttaccaggatctagatgttgggctttgtgccctaaataaaactctatatcagtgatcttttctattcaattatcaataaagaaacagatataatttcattacttgtttaatgtgnnnnntggttcatgtgatcatttatttacttatttaattaattgttgtgatatctttcacacgtaagtgcacatatcgtgacaagttcgtgacaagtagtaaacttactaagtgaggtcgatcccacaaggattgtagttaagtacgttaaaattaaacttcttcttctatttggttaaataaaaattaagaaaagattgaaattaaaatagtgcaagaataagcaattaaattgaataggaaattaatggttaataagaactagggcttcgacttcaatt

SEQ ID NO: 156273 - DNA, 770 bp, Cannabis sativa
tagtttctaactctttttgcctttaattgttgctgaaattgaagttgagttaagcatgattttgttgtagagaaccttgtgatgcatgtgtgttgaaattagtttaatcttaatgctctctatgcttgtttgtgttaaaagattgaagcagaatgcttgtgctttgtttttgagataattttggggttagatttgtgctttaaccctttcatggagctctgattttgttgttgtgtgtgagctgaaaaatgttgttggtatttgactcttgagtataaggttgtgttgatattttgctcaagtttagagcctatattgtgtattatttaaatctgaatttagatacatgtgagctttgattttgagctttaaatgtgtagtttagctctctgttgtggttatctaattctttaagaggttactttgggttggtgcatgttttggagtgattttggtgtgtttgagcatgtaaattcgaagctaaaattgggtttttctgggtttggaacctagtggtcgcggcccagctccttgggtgtcgcggtccacctcttgtttgtggcctgggattcgaacctaggtatcatggccccatgtgagggtgccgcagcccgcccccttatttttggacagattcgaatgcaatttttgaatactcataactttgtgatctgggctccgttttgggagttctttatatcgttggaaagctcattccgagctctatttgatcatctatattttgaatgccaattttatattatgtgaaa

SEQ ID NO: 156274 - DNA, 874 bp, Cannabis sativa
  modified_base (523)..(526): a, c, t, g, unknown or other
gcatcaggttttagcaggggaggtagtggttcggccatggaccagaaaaggaaggaatccactgcaaccagtggctcgggtcagaataagaggttcagggggaactagggtcgaggcgatcgccaaagtggcactgagacccgatacacttacccagagtgtcccagttgtaaaaggcaccatctgggggagtgtaaagggcaggggtgctttcaatgtggcatggaagggcattacaatagagattgtccccaactcagagctgaggcaccaaagactgcagcgaaacacactccaggaagggtattcgccataactcaggctgatgcagaagccagtccttcagtggtaataggtcagctctcggttaacaactcttatttctctgtgctgtttgactttggggccattcattcttatgtggcagccagaatttttagtaaattggatagatcgcacgatagttatgaatcaaggtttggaacccttttacctggaggagagttagttatctccaaaaggnnnnttaggtctatgccgatcaggattgacgatagggagttaagtgctgacctaatagaaatgaatttagcagattttgatatcatactgggaatggatttcttgtccaaatattcagcgagtattgaccgtaagagaaaaatggtaatcttctaaccagaaggtgaagaaccgattgtttttgttggttcagttcagggatctcggatctcggtgattttggtcttatcagccaaagaattattgtgtgatggatttttagggtttctggccgtggtattggataccactcgccctaactctgttcggctagaagacatcaagggggttcaggaatttttagatatttttc

SEQ ID NO: 156275 - DNA, 510 bp, Cannabis sativa
cttctatataatgttggatcggccaacttctctttctcatcaagcccaagtttgagatttgcttccattggtgtactcactggtttggaacctagatagcctagatcttccaacaatagaagtgcataaggtctttctaaaacaaagatccctttctcagatctagcaacttcaagtcctaggaaatacctcaaatttcctaagtcttttagctgaaatcttgtgtgtaaccttgctttgagagcttcaagttccactaaattgttgctagcaagaattacatcatcaacataaaccaatagaaatatgaaatttacattgaaatgttttatgaacaaggaatgatcagttgctgaatggtgaaatccttcatcattcaaagcacttgagaacttggtaaaccattgttttgaagcttgcttcaatccatacaatgacttttgcaacttgcatactgcatttggtggtaactcccccttaagtctttacccttgaggtatagacatatac

SEQ ID NO: 156276 - DNA, 639 bp, Cannabis sativa
  modified_base (220)..(226): a, c, t, g, unknown or other
  modified_base (418)..(426): a, c, t, g, unknown or other
  modified_base (562)..(562): a, c, t, g, unknown or other
aagataacataatcaaattttaaaaataagataattaattaagccaaaaattagatttttacctattttcaagcttcaaatttcactaaatttcactgatatcttaaattaatttaataaaattctaattactttaattctaataattagatttaaaatatgaaaaacaaaaatctgaatacaaaattacacaaaaaatttgaaattaattccatgaaannnnnnnaaaaaatgaagaaaattgaaaaaattgtaagttgtacggatggtatgcgttgcataccatccgctcgcgctgcctgggatgcaagaccgagaaatctcggacaccctcttgtctgaggcgcgcgtgaccgagtgatcactcggatccgcgcgcgtatggggtgtcaccacccctaacttttttcaaatcttnnnnnnnnnataactaattcaaattaaatcgagatcaagttctgtaaaaaagtgaattgcttaatttttcccaaactattcaacaaaaataattgtagaatgagaatgtaattatttttcaaaaaaatttcacaaacatcaatcnatcatcaaataacacacaaatcaatatgaaaccatccaaatcacaaacaaataattttaagtccaaatttcttgaaa

SEQ ID NO: 156277 - DNA, 506 bp, Cannabis sativa
aatacatagcgaggtatcaacctcacaatatgtagaaaggtgttgacgaggcgaattggctgttagaacacttagcgtataatatgcgttatactaactaagtgtaacagcttgatccatagataatggatagcgagacatccatcttgctatcggaaggcatactccgggtacctttactaatcagctccagacatctttcaatgagctccactgctccgtcgtgtcagctctctcatacagaagctgacattcaaatgatgttggctactgaagttcatcttggcaccaagaactgcaatttttaaatggagcattatgtcttcaacctcggaaagacatgggaaaagctccagcttgcttttaggattattgttgctattaagaacataaaccaagttgttcaagtaccaagcgagatgctccagcaagatacactttgcagcgtgtcttaatccacatcagtgttgacccattaaaatcggtttaaatcacagttgtatgat

SEQ ID NO: 156278 - DNA, 656 bp, Cannabis sativa
  modified_base (48)..(65): a, c, t, g, unknown or other
acattggaacgcggtgtatggctcagtagaatcacatcttagtatttnnnnnnnnnnnnnnnnnnttgttagacattgagaatgtcaggtttggtctggaattttgaatttcccaaaataccctttagagccatttcatgattcttagtgtggaggggcaaaatggtcattttgcctcataagcttttgtccttttgtggatttaattaaataagttaaatcagttttttctatattgctttggctgaaattaatgtagtaaaaccaatgtttatttcatttattcaaaaataggaaaattagaaaagtttggaaaattctctctttcaagctctctctctctctttcggctttcttgggctgttagggttggatttttctacagaaattcaatctttctcagctacttgtgtagtaaatccaagctaaggtatagctcttgcaccttctttttagtttcttgtagtttaaggaggcaatgtttacatgcttggtgtttttgatgttgtagctgctgtttatgtttattgttgatttgtaaaaattaaattgtgattagatatggagatttaagcaggttttgtggttgttagttggttttatccaagtttggagtttgaactcaaaactttgggttttaatggtgaaatggtgtt

SEQ ID NO: 156279 - DNA, 796 bp, Cannabis sativa
ccacaaaactaaggcatcttcttggaattgaaatgtggcacataccactctatcattccccgtgatgcccatgaaattcaatatcctagtgatcacagttagcctttgctcagctttcataacatcaggacgtcccaaaaaaactggaggtgctagcttacggaacctttcatacagaggttatatccaattcattacaaccactggttcggcctggacagcaggggcaggtgccactggaatttcaagagcaggcactataggagcaccctgctgtcttaactgtctaatcacttcttcttgttcgttgattttagtttgcatttctgcaaaccggttttcccaattctgggcttcctgagtagcttgggcagcctggaaagcctgtggcaggttagcatcaccccgaccatgtgccctacccctgggtcctctacctcggccccaagcatttgggggaaactgagctccctaaccttcatttgacccgaccgagttgccctaactcctggttatattgcctggcgtccatctagtctgaacaaccagcgtaaccaagagctagcaaggtcagatcatgatcaacgagaacttactaatgctgcttatttggaaattaaaaacatgcgcttattctactattaggcaactaatatgcttcctaacaggctttacttaaaacatactattaatataagctattaacgcaataaaagcttactgaaccgtggaacgagctaactgctgatgatgattgtacatgtcgcgacgatcttcggaagacaacctggcggct

SEQ ID NO: 156280 - DNA, 786 bp, Cannabis sativa
tgatagtgactcatcactggatgtgttggtgggggaagtcttgaaggagatcaccagggtaagtattttttgatacttcccttttaactttctatactttgctccacatgctgactttttccctttgtgtaggccagtttgaagttgccttacacttactcccgggctaaatctgcaacttccaagagtgtggctctgttcgacacctttagggtggaggcggacttggcaaaaaaggaagctaaggaggccaaggcggacactggagctgttcggctgtagttggacgaggccaacaagaagttgtttgctgccgagaagaagatcttcgtgctaacaaaggaccgcgaagttgctggtcgctttgaggagaccattgagatcttatctcctgaagttaacagtcttcaggatgagaggagttctctatggcaagttcttcttcggctgaaggaggagagggacgccaagatggctgaggcggaccagttgaaggagaaggtcaatgctttggagacagctggcctgaagctcttctttgatttctggaaggctaatcccaaggccaattttgactacttgggtgaggcaaaagacatgtaccttgtgtactgcgcggcccaagttgcttatggtgggaaagaggccgctgcttaaacctctggccaagcccctggcccggttgttgatgcttctcctgttcgaacaacaaatcctccttctccagttggcttagaagaaccgaaccaagagccttggactccagctgtttaaacacttctcttt

SEQ ID NO: 156281 - DNA, 783 bp, Cannabis sativa
  modified_base (322)..(324): a, c, t, g, unknown or other
  modified_base (462)..(466): a, c, t, g, unknown or other
acatggaaaatgtacacaggaagagaagatcctctttcccacctcaagtatttcgaaatgcaaatggatttgcaaggggtgcgaggggacatgcgttgcagaatctttcctgctaccatgtcgaaagccgcccagcaatggtatttcaagttggcccctggaaagttcagttcatggaaagccttttcttcggaattccatgcacagttctccttctcacaccaacttccgttgcatctgggagacctagttgaagtcaagcaaagaccaggcgaacctctccgagcatacattagtagattcatgacggaggcgaccaaannntcacgggtaactgaagatggaaagttctctgcgatactggggggcgttgaagtcctcggtgaactttggaaggatataaggaagaacgggccggtagactcaatgagtaattttcttgaccgtgccgaaggcttcatnnnnntcgaagaagccattcaacgagcggaaggtgagaaaaagcctagcaagctaaaggctccttctactgggacatccgcccaacttccccattacccaaataattcaagctcaactggtaagcgtaccaacaacaaccacaggcaagggaatgggaagaagggaaacttggccgacaaatctgaacaagctccccgggagaatcaagcaaagtacactgcgttcactatcttgactgaagaggcaaaaagtatttacatggcaactcagccgctggcaccatataagaagcccgggcccatgaagaaagatgcaagcaag

SEQ ID NO: 156282 - DNA, 887 bp, Cannabis sativa
ggtctgtgccacattccagttccaagaagacactctggtgttgtgggacatggtgtccttgactcacgatgttactacaatgacctcggaaatgttgcaggaattgttcaatacgaaatactacaatgaggcaatgagaagtgcaaaaaggaaagaatttactcagccaactcagaaaaaaaaatgagtgttattgaatgcacaactcagtttgaccgcttggctagattggcctcgtgaatcgtgccaaatgattttagcaagaaagagaaatacttggacgggttgaattcgaaaataagacatgacttaatgatcactacggatgataataccacctatgctgatatggtgggtaaggcactgcgagttgagggcgcagtggagtgcaccctggagtctcaagagactcagcttgttggtggggctcctactcctcctacctcaggctttagtaggggaggcagtggctcgaccactgaacaaaaaagaaaggaacctacttcattcggtggctcaagtcagaataagaggttttgagggaaccagggctgaggcaatcgtcagggtagctccgaaacgcgatacacttacccaaaatgccccagttgtaaaaagcatcatttaggagagtgtagagggcaagggtgcttctagtgtggtatactaggacactattaaaaggattgcccccaactcaagaaggaagaacagaaggctgcagcgaaacccgctccagcaagggtgtttgcattaattcaggaagatgcacaaactagcccctcagtggtaacatatcagctctcagtcaacaactcttactactctatgttatttgactctggggctactcattcctatgtggcagccataatctttagtaaatt

SEQ ID NO: 156283 - DNA, 520 bp, Cannabis sativa
  modified_base (230)..(237): a, c, t, g, unknown or other
  modified_base (465)..(473): a, c, t, g, unknown or other
ttttgttaatatttttaaataattgtctaaattatattttaataaataaattaaatttagatttttaaaattatttttcttttttaaaaataattgattgattgctaatggattaacaaaaattgaagaaaaaatatgttaaactaacaatttttgtggaatatttacatttaatataaaatagatgtaatataataaagataagattaaaaataataataataataatnnnnnnnntaataataataatatatttttaaatatgtgtaataaatttaaatttaaagcataatattaaatatttttagatgtataaaaagatttaaatttaaattacaatatttaaaaaataaaaaaaaaatcatcacatttaatatgatatatatatttataccatcccctcatggccaattattcatgcatatatatatactagcaaaaattacgtgcgaggcacgtatactnnnnnnnnngctagtttttttctatgttatttaaaaatgatacaattaaaaattaa

SEQ ID NO: 156284 - DNA, 547 bp, Cannabis sativa
tggtgctttggttgatatttgatattgcatattctggtgtttgataagtatcttatttttgacatacaaagagggaaaatattgtgattaattgcaaaagatttttcccaatattagagccaagattgattggtgttgaattcttgtgtgttaaaaatggatgattcggatggaataatgatgaaatgaacttatcaaattattctgtttcaaagcaattgatggaagatttgctctattgtaaagatttgtacaaacctattaaaggtagtgagaagctgtcaaagttagatgatgaggaatgggaagttcaacatagaaaatccattgcctatattagatgatggatggatataaatcttcatgagcatatctctaatgaaaccagagctgatgtcatttggaaaaagctagaaaatctctttgccaaaagaacgactagtaataaaatttctctacttagaacttgtaaatttgacgtacaaggatggtggtagtatggttgtgttgggttttataccctaaattaaactcatttcaatataat

SEQ ID NO: 156285 - DNA, 583 bp, Cannabis sativa
attttaaaatggtagattccaaaattgtgattagtcaaattcaggaattccacgtgatcttacatgagatacattctgagtaggggtgggcaacatccaatccaatccaattgaaccgaaccgatccaatccaattcaattacaaaaaattggatatccaattacaattggattggattggctcggttatgggatgtcaatctcaaaatttaattaaaaactgattcaatccaattacatttatatatgttaaaaattatttatatgtatttatataataaaaaaatataatatgtattaattatatttttattagatttaatttttttgttaaatttgtaacagttagttgttttgtgtatttatttttatgatgtttgttttattttattacttagaaatattgttgttttaattatttgaaacttttagttgtattacattgtaataatagtaatgcttatggagtattaaatttctttttttaattgaatcaaacttaaataaaaggtaatatttaatttttacgtagtttttcttcatatttttatgttaatattaaaatttgggcgcgtaattggat

SEQ ID NO: 156286 - DNA, 524 bp, Cannabis sativa
  modified_base (237)..(245): a, c, t, g, unknown or other
tcaatatcttcagctttctttttgtccttttttgcattactggggaaggatccccatgcaagtgacaatgtccgttcataagcacgcaattcagcatcaaacttgtttctgtcggacgagttccaattgttaacaacgaattggttaaactcaggtgagaagctgttgagaacaaaatgaactctttgttctctagataaaacacttcacaacatagctgctttctggaatttcatnnnnnnnnngagcaagtgtgaagtgatactctaaccaggagtcttcttcacacttttaagttcatttcgaaagacatattctagataaggattggggtttttgttgtacattttgacaataaaaatatcaataaacagatataaattattggctcaataaattcgtacataagttcagaaaataacaggtaaaggaaatatgtttgcaaaaataccaaaaataaatatattaattatttttcaaggttttcaacataatgaaatacaatgtcccaataggtgagagtc

SEQ ID NO: 156287 - DNA, 523 bp, Cannabis sativa
gatataccttgattcaaagtgttctaaatcagctagagattggagaaattcagctaagaaaaaccttctccttgctgggttgatggttcgaaagaaaaagagaggaagaatgagaagatgcacctttcctctaagttccttcaagcttaagataaatgtccaatttcccttttctttctctttgtttttttttaaacttatattcagcctaaaataataatcccaaataagacaaagtaacatgccaaaagacttccttgcccttcaagctaaattatttactattaactcctaagggtaatttggtcaaataacaaaccccgaaaattctaactcctctaaaattctagaattacaacatatgactctctaaaaggcccaacgtcgcttcccacagctaccgaacacaaacacagaaattttgggtaatttacattaaatagcataaatgatattaaatttatttccaaaatatacctttcataattattaattaatttcatacataaaccttaattattta

SEQ ID NO: 156288 - DNA, 626 bp, Cannabis sativa
ccgtggattcgctatcgcgaatctcgattgtccctggttcagcgagctcctgaaccatcctttctatgtcctcggaggaaagcggacctaacgtcgcagttctaacaactagtatttctgtctcagaaatcgaagtcggaataaaactatcctcttggtcccggtcatcagcgaaggcataacctccagagccaagcatttggctgtcgacaagtcgctcatctgacgacaagtcgctcatctgaaaacaagtcgctcatctgaaagataagtcgctcatctgaaagatagaagatcttttcagtgtggtgaaagtgcgagaataatgcaagtgacctcacccgcacaaaaaatataagaattccttggaaagttggttcgacctctcaagaaatggttgggtgtctctcaataacctaatgaccatgtcggttacatgggtattaaggtactgagatgcacccaccatttcaagaaacccagccaaccctcccaaggtgtaaatcgcacatgtgcaattagtagagtgcctcaaaaaatgactgggtgtatcccaatgacccaaggggcatgcgttcttaagcatgaccatggagttactgggaaacacccaccatttcgagcaa

SEQ ID NO: 156289 - DNA, 811 bp, Cannabis sativa
aaaatatactataatccgactaaattgactaatgtactgtgttaaattttcactgttattttttagctgtttcactattatttttaattttttgattttgttgttttacgattgtttaaaaaaaatagtatttttgtaaaaattaacataaattttaatatttttgtaagttccttaaaaaaaaagggtcaatgagtatttgaattatctttagactaacctattttgttttggaatgtgactttaaatactattttttttttaattattattatttgtttattgttttttggtttttagtttttttaaataataataataacaaaataataaaggttctttttttaaaaaaaaaattaagtctctctaaaacaaatcaaaactaaaaattacaactatataattataagaagaagtactgaatttttttgaaaaaatcactgagaaattcttaaaaaatgtgtttcatcagacctcttatctatttaggcattcattagagcttttaagtgtgtatgttgtagttatttatgatcactagtaaatttttagaaaattttaaattatttatattgtcgaaagtaaagttcaaacttcaaagagttatttattatgtatataaaaagaatagtcatgattttaattaaatatttaaactttattttttgcattgtaaattattaagttttctaaaaatttattggtgggtctaaataactacaacgcacacaattattaaaaaaaattaaaaaactctcttgaatatcaaaatagatagatgaccaaccaaaatatatgcctactacaaata

SEQ ID NO: 156290 - DNA, 714 bp, Cannabis sativa
ataagaaggatctaaacattctaacatccccctgggcattagatgattttaggttcaactttgttgttaccccttctagcggagtacgggaaatcccgcgacccttaggatctctgatggtggcactgacagcaatagcgaaaagcactatgcccgggtcttctaagaacaggccaattaggaagtgtgactctcgtggtgatgatcgctatttttctttcttattgcatttcttcattaatttgcatgttattatatgttactaatcatttttgtgtgttttgtagatatggccagcctgttgcgacaaacgacctaccaggagcaagagggttccccctctaatgcctctcccatggctcctcttggtaaggttaggaagactaactctcgcttgaccatcgatattcacacccctattgttggatcgcctgtctcatctcggccgcctcctcctgactccgcatctgggtctaccaatgatacaatcctcattggctcgacgtccacgggagtcgagtcacttgctgcactgtccttagaaggccgttgtcaagatttgtccacgcgtttgatggtggcacgtagccacaccgagggcctcatggacatcatggacaagaccatgtctaagcttaattgtttgtcccctgccaagattgttgctcttgggtgttgtaatgaccgctttagtaatttggattagtaaaggca

SEQ ID NO: 156291 - DNA, 714 bp, Cannabis sativa
tttttttttgggaagaatcattattgagccctgcaactttgaatggtcaaaagaatagaatttatcagcacatactgctctgcctaggaaggatttttaaagctccaagaccaaatcataaccagtaccatcttttctgtaaggatatcacattttgcactcgagatttgcttggagcaaattgggataccgaggtatgtaaatggcaacttactttgcataaatcctgaggcatctacaatttgtttcacatcatttttatccattccagaacagtacatggtagtcttccctgtattagcctctaaacctgaagatattgaaaacctcttgagactttttagcagtaaaaaaatagaccgagcatctccatgacaaaaaagaaggaagtcatttgcaaagcacaaagagtaagcttaaggtcgaagcacctgtggtggaatttgaattaagctctttttgaccccttatcatttttataatataattgtaacagcttacaacactttaaaatttataatttactaaacacagctcagtatttttctacaattttgctacagctatttttttctcacaacacaactacaactgctttttttctacagcaaagttgtgccaaactagtcgtgaatccactatgatcttcaacgacaattacaagaagtcaaggtaatattttcttgacggttagtaataacacctaaaactctc

SEQ ID NO: 156292 - DNA, 618 bp, Cannabis sativa
  modified_base (471)..(503): a, c, t, g, unknown or other
  modified_base (570)..(576): a, c, t, g, unknown or other
ccccccgagataaccaggatatcctctccttcaataggaggaggttgtaatccctagttgcttaggttgttgggcagatcgggctggttatgtcccctgtctcttcacatattgcttgaagtggcctcgcgcgatgagacattctatctcatctttcaactgacggcactcgtctgttgtgtgcccaatatctttatggtacttgcagtacttggtcagatctcttttatgcctcgcgtgcctcatgggctcaagtttactgaaggcaaccttgtgatcatgcgcgaggtaaatattttcctgagtttcataaagctcggtataaatagtataaactggcatgtatttgtcatgcttcttttgtttcttcttgtctttggacgaccccttagagtcgtctttcctctttcagccagaggcccctaagttataaactttagtcgagacagtactgttggaaattattttacnnnnnnnnnnnnnnnnnnnnnnnnnnnnnnnnntaacaccctaaatatgaacttctagagcattattttacttgtatttggagaagtgttatgttctttnnnnnnnattggttaaagtaaagctcaggtcggatgcatggagtatgca

SEQ ID NO: 156293 - DNA, 730 bp, Cannabis sativa
  modified_base (700)..(705): a, c, t, g, unknown or other
aaaaaaaaaaaaaagataaaaaaccgtggaatggtgatgtttttttaattagttttttttttttgaattttttttattaattattgaattaattgatatttagtgtgattaaaaaatatgaaaaaaggagaaaaattttagagtagaataaaactattttagagtgccacatcaccgcctcatacttctcttttatatatatatatatttatatatatagatagatagattattatatagaaaatataaattaacattttatttacaaaaatacatctataaggtaatgacaatatttatacctttaatgtgattttaattactaaaatattacttacacaatcagacgatggttgcagggtagttgttgcgtggttgcgcagtggttgcatcagacaaagatttcaaccagacgatggttgcagagtggttgctaggtggttggccgaaggttgcatcagacgaaggtttcaatcagacgaaaatttctgggaaattgttgggtggttggccaaaggttgcatcagacgaaggtttcaatcaaacgaaataactgttagcaaaatgtttatgcaactataatgcaactcttgtaaagcattaaaaatcagaacaatgttttcacatgcgtaactcttatctacatgtctctttatgatttaatatgaacaaatacaccattagaaatttggaaaacaannnnnntacaccaggataaatattttactat

SEQ ID NO: 156294 - DNA, 1075 bp, Cannabis sativa
  modified_base (530)..(535): a, c, t, g, unknown or other
caacatattgtgaggcaacaaaagtttcgagtggacaaaagagtgcaaagaggcctttcagagcataaaaaggcatctcgtaacacctccagtttcggcgaaacccataactggagagacattatttctctatttagccatctcagaagatgcgattagtgcaactatagtgcgagaagagggcaagcactagcaacctatttactacgtgagtaaaagattactaggggcagactatagccatactcgtgttatgtctagtccatgtgtctcgcaaactatagccatacttccaggctcaccccataaaagtgttaaccgatcagcccttgagacaagttttatcaaaaccaaatacttttggaagattgataaaatggtcaattgaactggagcagttcgacataacatgcaatcctcgaacatccattaagggtcaagctttagctgacttcttgatagaaggtataactcaaaaagaaatcccacctgatcatcgagatgtggaaacctggaagttatatgtggannnnnnatccaacgaacagggttcgggtgtaggggtgatattaatatctccggaaggctttaagtttcactatgctctgaggttccaatttgacgcatcaaataacgaggctgaatatgaagccttaattgctagcttaaagatagcagaggccttaaaagtaaaaaatctcatttgtcataatgattcacagctgatcgtgaaccaagtcctcagggaataccaggccaaaggattgaaaatggaaacgtatttagagaaagttcggaagaacttggaaagattcgattactttaaaatcgaacaaattccgagacaacaaaactccaacgccgatgccttagcaaagctggcctcgcagaatgacttggatgaattaaatttgagatggtggttactctgggggtggaggagttactctataataattatagctctaccagagaagattcataactttgtaaattcgaaattaccagaaagttattttactaaagaaaattctacattgtattatctcagttccatattttaaaatatgagaga

SEQ ID NO: 156295 - DNA, 503 bp, Cannabis sativa
agatcaaggagaaagattccttttcttatagctcttacaaccgtatctctgaatatataattcttagataatagtatagtcttagcttaactacgtttcgaccgatcccctgcccactgaatatgcatcactatttatagggctaggaggcttgaggaggaagagtttcctctctcgttacaatgcgtattgttatcccaaatttggcactctgacatggcatcacgagaatggtgacatgtggagtccacttgggagcatctgctcggaacgatagaccgagcaagatgcctcgctagcacatccagaatgagatattcaacgagccatgcagggcgatcaacacttagcgaattcagctttcgcattatgagtcattagctcaatccctacaactctgccaggaatcaacacccaaaaaaccatcagagacgcaaccgaattgcaaaatctccatgcagcgctcggactcatgcaaagtcatagcaacactgtgcatcatg

SEQ ID NO: 156296 - DNA, 513 bp, Cannabis sativa
tacaatgctatggatacaacaaaagaaaaaatagcaatagctttgagtggagaagaaaaggattacaaggagatatgagaaatcatagatgagaatgggaatttcagttgcatatacatttgcatgccactgcgtactttttgaatccctgttgtcattattcacaaggattttccaaccatccagaggtcaagttggatttgtttcattgtatgaacagatttatgccggaccttgaagacagaatgaaagttgacattcaatgtagcaatttccacaacaaggaagggttctttggactcaccttagctcaacaaacatttcaaaaacgatcagcaggtaattaaatgtctaaatctatttctaaaattttttcaaaatgtgtagtagtatgaataataaagttaagtaattacttttttcttttagtgaaatggtggactcaatatggagatcaaacgtcggagttataaaaatttgccatcaaagtattgggtcttacttgctcggcat

SEQ ID NO: 156297 - DNA, 773 bp, Cannabis sativa
  modified_base (430)..(433): a, c, t, g, unknown or other
ttgttgtaggaaaattctatcaaaggtaagtatttacaccaggaaccctcaaagtccatgacacaggctcatagtaagtcttctaaaatctgaaatcttcactctgattgcccatcagtctgagggtgaaaagttgtactaaattttagctttgtacccatacctctctgaagacttacctagactttcaatgtaaactttggatctctgtctgaaatagctcattttggagctccatgaagatgaactatcttcctaacatacaactctgcatactaatccattgtataagttgtttttaccggcaaaaaaatgtgctgacttcgtgaaacagtccactatgactcatactgagtcatacattctcgtggttctgggtaaaccttcaatgagcttaatttgggtattgtgagacccgaaatccaagcannnnactttgagctcaagcccgtcatgtttcaaatgctccaaacagttggtcaatttggtggggcaccaacggaagatcctcacctccatattcgctcatttttggaggtgagtgactatttcaagctacaagaaattagtgaagaggctttaaggttgaagttgttcccatttttcttgagggatcaggctagagcatggcctaatactcttcctcccgattcggtgactaattaaaatgacttggctgaaaaattcttgagaaagtattttttttccaacaagaaatgcaaagtttcgaagtgagatcatgtcctttgaacaattggaagatgagaccacta

SEQ ID NO: 156298 - DNA, 553 bp, Cannabis sativa
  modified_base (192)..(209): a, c, t, g, unknown or other
ataaataaaatctatgtctaagagtcaaaagacttcctataaatagccattagaaaaaaatgcgtccagcatcttacaaaagtaagctacttgcactagagtaagtaaattaccatgtataccataagccataggtttagataatctcaaacctataatactagaatcaagaagttttgttaagtccattgnnnnnnnnnnnnnnnnnnattttatttcttgtccttgtaataaaaaacttttgggttactccatatgaatggttttaatcatagttctcttggctttacttcttagttcattattctgactatccattacttgttgaaactaacaataaatttaattacgagtgtcttccaagtcataacaggatgagttccttaaaactctcccattacaacaaggtaccgtgacttactgtctaagaccactatgtattgacctcgtcggttgtatcaatacaacagaggcagtgggaccatcttatatatataaaaaaaaatgatagaacacttttagaatcaagaaaatatatctcctctactttgct

SEQ ID NO: 156299 - DNA, 523 bp, Cannabis sativa
  modified_base (374)..(380): a, c, t, g, unknown or other
ggattcatagttaacgagaggggcatcgaggcaaatcttgaaaaaattaaggcattaatagacatgccatcctcgacaaagcctaagaaagtacaggccttgacagaaagaatggcgacacttaatagattcatttcgaagttaactaataagtgtgtaccgttcttcaacgtattgtgaggcaacaaaaagtttgagtggacaaaataatgcaaagaggcattttagtgcataaaaatgcatctcgcaacgcccctagttttggtgaaaccaataactggagagatgttatttctttatttagccatctcagaaactgtgattagtgcagctatagtgcgagaagagggtaagcaccagcaacctatttactnnnnnnntaaaaggttactaggggtagaatctaggtatccccctctagaaaaactcgtgccctgtctagtccatgcatctcgcaaactacggccatacttccaagctcaccccataaaagtgttaaccgatcagcccttgagacaagttt

SEQ ID NO: 156300 - DNA, 856 bp, Cannabis sativa
  modified_base (692)..(692): a, c, t, g, unknown or other
ttgaaaaataccttttttttttttgtatccattaatcaaaaataccctcataatatattttattaaaatatattcacttttttgagtgggttgtctaatataacctcactctctaattaattttagcatataatttacattaacctaagggatctaatggggacatcatctataaaagtgaatatatcttaaaaaatataaaaatgaaggtaaaaattaaaacaaataaaataaagtaggtatacaatgtaatttcctctataaacttttatatacaaaagtcattaaaactagcttagtggtgagggagggatgggaaaaagagagaggtcatgggttcgaatccaagacctttaagctattaaaactattaattaattgtaaataccattacaatacactaaaaaattaactttggtatacaaataaaataattatattttcacgtattacgttatcgtaccaaaaaaataatgaacggccaatactaaccctttgggaaaataaagttttaattttatcatatactgtaattaatcatcataactttttaagggctcatttgatacgctgtattgtattatattatattgtattgtgttggattagattgtattgtattgtattagtattatttaacacaatactatgttcgagattgacttgcattaatagattgtgtaaagttatantatattttcaatacactcgaccccaacaccaactataggttaggttcgggtctcagtccagttcggggttcgagttttggtctgggtttgagtttgggtccgggtccgagtttgggtccgggtccgggcccgggccaaagattggtgttgaccccgaatccttt

SEQ ID NO: 156301 - DNA, 727 bp, Cannabis sativa
aggtgtctagtctaaggcatactaaagcatatctgagacctctcactattgatttgagaaattccttcgtgactttatcttttctgggatagtagaaacttttccttagatcaatgaaatctatatctagaagttgaaaagcttctatagatttagccactagaaaagaaaatgcttcagcaacttactaaagtaagttgcactagagtaatttattaaccacgtataccacaagccataggtttagataatctcaaacctataacaataggaacatgaagttaactaacgaaattcccttcattgtccttgtaatagaaaacttttggtggttccacatgaatggttttaaccatagttctcttggctttttcttcttagtttcttattatgacaatccattacttgtttaaaataacaatggattttcatcacaactgtcttccaagtcataatagggtgagttccatgaaaccctcccactacgataaggtatcgtgacttttgtctaagaataataaattgtattgtcctcttcggttgtgtcaagataacagaggcagtgggaccatcttatacagaataagatgatagaattcagaattgtgtaatggttgtgtacttagtataaaccattacaagattcatggatgacctgatcgtaatcttaagaaaagctagaactgttagctattctaaatggttaggggtggaccatcccatagtc

SEQ ID NO: 156302 - DNA, 1028 bp, Cannabis sativa
tttttgacacgacacgaaattggtacgagttcagaaggcacgagcacaactaggcatgaaaaaaatacaagtttaggcacgacacgacacgatacgatactacaaattggcacgacacggtacgaaaatatgcctttaagcacgacagaacatattaaaaatttataataatagtaataatatatggatttatcaattaaaaataatttaaaataatgataaaacttaaatataatactgaacattataattctataattaaaactattaaattatgaaaaattaagattattatattaatttatttatagggcgatataaatatttgagtatttataagtaaatattcgaatcctaatgatgttaataattttttttgtatgattatctataaaatattgttaaaaagttatataaatatagctaaaattttaaaatgtacacataatttagtaattgtaaaaaaaaaaatatatacatatatatgaaaaaaaaaacacgaatttaagcccgaatatgaaaacgagctggcctgtttaaaaagtatgggccgacacgagcaaagcacaacactaatccgagcatgccaagaaaatatcaggcatacgggtcgtgtcgagcctaccctttaaaatgttagcacgacacgacacaacttatatttttctgtggcacggcatgacccgttttttaaaaaatacagataaatataagtcgggtcagcatgacacgcacgaacttacaacactaggttgagcaatgttttcaaattaagtttttgggaaacatgggtcatggtgatagtgaatatatttgctaaaaagtttcaacaagacatctgttaaaatcttgtttttagtttgggtggcgtttggtaacacttttatttttaatttttttaatcacaaaaatgttagtaaaattttatttttgaaaaataaaaatgtgttctataataacttttgtttttcaattttaaaaacagaaaatataattgtgttctgtaaagttcatttttatttttattt

SEQ ID NO: 156303 - DNA, 700 bp, Cannabis sativa
tacttaattatttctattctaatgaatttaattaaatagaaaattatatttaagctggaaatttttcaatttctgatcaacttaaattacaattgtttcaaagtatattttattttattttaagaattattttgttacacaatttcaatattcatttttttaatatagatatttcgatttttttttcaattttgaaaattagattaagttgaaaattaattttagatcaacttaaataaagtaatttttattaatgatttaattaaaataaatagactaaaatatattattttaattaaaaaataagtaattagtttatgaattatctagatagatattttctaggtagacttttagtatttttctagatatatttaattaattaaaatattaatatttaagttgatttgttctggacacttaaatatttgatatttttcttaagttatttaattaaattagaaaattatatttattttgaaaattaatttatttaattttaaaccaacataaattagaataattttttcagttttattttattttattttaatgtgaatttcaaaaatgtattatttttaaatacattgaattttgaattttgtcatatatatttaaagaaaattatatttgaattgaaaataaattatttgattaattttggaccaacttaaattaagtaattttcataacatttatt

SEQ ID NO: 156304 - DNA, 729 bp, Cannabis sativa
ttgtctagtaattcatcaggagaggtcatacctgatagttccaaccaggttaacggtgtcattccacctgtcaaccaagcaaatcaatcattaagacagccaagtgcttctgtattcgaaaggttggggacaaatcatgacctaaggagtgacctgaacaaaaggagaggagtagacgatcagattgtcacgacgatcgtacaacccggagcccgtgctcaaattttgtctcagaaagatactgatgtgattcaaattgaccagaatgccaagcaggttagcctagccatacaggcacaactagacgaactgaaaaatattttccaaggcatggctggaccgagcacgtggaacgcctttttctccttagatcaatcttctggcgttgctccacaagtttaaaattccaacatggaaaaggtacacaggaagagaagaccctctttcccacctcaagtatttcgaaatgcaaatgaatttgcaaggggtacgaggggatgtgtgttgcagaatctttcctactaccttgtcggaagccacccagtaatggtatttcaagttggcccctagaaagttcagttcatggaaagccttctgttcggaattccatgcacagttctcctcctcttgccaacttgcgttgcatctaggagacatggttgaagtcaagcaaagactaggtgaacctctccgagcatacatcagcagattcatgacggaggcgactaa

SEQ ID NO: 156305 - DNA, 618 bp, Cannabis sativa
  modified_base (471)..(476): a, c, t, g, unknown or other
agagtcagatatctgggttcgagcaacgtcaatccaacgagtagctccgatgaaggcacttcagcagacttgaagccaaaaacctctttttttcgctctgagcttacgaagggtggtgaaaatgagtttatgtgccaatgctctttggtatttataagcatgtcacgaaaaaggagtaatcattttaaagaaacctcagacgcctcggttccccctaaaagcgaatatgggaaataaaaaataatcaagtgcagccgtcaaccgtggtgagagaaaatttgatttcgaaatattaattgtcagagaattaattagccgaaaaccgaagggacaaccagtcagtctcacatcgagtctcggacagacgcgcccaacacgtgtcctcatccaaaggcagaagcagctcggataaagtctacacgcaacttcagaagtcccatacagactagggggcaaatgttatcccaattnnnnnnctctgacgtggcatcacacgatggtgacacgtgcaatcaacctcgagtatctgctcataaagtatagcccgagcaggatgcctcgctggcatacttgaatcaaaccgatcagcgatccgcacagaggaatcaacacttaacg

SEQ ID NO: 156306 - DNA, 590 bp, Cannabis sativa
  modified_base (321)..(323): a, c, t, g, unknown or other
aaatacttctcaatgggtattatctgttaatggatattaaacaaatttaactataaatattaattttaaatatattaaatcattagattttagtccaatagcgattaataaaaaaatttgaatttttatacttaatttagctacttaattaaagaaaatatcaaaaaatacctctttttatactatatcaaaaatatgtttatatgaaaaatatttaagttaatttaacttttttttttatcatttttttactgaaaaacttttttaatttttttttatctttttagctgatggaccaatctcagcccatataatgtaaannngagaaatttttctaattaaatagacaaattaatcataaaaactcaaaattttgtaatattacccattcatgggtaatacccattaaaagtgcacccaagacttatgcatttgtttttcttctttctatcattttgaaaaatacatttgaatttaaataaaaataaagaaaaatttacttgttaaaaataattaaaattctataatgcactcccttaaaagggatataccgatacatctctttctgttttagtatccaaaataatttt

SEQ ID NO: 156307 - DNA, 502 bp, Cannabis sativa
  modified_base (53)..(55): a, c, t, g, unknown or other
tatttacgtggcatgccacgtaactttcatctaattatgtatatatatatatnnntatgtatgtatgtatgtatttatatattagaaaaacaaaaaaaaaatagcttgaagggttttgatcagtcaagtaaataaaaagaacaaacagaaagatatattgatgtttacaaaaatgaaaaaaaataataatgccatacataacatataagaagagagaagtaagtatggtgtaattacaacgtacatacatgttaaaagaaaattaataaattagcggtattttctataattaaatagttagtgttaaatatgatattatttacaatattgcgaccctccgtgtaaatttttctaaatattattactgtacttgaagacatttgaaaaataaaattaaagattacaattcgctagctagctaaaaatcaaacatctatatatatctataattctgttgttaagcttgatgatgtggcagcctaactattgagaattcaaaatt

SEQ ID NO: 156308 - DNA, 516 bp, Cannabis sativa
caagattaacctttctcgcggcgaaaaactgtctccggaagctaacttgtagcttgttccagcagtccactgatcctggtcccagctttttgaaccatttctctgcgaacccactcaatgttagtgggaagcataaacatttggcgtcgttgctcactctcatgaccgtcattactcggttgaaccgtgacaggtgatcactagggtccgagttcccggtataagctaccatttcgggcatcttaaaatttttggggagctctgcctctaggatgttcctggcacatggctcccgatcctcacagtcagagtcggagtcatcgcctttttgtctccaggagacccgagcaatatctttacgtagtatggcaagctcagccatgattccttcgttcagcgttcccatggagaccgttggcgcatgtctcttctggtctaggtgatcccagaggtcaccatgttttctgttaatctgatgcctcagatcgacgagagggtatctttggctccttcttc

SEQ ID NO: 156309 - DNA, 902 bp, Cannabis sativa
  modified_base (369)..(373): a, c, t, g, unknown or other
  modified_base (494)..(495): a, c, t, g, unknown or other
  modified_base (703)..(706): a, c, t, g, unknown or other
atcaaagaaagtttaagactttattgtgaagaacataatctgccggttcggattgccgtacaaaatagtttcagataatggcaagcactttgacaaccaacccttcactgacttttgcgcgaaccatggtatcatcaaaagtttctctgcagtggcacatcctcaagctaatggtcaagttgaggcagtcaaaaagaccttgaaggatgcactgaagaaaaaactcaaagatgcaaaaggaaattggccaaaaaaacttcctgaagttctatggtcgtatcggacaactaagaaaacaacaaccagagagacttcatttgctatggcgtatggatatgaagctatgctgcctgtagaactcgagccacnnnnncacagaagattgacgtacaatcaagataccattcacgtactcctggctgaatcacttgatgaaatcgaagagaaatgagccacaacaaacttaaagttgatagcccatcaacaaaaagtanntcgatatttcaacaaacaagtgaaggctcagaaattcttcgtatttctaaacaccaaagacagtacaacaggtgtactcggacctaactggaagggaccatatcaagtggtcaaagttctcaaatccggagcatacaaattaggtaagtatgatgaaaaattgcaactcgttctagtactacgatattggaatggggaacatttaagnnnntactaccaataaagtaccaggttgaacaaccacactaagtactgaaagagcatttacttttaagtgaatggcctgctgagcggaccacgctcaaaggtttcgacaaaagaaaaaacgtattcaggtcggatgaccaccatttaaagtacaatttcttatttttgcaatttgttttatttcatgttaagctaaaaga

SEQ ID NO: 156310 - DNA, 840 bp, Cannabis sativa
acatgagaaagagatgccctaggaaaactagacagtaggactttaatatcagaaaagataacccccagctcattaaaatacactgtctgaccctccaaagccgagaccagagaaagtgaattagaaaaaaccctctccacgggaagtcacacatcttcagcccaacgcaaacctactagtaaagcagctgctttggcctggaaaactgaaaaggaacctacaaatgagatagttaaagcaataagtacttttaatttttaaactaaaaaattttagaataaaattgtaataaagtcaaagcccaaagggaaatccttttggtttgactctttacttaactttttaacatattaatataatattataaatttaaataacccccacgctaaagcagatcatatatctattttgaaaaaacataactattaaaattcttcaaaatttatccagataaaatccatttagaattatttagttaaaattatttaagttgcagccacacttgttattattacatcattttataccttcataagtaaatttgaagcataaacttaaaactaaaaaataaactaaaatgatatttactatattattttaaaattatacgtattatcccaatcaaatctataagaaaagcataatacgttttaaattggaatgattgtttagataagactgccttcatttgtttgtctgaggagaaaatgacagctccaaaaccaatcacattttcaggacttgatatcgctgcgtccacatacagtttatagataagaacttctgtctctgcattactttgctcactagtacacccagttgaaactccttttttagttt

SEQ ID NO: 156311 - DNA, 567 bp, Cannabis sativa
atttacaatcacgtcggaaaatagattttgaaagtgaagatggaatattgtcttcaaatattgatataaatctcttcattctaaaattaataataaggcaataccaaagattggtatggaatttattacagaaggggaagcttacgatttttataatatgcctataagataggttttagtattagaagaagtaaaatgcataaagatttagatggacggataacctatagaatattttgctgctcatgcgaaggtcatcgagaaaaagataaacgagatgctacagtaaaatctcatcgtgctaaaatgagatttggttgtttaacaagaatgaatattaattctcatcaaaatagcagatattgtgtggttgattttgttatggaacaaaaacatgttacatcaagtcctagaaaaagtcatttacatagatctcaaagaaggttgactctagcccaagcagttgaaattaatttggctgacatctcaggaattacacctaaggcgagttatgatttaatggctaggcgagttggtgggcgcgagaaccttggatatactattgtt

SEQ ID NO: 156312 - DNA, 737 bp, Cannabis sativa
  modified_base (378)..(380): a, c, t, g, unknown or other
  modified_base (615)..(616): a, c, t, g, unknown or other
gaagtcggttcagacagctttcaaacatcctcaatcaacaaaagtaaccaccaagtagatggttatgtttccagattattttagatgagtgtcccccatccttttgacaaaaaatcgatcaagatggctttcaaaaatcctcaatcgcccaacgggaacgcccgccaaaatcctatcggaaggtggtgacaccggatgatttcaaatgagtgtcgacaatacatcactctgacagtgaagtccgttcggactgctttcaaacatcctcaatcaaccaacgtaatcacccagttgatggttgtgacgacggaggattttaaacgagtgtcccccatccttctgacaatgaggtagatcaagatggctttcaaacatccnnnatcacccaacgtgaactcccgccgaaatcccatcagagggtggtgacactagatgattccaaatgagtttcagcaatacatcactccgacagtgaagtcggttcggacagctttcaaaaagcctcaatcaaccaacgtaacaaccgagttaatggttgtgaccccggattattttaaacgagtgtgccccatcctactgacaatgaagtagatcaagatggctttcaaacatccnnaataacccaacgtgaacgccctccgaaatcccatcggagagtggtgactccagatgatttcaaatgaatgtcaacaatacatcactctgattgtgaagtcggttcagacagctttcaaaca

SEQ ID NO: 156313 - DNA, 640 bp, Cannabis sativa
  modified_base (40)..(41): a, c, t, g, unknown or other
atgatagactttaaaaaagagggtaaaaataaaagaggannatataaaaagggtataaagtgtaattttctcttataatttgttatagttttggagttacaattttgacaaaatgaaacccttaaatttgaaagaaaaaaaaaataataaataactggcaggtttgagatggtgactttgtcatgggataactttttggttaaaattaagctgttgggatttatagagggtgtttctttaattccccactggttttgtccaatttggttttgtcttgaagaaatggaagaggtacaaagttgggcaaaaatcatgtttggataattttaaaataatgaaactttttgaaaaataaagggtttaaagcttaaatttgatgaaaaaaaaaatgagtgagttttaaaataaatattcgactgaaagagttatttggattttaacaaatgggttttttgggtccaaagtccaactctttttcaaaaacaccataatttttaaataaagagggacaataaacacattaaggagattttttcattttgggcttaagttaaatacagaatttttaatagggaaacttacaaaaatactggaattttagttaacttttacaaaaatactgtcacacggaaattttttc

SEQ ID NO: 156314 - DNA, 578 bp, Cannabis sativa
tgcaacaagcaatttggggatgatcgcatatactcaaagatagatcgtgtgcttgcaaaccaacaatggatggatgcccatcccactgctgaagttatttttatgaatgaacatgcttttgatcacactccagcagtcctcaattttcacaacaatgtcattggtggacggaagccttttaaatatttttccatgtgggaatcgcaccccggatatgatgaactcattcaacaacagtggcaacaacatctcaatggcactttgatgtttcgaattgtctccaaactcaaaggtatcaaaactgttttaagacaattgaataagaataactacgctgacatttgtgcgcaggagtgtcttgccaaagcaaaattagatgagtgccaagctttattgcagcagcagccacttaatgaaactctacaccagcaagagaaggaactcagaactcattacactaatgttttcaagagctatatgtcttttctgcagcaaaaagccaagctgaattgggcaagggcaggtgatgaaaactcagcattttttcacaatagtattcgagagagaaggagacataa

SEQ ID NO: 156315 - DNA, 646 bp, Cannabis sativa
gattatagtcttttttttggaattggaaatctgactttgtatcgtgactctatgttggttggtaatgggagttaatgtggaaatttatataagcttaatttacatgatgttgtttctgttacttttccctcttgcccttcttctccttcttaatgttgtttttggttccaaacgtgcaagactagaaataaaatcttccatgctttggcataaacatttggggtcatatttctagagatagaatagagagattggtgaaagattgtgtacttcactcgatttctctgaattcactgcttgtgttgattgtataaaaggaaagttaactggtaaggttagaaagagtgcacagatgtattggagcttattcacactgacatttgtgggtcctttgttccacctgctatgggggactataaatacttcattaccttcattgatgtttttcccgatatggtcatattgagctcattcgtgagaagtctgaatctttagatgccttaagattttcaagacaaatgttgagctccaaaagggaaagaagattaaagctgtcaattctaatagaggtggagagtattatgggcgttatgatgaaactgataggaacccgggccgtttgccagattcttgcacgaacgtggca

SEQ ID NO: 156316 - DNA, 660 bp, Cannabis sativa
tactctctcgttgggtcttggcagtaggccaggaatttgctgggcatctcctgggagagcaactggggccaatgctccggctacaccccctggggacccttgaggcaaagctcctgctgcctgaaccggattgaggtgaggcaaccggttcttgatccattcgtagatatgtcccaatcgtatcaagttttcgatctcatccttgaggtttttacattcattggtgttgtgcccaatgtcgttgtggtacttgcatcttttattgggatccctccgagagctatccttatacagagggggcggtcgccgatagtgcgtatttttcctggtagcaaaatacacacgctcttgggagtccgttagctccgtgtactgggtatactggggactgtacccccttttctgccgcttatcctccgtccggttgctgccttttgaggacctcttgctccgggagccttgagagggacctgctaagctcgcagccggagcggagtgcgacggggcttgaccacccatccctgagggatttccaaagtgggaagatgcaggggcaaaggcctggccctgactatatccgggagtattggaaaattgtatgccgctcatcggtggagcggctgttggtaaggttcctgggagctgagctccgggtacata

SEQ ID NO: 156317 - DNA, 639 bp, Cannabis sativa
  modified_base (27)..(38): a, c, t, g, unknown or other
aactttaatcaaatagggtttataaannnnnnnnnnnnaatcaaatagggttagaaatacggtaattaaagaaaatctagaacgctaattttttttggatttaatgagatttattttattttaattttattatatataaataaaaagtgactcatgaatttttcgtaaactattttatttttaatataaataaaaagtcacccataaatttttcataaaccaaaaattctattatataaacacactttatataaaatagatattacatatggaggggtgggccctttttaagtagacttggcctcatcgtcattaacctcggcagtgtaagtagaggaaacgccacctcgttactgtgagtagacttggaagctcgatacagcctcggtcctattaatcttgagcgcccaacatcagttatgctttattatatgtgccatgcccctttacttatccactcctttgatccatgaaattgaaatcttaattgatgtacataaaaatatatacttttttccatgtttcaattaaataaacgatcaattaatttagtgtaatttgcggcaaaacccctttaactatcaatttacttacaaaaaaaccatccaacctcatattttggtgggaaaaccttccaaa

SEQ ID NO: 156318 - DNA, 596 bp, Cannabis sativa
  modified_base (121)..(125): a, c, t, g, unknown or other
agttcgaaggcgcgcctccgtaatcttggacggaggacttacccacttggcacccaaggcaccctgccttttatgaggaactgacgtggcaagttactcactgacgtagtccacgccctcnnnnnggacgtctccgtcagcatcgactggctacccagcttcattgtacccccttaatttcggggttcaacctcttcctcttcctccacctcggagggattgccacgatgcacatcgtccatctcctcgatctcctggaccttagcatccccttcacgatcctcctccatctggacagtcggatcttgttcagtgttgggcaaagtggcgagccgagccactcgaggatcaattgcgacagccagacgcatggttttctttgtacaagccatcatcctatggctgggtacaaggccaaaagaatgtccttcactagaagaaggaggactagaacgaagacgaggatgatcctcgtgcagaagttgaagaaaatcctggtcgattcgatgttcgagttcccaagactcgcctgagttcatctacaaaagacaacacacgagatgagtgttggtcagaatatcaaacaataaacaagc

SEQ ID NO: 156319 - DNA, 600 bp, Cannabis sativa
tataaagtccgtttcaaaatatatgtttttggcataaattaaattagaatcagaacatgatagaattttagtaatttgataaatattattttgatgtgattaagtttatatataaaaaatagaacgattgataaatttatagaaaactcatcaattttaaaattattatcatcatcgtatctcactcgttactacatttaaagtcgttattattaccgtatctcatttgtaatcgccactatcttaaaaataaaatataaaaattgataaatttattaaaaaaaaaataattataccaaataaagagaataaagagtattaataaatgataatgtaagcaaattaatttaagaaatttttacaccaaaaatctaatttacacaatttattacaaatatacccctacacgcttacatcatttacatttcctctttcttttattacaattatactacttacacatcatttccatgcacatatatgtgtgccttccctatcattcatcaatcaacttccaatctcttccctctcttttttccttttcttttcatttgatttttgatttactttcagtttttttgtttggaagatcaataacct

SEQ ID NO: 156320 - DNA, 511 bp, Cannabis sativa
ttatgtgtggagaagtatatggggcgccaaagacttagttcggcttggtgctcttcgtgttattggagatggtaagagtactaaaattcttgatcatccttggcttccatcatcaaataacaagtttgtcacttctactcatcccgggcttcacacacacactgtaagttctcttttccaacctgagttgatgtgttgggatgctgaagtagtaagggacttattttccccacaagaagcctcattaatacttgatatcccgctgagttcctctgctagacccgactgttggtcttggacagccgataatactggtaatttttcagttaaaagcgcctatctccttcttcaaagacaaaaaccagtcactccaaggccaaataactctggtttttggcataaattttggcacttgaaaatacctccgaaagtgttgaactttctatggcgagctataacaggtactcttccaacatgtgtgaatctcgtcacgaaacatgtcccaatatcg

SEQ ID NO: 156321 - DNA, 684 bp, Cannabis sativa
agtattggaccgtccttaatctacgtaattatatttttcactaatcctttttcttttactaattaattaatagtataacttgtttctaaatctatagttattgaaggttgtcttttttcttctgtagggcccacggtgactttctcagtgtttaggagtatacgacttggttggtgttgtgttttgctattgcgattagtcttgtctatgtgatatggttttacgtgttttagtcttgtctgtatgacataattttattttattttgtttcgttgttggtttttctatattcttcaatggttcgccattacatcactattagtggttgggaataataagttttttgtaattgaaaaggttgttactagtacagttacgtaccttacataatatagttgagtgctcaggttacgagattaaacttgctgcaataatttttactattataagtgttcttaaggttaactataatgttgcaatcttctttatctgatattattttatttttttcatcaaacgatctggtaattacgcaattgattattttgtttgtttttctaattttaattttggtcatatctccaaaagagatgtcccaatttgatcgtagactattctttagctaattactattaataaaattttttatgatttattaaaaaaaataattaatattatatgtat

SEQ ID NO: 156322 - DNA, 575 bp, Cannabis sativa
  modified_base (380)..(385): a, c, t, g, unknown or other
agtgtagtatgtagtattatctctgtaataggatctgatagattgtgtttaatacaaactttctccaccattacatatccttaatcacagaatccttgatattgtgagattcctagattccacaaaatctaggaaggccttggcaattggatcggcgagtccagcatgacgacttcaccaataagtactcattcataatccgtcagtgaacactcactctagcttctttgacaccataacaagtctatgaagaacaagtgagattgaaaaatttgagtgatcaaaagaatttgagtgataaaaagaacttgagtgaacaaaaaaaaaaaaaaaaagagatccaaagagagaaaacaatcgaagcaagtgagagagaaaannnnnngaagagttctatcaatgagaaaaaaatagagagaaaacaaaataatttttatgcaagaaaaagtgagattacgtaagctaaattgagggttcaaccaaatggtctttacacacccgtacctattcctagttcaccatgggttgacatttcaatggattttgtgttgggtttacctaggagtaaacgtggg

SEQ ID NO: 156323 - DNA, 553 bp, Cannabis sativa
aattttcgtttcggttgcgttgggttgctgcgtagttgcacgatagttgcgcgatggttgcgtgatagttgcccaggaagcataaatcctaggttgaaggagtgtgtaaatggtatttgtgttaattttttttagttgggatgtatatttgtttatttggccttatattttgagtattaatttagtaatgttataatttttttgtggcatctaattttattactacagtaaattaatttttagtgatataatataccaaataatgttatatatatttaatgatttaatatatttattcatttttattacaatatatttatatttaatattaaaataattatataacttaattaaatattatatatattttaaaaaaattaacatctaataaatatattataatttttattagttaatttattatatttagttattttaataattttttttaaaaaaataaacatttactacggatgtgtggcaacaatttttttttttttaatttcttaatcacgaaaaaaaaagtaaatttgtatttttaaaattttatttt

SEQ ID NO: 156324 - DNA, 604 bp, Cannabis sativa
taaaaaaataattaaaaaaaattggttataaagagagggctgaacagttaaaaaaagagttttggaaaaaatctttggcaattgatacgtaatagtgaaacagagaaaaaaaaaagatctcagaaaataagttgatgttatattgtaaagatcgcttatgattaaacactttgggttaaataattaggatttatttatgagatttaaatattatgtataatatgtatattgtggagatttatttaagttgatatatgtttattatgttatttaagtaatttctcgtttacctgtgcttgtgatcggtagctgtggaaagcgacgttgggccattagagagtcatgcttttatttggtttaaaaggtttgtaatagtgggacattattttttttagacgttgggaatgtcgagaagtgtcggggtttttaaatgaccaaaatacccttttatgttattagtttttgtcctattgttaagggcaaaatggtcactttgcgagaaacttttctttggtcccttgtgaatattagtggctgaataataggatagaatttaattaaattctataggttttattttacttaggttggaaggaaaagaatt

SEQ ID NO: 156325 - DNA, 782 bp, Cannabis sativa
  modified_base (297)..(298): a, c, t, g, unknown or other
  modified_base (743)..(754): a, c, t, g, unknown or other
aagagcctagcatcactggcacggaagaaatcgaaatgattgacacttccccaaactggatgacaccaatagccgcctacctcaacactgagaaactcctagataattagaatgaagctcgaaaaatgagaaggaaggttgtacggtatatcatagtagagggaattatgtacaggagaagaatctcaatgccattgctcagatgtgttactcaagaagaagctgcacgactcctatctgaggtgcacgacgaattctgtggaaatcatgctcccgggcagagtttatctaagaaanntctaaggcaaggttatttctggcatacaatgattgaagattcaaaggcctatgttaagaaatgtaacaaattccagagattttcaaagatacctcgagctccacctaacgagttaactcaaatgtagagtccgtggccctttgccatttggggaattgaccttatcggacaattacccaagggcaaaggagggatgcagtatgcagtggtagcagttgattacttcactaagtggacggaagtcgaaccactaacaaccattacataaaagaaagttcaagacttcattgtgaagaacataatctgccggttcgaactgccgtacaaaatagttttagataatggcaagcaattcgacaaccaatccttcactgccttttgtgtgaaccacggtatcatcaaaagtttctccgcagtggtgcatcctcaagcaaatggtcaagtnnnnnnnnnnnncaagaccttgaaggatacactgaataaa

SEQ ID NO: 156326 - DNA, 543 bp, Cannabis sativa
tcactttaacaagactaaagtaagcttataccatttgattgtgtgtagtcttgatgtagatgagcttcctagcttgatttgcatgttttgatctgataactcttgagtaaaaagttatttgatatcactttaaacatgttttttttttttttatgtaattgtgtgtcatattttgtcttttaatttgtgaaagttccagtgttttatgtttatgtgtgtaatttaaagctgttagtagaaatcaataacttttgtgtataaattggcaaagaaaatagcaagttagtcaagttctttatttttctaaaattcggtgaagtttttgctgcagcaaacaggtcagtagctgatttgttaaatttcttaagaaaaagataagctagcacttcattaaatgtggtggcatttgtggagatgacatgtcattctaggagttgtgggtggagtaattacttggagatgctagatgcacgccatgtgtagggtttatgttgggcaaatggtacaaaatctaggaggttctcaaaaagaggcagcctccat

SEQ ID NO: 156327 - DNA, 637 bp, Cannabis sativa
  modified_base (361)..(365): a, c, t, g, unknown or other
  modified_base (421)..(421): a, c, t, g, unknown or other
ttgggttcgggtgaggatttcagtctaggtccagatcaggctcctggtttgggttcgcatcctaggtcttggtctaggttagatctgagtcccattttccattcccgatctgagtctggattaatttctaggtctaagtccttggttctgatcttggtcagggttctagttcgggtccgtgtccggatcttgctttgggtcttattctaggtgttgttttgatttcgggtctgagtttgtgtccgggtttgtgtccatgtctagaccttgatcatggtctaggtccgggtctaggtccaagttggggtcctgagtgcgggtccaagttttggtctgggtaaggatctcggtccagatctannnnnagcattttgatctcattctgggtcttggtccaagtccaagttcgtatccggatccntgtctaggtccaagtctgtgtttgggattaggtcctagattagattagttttggcctgggtacacgattgtgtctgggcccgagttccagtgtgagtttgggtctgaagctaggtctgtgttcggttctaagtctcggtccgggtcttggtcaccgtcctagtattgttctagggtcctggttcggtgattcttgttcaggttctaattttgggtc

SEQ ID NO: 156328 - DNA, 515 bp, Cannabis sativa
tgtgaaactttgtgtcgtaaggaaattgtggaaagaattcgagttgctattggttttgatggtttatttgcggttgaattgggcgtagtggtggtgttgctcttctttggcataataatggggatatcaaccttctccgctttgctcataattatattgatgttgaggttacttctttcgatcaaggtgtgtggcggttaactggtttttatgaggagcctaaccgaagtgcaagggtgactacttgagttcaattgaaaactttggctaccgtttcttctttgccgtggtgtgttattggggaccttaataatatcttgtctcatgaagataagcgtggacgtattccttatcctcactggcttattgagggttttcagcaaacaattcaagagtgtgagctgagtgatgtggagcttgttggtcatcaatttacttgggaaaagagtcgtggttcggatgcttggatagagtctcgcctagatcgtgcgcttgtttctaagcaatggttggtt

SEQ ID NO: 156329 - DNA, 527 bp, Cannabis sativa
tcacatcaatcatattggatcaatttatgttttaagatcaacacacattatctttaccaaagccatttctcacttttaccaaagttctcttctgcatcatcttcaatctcactttctttctttttaacctttttttttttttttcatttgtttgaaaaatccatccacctttttcttcttttatttttaattgtatttgagctctttctttcatgttattattttttttttgtttttttacccttttcttccttaagttatctcttttttcattaacatataagtttttaattttatttcttgttcagttctttttctttatcttcttttcttttttttttttttcttgtttaagttttcagtctcgttttttgaaaagataagagtataatttttaattttaatttttcacaattaggcttgcaaatatagcatccattgcatctgatgtcaaagttgggcagaagatggttaattttttttaaattcttttttcttttcttttcttttttatttgttttagtgtt

SEQ ID NO: 156330 - DNA, 681 bp, Cannabis sativa
gttactacggtaacaaatacactttttgttgaataaatgaacaaagatagtatttcaaaattcaattgagtctaaaaaatcagcatatttaccatataatgtgtacaaaaggtttggtaaaacccaaaacactgaacagataagcaatatatttgtaatagacaagtgaccaagagtatgtactttaaggcatgtactttctctttctgcttcgtcacatccgatttgtacttctcaactttagctctaagcacctcctccttagtcttcttctcttcttccaacagatggaagacagtctaaagaactcccctttcctcttgaaggctactcacttctgccaacaaggtgctgatggtggcttcaagctggttggaagcctcgaggtccttagtcaactcgactattttcctctcagcagttaaaagattcttgttgacttcacccagctccatcctgacagctctaagttccaccctggcgtcatcaacatccttcctagccaagtccaccttcaccctcatggtgttggacatagcagcatttttggaggcagtagatttggctcgggaataggtgtaagccaacttcaaaccagccaacatagataaaaaaactttagagtcttagctaaataaaaaggattaaaggaaattgtcaagaaagacttacccttgtcaa

SEQ ID NO: 156331 - DNA, 617 bp, Cannabis sativa
gaatatgagtcactacaaacaaagtgacttatataagaccaagttatctcgaaaatttagacaaaacaacttaagaccaccttcaaaaggcatccgatgtaaacagtcgcctggacgaaaactacctataaataaatagatgtataaatgtggatcagcacactatacaatgataatgatgtgaattattaaattaagaataaactgtaattattattataacaagaaaaaacttatttttgaagcctttatattattagagctaagccttccaaggtagaactatattagccaatataacctacatcatacataagatttaatcaaaataaataaaacaaatctctaataaaattaactatttttaaaaaaaatgtaacaaaactcaattgcctaataaataattgataagaaaacaatgatataaaatgatagaaagaaattcctctaaaattaagttttatatatatttatataataattattatgtcgattccatttgtgaatttctgtttaggtttttattaggatatatatctattctacataaagtgtgcctatataactgaattcttggtttatgagaaaatcatgggtgactttttatttatatttaa

SEQ ID NO: 156332 - DNA, 628 bp, Cannabis sativa
gtgtaattagaaaaggaggtattgggattgtgtgaaaaatattttgggtgacatgattggagaagcttatggtataaacaagcctaaatgaccatttcaactatccttacctaagcctaatactacaagcctagaaagaccttctgattcttagttgtgcatttatatatattagtggagaatagtaagtactacaagcatatggaattttaggttagtggattgatgattgtaattggcatgcataaagtggtccaattgttagttaattgcattttatggtttcatgagctgaatgaaaataaattgaaatctgtcaagggtgtaattgaactaaaattctagattatgtgcataagtaaaatttttcataatcatgttattgaagctacttgaaaattactcaaattttagttattgacatgtttattctgtatttagtgttttacttaaggacaagtaaaagcttagtttgagggaatttattagtttaattttagtattatttttagggtactttttagtatatttttttatttagttttactcttgtttggaaaattttaggctttttatcttttatttttgcagatttaaaatacaggaagattagaaaataccaaaggaa

SEQ ID NO: 156333 - DNA, 559 bp, Cannabis sativa
  modified_base (227)..(232): a, c, t, g, unknown or other
tctaatgactatgggatggtccgcccctaatcacttagaatagctatcaaacatgcaaaccttagttaatagttctagcattttgaagattacgatcaggacatctatgaatctagtaatggtttacactaagtatacaaccattccatcattctgaaattttcctatcacaagggtatttccctagaaggacttaggcaagggctagtaactaatcatagaccttnnnnnntcatcaatatgcaaatcaaatttatggggtggtaagtttgaatacaattcaaaattcaacttaatgatctttgagctgcatatccaccaaatatttctccacccctatcagttctcaagatcgttaaccacttaccttaatgtttttcaacattgttagaaattcatgaaatttttgaaatatttcaaatttctttgggtaaggtaaaatctagaatgaccatattaagaatataacggaaactcatatcaacccctgaatgtacatccatattcgaatatagatgatcttactttcagtggatatagatatattgactctttgaag

SEQ ID NO: 156334 - DNA, 516 bp, Cannabis sativa
gtaagtaagttgcttaaaatgaccttctatgaccaaaacgagtaaaacttgccaaaatctctcatttttgaagtttttttctatttttccagcttctacacttcatattaatcatgtttaaggtgatgcaaaaataatttttcaagaagggtgaataaaactaatttttggtacatttgttatttttgcttagcactatgtttggtaggaaggggagatgggtggatggagaggggtggagggagagtgatggtatgagagactaaatcacttgtttgacaagagggagaaaaggagggagaggagagatagagggagacattctccctccaaaccttcaaaatttaatccctccaaatttggaaggattgtagaaaaagacaaaatacattttggaaaatacaataactacccttataaaaataataaaattttatttttaaaatgacaattttgtaattttactaatcaattttttctccatccttcccacctcacacctaataccaaacaata

SEQ ID NO: 156335 - DNA, 639 bp, Cannabis sativa
tgaatcgcctcttaaatgtaattttcaaaatctaattaaaaactgatccaatcaaactatatttatatattaaaaacattatttatatttatttatatattataaaaatatttaaaaaatttaaaatatatatttttagtggctatttttttttttgatttaaaatttgaaaatcttggttgttttgtgttatattttcatgttgttttattttattttattttttggcaatgttattgttttagctatttcaaattttaagttgtattaaattgttatatttatggagtattaaacttaatttaaatggtgatatttagtttttaggtatttttgttcatatttttaagttgatattaaaaattatgtgtgtaattggatatctaattaaaaaactaattggattggagcattaggaaagaattaaaggttcgattagatcaaatgcgcagtcctacgtggacaatccaattgaacggaactaacaatccaattcaattataaaaaaattagatatcctattacaattggattggattaaaagttagattttaattagattagatcggttattggatgctaatatcaaaatctaattaaaaactgatcgaattcaatcactacaaaaaactgctattt

SEQ ID NO: 156336 - DNA, 605 bp, Cannabis sativa
ttttcaatctgtgttgtttctattttttttataatatttgtttccatttcacaaactataatttctatttcgtgattaaattgtttctatttcgaagttaattgggttagttgtttacatttcacaaactatactttccatttcgaagttaattgggttttattttttgagattaaatgctagttgtttctatttcacaaactatagtttttatttcgaaattaaaggctagttgtttacattttacataaataaggttaaatgctagttgtttctatttcagaaactatagtttttattttgaggttatattgtttttattttttgaggttaaattatttccaaattttttatgatatttggtttatattgttttatttttcaacttcaaatttcaactccattcgcattccccgagtcccattcccgaatctctactgtgtattaccaccgattcatcgctgatttttttcctccgtcttcaatttttcaccgtactaaaaatatataattagatgcatatctataaattcacactttaacagtgttctttccaaaacaaataaaatcacacttgttaattttcttattcaatttggtataga

SEQ ID NO: 156337 - DNA, 1668 bp, Cannabis sativa
ttttttttttttttctaaataataggtgcttctgtatattcttaattatatacgacataaatttataaaattaaaaagcaacaaagagcaaagtcttagattttaattttcaataaagtgaaaattaaaaacataaagtaaaacttataggttgaataaagattaataataaaataaagaaatgttaaacagtaataaattcataattaattaattaataaaagttatccactcataatataaaaaaaaaaaatacaacagaaaaatttaaaataactaaacaataaaattattatgaaaaaaaaaaaaaactaaagatggaagaaataaaaatttattggtttcccaccacaagttgaaaactttgtgacaattaagcactcattcatgatcgataatggtttaatgtttcactataaagcacattttatcatccatcaaatcatgattacaatgattccttcaataacatttttaccttttaagttgaacaaatgacatgaataccttactcaccacagaaaaatagattgtttgatggcacttcatgtaggttgtagtattgaaataatatttgttgctccatatccccaatacttgtatatatattctcatgcaagtgaaatacattgacaaaagtgttaagtacattgggtctagtcatctcatttgggcaaaccctttgtcctacgtctgatcactcctccatgagtgactacaaccactcgttctcctgaaatagacatgaaactctactgattccttcgaagcatagatttttttttttttttattgaagcatcattgataatcaatttccttcaaaatttgcatttcgatttccttcaatcgttttattgaagcattgttgagaataatgttagagatttggagttagtaaattggagaataccactcgaagcttggttcgaaggtcttgttaagctttgtgagagaatagggtaacatcacaaattaagagaaaagaaaaagaattgaaaaaaataatttcgcattcaatagcaatagaaagaacaaacaatttttttttaaaaataaaataaattaataaataatacaattatttcactatttaatttgagctagttttcatgaaaaaaaaaacctaattatttcctattttctatgtgttttaggctggaaaaggcatattataataacagaacatttgtaaatttattcagatttaaaagaacatgtttttttattttcatttataatcatataggaaactaatctgtattttaaaaataataataataattaaacacaaagagttggtagatcgatatatacattttcattgatgttaactttctttattattttattttatgtaatcgcaaaaagtaataattataatatattttctctctttaatagaaaaaattaaagatttcaccactacggaaatgcagaatataccacatattataatttcattgaaccaaattaaacaagaattcatcaccattcaccaagtaaagcaaatgcaatatataatagtacaaataaatatatttatataatatatatatatacaactacaactctaaacaaaatattacaaggacaatatattaaataaagagttacaatcccaaagcacaaaatacaaataaaagaaaagagttacaactcaaaactc

SEQ ID NO: 156338 - DNA, 583 bp, Cannabis sativa
ccaatccattttagccactctttaggcttattttattaaaaaaatatatgaaaaaacataatttaaaacctaataatccaacatagataataaagaatggtttaatccaaatccaacctaattttcatgatcccataataaaaatacaacacaaatctaacttaataagcaaaagccttaataaacaagttcattacatggaatgcaaatattatatataaatcaatcactcccttgagtttaatctttgatggtccaatttcacaaaagaggatgtttactcaattttaagatcaccaactccattaagaatttctacaaataacacaacaaaacaaaacaaaaacaaaattagtatattctattaaaaaaaattataaaataaagttaaaatgtagatgcatatgaccaacttctaatgcttccacttcttcaatttttagatcatcaacatcaatttttgctgtttgtcaaatccaattttgagtacatataagtgcttatacagctttaagagttaagcaactcctatatgtgtgcagcatgtgcacagtaaaacttataaataattaatatatttttt

SEQ ID NO: 156339 - DNA, 732 bp, Cannabis sativa
  modified_base (670)..(688): a, c, t, g, unknown or other
ataccttttagcatttctcaaaaaaaaaaaaaaaaacattactattactcttggccattttaaagtaccaacaccatatcaatgtagcacattgagagttgttagcattatttattaactcaaaatatttaggacctaatattaaattacatcaataacaatatacaatactactttttatagtttttatagtgcttgacaccttaatgagcaccttagcatattaagcaccacaaaatgtatcacattattattgatgcattttaatatcgagtctcacataattcaatctagtaaataaattttttcatttttacaattcaaattttttaaaaaaatttacataacaactaatagaataacctaaatctcaattcgagaacaaccaaaaccataaatttattcttaaaaaaaccataaatttaaaatatatataaaaaataatatataaaataattctcaaatattaattagcaatttttccccccgaactttgacatgtactgaatcatgtcccttgaactttttttgccgttaaaaattccccttgaactattaagattgttaaatttaagaacttttatctaattttagtaaaaaaattctaacatgaatgaaagtgcagggagtatgatttaatacatataaaagtttgaggggtatgatttgnnnnnnnnnnnnnnnnnnngagcatgatttagtacctgaaacagtaaaattgaatgaaactag

SEQ ID NO: 156340 - DNA, 658 bp, Cannabis sativa
ctctattgttataaagtcatgtcgttcgactgaagaacgttggggcaacgtatcaaagactggtaaatgaaatgtttgcaaatcaaatagggcgaaacatggaagtttatgtccacgatatgttggtgaaatcgataaagcgtaaggatcataccttagacctcgcggaatgctttaaaatattaaaaaagtataacatgaagctaaacccgaacaaatgttcctttggagtctcctcgggaaaattttttggattcatagttaacgcgaggggcattgaggaaaatcctgaaaaaatcaaggcattaatagacatgccatccccgacaaagcctaaggaagtacaggccctgacaggaagaatggcagcacttaacagattcattttgaagtcaactgataagtgtgtaccgctcttcaacatattgcaaggcaacaaaaagtttgagtggacaaaggaatgagaagaggcttttcagagcataaaaaggcatctcgcattgcccctagttttggcgaaaccaataactggagcgacgttatttttttatttagccatctcgaaaaatgcgattagtgcaactatagtgcgagaagagggtaagcaccatcaacctatttactacgtaagtaaaaggttactaggggtagaatccag

SEQ ID NO: 156341 - DNA, 532 bp, Cannabis sativa
ttcatttgattcaaagctaagtcttatttaattttcattgttcatttctggtttttttctggtttaaatttctttgattgcttgttatgtttattgttattcttgattttttggcattgtttttggccaagaattaagggtgttttcaccacaagtattggtcacaaaaattacaatttgctgtgattaaatgtctttttagtaacaatacttattgtgactaaaactaaattagtaacaagttgtatccaaaaactatattttactcaaaagtaattttttgctatgactaaaggtcatatttagtcacaaaaaaattatattgtgacttaaaaattatcactaaaagtaattattttttatagtggatggtggcgagcaggcccttgcgccaacctcatgcgctaccaaggtgaagggtttcatctttcaagaagacttcctgaaagtccttccattctcatacataacctaacattctattataagaaaagttgaacattgcaaatttcgaaggaaataaggacgaaga

SEQ ID NO: 156342 - DNA, 756 bp, Cannabis sativa
  modified_base (49)..(52): a, c, t, g, unknown or other
atcacaatgtagtattttagtatattggggcagtttatttagacattgnnnntgtcgggattagtcgggaatttagagttttcccaaattaccccctttttaccctttaatgttatgttaatatggaggggcaaaatggtcattttgccccatttgtatttttggtcctttagtggacttagagttatgaattaattgtttatttcatttaacctagctgaaataaaggaagttttatgcattgttgctcatttgttcaaaattgttgaaacttagaaaattcaagaaaattgcttttctctcctcctttctctttcggccacttcttgagcagctagggtttgatttattttctgcatttccagcaagaatcttcaaggttttgaaatgcttaagctctaggtaatttcttttagtttttctttagtttccttgagttttaagaaaatgaatatttgcatgcttgatgaatttggggctatggttgttgctgttgtttattgttgtcttcttaagtttaaacatgtttaattgaataaaatagagcaggttgtaatgcatgactagttgattttaagcaagtttggaattttagctcaaaatcttggttttatggaaagaagaggaattagttgctgtagtggttgtttgtgcgtgggttggatttctgctgttatattatgcttgtttgagtagattaaatcaagttttgatgcatgtttgtgagatttagtcaagcttgagttttgaactcaa

SEQ ID NO: 156343 - DNA, 973 bp, Cannabis sativa
cctcgctacacaatgatcgaaggcaaacaatatagaagagggtattcaatgcccctacttcggtgtgttctaccagtaaaagaaaacaaaatcattagagaaattcatgaaggcttctgtggggatcattcaagttggcaaagtctgtctataaagatcattagacaaggatattactgaccaacgatcaataaggacacacatgagtttgttaataaatgtgataagtgtcagaggttttcacatatacctcgcgtaccgccaacagaatttagaatgatcacctcgccctacccatttgctatatgggggattgatctaattggggcattacccactgggcgaggtggagctaagtatgcggtagtagtagttgacttcttcactaaatggacgggccaagcccctcatctccataacctacaagaaagtccttgactttgtcgtcaagaacattatctgtagggttggaattcccatgaaaatagtatctgataatggaacccaatttgatggcaactttttcactgaattctacgagaggaatagaattatcaaaagcttctcgtcagtatccaggcctcaagaaaatggacaagtagaagctgtcaataaaaccctaaaggatactatcaagaagaagctagacgctgccaaaggcagatgggttgacaggctacctcaggtactctgggcccacataactaccaacaagacacccacgggacacactcctttctcgctagcatttggatcagaagcgatgctgcctgttgaagtgaacatattgactcacagaagagagttttataatcaagaagaaaaccaggaacttttaaaattatccttggatcttcttgaggaaaaatgatctgagtcgcgaatcaccaacgctgcataccaacaccgagtcacaagatacttcaacaaaaaagtcaagaaaagactattcaatgttggagacttggtgtta

SEQ ID NO: 156344 - DNA, 525 bp, Cannabis sativa
aaaaaaaatagaattcggggattatttgacaacaacttgaagtggatcagctctaaggaagagattgaaaagaccatttgcgaccactttcaagagctattctcggccaaagactatgagggagacatggttgctcatctccaaagatttgttccctgtaaagtgagtaggattcaaaatgagttccttctttcagcatttactgaatcggatatcctaaatgcattgtcccaaatcaatgcaatgaaggctcctggaatagatggaatgccaagtctcttttatgaacaccattgggatgttgtggggaaggatgttacaaggctttgtctgaatatactcaacaatcacaccgactgtagatatatcaataaaacattactgtgcctaatcccgaaagtcaagagcctaaatcaagttgctgattttcggcctataagcctttgcaatgtcagctataaaataattgcaaagtgccttgccaaccgaatgaaggacaacctaaaagaagtcatctctgaaaac

SEQ ID NO: 156345 - DNA, 1489 bp, Cannabis sativa
  modified_base (850)..(853): a, c, t, g, unknown or other
tttaccaacatatcatcgatgtaaacctccatgtttcgccctatttggtttgcgaacatttcgtttaccaatcgctgatacattgccccatcgttcttcagaccgaacgtcattgccagcatctgggcgccacgcaccactcccaagccatcttgtgtttggaatttcaaggataggtgcttcatcgaactagctgcccctagtccaatcagggcttgacgacccaacaatatgttataagccgatggcaggtggacaactaagaagtcttgcataacagtagtagataagggtgcctcgcctaaggttaatgtgaactcaattatgctaagactggcaatgctatccccggtgaatctgcaaaggttcaccatacaaggccttaacttggcttttcgagccccattttccgtagagtctccttataaaggatatttaccaagctcccattgtctattaacaccctcttgatcctttattagcgagttgaatggtaatcactaatggatcaacgtgaggatacctcacgtttttctcgtcttcctccatgaatacaatgggaggttcctcggttttcacctttttggaaggatctagggcaaaagtagactgctcgttctttatctctttcacatatcttttctgggtgttaatgctgtctcttgcgatatgtggccctcctgaaataacaaggatgtcctctccttcaacaggaagaggttgtaaccactggttgtttgggttattgggcagactgggttggttgtatccatggccctcgcttttcacgtactgtttaaaatggcctcaagtgatgagactttctatttcatctttcaattggcgacannnntcagtcgtatgcccaatatccttatggaatttgcaatacttgttaggatctcttttgctcctcaaattcctcatgggctcgggcttatcgagggcaaccttttgctcatgtgtgaggtaaatattctcccgattttcattaagctcggtataaatagtatttacaggcacgtacttatcatgcttcttctacttctttttatcctttgacggttccttaactccgtcctttctcttcaaaccagaagcccccgagttatcaattctcgtggaaacaatacttgttgaaacattgctgggttttcttcccaagcttattttcaacagattcatttctttttgggcttcttccttccaaacgaacacctgagcccttttgttgaactcaagatgcttctcactggacgtccttgtaagtcatcccacagctcgcccccctgcaattaatagatcagtagagattctcgcctgaagggctgtgagttgcgtgctgtcatcaaaatccctaaccctagccgcagtcgtgctgaaatgacttaagtgcgccttaagtgtctcgcccggctggtactttatattggttagcgaagccgcttcgggtcgcctatccctagcagcctggaattgtttcttgaaa

SEQ ID NO: 156346 - DNA, 657 bp, Cannabis sativa
acactatagggttatggtttttttttattttattttttttacatttatatggttattttatgctatatttttataaacgaaaaattggaaatctcatatttgtaaaacaaaaataagttttgctggaaaagtcactggcaccggaaaatttgccaaaaaagtcacccgcaccggataagtctctgaaaaagttaatgtcgtcggaaaaatcattgtcgtcggaaaagtcacttgaaaagtcaccagaagtaaatgtctcatatataactaaaaatataaccagttctatgaataaaaactaataactcaaaccagttataattgaaatataaccggttttgtaacataataaataaaagtaaataacataaaataactcaaattagttataattaaaatagaatcggttctataacagtgttataatgaataaaaactaacatgaaataactcaaaactggttataactaaaatggaaccggttatataacataatcaatacaaacaagtaacacacaataattcaaaccgattttaattaaaaaataaaggggaattcagttcctaaaatactgaaacataaattaaaaacaaaattagttttacaataaaaacctcataacacataatacctcataaaacccgttataatttttt

SEQ ID NO: 156347 - DNA, 578 bp, Cannabis sativa
  modified_base (527)..(528): a, c, t, g, unknown or other
tttgacatgtaataaatcatgtccactgaactttaatccatgttagactttttttactaaaattagacaaaaattcttaaatctaacaatctcaatatttaggggcatttttaacgacattagagcatctccaatggttaaggatgctaaaaatttacacatcatctaaaaatatattttattttatctctcttccacatcatttttagcacttttacttttaaaaacactcaaatgtatagcactctctaaaaatgctataatcatgatctcacacattattatttaatatatattctaatttctagctacaataactttttagccttaattttttattaaaaaaaaatgaatagcatcaatgccacaatatagcgtccatgcaaatttttagaatgacatcattttgtcttcaatagtatagcatcttaatattttgccacgtaataaatcatgttcactaaactttcatccatgttagactttttttttactaaaattagacaaaaatttttaaatccaacaanntcaatagtttaggggcatttttaacgaccttagagcatctccaatggtag

SEQ ID NO: 156348 - DNA, 752 bp, Cannabis sativa
aatttgggataacattttccccccaagtctgtacgggacctccgaggttgcgtgtagacttcttccgagctggcttcgcctttggatgggaacacgtgtcgagcatgaccgttcgagacttgatgtgaagctgactgggcatcccttcaggttttggctaataaatgctctgacaattaatatttcaaaatctgattttctctctccacggctgacggttgcactcgattagttttgatttcccatattcatttttgaggcgggaagctgaggcgtctgaggttcctttgattcagttacctcttttcgtgacttgcctataaatacccacagcattggcacataactcattttatcacccttcattgctaagtaaactccagagcgaaaatagttttctagcttcaaagtttctgaggtgccttcatacgactgccggtttgcttgacgttgctcgaacccagacattcgaatctttgagtaagtttctgatttcctttatgctttcctttgcatatttacactttgaatgcaactatgctgtagaaaactgcttaggaaaccctagggttagaaacttctgcaactcttctttatcatatcttcatgtgggtttacagccatagagcttgtctctgaaccgcattacgtctctctttcatcttgcttattctaagctttatgaacttttttgccctaactcaagaaaactttctgacttcttgagctttgacttttctttagacatagtc

SEQ ID NO: 156349 - DNA, 620 bp, Cannabis sativa
  modified_base (512)..(512): a, c, t, g, unknown or other
ttaaaaaaaaaaattattttttgattattttttcgtattttttatttcataaatttatattctaataaatagtagtaaatatttttactaaatgagttaaaaatattataaatcatgtttgttatttttttaattatttttaaatttaaaaaaaaaataattttttaattcttattctatcactttaattttttttattgattcatttaattattataaaatattattattaattagtattaaaaaattgactagatatttattaatttaattataattagatctattatatcattatttatactttaaagttgtacataatcttttagtaagtatatcaaacgccacttaaaaaagaaatttataaaaaataagtaaaagacaaaaaaataataaggaaaaaagaatcctaaaataataggatgttgcattttaaaaaataataaataataagatgatacctcacattttctgtccatatatttttgaacaaaaattagtgtaagaatacnttatttatagtttagaaatatattaattatgtagttcttaattcatatgggatttttacaaataataataataataataataataaattttattaagaagtcatattt

SEQ ID NO: 156350 - DNA, 635 bp, Cannabis sativa
  modified_base (214)..(216): a, c, t, g, unknown or other
agcaacctgctccacctcaatctagacattctcatctaaaccaacttcattgtctttgcaagtgctcttcgttttcatggccatttcatgttccttgaaaaccacatctccactaatcaagcacttcttgaatccaggttctaaacaccacactctatatcccttaacccctccagggtagcttagaaacatgcatctcaatgctctaggttgnnntttatcttgtctaacatgcacaaacatagtacatccaaacactttcaactgatctaaatttagtgctttacctgtccataactcttgtggggtcttgaagttttttggcacagatggtgatctattgattaggtaacatgcagttttaagagcttctccccaaaaggttttgtccaaaccagctcctagtaacatgcacctaaccctctcaatcaaagttctattcatcctctcaacaacaccattttgctgaggggttttgatcatagttctatgtctctcgattcccattgtggcacacaatccgttcaactcatttgagaaatactcaagaccattgtcagttcttagtaccttaattttgttcccagtctggttttctagtagcctcttcgatgtgtcaaaggttcctagagcct

SEQ ID NO: 156351 - DNA, 694 bp, Cannabis sativa
acttgtgattagatctaagatcctagtaaaataatttccaacaattaggtggctgagtttggtgttggcagctggccactcaaattattcagccaaggttaatcaatttcactattatcatttgaggaaaatcaagggaaaaaggaaaaaattgaagaaaaacctaaaatagagagctttctctctttctctctttcggctgaagtaaaccagagggattcaccctcaaagcttggtgtttttctggattaaagataaggaattgatcattcttgaagctaaggtaaccctagaaacttttgtcatagaattctttaagtttttacttggtttgattttatgattttgagagttagtggctgttaaggttagagatgtttaaggtttgaattctagggttcatttgagtttattatagctttttgcagctgattttgatgtatggaattagatttatgcaagtttgggtttgaaaacctaaactttgatctttaatggcatgttttgattcagtgggttttgctatggttaatttattggctggattatgttgtgtataccctaattaggtactctggaaggtttggttacatttggtagagttttgagcaagaaattagatttctttggtgaactggtgcaaaccggttagccagttttggcagggttccccgagtctctcatttcctcaatt

SEQ ID NO: 156352 - DNA, 553 bp, Cannabis sativa
gttaatccctaaatccatttccacaaaatatagaattggcattcaaattaaagataatcacatagagctcggaacgagctttctaacgatataaagaacatcccaaacggagtcgcgagtcaaaagtcatggcgaaaacaaaaacccaaaaataatattaatctgccattatcatggtcgcgaccagacctatgatagtcgcgaccactgggtttaaaaacccagaaaacccagttttcaactttgaaaatatgccaaactcacccccaattcaacccaaacatgcatatttctcaaaatcatttcccacataataaaactaacataatagagagttaaaatacaaatttcatgcaccaaaatcagatttaaacactatacaatatatgctccaaacttgagcaaaatatcaggaaattcaagctcaaaccttgaatatttaaacccaaaactcaagctcaagctcaacaataaaattcagagatgcataacagaaaagaagcaccaacacaatccctaaaattctctcttaaacttaatccaaaacaataac

SEQ ID NO: 156353 - DNA, 531 bp, Cannabis sativa
caaaagaaaatggtgaggagagcctctcttgctggctggttggtttgcacgaatgggagaagaagaatgaaattttgtttcttttcttcgaagctattaccttaaatagggttttcgtttcattatttttttttatttcttttaaaaaaaatagtaggcagccttaaaaagtaaaaaaagcaaaagactaacatacccgtaatgaaaaaatataaactttaaaataacctagggcatttttgtaattttgctaattccattaaaccgacatatcccaaaataatctccgtaattaataaatatcttcggtactcatatcccaaaataatctccgtaattaataaattacgctatttatttcattgagtaaattctcaataattaccctacgtaagatcataatcttactttattgccaacataattacctatttaataaaatatgcctatttaaatattatttattttctgggatattacaacctagatggcattctataaatagagagtgatggctccaggaaactatgc

SEQ ID NO: 156354 - DNA, 922 bp, Cannabis sativa
ctaaagtttcctcttccttctcctccaagaagctggtataaatgttagggttccaaagccaggcccgatatacagcgcaaaaaccaactttgtcgcacggttctacggtcacgatttctttctcagtgagtttttgagcaagcttctcctcaaactcatcggcttggactttgatggtcttctcggcctcctccttcgtcttcttaacttcctcttttgccttctcggcttccttctttgctttctctgcttcctccttcactttctcagcttcttgcttgaggcgggtaatctgctattgggcgttgtctcgttgctcacacacaacctttcattaggatactaatttgtgagtctcgccctccaaatactcgagtcgctcagaaagtagttgattggaagcaaaaaaaagcaaaagaagcatggagaattgctaacagatgaatatagaaaaggtataaaaagataatataagtataataacaaagccgacataccatgaagtgacagtccaaactccttgaaagcatctcttttggactcctaagattgagaaaatccaaatcagggggaaggagagtttgaagtttgcgccaacaggcgaccccatttgcctggggaaattcaaactcagcttccccagctgcgaccgacagggtctcgatggcctaactcagaaagttagtagcgagggtcgcctcgggatgaggggcattggcgttgggaaaaattggaggaggaacttgctcttagatctcgttgtcctaaaccttgagatcgataggctcgacaagtgatttcttcttataggcggcggttttcgtttgcttcttgggaggaaccactttggcaacaatagggactccaaggttggatgtccttttcttccccttacggtctaggatgtcttcataacccatgt

SEQ ID NO: 156355 - DNA, 783 bp, Cannabis sativa
  modified_base (573)..(583): a, c, t, g, unknown or other
atttctggttaaatccagaacatacagttattcacaattatagtaatgtcataacagtggaaagtgattgtgattatatgtttcgacttaagtcccatgatttatcagtacactagatttacactgacataataatcagcgataaagtttacctacacttgtataagtggaatgtcctttctatggcattaacaaagtatactagtatcatatgtatggagtatacatcagacgtgactgatattgaaagtggaaaagacatcttaagcttaccgttatctttctaagtcaatatcacttaattgatcttaggtaaatagatcttaatcctaagatttttaggttctagcataactgtattatttgtgttctttgacttgtttgttaaagttgaccaaatgaatcttcccaatactttcatcttgggaacatgatagtacaactgagggggagcgttaatcatagatatggaatctatagcttttataactatatagaagtgaaatgatgatttcctttgagctttgcttaatagagataaatggaaaagctcttattttagtaattatattnnnnnnnnnnnatatcatttataggaagctaagttttttaaggataaaatatattgaggggtagaatggtaaatttgtccctaatcgatgtaaatcatctatagatgatctttaattatttagaatcaaacaatggataaatcataaccactactagaaaaataggttttagtgacacacactaatcagtaactctaaaactgtatagtga

SEQ ID NO: 156356 - DNA, 511 bp, Cannabis sativa
ttgcttggaaaatgatttaggaaattttctttggaccgattgagcctttcaagcttacctgtaaaattttgtccttagtatacccaaagtggagccttagactgcttcaaaattttaaccacttaattgagcctaatgtgtttcctttaattactttcattctcaatgtaccttattatgtcatatgcttataattaagttaggggggaatgaaatgttttgagtggatattattttggaagcaggagattgaggaaagttatgtggatgtgtctttataatcttttggaaaaaaaaaaagaaataaataaatttgctaattcttctcgaaaaaaaataaaaaaaattaagaaaaaaaaagagaagaatagatcaaaagaaaaaaaaaaacaaatgatggtaggcacataaggtggaagttctcaatctctcacaagtttctttgggataaaaatatggataattgtgggtgtgtgtttggtatgttctgcttatggtataatgtagccta

SEQ ID NO: 156357 - DNA, 1040 bp, Cannabis sativa
  modified_base (231)..(233): a, c, t, g, unknown or other
cggattcaaagattgcagttcaattcttaaatgcaaggaaaagggccccagattggaaggtgtcaagcttattttattctattgtcaatgtgatcaaagtactccctgtagttcgcttcttttttatcaaccatagttttaatactttggcggatggtgtagctaaaaacgctagaattgctagtaagttggctgttttgtatcagggggagggtaatccccctgtgattnnnatcgactttcttaatcaatgaacatgtaattctttcaaaaaaaaattcagtgattagtcctccatgtgttggttcgtatttatttttggtcaaattatcattttacatttctaattacttctttatcatttagcactattaattcactagtgaaagtataatttagattccatctaaatttgtgcacaacattctaattctataattaacacttaaagggaatcagtatttgatacgtgaggaaagttaagattctatgattgtacatcatgttcccaaacatgcacattattagattcataaaacaaaagttgtaaaaatcatattttttgagaaactttaacgagtgaataaaaaaactaataatatgaacatgatttcatgataactcaggatttaggccgatctactattgatcatcgttataatatgaactaggtctttatgataaacattatgttaataaagacaacttcattatatcggtcattatcatatataatttttattatatacaatatatttactttgatgtcatactacatccataatccaaatcgagattacttgcactgaagaacgggcattagtgaaccgtactagcaaccattgattaaagattctataactttaatatgttactaattgttttattcatagctaagtggtcttagttctctgtacagctacaagtcaacaacctcatatataagaataaggaatttttcgatatttaatataaattattcaataataatattaataatttaacattcatacatatatcaaatgttcaactctttattt

SEQ ID NO: 156358 - DNA, 626 bp, Cannabis sativa
ttgcccagtccacttggcatatactccaatttatcacaatcagagattttaagatgcctaaggttgatgagtttcccaatatctggtagtgataatagactttgattccgagaaagatccaagtttctcaattgtgtcaactgacctagtccacttggcaaagaattcaattttttgcaaaaaagaaagttcaagatgccttaagttgatgagtttctcaaaatctctaggtagttctttgagatttgagcaataattgagcttcaacgtttgcaaattcaccaaattcgtaattgaattgggaagtgacttgagataagatttccctgaaaagtctaaatatctcaagtgtatcaacttgccaatagaattcgataccatctttccacttgaaaagttcaaatccaaacaacgtataaccttacagtttgatgttatggcattgcaaaatgactcctccttagagtttgacatactaaaaaatgttcgaatattttttgcatgagccaatgaagctgaaagttcacttcccgagtaagcattgtttacaaaagacacatgaagagtagttttcttgatatttccttgaccatttgaaattgcaaaagtagtacattcttctccag

SEQ ID NO: 156359 - DNA, 727 bp, Cannabis sativa
  modified_base (235)..(241): a, c, t, g, unknown or other
  modified_base (419)..(422): a, c, t, g, unknown or other
aaacatggatgaaatataatgaattagcaaattatcagaatatattcttgatcttgatttatgttccatttaatatattactgttgtaataaaaattgatacccataattttctttaacgttgtatcacactaccttatttcagtggtagaattttaaaattctaaacccatttttatttggttgacacttgtgataggaactttagaacacaactgagaaagtaaatctaaccnnnnnnntggatagaaataacttattagaattatgagaataagatagtagaattcttgcaaagtctattcgaatgacttggaaaaaaattcctaatcgtcaaaaacttttatggtatctctattgattacttaatctctagcaagtattttacactcaatttaaaatactagattgctatgttgnnnncttagtctagaaggaacttacagtttcagactaatatgtcacaagtagatatccctcaaacaatagtaagaggttaaatgtacttttatgtatgaattcaaccagactcctactgttgagtgggagccatctaagatgtaatcaaacaaggaacattaagggacaattaagaaagattttatgaaagtgacctatatattagatagtaagaatgtatatattaatagtccttatatctacaccaactcataaagtatctgaggtggtgattactctgggggtggaggagttattctagaagagtg

SEQ ID NO: 156360 - DNA, 1034 bp, Cannabis sativa
tttttctcctatttcactataacgtacgggacctattgaaaaaaaggtgatggtataactccggccaccgattttagtagagaaaatattgaatctcaacgtccatttaggtagaaatataatttctattcattttattaatgtatattgctttattttcatttctgtaaattttttttaagattttctatttaattaacattatgttgttgtgtgtgcatggtagccaaatttttgtcggaattggtcgccagattgtgcttataaggtaaatatttattaacttatataaaatatacatctttgtatttagtttttttattgaatttgtgtgtatatatattgtgtattttatttatataaatattgtaattttatggtatatattctaagtaatatatatgtatacatatgcattgtgaatgaaaatgagataggagagatttaattagtttagaaataaagtttttaaagttttgttagtgtaagatataatttattacatatataaatttttcaaaaatttatgtatataatttactacctagtaactagttgcttttttttatacctagtaagtaattaaataattaaaaatctaattttattgtatttcattatattgtaggttgtgagctaatttttaagatttcaaaaaatttagtgttgagcggattttagcttgctataagtatataccttcactaattttttgttattaataaagtatcaatgcatgcttagtgaagtttgaatatcttaaatattcatccgtaatgaagtaggttctgcgatatattgtactgcggtcggataggtgtaataatatgcatgttagttgggtttgaatatcttaaatattcaaccatagtgaagtgggtactgcgaatacatgtattgtggtcggatgagtggataaattttgaatcatagagaaattagagtgacatcataagtagatgatttataggccattcatccaatgatatattatttaagttaattcgaaatgaataagctaagagaaaaaatta

SEQ ID NO: 156361 - DNA, 611 bp, Cannabis sativa
acaataataaatgcagttaataacaccagaattcgcaataaatgtaaataaaagacaccggaatttaaagaggttcagccccaaatgtcggtaatagcctattccacttgagttttattaatcttagttgcaaaagtcaagaacaagctcttgattgcaaagaatgagaagtgtttatttttctaattgtttcggattgcggatccccctcccaggtcatgggtgaccccttatataggggaggggggtcagtgcttctcgcttcaggagacgcgaccaacgcggagctatctcaaccgtctccttaattttcgaaggtagttggagtctgatttttatgacaatatcccgctattttcgtgggttgacaactgtctttgagcctttcgtgggatttgaacatttgaaggagctactgttgacgagggtcccttatgggtgtgacatggttgtcaaccacctttgaagattaagcccatacttgggggtaacaccctcgggaccctcgttgatgggggatgacaaccatcctagttagatgaccccctaagatccaacttgggggggtgacaaccacccaagttgccccccccccaagacccaagttgggg

SEQ ID NO: 156362 - DNA, 517 bp, Cannabis sativa
  modified_base (83)..(97): a, c, t, g, unknown or other
gaattcatacattatgtacttataatcatgaaatgaatcatgtgaaccatgcaacattaaaagttatttctgatctatattannnnnnnnnnnnnnntatattgaaatgagttttattaaaacccaacattcagaccagctcaaatctacctaaatatgcatataataatctcagaaaacaataccaagcatcaacaacaagtgcagcaacaaattcttcatttttctttgaaaactatagtttttgagccaaaattctaaactagtttaaaaccaaccaaacatgcatcaaaatcagtttcattccactcaaacaagcatgctttaaacctcagaaacaacataaaatcacagcaagaacaacaacccaaactaagcatgcaaatcattattttcttccaaaaattccaagaaacatagaagcgaagctacaacaaggattacctctactagaattactctaaacttgatggaatcacttgaatcacaaaggaaaatccacttccttgctgctcaa

SEQ ID NO: 156363 - DNA, 550 bp, Cannabis sativa
tcgatagttgaatggattaattacaattgtacaagtgtctgacatgcgagttgcattgtggagtctatgtcgatggtgtgtcgattatatatcgatgaggattgccaccctcatgttgataatgttatcgacataatgtcgattatttttcgatggaaactgtcacactttgtgttgttgtttttatcgacataatgtcgatggatgtcgatatttgttattttttggtatttttatcgacataatgttgatagatatcgatgggatcaacagtgtttcttgttgtatcgtacgatggtgtttggtgtgttgagggttataattgggtttacaaagcagaagggagcttgacgttgacaattacaactgacacaaccctacaacaaatgcgccaaattttatatgaagagttggaggttgatcctttagcgtatgatttaaagttggagatttgttccttgtgcatcaagggacaaacggttccgccacaggttattaagaaagaacgccaactgagaacgttcttagagatgagggcaacaatgtcaaa

SEQ ID NO: 156364 - DNA, 509 bp, Cannabis sativa
tggagatttatggaggatcaaagggattcaagacttagaaaatatgaaaagaaaaattattttcgggagagattgaacaacgatcaaattaacttaaaaaaaataatgataatttaaattaaaaatacataaaaattttaatttattaatattatttattttttaaaataaatatatttttaaatattattataatatgaacaaagttttaattgtatacaagcagttctatcgtaagagtatacaccttatatcataatgaccacatgatttaaaatcaatgatcaaaaaagcttccctaccgatagggaagttatactaagtcctaccgtagtcttgtcttatatatattaatagtaaagtagtatatattatatattatatatacattactcatcgttaaccgactcattactcgtctctttgtttttttacgtttgagagcttgaagatacaggtatgtcttctcttattcaattgatttgttccgtacatatatatatatatat

SEQ ID NO: 156365 - DNA, 857 bp, Cannabis sativa
tagctagtagtaccagacggttttagaggattattattagacattagatattagatgagtgatggggtgatgggttctattattctattataattttttagttaaatttttttacttaaaaatacatattgagctgttaattttagttaagtattaaataatcgctacagtccgtgctgggagagagaatacgcgttgttggagagagtcacgttctagggttttgtccttcgcttcagcccaaccgcttagacgatttgacgataacagtgcctccccattcccagacgacgacggtgtaagctcttccccattcgcagacgacggcggtgcacgatcttccaatcgcagacgacagcagcgagttccttccctctcgcaaacgtcaacgacggcagttccgtgttcttccgtgtcgttgatcaaagacagtaaaagattggttcaacctgtttccgtgagttacagtcaacgattggttggttttagttttctgttttcatgagttattagttggctttagttcttttgttcttttgttgaacaattggctttagtttattgtttccgtgagttacagtcaacaattggttgctttccagtgaaagattggtttttgttcatttattttaaattactcttttttttttagttttttgatctttttattttttactattattaagttaattcctattagtatttttatggggttagaatttttagtttcatgaattgaaactaattaagttttaccattagtctttgtcttttgacatggttctatagtttctctcattgggtttggtttattggtttctggcgttagttactggttcttggttctggattcgttc

SEQ ID NO: 156366 - DNA, 639 bp, Cannabis sativa
ttttttttaatattttattctttattataacctctaagaatactgataattaatatattgtaaaagaaataatatacagactaattaggatttttgtcacatgtatcaaatcatgccccataatatctactaaatcatgccttgaaactttaacatgtaataaattgtgcccctaaatttttatctacgtcagatttttttttagtaaaattagataaacgtccttaaattcaataatcttaatagttcaaggagaatttttaacgacctaaaattttaggggctatgatttggtacatgtcaaagtttagggagcaaaaatctaaattaacctaatatataattctttacaaaatttcaaaaaataagaaaaaaaattaataaagattataatgaattgataataaaaataataactaaatagttattgatgatatattaatgtgtttcatttattgttcattatcgaatttttattaatgttatcgataaaaaattaaaaattattttaaatcagccgctcgcgaagcgcggcatatttcctagtatatatataaagaagaagtatgaggcggtgacatgacgctctagaatctctctaatagtaatatttgctctctccttaattctctctctttt

SEQ ID NO: 156367 - DNA, 525 bp, Cannabis sativa
cttagtggtgcgttttaacacaaagggggctaacaggcctcgtacttaggtattcgcgtcttaatcgagtcgtgtatgtggataccttatcagcgtcgataacataggatatgcgatttcttatcgattcatcgagtagtcattcagaccaactcgctatgtaaagaaatgatctttactaagttgctggagaagtctatgtagtcatggcatttactttggtatatgcgcgacttgtataatcccttctatgtcctaccttattacgtgaggcataataatgcgactgactctatcacggtcacatcatctcgctgagtttggttcaggagaggtttattctcaagaattcccttcttgacagctcagcaatcctcaaggaatgtgagtccacgtgtcattcttacgggagcctggtctcgagtttctaggcaaaaaattcacactataacagtgtcttatgtaattatcccaaaaaaataggctcttatatgcatctaagcccaatagcaaacatataggctc

SEQ ID NO: 156368 - DNA, 506 bp, Cannabis sativa
tctgtatggtgagcccttaatgcctccatctctttatctctccattcggcgaacatacgcctttgttcgtcgaacgcgagattcaccgcagcatgcagtttgccctgatcatgatgcagagtgttgttataactctgcatgagtccgagcgcatcacagagattttgaaattcggtggcgtctgcgatggtcgtctaggcattggttccaggcgaaacagtcgtattatggatgcctttgttgggggcgaaactgttattccagtctcttgcacaccaggcgcaattccattaataggaactgtttgaccattccccacacttgccagctctccaggattaatagtaggaggaaccctagaactctctgggttctgcgatgcaggatccagcgtctgtgaattttctgggtcaatcagacctctatgagtttgcaccatcgtattggcgattggatgttgaataaagagcgatttgtgatcctcctctcaatgaaagcaccaaaat

SEQ ID NO: 156369 - DNA, 562 bp, Cannabis sativa
tctctcttcgcctgggatttccttggtctctcactgtaacgacaatgacctccaagggaaatgcctgagacacgacgatggacgactcccactactccatcgtcgacttctgatcagctgcctcaatctatctctgatttgtgtaggtggaccagctctgaccttgtctgtcacgaactactcccccagcccccgcttttggtacatcagagcaggttatcgactctcttctctactttccctctcttcggatttcttattttttttacagatccacgatgatggttgttgttcgtgatgagggattgtgggtgtttgtagtggacgacggttaggggtcaacaccgattagtacactcattaccgggattgaaaatgagctagaatatttaggttttgataatattttcttattttttgtcatatttattttgggtttatattatgtatataggtttgtatataatttttattattggtattgggtgtttttctttgagaagatctgtacattgtaaattaattgtaatattttttttttcatttagtaaattaacccatt

SEQ ID NO: 156370 - DNA, 531 bp, Cannabis sativa
gattaggtggctgattttgaggatgacacctagccattatttgggcagcaaaggattaatcaaaatcctttttccaatttaggaaaaatcaaaaagaaaagaaaaggaaatatcatttcctcttgaactctccctctctctctcttgctcttttggctgggacaaaccaagggcaaggactaggttttctccttcatttctttggattttagcaaggattcaaggttattacaagtgaggtaaaaccctagatcattggttttatgtttttaaagctttttctttggttgagtatgtgaaattgtaaatcaggggctgttagggttagagttgttttgatttcgaattctaaggttagtttgagttgatttaagttcttagcagctggttttgttgattggtttgagttttatgcaattttaagcttatagttcaaagatttgagctttaatggcaacttgagatttattggtttgttctgtgaaatactggctagaatttattgttaataccctaattaggtactctgga

SEQ ID NO: 156371 - DNA, 605 bp, Cannabis sativa
  modified_base (163)..(164): a, c, t, g, unknown or other
  modified_base (388)..(408): a, c, t, g, unknown or other
tccaactattgacttcaaccaaacaaaacttagttttcattctctaataactattagatgagaggcactttctatactgatttcgaaacatccttaattgttcttcatccaattcacccatagtgataaagtgccatgcccacccatagcaagtcaagtactnnatcatagtgcggaagacggtggtaaccaaactcaaaagagagaaagagatccagtctcaaatcttgataatactctacgacaaaaaggaataagggttaaagatctgagcagaatgagtcatattattctgctgtaatcaatatcaggttttctaaactcttatgtgtttaatttcattattttagagatattcatatctaggatgttaattcaacatacttgnnnnnnnnnnnnnnnnnnnnnaaaatatttccaacaactcgcctctgagccatgctaatgatttactttcatgaaatatgaatttaaaacgatgaatatgttaattttgttcatttggacgtgttcatgttagtttatgtgttatttgatgaatgtatgtgatttacaaaatttttccatgaaaatatttttattaatttatttagattccttgtgaa

SEQ ID NO: 156372 - DNA, 535 bp, Cannabis sativa
ctgggcggtgctgataacaaatcttccctggagttgccgatgtgaggagtcttgaaggaatttaccagggtaagcctttgttgatagtttcctttagttcttctttatttcgttcaaaccttaaagttttttctatgtgtaggctggtctgaagttggcttacacatactcccgagctaagtctgctgcttcccggaatgcggctttgtccaacaccatgagggtggaggtggacttggccaagaaggatgctgatgacgccagggtggaacttggagctgggcgaagtcaacaagaagctttttactgctcagaagaaaataactgagttgactaaggatctcgaggcttctgatcgacttgaagagaccatcggcaccttatctgcagaagtgaatagccttcaagatgaaaggacgacccttcgaactgtcttccgtcggcaggaagaggagaagaagtctaaggaggaggagcttacagctaaggtggcgaggttggaagagaaagctcatgccttagagacagccgatct

SEQ ID NO: 156373 - DNA, 592 bp, Cannabis sativa
ctttaatttaaacgggtattggggtgggtacggggtgaatttaggaagtgggtatggggtgggggagcaatccccgcacccgcaccgccccatttacatccctaccgcatatgcgatttttataatatctcaaatcgcaaccacaccgcgagatcttaaaatcgcaaaaatcacactgcgaaaatacgatgtggtgcagtgcggtgtgagcggtttacactatcatcattatcaaacattatagtaaaaaattagaaaccaaactagtaaagctttaacaatacaaaacaaaaaaaaaatcttattaaagttttaacgtatattaactatcaagtcattatattaaattttttaaaaaaaataaagtaataaacacatatagtatatatatttatatatttattcttatatatatatataaaaaattaaaaattggtgactttgtaacatatagtggagtacggtttaaaccgtaattattagatttaaaattgcaaattgcaccgcaccgtgtcacgggctcaccttttcaggcagcggaacacccgtgcggcaccttgacttctctaagccaaggtcagccttccaacca

SEQ ID NO: 156374 - DNA, 520 bp, Cannabis sativa
ctagaagataacatgcatccaaactagctaaaatctacttaatcaagcataaaatcacctctgaaaataattttcaaacatcaacagcaagtatactacagattcaagacatttctttcaaaaatcatatttttgagctaaaaattccaagcttgaaacaaagcaaatatcatgcattactaatagcttaaataacttcaaattatcatgcttacatctctgaaaatattaacaaaacacagcagcaacaacatccaaataaaactaagcatgcaacctattaaacttactcaaattctcataaaactcaaaggaaagctaagggaacataccaacaacttgagatcactagatttttttttgcaaaatagagcttgaatcaccaaggaaattggtcggttcttgatgctccaagagagccgaaaaagagagagaggtttgagagaaaagctttgatttttttaactttgtaatttttttgaaactttgaaaaattaaggaaatgccacataacccttta

SEQ ID NO: 156375 - DNA, 570 bp, Cannabis sativa
cttaagatgcttagagcatgagcaatgtccgctctagtgctcactattgagatttacaccctaaaagcaagtaattaatggataatatagtagggagtatatgaaatacaattataagataaatgatacaataattataatgttataaatattaaatatctgaaaattccttatttatatagagaaagtataatcttgtaaggacatacaagagaattaagattatacgatatgaataacataagtcaacagtatattaaagtattgggaattttttatatggaactgctaagtacggtatactatacactataattttagtgtgtatgatttttatttgaatcacatatgtagatagacatgtaggaagtgtcttaagtataattcgataatgcatggctaggtcaatatataataaaaatctttcattaacgtgccgtttactatgaaagggttattcatattacaatgatgatattaatagatcaacctgaatcttgagtatacatgaactcctatttgtattcattaagttctttaattcactcattaaaatttctcagagaagat

SEQ ID NO: 156376 - DNA, 501 bp, Cannabis sativa
acccacttgagtaaccgtctagagacatctggcttctgcagtatttgtcgtagtggttggtcggtatacacccgaacaagatgagcttgaaagtaaggcctaaactttcttatttctagaatgaggcagtaggcgagtttttctatcaacggatatcggccttcgacctcgatgagtcttttactaatgtaatagactggatgttgcacgccgccctcttctctaatcagtacggcactcacggcatgctctgtcactgctaggcatatccccagttcctcaccgtccaaaggtttagaaaggacgggaggttttgcgagttgtgcctttagatcttgaaaagttctttcacattcttctgtccattcgaactttttgtttcctcgcacgatgttgaagaatggaacacattgacacaagaatctgctaagtgcggcgattcgaccagttaggctttgtacctctttggtttttgtgggcgagttcatatccaggagggct

SEQ ID NO: 156377 - DNA, 687 bp, Cannabis sativa
  modified_base (639)..(640): a, c, t, g, unknown or other
taatgaccaaaaatgttgtagtgaaaggatgtactaaaaggaaagtccccaaagacaacgcaacagcggaagcactcgctcgactagccagctgctccttgacaactaaggcaaacttggtacccgctcagttcttcaaagaactaagcatccatatttcaaaagaaatagacatgttaaacaaccaacatggatacacctttagcagcatacctccaaacaaaaaccttgccagaaagtagggttaaggaagatgtttgctgggtgtccaatcctagacaacataactcatagatgtggtatcccaataccacctctaagaagtgttaccaagaaagaagttgaataactactgaaatgggtgcataaaggctctacgacaatcatgccggggggtaaagtcaattgagggcagaatggatcgaactgcagcatcgacctggcctccaaaggttggccaaccatggcctcagtaggctggtcgggcatggaatcaacaacctggcagaccactacctccaaacgctagccagccatagcctcatctaattggccaggtaatgctccctcaacacggctggccacctggtctgtacactggcccaatcaaccaacagtctgttgggttttatgccctanntaaaactctatttcaatgtaattcgtattattcaatatcaataaaga

SEQ ID NO: 156378 - DNA, 888 bp, Cannabis sativa
ttgctaagtgttaattgctctgtggggattgctgaaagctttactctgggcatgctagtgagacatcctgctcggactatgcttcccaagcagatgctccaagtagattccacaggtcacaatttatgtgattccacgtcagagtgggaaaattgggataacatttgcccccaagtctttacgggacttccaaagttgcgtgtagacttcattcgagctgcttctacctttggatggggacactttgaaacgcgaccgtccgagactcaatgtgaggttgactaggtgtcctttcggttttcggctaataaatgctctgaaaattaatatttcaaaatccaattttctcgctccacggctgatggtgcacttgattattttttatttcccatatttgcttttaaggagtgaaattaaggcgtttgaggttcctttaagatgattacctctttcgtgacttgcctataaatatcaaccaacattggcacataaactcattttcaccacccttctttgctaagtatgttcatagcgaaaacagaggttcttggcttgaagtttgctgaagtgccttcatcaaagtttcttgttggattgacgttgctcaaacccagatatatgactcttgagtaagaatctgatttcatttatgcttatttttgaatgtttacatttcgaatacacattcgactttgctgtagaaaatttctaggaaaccctaagttcagaaacttctgtgattcttctttgtcatggcttcatgcgactttacaacccataatgcttgttttttgaactgcgtaatgtttgtgtttcatcttgtcttattctaagcttcatgaaattttttgccataactcgagaaaattttaaacttcttgagttttg

SEQ ID NO: 156379 - DNA, 666 bp, Cannabis sativa
attaatatttataacacttctaatatttttttaattgtcttaattgtggggtgttcataaaatacctgattcaattcaatccgtacgatccaatccaaaagaatttaatattaaaaaattaccaatccaaaataatcgaaccaattcgcacttttacagataaaattagatttgaattataaagattggattgaatccaaaatttaaaatccgcacttaatgcatatcaaatacacactataagcaaaatagcgtaaaaaattagattagatgaacacccctaattattatgtggtgttctcaaacaccaaagaggataacaagactaaacaataaccgtgaaccgttaacacaaactataattaatttgcaaaggattgaatactcaacacaaactatcaaaatatggcaactttaaatagaaaataacaaaatactttttagtaatctataaaatcaattaacatttaatttaatttaatgttacagattttaaagtttgattttgtcatgatcacctcaagaagagtgagcaatgttgatttgagcgtaattttatagaaaaatattttaagaaatccgagtcctgtggtaattttttcttggctaattagtaatttttccccccaaactttgacatgtactaaatcgtgctctctgaacttt

SEQ ID NO: 156380 - DNA, 564 bp, Cannabis sativa
aaaaattcttaggcctttcagcattaatcgtccaagtcttcttgaatcaccgccatcagccgttctatccattgtcactgtactggtaataaatcggttttagattttattcctgcttgtctccaaactaaaaaaaattaaaaatgtatattagtttatctatattattatttgttattataataaatactataataaataattaaaacttactaatttttgatcttgtatataacggttgttgtttgtacgtgcgacgatatcagtcatgtatttcaaaatataaaaaccacattcttgatttttaggttgtcttggagaagttgctagtgaaattcctagccacggccaagatacgcatttgatgtccctatatattcgtatgctctgtttgaaaaattatattaacatttcaattcattagttaatcaaaaaatttgttacataaatagtcattaaattattacctttttaacattacagtaatttgttcgggaacttggtggccacgtatagggcctaaatggataactttccttggcgcaatgacctctagcatccaat

SEQ ID NO: 156381 - DNA, 755 bp, Cannabis sativa
  modified_base (27)..(27): a, c, t, g, unknown or other
  modified_base (517)..(518): a, c, t, g, unknown or other
aaatattaccatccttacgtaataaanataaaaatcgagcccttaaatgaaaaacgccattaacgttcggactaagctttaaaaagttccataatttctaactcaaaatcacttttacttcaacaagaaaacatcagaactagtcctatgactacccgagaccaatcctataaggtcagaatcttcataactattctaattcataaaacccctacacgaaaataattgtttgtaaacttaaaacaaaatgaaactataccttaagctttccctcttcaagaatttgctactaccagagcttagatcgttaagtttcaagttaaaaattgaagaaaatagatatagggggagaagattttttggaaagtaagagaacgagggtttcgattttcgttcttctctaccgttataacttaaaacttaatatatatatatatttaaaacaaacaaaacttcagattcgttttatgtatataataataataatataatattaatatattaataataataatannaataatataatattaataaaaactgtattattaataattatcttattatttttttgccactaagaaatctctatttctacagtatttggccaactttgaataccctaaaataaccccgatatttttaaaataaacttaccctaataatcctatcaatatttctaacttaaactgttgtgacattgttggcctccactcgggtctctagggtcgccgaacatgaaaatatttttattt

SEQ ID NO: 156382 - DNA, 533 bp, Cannabis sativa
ccacaattaaaatatatataccatgaccataaaattatatactaccattgtatataataaaatagaaactaattaaatattatttataataaatacttttgatttaattaaaataaataaaaataataatttaatatatgttgcatgccaataaaattatatacatacattaaaataattttactatgctaataaatttatgtaccactattatacatagtaatataaaaaataaatatcatctaagaataataatataccatacaacaaaacaaaaatatactatacaataaaatatatattccaacaacccacaacaactcataaaaaattagaaaaaacgacataactttcaaataaaaaatattttaacaaaactagtataaatataccataaaatttaagtaacttgcttctaactgtaaaaaaaatttcatttcaaaaacaaaatatgaaaaaaaaatgattatttttttttatgtggcaaaaataatatcaataataaatagtctaaaagggtcatttctcaaaaa

SEQ ID NO: 156383 - DNA, 605 bp, Cannabis sativa
  modified_base (464)..(468): a, c, t, g, unknown or other
gacgatcttcggtagacaaacctggcagctctaataccaaaattataatgccctaatacttaggtgctacagtaattttctaattattgtaccacatttgttaattaaaggaatttccttaaaaatcgtgccaaattatatttttaacaaaactttaaattttataaatacatatacatacatacaatcgagatcctgtatttaaacttttacaatcattttcaaaataatatatcacaaacatgtcgcacagtgactacaaaatataacctaagttgtcttgagactgaacacttcaggtcgcaccgtctcgacatgtacaacatccctcgagctcggaactcattcctattcaaatttcgtatttcctttacctacacatgaaagtaatatctgtgagtcaacaaactcaataagaaaagcatataacatacaatatattaccgacttgtatctaggcgccnnnnnacctatccacaaggcttatatgatgagtaagcacgttctttactaaggtatgaccactgtatcacatgcactacgtactgctactgtacgagtgttggtagggttttctctgcacctcaagtacccttaagtgttgt

SEQ ID NO: 156384 - DNA, 516 bp, Cannabis sativa
  modified_base (47)..(58): a, c, t, g, unknown or other
  modified_base (487)..(488): a, c, t, g, unknown or other
taaggttactcaaactttatatgtgtttaaattctattattttagannnnnnnnnnnnggatgttaataaacatacttgtaaataaatctaggtcctggtaaaatataatctaaaagtcagtacccaacccttgagtgttttggttgaaatagctttgtattaagtcagcagcttcttgaatgtgatgatcttggtcgtcttggctccttgtcatctcacgagcatgttcttccaactaagactggaactccctcttttagttagcgagactctcagttaaggctgctcaagtataagtttgctcatggtgaacggtttggaactgatcctacatttgacctatcgtgtctcataattgatccatctctaggtcaattccttcaatatccacatggggttctcttcggggcctaaagatgccaagattgttggaaattattttaccaggatctatttactaacatgtatgttggattaacaacctannatgaattctaaaacaataaaaataaaca

SEQ ID NO: 156385 - DNA, 711 bp, Cannabis sativa
  modified_base (612)..(619): a, c, t, g, unknown or other
tataagagtcattattctgtgggtgtaagggcccaatggaggcttgaagcggggacgttacattttcaaatcctgtatttaatatttttatttgtttaggtagttttatttatcacaagtgccggaaaagtcgctggagtttgctgctggtgctagaaaaatcaccggagtagctgtcggtaccgaaaaattcgtcagagttgctgccgacactagaaaatttgtcaaaattggcattgctgccggaaaaatcactaaaaaataccaagaaatttgtttcttgatgaagaaagaaactagtttcttgatgaaaaaaccagaaacgaaaaccgatttcttgatgaagaaatcggtttcttgatgaagaaactacttttttagtaattttttcggtgatgatgccaattctgacgacttttttaacactggcagctacttcagcgactttttcggcaccgataacaaacttcagaaaagtaatcggaatctacatagtcactggaaaaattaccaagaaccagttcttggtaatttttctaatgattttttcgaggacaatgccaattctgatgacttttatgacttcagtagcaactccgacgactttttcgnnnnnnnnagctactccggcgacttttctagtactgacagcaaactctgaaaaatttgttggaattggcattatccccagaaaaattaccagaaaaatca

SEQ ID NO: 156386 - DNA, 896 bp, Cannabis sativa
tacagtcttttggattataattttgatttttataatttatggataaaagaccttaaatttgctctgaataaccataaatgacattaaatttacactatctgatcataatgatcttttatgttcttcaactaactttatagaacttgaattttctctgaacgaccataaacgaacttaaatttacattatgcgaccatcgtggtcttttatgcttttcaaccaattttaaagaacttgaatttgctctgaacgaccataaacgacattgaacttacattatgcgaccatcatggtcttttatggtcttcaaccaattttaaagaacttgaatttaatatgaacgaccataaacgaccttaaatttacattaagcgacaatcatgatcttttatggtcttcaaccaattttaaagaacttgaatttaatctgaacgaccataaacgaccttgaatttatatatgcgaccataatagcttttatgtccttcaaccaattttaaagaacttgaatttgctttgaacgaccataaacgaccttgaatttacattatgcaaccatcatggtcttttatggtctttaactaattttgaagaacttgaatttgatctgaacggccataaacgatcttgaatttacaccatgcgaccataatagtcttttatgttcttcaactgatttcaaagaactttaatttgctctgaacgactatgacgaccttgaatttacactatgtaacttgaattttctctgaacaaccataaacgaccattaaggtcgcacatggtctcacaggtcgcatagggtcgcacatggtcgcactatatattttcataccacgtgcgaccttgttcatttagttaaatttgtaatcctttttatactttttatatttatg

SEQ ID NO: 156387 - DNA, 1066 bp, Cannabis sativa
cagagtctcagatgttgatgaatcagcatcattaatgggagactcgctataattggtatggtagtttgtaccaaggggttgtccataaaataaagaatatacttgaggtatgtatatttctagatgtgtttgaaaagattatcaagatttctaccaagcacagaaaaaaactttaggatcaaggaatgatctttgattaaatgttattagtgagaatttgggaaatgggtatttcaagtttagttgtgggtacctggtatgagcagtgttgcctctaccgtataggtttaatcaatttactttataatgatggttaactgtaaatgatcgggaaatttaaaagttgtgtcaattcaagggaaattgatacaagttaaaataagtggagatgaacaagatttaagttgacaataagaagggaattccttaagtttaagtgaacaaaaccgatgagaaattgcaagaggttaatgaaggggtgatggaaattgaattttattaacgaaagaatgaaagcaagaaatacaattaggaacgacaaagaagcatctactttatgataacccaccatgagcttactttggagttaagcatacttaacttggggtaatgtgaggacagagtacgctagaaagattcatattaggatgcagaatcggtagtcgttctagagattattaagaggaagggatgtgttaataagtagaaatttacaaggtattgagataagtatatattagtgggtggaaataagaaatgctctaattgaatatctatcagaaatgaatacttaacttgttactaaattaaataagtagataggcttaggagatcgcatagaaggaatagaaagacataaatgcaaattatgtactgtgagatcttatgattttgactgagtagtaacggtttgacataccgagttaatatgttgtctattagtgtagacaatttatacagtaaatgagcatatggaattcatacgaaagaatagtctaatcttgtgaaattccaaggttgatatctttggctatgatgttaataattaaagaaggttattgaaaac

SEQ ID NO: 156388 - DNA, 565 bp, Cannabis sativa
ctcaattgtggaggtgcccaatctgtgggagaaagaacttatgaaatggtaagtcattggttgagacgccgactggaagaggcgcagcatcgaaacgctgagttagaataagaggtggctttgcccaaggtatcacacggaacgaacactcaaaatcaacttgaacttcgagtgagaagaccacgaggcagacctcatggctcacgagccaggagacaagaaaaggcccgggaagaacaacccgaggaaaatgagtcaccccctgagaatcaggatgagcagccagaaaggagacaaccggaaattgatgaacgagaaatccctcatgagaatgaggaggatcttggaactcagccgagagaacagaggtcgcctgcaaggaatcaccaacgttcttcccaaacccatagagtgaggactcgtacgtaccctgatgggggaaatacgacaaaccgctttatggaggaaagaacagagcttgaagaagcaagtgtgacttcgaggcgatccagattccatagtcgatcaactcgaagaggaaaaagcactcaatgagttaatgatc

SEQ ID NO: 156389 - DNA, 706 bp, Cannabis sativa
  modified_base (112)..(142): a, c, t, g, unknown or other
aacgaggattaggctattacagggctgaacctctataaaatccttgtgtcttattattgctttttcatatatctgttataatatatcgtttatcgcttataaaatagactcnnnnnnnnnnnnnnnnnnnnnnnnnnnnnnnttggtgctttcattgagagcaagatcatgaattgctcttcattcaacatccaaccgtcaacacgatggtgcaaactcgtggaggtcttactcatccggagaattcacagacgctggatcttacatcgcagaatccagggagttcaagggtttcgcctactgttaatcctggacagccagcaagcgtggggaatggtgaaacagttcctatttatggaattgcgcctcgtgtgcaagagacttggaataacagttccgcacccaaccaaggcatccaggcatccataaatccataatacgactgttcccccttgaaccaacgcccagacgaccatcggagacgcctccgaattacaaaatctttgtgacgtgctcagactcatccaaggtcataacaacactctgcatcatgaataggacgaagtgcgtgctgcggtgaatctcgcgttcgatagacaaaggtgtatgttcgccgaatggagagataaagagatggaggcattaagggctcaccatgcaaagattgaagatcgtagtcagcaagccaccatgctgatacgaagag

SEQ ID NO: 156390 - DNA, 584 bp, Cannabis sativa
tttatactgaccataagagtctcaaatactttttcacccataaagacttgaatatgaggcagaggagggggctagagcttgttaaagactatgattgcgagatctcggccaacctaaatggagaactatccccgatgatctcggcccttaagctctctctcttcaagaatttgttgtcctgctactatcaaagcttagatcgctaagttttcgggatgaaaatcaaagaaaatgaatataaagggagaaggttttgtcgaaaggaaagaacgagggtttcgttcatccttctgctgctactgtaatatttttaaaacatataatatatataaactgataaacgaaactttcgtttatatacatataataatataataataataaaatattaataataataatatatattaataataaaaatattaataatattaataaaaattttatcattaatagttatcttattatttcttagtcgataagaaatctataaggtatttggtcgactccgagtaccccaaaatactttggtattactaaaatcaatttatcataataatcccatcaataattctaactaaaac

SEQ ID NO: 156391 - DNA, 512 bp, Cannabis sativa
tttttacaaaaattagtgtcttatataattatcccttaaatattttgttacacggcaattattttttaaaaatttcctaatgtcaaaaataaagtttaaaatttgatattgtaaattattcagatttttgtaaaattgataagtagtcatataatagttacaatatacacaattatttaaaaataatggactaaaatactcttctgaatgtcaaatgggttcaaaatactattttaagggatgtactacaaaaattttctaattgaatgaattaataaatgagacacgaatttggggtaattttatagtatgccctctaaaatagttgtttcggtacacttttatatatttaattattcagaagatcgttttagactattttatttttatgattgtgtgttgaaattatttagaattatctaaaaatttttagaaaattttaattatttacaatatcgaaaataaaatttaaatgatttattttaagtgtgattatttttttttatatgtat

SEQ ID NO: 156392 - DNA, 580 bp, Cannabis sativa
tctgggttcaggttgggttagggtccgagtctaagtttgagtcagagtatgggtttttctgatctcgatctgggtcgatgtctgatccgtgtccaggtttgggtccgggatctgggtcccaggtttgggtttgggtctacgtctgggtccaggtcccgtgttacgatgccagtcgtggtatgggtcggtatttgagtccgggtctggttcgcgtccatgtccaagactgaatcccagtttatgtaagggcttggtctgggtctgggatcaagtcctgagttcgggttcgggttcaggttcgagtctcagtcctagtctgggtttgggactgggtccgagcctaagttccgaggctgggttctggtttagtttcaggtctcggtctaggtccaggtcctggtcgtgttctagggtcctggtcgtgttccagggtcctggtcacgttctggttcaagtttcagttttgggtcacaggtctgagtttgggtccatgtcctggtccagctttgggtccttctctgagtcccaaatcaagacaccgactatgggtcttgtgcaagccctggttcccggatcccag

SEQ ID NO: 156393 - DNA, 519 bp, Cannabis sativa
  modified_base (36)..(42): a, c, t, g, unknown or other
taataagtaaatctgattattttgaaatgagttttnnnnnnngcataaaacccaacaaaaagtacactgaatgcgccgttaaagcttatactgcgccggtaaaacatgtctgagaatcttggtcagtaaaagactttttaccggcgcgtagactaaatgcgccggtaaaactgtgttcacaccggtaaaagggaaacgtcggtgttagaagatacccttattcgctatgaacctggtttgataaccttttgccggcgcaatagtgcgccggcaaagcaattggcgccaatcctcagattggcgccaaaagttttgcggattggcgccaattgttttaccggcgctatagatgcgtcggcaaaactattggtgccaatttgaggattggcgcgtacatttttgagctaccttttaccggcgcagtaatgcgccgacaaaagtatttatatttttttaaaaaaatattaattaattatatttaattaattaaatataatttattaattttttttaaataaa

SEQ ID NO: 156394 - DNA, 535 bp, Cannabis sativa
ccctgctattgcgtctacgagctggtcgatccttggtagtgggaaacagtctttgtggcatgccttgttgaggtctgtgaaatcaatacagactagccattttttgttcggcttgggtactcatacgggaaacgcgacccaagccggctagaaagcttcaattataaagttgttgttgcgtagcttttcaacttcttcctttagggctactactcgttctttgtccaacaaccttcgctttttttgaactggccggaagttgggatcgatattcaggacatgcgaaataataaaaggatcaattccaaccatatccgcatgtgaccaggcaaaaaattctaggtttgctctcagaaattttatcagttttgattttacttcgagcaacaaaccttttcgatctttagcaatctgctcgggatttttggagcgatctcggtctcttctaattcttctacaggtccaacatggctgcttgggtccccaagtcgaggatccacatcttcatccacgccttgggaagttccctacttgg

SEQ ID NO: 156395 - DNA, 728 bp, Cannabis sativa
gtttgccttctatttttcttacaagaagcgcctgtgtgtcgactagcattatcttcctggtggaccttcactaagtgttccctaatcctattatcgtttaactctaatttgaatgtgtgttttgaaaggttgggtttataagggacgacaatctctgctggaaactcaatttctatatcttttggacgatcaacttctgaaccagattgggacattgctgcaagaagaaagcaatcccaatccctggaaagaattttatcaaactagaaggtggtgaattgaaggtcctgtaagacttacgtattgcctaaaccctaatatttgcccaaatatagttcaaccctaaaaattactaaaaccatatgagatgacaatgaaatatacaaacaaggcagcaataacacccataaatgcaacataacaaacgtataagatattaagaagaaaaaatcacttactgtttgaagttagggtttggggcaatagatagctcttcagtttgcgaatccttggatgcagtgagggtctctttgagcatgtgaagtcagaatttaagtcggaggaaactcgtagaaaaaatatcaaggtcagagatggcatgcaaattcggtaccggttcttcagcaaaggagcttgagagtttttcaaaatttctaaaatggaagaagtaatgcaaaggtggttcctttttcttattttatactcttgaaatcattttcgtcggatca

SEQ ID NO: 156396 - DNA, 524 bp, Cannabis sativa
gaccaggcgcacatccccttatcagggtttgtggcacgattgtcgtgggcgggaatgtagcagtccagctcgcccaggtgtccgtcctggtcaagattgcggaggcgtgcctccgaaattttggacggaggacttacccacctggcgcccaaggcaccctgcctcctgtgaggaaccgcctcagcaagctcctcactgacgtagtcagcgccctcaaccaggatatccctgtcagcatcgtcttgttgcccagcctcattgtactccccaaaattagggggtccaatctcttcctctccctcagcagcgaaaggactgcccggacgcgcctcgtccaactcctcaacctcctggacttcagcgtccccctcacggtcctcctccattgggaccgccaaatcttgtttggcgtcgggtagagtagcaagtcgagccacttgaggatcagaagcgtcaaccagacgcgtggttttcttcgtacgatccatcatcctatggctgggtacggaatcagaagaatttcc

SEQ ID NO: 156397 - DNA, 567 bp, Cannabis sativa
ttccttaaaaagttcttttttttaataaaaatagctttttaatgattacaatggatatttctgtcatgttcctctttttaaaaagatgcatgtcctctgattttggcggttgtgcggtttcgaggtacatcgaaattaaatgaccatattttccacttccactttgaatcatgtccctaggatcaaatctttctctgatctaacaaagccactatcataggtataaagtaagaaaaaaggatccacctttgcattattttctccattttagaaagtctaaataaactcttaagcttcttcatcaaggatcacaattaagtttgtccgaggacttgtaggccatttctgtccttgacctttttcctgagagtttcctccgacttcatcctctcaaatcgatccttgcttcattcgaagatttttagacggagtaaccagtcattgccccaagccctaactttaaacagtaagtttctttcttctttctcatgtttgttacattgtttggatttgttaattagtttgtttgtatcattgtcatctcatctggttttggtagtttttagg

SEQ ID NO: 156398 - DNA, 786 bp, Cannabis sativa
tgcctttactaatctaaattactaaagcggtcattacaatagcattatatctttagcttttgatccatctcagaatcccatactcatttctacagatttcaagttagttgcagttgaggccttttatattggggaagaataataaaattgtttcacattcgaaatatactctataagaacaaaagaatggttgaaatcaagagagatttgaaatcaattgaacaaaattatgttgatttcaaatctctcttgatttcaaccattcttttgttcttgaagagtatattttgaatgtgaagtacttttcttcttcttttccaatctcaaatgcctcaattgtcactaacttgaattctgtagaaatgtgtatgggattctgagatggatcaaaagcttaagatataatgctgtcatttccaagtgaatcccaactctgcttggtcatttccttatttcatgtattgcaaatgtagattgtttagtcttgagtagggaagcacttcctgcaacaaattagaccctaacacgatgacaataccacaacatcctcagggagaaaatcaaagattgtctttttgaattgaaagccttctatatcaacaagtatgtatgtgatagttttgatatctttgttgagctatgggaacttgtcttggaagatgaatctggagagttcaatataaagtaattttcctcttggttttaattgtactacatagcaagttatattgcaatgtaattaatattattgagaatggtgcatagcagtttttgtggtagggcaat

SEQ ID NO: 156399 - DNA, 536 bp, Cannabis sativa
  modified_base (26)..(31): a, c, t, g, unknown or other
  modified_base (240)..(243): a, c, t, g, unknown or other
taatgatcaaagctttgaactcaaannnnnnacttgcataaaaccaacaacacacactaaaaccagctgctaggagttaaaattaacgcaaaagaaccctaaaattcgaaccctaaacctacctaaacctaacagccactatatcacaatttcactatttcaaactaacttaaaacttgaaaatacacaaactcaagggttctagggtttaccttattttgattctccttgaaatcttgnnnnaaatcacaaattcagcaagaaatcccctggttcctagctggttcaaagagagaggtgaagaaaagagagcttctcttgaattttttggtgttttcttttgttttttcctattttcttccaatgtgagaaatgcattacctatccattgattcagcccacaaagagggcagctgttacaccctcacacaaccacaacatcctcaaaaaggaaaagactaaaatgcccttaatgtaaaattctaggttatttttaaagctaggggtaaaatggtcaaaatccaaaaccccgctca

SEQ ID NO: 156400 - DNA, 639 bp, Cannabis sativa
tagttttggttactattggggtggacaatatcaaaatcaattcaattatatatcaccagtaatattttcatattttacttttattttgggaataaaaaattaaaaaacaaagtgttactaaacgaccttaatttttacgtattttttttttatatatttttaatttaatattgaaatttagttatgtaattagatatccaattaaaaacttcatccatccaattagtaattggattggattttgaggtctaattggattgtatcggatgataattttccaaatctaattaaaattggattggatcggacgaggaaaaaaaagttagattggatcagatgactacccttaattagcatcaataataaatagagcattgctattagactatccagtactttttataggtgacctattggttattctttaaaagtttttttcttaagtttcaaaagatctattacataattgcactaatagtagtataacacaaaaaagtactaggtaccaataatatcttttaacaattctctaatagatatgttatcagttatcttccatagtgattggtatttggtacttaatcattcttttagcattttatatatattgagaaaataataatatgtttttgtaggtga

SEQ ID NO: 156401 - DNA, 561 bp, Cannabis sativa
taaacctagaaacatgataggactcatccaaattagtttgactttgagtggcttagatgcatataggaagataatttatttctagatatttatttagactaggttgctaaaataaaatatcacctacagtagttttatttaggcctaattagtattgaacttattcaatgaataataattatttaatgaaaggttaaattcctctcttttgggcctcgtgtgagagttagggggccaacagtagtgggtacgacatactgaactcaacactttctcacatgaacaaccccaactgtgaaggtctatttgccttatttaaataattatattaggctaattatactagtttaatctaattaaatttaattagcaactcaattaattttaagaaaaatgaaattaatttttcattggattattttaaaaattaatttagaaaaatacacttagtttaaagataagattctagaaagtgatttctattaactaattaaaactttctaatatttcattaagtagaaaaatatatttaagttgagaattaatttgttaattaatttt

SEQ ID NO: 156402 - DNA, 589 bp, Cannabis sativa
aacccgtaccctgtgacctaaaatttgaaccaaaacgagaagttgaccgagactggaactaggacttggacttggaatcataacagaaattggacatcaatccaggaccataactggaccaggacccagattccaaatctgacctagactcgaattgggagccggacccgggttcactcaggacccgaacccgaacttgaactcagactcaaacatggaaccagactatggacacagaaccaaggtcatgacctagaatcgcacccctgtctcgatcccgaaccaaaactcacaaataggtcctgggccctgaacaagaaccatacctagacccgtgacagtgatcaagatcttgactcgagatttgggtaacgggccgtggaacaaaccagtagtcggtttctaggtctgggacttagactaggaccaaaacccagacgaagaatcaaacccgaacccagaagtagaccagggatccaaaattagaacatgattaagaatcgcctaacagggaccctagaataagactaggaccgtgacaaaaactcgaaccctgaccttgaaccgaacacagacctagcctcagacc

SEQ ID NO: 156403 - DNA, 501 bp, Cannabis sativa
  modified_base (45)..(50): a, c, t, g, unknown or other
  modified_base (448)..(473): a, c, t, g, unknown or other
ttcatatttagggtgttaatctacatacttgtgagtagatctaannnnnnggtaaaataaatttccaacaagagtcgacactagcccctttgattatcgtgtaatctctctaaattaggtttacaatgtctgacatgtcctcttatgggcgttcctagacattttctccatgctgcattaaatgcgaagtgactgttcaactcaagcctttctagtccgaaggcgccttcttatgtcttgactcccggaggggaagataaatcttctgctcacattcgagagctaacgacatcaaccatacttgttgcttctctaattcaacttccaactcatctccgggtgacatgcttattttgtccacatgtcacacacatcgacaaccacgtatattgagaataaatcagggcaacaataataaatagataattcatagcgtatctatatcgtnnnnnnnnnnnnnnnnnnnnnnnnnntgagagtgcaattccaaatctatagtgg

SEQ ID NO: 156404 - DNA, 779 bp, Cannabis sativa
tttgatgtaatattatcttaactagttactttttattaataacaaattatttaaagataaattttttctcatacacatttggttgcttattttgatcaattaactttaaaattatgattttttttttttttttttaattttgaggtcatattatgtcattttataatttaagatgctttgaggttacttttttttttttttttacaattttaaaccatattttgagttgtgaaaaatatatatatattttacaatataaaaataaataaacaaaataaaagtgtaatgtagcaaaaaattttaaataattaaaacaataatatttctaagtaataaaataaaacaaaatatcatgaaaaatacatacacaaaacaatcaagtgttataaattcaacacacacaaaaaaaaaataataataaaagtataataaatatgtattatattttgggcctttttcatttttatacttttaatttttttatttatttattatttttttgcatttttacggaattttatatagaaacccttattgcaactagcgttgcaacctaaatcgcaacaaaatatcgtatagaattccctattgcaactagtgttgcaactactttagaaacctaaaccgtaaattaaaaaaaaaaaggttaaaaaaacagtttataaagtaattccccttatatttttcaatattttttattatataaataattttttaacatatataaatgtaattagattggatcgatttttaattggattttgagattgacatccaat

SEQ ID NO: 156405 - DNA, 600 bp, Cannabis sativa
gctctgtccgacaccatgagggtgtaggcgcacttggccaggaaggatgctgaagaagccagggcggaagtcggagctattcggttggagttgggtgaagccaacaagaagctttttgcctcttagaagaagatcactgagttgactaaggatatcaaggttgatgaccgttttgaggagaccatcgagaccttatctgttgaggtaaactgtcttcaggaggagaggacttcccttcgggcagttcttcatcggatgaagggggagaaggaagccaaggaagaggagctttcagccgaggtggccaggctgaagaagaaggtcaatgccttggagatagccggtctagagctcttctttgatttttggaaggttaatcctcaggccaattttgtctacttgggtgatgctaaagacatgtaccttgagttctgcgtgtcccaagtggcctatggcaaaacagaggcagcagcttcaacctccggtcagactgttgatgtacctcctgttcaaacaacagatccccctgctccgcttggcgcagaagaaccgaaccaagagcctgggactccaactacttaaacacttctctttttatct

SEQ ID NO: 156406 - DNA, 639 bp, Cannabis sativa
ttgagggccatttcatcttccttgaacactacatccctactaatgatacattttttaaatccaggttctagacaccataacctgtaacctttaaccccttcaggagttttgccggcttaatatgcataaaagcagtacaaccatagactgttaaatgatctagattaggagctttacctgtccacatttcttgaggagttttaaagttgttaggtactgagggagttttgccgacttaatatgcataaaaatgcagtcttgatggcttctccccaaaatgatctatccattctagcactcagcatcatgcatcttaccctttctagcagagttctgttcattctctcaacaactccatttttttgaggtgttttgatcattgttcaatgcctttggatcctcaacctgttacacaactcattaaactcatttgagcaaacctcaaggccattatctgtccttgagtttgcttcctgttttattttccagcagccttttccaagtgtcaaaagtaggcagtgcttcatccttgcttttcaatagacgaatctacacttttctactaaaatcatcatccatgcttatgaaatagtgagctccttctttggtttgaattctagagggtccccaaaggtctga

SEQ ID NO: 156407 - DNA, 575 bp, Cannabis sativa
  modified_base (48)..(48): a, c, t, g, unknown or other
  modified_base (473)..(474): a, c, t, g, unknown or other
  modified_base (521)..(535): a, c, t, g, unknown or other
atatttagggtgttaatcaacagacttgtgagtagatctaagatcctngtaaaataatatccaacaaaatatcccataacaattccaaataaaaatacccattcttcctctgcttcttacccttctcaactcccactccatcgccagagaatcctaacaatggcgctctccacctttctctcttcctccatttgcttccatctaacttcaaaccctagattctcccaatctcaccccattactaccttaaggcacctcagactccttgccccaccgttggtctccattcctcctcttgctgtcgacgtagacggcaccaccattgttgtcatataagtggtggctcagtcgctgtcttagccgtcgcccgctccctaactaacctcgagtagcggcacaagctccacaccgaggaggtcggggtggcgataaggaggttgtgaaagagtatgattgtaaagaccgcttagttnnatttggaaattagcagttgattatgatttaattatgaaaattatttnnnnnnnnnnnnnnnattatttatgttgttatatttgaattctgaaatgcatttt

SEQ ID NO: 156408 - DNA, 541 bp, Cannabis sativa
  modified_base (462)..(469): a, c, t, g, unknown or other
ttagaatataatttttatagtattatagtctttctatcacattttatttaattttatcatgaaatgagtaaattaatagatgatacttgataaataagttaaatattcttcaccctttttacattaatgaataatagaatattttttttaataataaatttatatttatatctttagttttctaatcattaaagtaaaaaaagcgaaatatatttaatttgcgttcatttatcaactaccatttattacgttattcgtttcatgataaaattgaataaaatatgaccatgttactcttaaagttatactttgaatgatattattaacgagccgtatattataggggtacaaattaatagtgtaaaaaatttaagtgacaaaaatactaattattttagttataaatatatttatgcaaatttatgtcatccccaatagatgttgtaaagtccttttttggcnnnnnnnntgacaaaataatttttccttttatggtaagattgttgtgcattcatacccgaattcttaccttataaattcg

SEQ ID NO: 156409 - DNA, 670 bp, Cannabis sativa
  modified_base (109)..(109): a, c, t, g, unknown or other
tcgcttaggtttagctgctgatggttttaatccatttggcaatatgagcctagcctacagtatgtggcctgtcgtgttagcgaactataatcttccacctttgatgtgnatgaaagacaataatttcatgttggccctacttattcctggaccaaaatctccaggtaaagacatggatgtatttttgagaccattggtggatgagctgaaagagttgtgggttgatggagttgatacgagagattgtacgacaaacaatgtgttcaaattacgtgcagcccttttatggactattaatgattttcctgctcgaagtagtttgtctgggtgaagtggtcaaggatacaaagcttgtccaacatgtaacgaagacactacttcagtacgagtaattagtaagacatcttatgtaggtcacagaagattcttgcccagtaaccatcgatttagaagagacaccaacattaatggagaatttgaaagaagacatccacctagaccttttacttgtgaggaaattctcgaacaagtaaacaaacttgtgccacaaatttcaggcaaacatgatcaatttggaggtgtgaaacgcagacgggttgcagaagatcaaaattggaggaaaaaaagtatcttctatgagcttgagtattggtgtacaaatactttgaaa

SEQ ID NO: 156410 - DNA, 646 bp, Cannabis sativa
tgatatttggcatggcctctcaaaattcgtttctatattgtgttcacttagatgatttgtttccatgctcaatttggctaaaaaaatgaacaaatatttatatttagccaatttttacatctgtgttcttgtaaattaattcgaatagtcaatcagaagtcatttaatttttattaaatgtagtaaaaaatgtaacaactattgtgtgtcaaatttgataggctcaatttttatttttattttattttattttttttttttgaaaatgaaaatcattttattaaacgaaaatctctgttaccaaactaggcaacaactcaactggaacagtgtccaaattgaataggcgatcagggtgagatatagaggccctcgcaaaggaatgagccgttacatttgctgatcgttttacaaaatgaaaagaaacattacgcaaagacttaacaaattcttacaatcactaacaactttgccaaataaagaaatcataactatagagctacggacaacttgaacaactgaaagacaatccgtttctaaagtcacctgaagtcatgaatgatctttgatccaactcaatgcctcccggactccaattacttcggccaccactggagaaatcgcgccatgaaacaactttgtaccg

SEQ ID NO: 156411 - DNA, 510 bp, Cannabis sativa
atattgttatactaatcttacttgattctgaattcaggtgtgatggccaacctgagtggaacaactgcttggcgaattacaggctcctacgtcacatcaatcataacacaagtaagtgacacgctaaatcacttttcggggactttaacttgaaactaaaagtttccctatcgatgaataacatgacaatacactaaacatctcaaaaatgggaaaaactaggtttcccaaaactgccccaaccgatagaccggttccccaatcgaaattctggttctgtggagtttcttggggaccaaccggaattccaattctgtggggtttcctggggacccaccagaatttcggttcctacaggtccctctgaacaaaaattttggttcagtataggaatcaccaaaaataccataactcaaccaaatcaaccccaattcacatgaaatcttcaagacctattctaaacatcctaaagatcattttctaagcaacaaaaccagtacacaaactcaa

SEQ ID NO: 156412 - DNA, 543 bp, Cannabis sativa
tacttattgtatattttgtcaaaaatattattaaggaaaaaaaatctctgtagtggttcattgcttgttagttttagaataatttttttacttttaattccggttattataggaaaaccgggataaaaaattactttttatcttggtttttaaaggaaaatttggattaaaaataatcttttattccagtttctctataataactaggattaaagtgattttttatcccagtttttataagaacttttatcccactggcatacatctcagtttttattttaatgaaaactgggataaaatgccccttaaaaccgggataaaaagcatatttttgtagtagtggtttatgagctcttgctaataacatttgcctataaatagggcatcatcctctttgttgttatatatttgttatttaataaatatataatgaagattaaaatgtggcatattatacattaatatgagttgtaactttgttctcattctttctttctctttatttgtattttgtgctttgggattgtaatttttatttaatct

SEQ ID NO: 156413 - DNA, 655 bp, Cannabis sativa
caggcaaaacaacatcaaaattggataagtagaacccatcgcaccaagccatttgtcaacctgggcactgggtacttactttcgagctcctgggatctcgtttttgatacttccaagggttcggaacatgaggacaaggtctcctaacctgtttttgacaattttggattcaatggtcatatcagatttggcatttgatcaattaaagatagcatcccaggttgattgtcaacctgggggttgggcccaacactaggtcaacttaggcactggtacttatttctaggggcttgggttttttgttttttcccatagttttattgaatcttcattatttgtgatgatgaaaaaagatgtcaagaacactttttggtgaacttgatcagaaaaagcctaggttggcatattggcaacctgggcgttggatccaagttttggccctcgagaaattctgtttggtctccaaaaatagttgtatctgaatatttgttgaaaaagaagaatatgatcataattattcttgaaaaactccattaaaaatggctcaggttaacaaaatgtcaaattgggcgcagggtcagccccatgtgtcaacctgggcattgtgccttgcttttggcacccaggaaatgttgtttactcttcaaaaggacat

SEQ ID NO: 156414 - DNA, 694 bp, Cannabis sativa
  modified_base (629)..(629): a, c, t, g, unknown or other
taaaaatctttttttgtactattgtctacacactcttaagaatataactctagtgtgtcagatctaattaataaaagcaaaagtagacgtagccccattacaatcgcgatatggggatgaactattataaattcctggtgtccattttatttattgtaattttatttggtcgaattaatttatcgcaatcctctttatttttacgatcttcatagatcagttgacgaaaaattgcgtcaacaaatgatttataattcttaacaacttttttacttttagccaaaatttttgtggtgaggaatagtaaaatttttgtaaaaaaaaaaaaaattgtagtgtatatacatatatatagtctacttattaaattgatgagctctactctatttttttaaaatacattactaaaacattattttttttttacctctaacttttatattataccatatataacttttctattttttttatatataatatttaaatactatatttttattcaatttaaattaaataaaaataaaatgagcgataagaaaagataaaaagatagagaaattaataaaataatagtttgaaggaggcgtttggttgggaggattgaaaatataggaataggaatgggnatgggaatgagaataggaatggaatggaataaaatttaaaatggataaaaaaaattgataaaaaa

SEQ ID NO: 156415 - DNA, 883 bp, Cannabis sativa
aagagtttgttgagttggtacaaggcgaaggtatgtcagtaaccgaatacacaacgaagtttgatcgcttcgctaaattagcttatgggattgtacccacaaatttcagtaagaaggagaagtatttggcagggtcgaatgccaagattaaacatgatttggttatcattaccaatgacactacaacctatgctgaaatggttgacaaggctctttgagctgaaggagcagttaagtttttgcaagaaacccgagagactcctagtgtcggtgggaccactactctccctatatctggccctaggaaagagagtggtgattctacttttgagcaaaagaataaaactttcccatcttcgggaagttcagggcaaggaaaaaggtttcgaggaaaccagaatagaggggggcgtcagacttactcctatcctgagtgcccgcgctgtaagaaacatcatccagggacttgtaaccggagagcttgctttcaatgtggattagtggggcacctcaagaaagattgtccccagttgaagaaagaggaacctaagcctgaagccaaacctgcacctgccagtgtatttgctatcactcaggctgatgctgccaccagcccttcagtagttacaggttagcttctaattaacggtttttatttatactgttttatttgattcgggtgccactcgatcttatgtgtcatcgagagttcttaatcaatttgatagacctagtgatgattttgagacgggatttggaaccctattgcctaatggggagctaattattttaagaaagtgggttagatcagtgttaattagaattgaagatagagagttgagcgctgatcttgtggagttaccattggccgagttcgacatta

SEQ ID NO: 156416 - DNA, 658 bp, Cannabis sativa
ttctgaaattaacggggtagaaggaatggtatctaacatgggagattggaaatcgaagtggttctacatcttcaaagtcccaaggattagaactgattttaccgtagacctagtacgtcgcatgttttctgacttagacatttttctaagttgctttaaggttttaatctgacttgctcttttcttttggttttcgcagatagaccgtctcgtcccacactcgacgcgactcacagagaaacagtagaaattcttagaagccttcctgtacaagatcgcgactggcgattattatgtacgactgctaagcttcgcgaacataaactgatccttgagaacgcgagtctttggagagagccggtgtataaggaaccttctgaaaagcagcaagagcgaattgataaacgcctttctaagcaaactccgcgaccatcatcaggtattttatcacatacgcaaacttaaggtgttggaattttatccctagttatattaacccttgttgttttttgtaatcacagaaatgactttcctaaagtctgctcctatgctcaaccgcaaattgaaacctgggacagcatcgacctctccgattacatcctagaagaggaaaagcgattgtgttgtcactcctgccgcagattcctccaagaggcct

SEQ ID NO: 156417 - DNA, 609 bp, Cannabis sativa
gtcgtattgtctcgtggttctaggcaatcctaccacgaagtccatggaaatatcttcccatttccactccgggatattcaatggctgcaacaaccttgcagacctctgatgctcagctttcacttgttggcaagtaagacatttaacaacatactcagcaatatcattcttcaagcatggccaccaaaacatggccttcaggtcttgatacatctttgttgaccctgaatgaactgagtaaggagtcgtatgggactcattcatgatctctcatttaatgtcatcatccataggcacacaaacacgattcataaatcgtaggattcctgtattatccactataaagtcaccagtcttcctagtcgaaaccctatctcgggattttgctaactcgggatcctacaattgtgcttctctgattcgctccaaaagagtagattgtagggtaatattagctaatttccccacaaccaactcaattttagctcggatcatttcatttgctaactactgggagatttgcttcactatatttatatgactctggccttttctactcaaggcatcggcaaaaacgttggccttcccggggtgataaaggatctcaca

SEQ ID NO: 156418 - DNA, 822 bp, Cannabis sativa
tcttttgggcacgccttatttaaatcagaaaaattatacaagttctctaagttccattgggctttgggacgagaacaggattggtgatccacgagtgataaaacacctcgtttataaagtcattgactaataacttgtccacttcttgttttaacgccccttgtctcttggaatccaagggtctcctttcctgccccttcgctgggtagtttggatcaacatttaaatgatggcagataatattagggtcggtccctattatatctccatggctcctggcgaactgatcctagtttgctcttaagaaacttattagctgctatttagctgcttgtccaggttcttcccaatgtaaacacactttgtgggatttcttgggtcgagaataacttcttccaattcttcaattggttttaataagtttctttcatcttgaaccccggggtcaagatcctcgtccttctttttgctttcttctaccaagatcgccattaactaatgaccgacttttctatgttttagctctatgcgatagcaatcacgagctagcatctgatcaccttgcaccacccccacaccttccggtgtttggaaatttagggataagtgcttgatcgaactgactgtgcctagtccaattagtgtcgggtgacccaacaatatattgtaagccgatggtagttcgacaactagaaagtcttgcataactgtggcgaataggggtgcctcgcccaaggttgatgcgagctcaattatgccctgactggtaatactgtcttcggtgaagccgcaaagatttaccatgcaaggcttcaatttggc

SEQ ID NO: 156419 - DNA, 766 bp, Cannabis sativa
gtcagggttcgggtccagggctgggtcccaaatccagaccgactacgggtttttatccaagcccttgttccagatcgagctcccaatatagttcaatttcttttgccgggtcacaagctgggtcctaggttcaagttcgggtcggggtcgggtactaggtctcggtcctagttctgtttcccaggtgtctatcctgattcttagtccacgtcccaattattgtgtgggtttgggtcccggtctaggttatggtgcgagtcctagtctcagtttaggtttaagtctttgtctcgattttgatctgggtgcggctttgggtttagttcctagtcctggtcctagtcctagttcggttctagttccattcaagattttgagttcgagttttggtttgagttcgggtcgaagttcgagtcctgttctgagtttggatttgggtcaggatgtcaatctaggtccagattaggctcctggtgtgggttcgcgtcctaggtcttggtctaggttaggtgcgagtcccaagttcccctcccgatctgagtctagattaatttcgggatctaagtccttggttttgatcttggtctgggttcgagttcgggtccgggtctagctttgtgtctgattctaagtgtgggttttatttcgagtctgagtctgtgtcctggtttgtgttcatgtctagaccctgctcttggtctaggttcgggtccaggtccaagttggggtcccgagtgcgggaccaagttgttgggttttatgccct

SEQ ID NO: 156420 - DNA, 537 bp, Cannabis sativa
ctaatgttttcaagagttatatgtcttttttgcagcaaaaagccaagctgaattgggcaagggcaggtgatgaaaactcagcattttttcacaatagtattcgagagagaaggaaacataaccaagtgattactatcgtgaatgctgaaggtgtaaggatggaagatccgaaggctattattgaagcttttattcagtattatcaagatcttctgggcagcaatgtacatgacaggaagatggtgcaacagaaaataattagagaaggagggtctcttacacaacaacagctgagctttattttgagagattacaaacatgaggaagttaaagaagcaatgtttgctattcctgggtgcaaggcgccaggtccagatggttttgggagctcgttctttcaaaaaaactggagtattataggtgctgaagtctcggaagcaataattagcttactcaaaacagggaaactgcttcgagaaatcaataacactactctcacgcttgtccctaagctgaaatgccctaacacagtgagag

SEQ ID NO: 156421 - DNA, 541 bp, Cannabis sativa
attctcataaacccagaattctcgacccccgtcttagtgtgtgtggggggtatttatagtatttttctggggtgatccctaaaaccgaactactggtctttctgtgtagtttcagtaggggcacatattcccagcagatacaaaatgggaaatacatgacctatgccataggtatcttaggggttaggtggatataatcttttatcccttcttgattgatgtgatccctcataaagtagtcgtcgctaggcttattaatcacaacgtaatagctgtagcagaggggttacgccgtcagacttattgcttatggcaattttaatacgtcttctcccatgcggcattaaatgtgaggtgactgttcaaatggagtctggtacctcccggaggtgccttatcatggctttgacctccgggagtatgtggagttctcatatcttctctgagatgtattttcttgctgatactcttgatccaaaaagacttagttgatttatctcggagtcatatttttcagatccacgtgtcgtagtcgcattgg

SEQ ID NO: 156422 - DNA, 557 bp, Cannabis sativa
tattgtaataatctcatacacctctgtaaacaaacactttatgcaatcctttttctttcaattcttattggttcaattttcttccttataatatagggtaaaaatactaggacctgccatataattaccctatataaatatatatatatatccatatacactactatatatattcattagtttaggggtaagttttagtaatatttttttaatcagttttttatttttttaattaaaaaaatgaaaatattttttaaaaacatgttccataaaattgttttcactttttaatttttttaattaagaatcaaaattttgaaaacaaaaaaaaaatcacttttacaatttttttaaacagttttttttttcttaatcaatattttagactccgatctcaacttagaccttaggacccggactccagccccaactccagtctcgaactcgaaccacggccccgactccacacctgaacctagacccgacataaataaaattaaaaaataaaaattataaaacatatttttattttctatttttaaaattaaaaaacacaa

SEQ ID NO: 156423 - DNA, 1074 bp, Cannabis sativa
  modified_base (586)..(589): a, c, t, g, unknown or other
tagaataagatgactcttattttctagattgacttcagactactttgtcagacaaaaatagaaaataaagaaagccttttgtaattcgaaatttcttcttcttcttctaaaaattttcgaagcctgtggtgaattgagagtatactcatacatgtcaaaacaatacagcatagtgaggaagactgtgtctaaccaaatcgaaggagagaagatccaagtgttgtggtatttttaacacgcaagtgtacgtatcgtaaacaagtattagactcacaaagagtgaggttgatcccacaaggattgtagttaagtactttacaattaaatctttacttctatttggttatgtcaaaattaagagaaaattaaatttagaaacactaaaggaacggtgaaattaagaagcaaataaataaaaaaaaaaataacaatgattaaagttagggcttcgatttcaattgtatctattgattatagcctaatatgattacctttttgttaccaatttctatgcaatagcaggtttactatggtaatttatagtcttctcagatatataaatttcaattacatgcaaattttctannnncgtgataaattaaacatgcaacaggcattaaatacataaagcctataagctatctaaaccatacaggtactctcgtcctatatcgaaattcagttctatctcactatagcataattgacactcacttcttagatctcacatcaaaatcatagtcagttaattggtgatcagacaattaaaagtaattaagtacgaatgaaatagaatacatttttatagtaagtgtagcagtcttctatcattttcctttaaactaaaagttatatccatcactctaagtacatacagaacatttttaaaattgagaaataaaataggaaatttacgctttaaaatatgacaagagaaaacatatacttaaaaccagaaaaacatctatgacttatgttcttgaaataaagacacaacataacattataaaacacccaataatagtctactttagctagaaaacagcccacacatttattgaaatacttagcaat

SEQ ID NO: 156424 - DNA, 646 bp, Cannabis sativa
ttcaatggaaggtaagaaatcaacatgtgataatacaagggtaagaattgtgatattttgtgatttactattttttatacatagtaaaatttatattaacgtatttttctatattaagatatggattgagatatatatatatatgagttatatatgtatgggtgtatatgtcatatttatatagtgatatataatttgatatttgaacatgttaatatgtatatgtgagatatacataatatataacatgtatatgaagtacatatattatatgttgagcatatgataatatatatttatgatgagaatatttatgtatgtgatacatatacaatatatattatgtggtgattatatatattatgatgagcatatgttatgtatgagatgatagtaacatacataatatattacttagcataaaatttgggagataattttatgcatgagagttatatatattattgatatatataataatataaaaatttttggaattaattttccattagtaattttatctcattttatgagatgagaaaatgaactgtgaaagttacacttatgagatttgtcttgtcatagcaagaacaaatggatcaaaagtggatccaaacttgtaaaatgagtcataattggaagagca

SEQ ID NO: 156425 - DNA, 649 bp, Cannabis sativa
tactttcttgaatttttgcaacaactcacatactatggcgaggtacttagccaaacgctcgcctctagccagatattcttcgtttacctggcatacgacgatttgggagtcgctaaaagcctgtaagtatcctatcttcatctcaaggacgaggtttaatcctgcgatcaaagcctcatacttggcttcattgttagatgcagaaaattcaaatcgtaaagcagcgtgtaccttaaaattgttcggactgataagtatgattccaccaccggagccttcgctattataagctccgttgacgtacaaagtccatccttctccatttggtatggcagtatcagttttttctcctacgagagccacctcaatacttggaaactcgagaatgaaatctaccaaggcctgccccttgatcgcgaatctcggtttgtacttgatgtcgaactggcttagctctactgaccatttcaacaaccttcctgatgcctgtggcttcactaagacttgcctcaaagggtagtttgttaaaacctcaatgctatgggtctagaaataaggtcgtagttttcttgacgatattaccagggcaaatgctagcttctccatttgaggataacgagtctcagcatctaacaaatgcttactgaca

SEQ ID NO: 156426 - DNA, 540 bp, Cannabis sativa
tttttactactctcctcacaatattttcagtttaaaagcataaaaaataattctataccatagagttatcacaccccaaacttagagtattgctcgtgctcgagtaatgaagaatagaaagaacaaaacaacaagaacaaaaaaaaaacaatgacaggaacattaacacatttgcaacagagaacatattgctcatttaaacttgatttagcgacggaaatgctctcagaattagatggaatggaagtgtaaatggtggtagtgaatatgccttgaacttgtgcttttcaatcaagttttacatgctatctatgtccttaatacttatcaagaataatttaatcaaataaagtgtgcaaatgcttcccaccaacaccttgaatttctataacaactacccttgatcctcaagtttaaaaagtttgcttccataaattaaattagcgtaaccctctccactaatgtagcttagctttacatcctagatccaaaggactttcataggcttgtaatgtgaggcttaggttcgggtttggtaaa

SEQ ID NO: 156427 - DNA, 500 bp, Cannabis sativa
ataataataataaaatattttttgcagtgcagttgagattgatcagaccatcgtatagtaaaaaaaaaaataagttttttaagataaaaaaacaaactttttcaaaaaaaaaaaaacaaacaaaacattaaatcagtgggactcacagtaaaaattaatactaattttcctacactacaccacattgtagtggtgatgtacccccttttatatctacaaaaatatagtgggacccattttataataaatcctcacagataaggcattttcaaaattccctaccttaaaaaaatcttatatatattgcatttttaattttttatttaaaaaaaaaaatatatataacatcaatgctatggtgtggcattaatgtaaatttcaaaaatatcattcttttatctctaatggtatagcattcatttattctttcatttaagctttccaccttagtaagcattttttataagggataattacataaggcactatttttggtaaaa

SEQ ID NO: 156428 - DNA, 693 bp, Cannabis sativa
  modified_base (270)..(274): a, c, t, g, unknown or other
tttggcacagtttttgaaaatattaaaagctgttttttgaaaaaaaaattgtggtaaaatgtgtttgataagcagtaaaaaaatagatttttgaagaatttttggagaaattacagttaaaaactaaagctgcttaacccagcttttagaaaaaattattttgattaaaagactaaaataaatttatttgtactaaaactatatttatttatttattatatattagaaaaataaaaatatttgaaataaattaattataataaaataaannnnnattaaatctcttatttttttaaaagaaaattaatttttattttattttaatattatcaaacaacattaatctggaatttttcttatatacttggttttctaatttttttttttacatttgataaaacataatataaaaatatatactataaattatttttatcaaatgaatataaatttatatttaaaaaaaatattaaaaatatataaaaaaataaataaaatattatacaaaataaatttttatatatgtgtgattataataaactagattataatattatcattatcattataataaatcttaacagctcacactactttgaaatttataatatactaaacactcagcttagttttttttacagttctgttgcagctgtttttttcacagcacagttacaactgttttttcccaca

SEQ ID NO: 156429 - DNA, 576 bp, Cannabis sativa
  modified_base (549)..(549): a, c, t, g, unknown or other
aaatccagcagttaggccccaaactaaaccctaattcaaaaagagaatgggggtcccctaaccgctggaaagaggccccctccggaaacttgccaaaaaagaaaggccccaaaaggttttccttgtcaagaatcgggtgcaagaatcccacaggtagtgacgttgcagaaaagtaaagagaaaaagaaaaaaaaaaagggtaaaaccgaaaaggcaaggtttactctatgccctaaagtggtcattacatggaatgaggacgatgccccagcaaaaacatagtgaaaagaaataatctaaacacaaaaaaggaggattttaacgcatcatacataaactcacacaaaactattcccagaagttcaacatccaaaccagaaaaaataaacagtaagcaagtgtacaagatacgaagaacttacatgaagtttgaaggccggtagttggtgttgatcggcggtaaaacgtggactggcagcggcgaaggaataaaagcaggaaatcaatggtgtttgaagtttcttttctctctggaaaactctgaggaantttggtgaaatgctgaaagtaaccaaa

SEQ ID NO: 156430 - DNA, 510 bp, Cannabis sativa
atttaatttatatttttatttgaaattgattaaaaattatttgaaataaaaaatattaaaaataaaaatatataaaaattaaattaaatcaaacataatttattaaaaatataaacaacataattaaaataaaagtaaacatgatttatattaaacataaaatccattacccccaactcagaaaatttttaaaccccatctgttaaattaattttcaatcctcttccctaactccttccaacaatgttcatcctccttacttgttagtagtataaaacagactccaaaatttcattacttggcaaaataaaacaaaatacactaacaaaattcaaatttatataccaaaattcataaaaagaattttaatggtgagaaataaaatttgataaaaatatacatctagtataaaataaaaccaaatcaattgcactcatatctcaaaattacaaaataaaactttaaatttccctaaaattatttatatttcttcatattcaaaatttctta

SEQ ID NO: 156431 - DNA, 522 bp, Cannabis sativa
tgccttaaaaataatgttttcatgtcactcaggggggtactaaggcataccacacgaacaaatgtaaaacaggccaaaagtaaaaacaaaatcaaacagagtatatatcaaagtaaaaatatatatttaaatatcctaacccaaaagcaggtccaaaaaaaatatactaagggcctggggacgggccataataattgtctccccttagaagataataatttaaattgtcttaaaggaaaggaaagagactgtaaatgaaagaaaaatatagttgtaatggtgaaattggttggactcctcggcctattcaataagaggaggaagacgagggccccggcgctcttcgagtaaagcatcaagccttttcttcttctcccggaacttagcaagagcctcctcaggcttgggatagatgtcaagtttgatactctggtcattcgactgccaggccatatagacgccatcatcgaagcgcttgacgcaatgcttgcagacgacgggggtcaggagctcatctctttt

SEQ ID NO: 156432 - DNA, 749 bp, Cannabis sativa
  modified_base (67)..(71): a, c, t, g, unknown or other
  modified_base (143)..(149): a, c, t, g, unknown or other
  modified_base (514)..(528): a, c, t, g, unknown or other
aattaggccctagcttagtgaaaagtcataaataagatataggctaattttagaattataattgatnnnnnaaaatcaattgactgagtcttacaagtagtaatatctcaactagtattgggaccatggacctatataaccgnnnnnnnaataagtagatctagaatttactaagtaaatttcctaacttattaattcttccttgcaccactatagatatggaattgcactctcaattatataaaacgctttatatgttccacgatatagatacgctatgaaaatttaaccatcgttctaatcccaataatcaaaaatcctttatagatgatttacactgagtagggataaatttaccgttttacccctcaatgtattttatccttaaaacagttagcttcttataaatgatatttcagtaaactaatataatcactaaaataagagctcttccattttatctctattaagccaagctcgaaggaaatctacttctatgtccaaatagaagctnnnnnnnnnnnnnnnatgattagcgctcccacttaattgtactatcatgttcccaagctgtacgtgtgacccgaactaaatggtaggctttgactaacaacttaaagaacacaaataacactcttgagatcgaaactatccacgtcaggattaagatcttttaatctaagatcaactaatgatattgacttagaaagatacaacggtaagataataatatctttactaagatcaat

SEQ ID NO: 156433 - DNA, 513 bp, Cannabis sativa
ataccaatacaaggcaagtattcatagctttttagatgatcaatacttatagtactatcataaaaaggtgtgttgtcatttcactagctttactcacttagaatgtaagttgtgtctaatctggttggtcaatgtggttgcttatagttgtgcttgtttaagatgcagatgaaatttaagaaaagagattatgagtgaggagccatataaatttgaatatcttttaacagatgattcaatatgttcatatcttttttacaacatagtacaaaacttctaagcaatttgagtaagagaaaaaataatatcgatagcacaaaatttttgactacaaacgaaatgcataaatctcttaagcttttttaggaatgaactagccttagattgattgactgaagaaaaaaagaaaacccctcattgctctattttacaagggtgaaatcattgtgatttaaataagcatgttattgacaaatgatctaaaccattgcaatattgtaaatttaggagtaa

SEQ ID NO: 156434 - DNA, 519 bp, Cannabis sativa
ttacattgttctttcggattgacaactgaatcactagggaaactactatttatttttttttgtaaagcactcacaacattggccagttgtcccacttgcacctctatgttcttcatggaagtagtaatattagacaagtgagtctccatgttatccaaccttgtttcattcttgttaaatctcttgttggtttctatcatgaaagtacctagaatgtcttctaaggacttcttctcttcttgttgtgcattaaacccaggaggtggttgcaagacatctttagtgttaccataagaaagattctaatggtttctcaaccttggatggtagtagttagcattggatttccccagtagttgttattataagtgtaaaccccaagttcttgtctaacctatctttttcatatttagattgattttatcttgatttatgcttgaatataaaaaaacaaaaccaaagattcaacaccagaattttacaagcttcatctgccttagaaactcattctaggcggct

SEQ ID NO: 156435 - DNA, 570 bp, Cannabis sativa
  modified_base (214)..(215): a, c, t, g, unknown or other
tgtaaggtagattagacttcctaccagttgtcgttacattgctccatcttgcgagtccttcccagcatgagcacatagcttagcattagcttccataggtgttgagatgggcttgcactcgagcattccaaatctttgcagaaaatctttagcatacttttgttgacagagaaataaaccttccttagttcggtcaacttctaatccgaggaanngtttcaattctccaagctccttcatttgaaagtgtactgataggttctcctttgtttgaaaaatttctgcgtcatcatttccagtgataatgagatcatcgacatataccaaaactattgcgatctttgcttcccttactttgacgaataagcttgaatttgcatgtgccatggaatatccactttttactaagaactcaacaatctttccgtaccatgctcgtggagcttgctttaatacacagaatgcctttttcagtttgtaaacatagtcgggatgtgctctatcctcaaatcctcttggttgcaccatgtatatctctcgatccagttctccatgtagaaaggcattctt

SEQ ID NO: 156436 - DNA, 510 bp, Cannabis sativa
aatctcgtcctgcaaaaaccaacactccaaagtagtgtgaccaatatctttatggtacttacagaattttttgggatctctcttgttgcggtttcccttgatcgtgggaggcttcttgaagaccccattcttctctctgatggcgtagatatggtctcgaggtactgctagcttggtatagttcacgaagcgtggtccacctttccttttcgggaaggattccttctttggaggggacttggccagtttcggacttcgctgtctctgtggactgcgtcttcttgggcttcgtcctatggaattcttccctcgaggactgcaggatcgtgatcgcgacactagtgatttacgcttatctttgcctttctccaactcttccaggaaattctcaatcctgttatgcagttctgccatggcacagaactcgaccagcgattctggtcttcgagcttgcagttccttccaaaaatcggttcttggcaggacacctgttattaacatacatactag

SEQ ID NO: 156437 - DNA, 657 bp, Cannabis sativa
aaaatttgactatacatgttttaaaaataatcttagcaaccattttgaatgttatactatatagtataaataaagtattaatttttatttttatttataatcaaattaatttttttaatatttatatatggtggttgaataaaatattattattatttaatctaatcttgtttaagtagttataaattttttatttattattctgtcaaaatcttaatattagaaaaagtgtgtaaagcactaagaaaaaaaaaatatatctatatatttatataaaggaaaagtgatattttgttttatactcaaatttcgactaataataaaaagctgacacgtgtactaagacagtgatacgaaccaaccaaaatcatacattattaaatgcacattaaataactcgccttagaaattaaagttaatagaaatattcgaactcgctactatataagcaatagcgagatatgaataataacaattaacaggtgagattggcgagataacaagtctatctcgggataaacagaatacacaatgaaagttgttcagaatgagtaaccaaagaacttgcagctaattgatccatatactcgtgagtatgtttaaagaatgacaacaacattcgttcacctcgcttttgacgcgttgaagtaaccacct

SEQ ID NO: 156438 - DNA, 531 bp, Cannabis sativa
aggactattgccgctatttttgaaggttggggactaatatgcatcaacgtgaactttttggggacttttgccgtaaatttcccttcttacaaatatgtatatatatgcaactatattcaataaaaaaacaataaaacatgtttttacatatgttgaataaaattaagttttattaatcaatcaaactaaatcatttaacatataattgataatttaattaaaaaaaaaaacaattaatcaccacatattttgtatatgatcaacctcaacataataaactaagggtgagaagtgcggattttctagtaatttaatatgtggaagtccaaaaaagattgtcacttttatagtagttatagattaaaaaattaaaaaaacctagaaattagaaataataaaaagaaatagtagttacatttaccttttatatgaatactagcaaaaaattacgtgcgatgcacgtatattaaattttatgctaatttttttctatgttatttgaaagttatacaattaaaaattttaaaaaaa

SEQ ID NO: 156439 - DNA, 539 bp, Cannabis sativa
gttttcagagccaaggcagatctggatatgcttcaaaaccagttgcagatacatcctatggatagtgatttacacactcaagagaaggaagctcggggaaaactgctcagaatacaaggtgattacacctccttcctgcaacagaagtctaaagctgattggattcagcatggggattgtaacactgcacttttccatgcgtgcattaagcaaaggcagagacataccgtattctatccattgaaagattggatggtaacagagtacatgaaccagagctaatcatggaggcattggagtactataaaggattgctggggtcaaaaatgaaacagagaagaaaagtagatcctagaataattgcaaggggtcctgttcttacgaaggagcagacatctggccttattcaaagatttactagtgaagaagtaaagaaggcagccttcagtatacctggaaacaaatttcctggtccggatgggttctcaagtagcttctttcaagataattgggagctcattggtggggaaatcagtgaa

SEQ ID NO: 156440 - DNA, 597 bp, Cannabis sativa
tttgttggctgaagttaacgccttattgttaactttcaaaaaataagtattaaaaaattaataaagaccttttagcgattatattttttattaatatttttctttaagagaaaccaacttagctaaaaagaatgagaagtaagaaaataaattttaaagcttatcaaagtataaaaagaatagatgaataattcataatagttttttctcgattttacttttctttcatcaattcaattaattcattatttaatcacttacctaatttattctattttattgtttgatttaaaattcattcaagaactttttgtttgttgaaatttaatttgtaactgagattttatttttttcctccagtttttataaaaaagtcacgcgattggagcttaagtattgttggtggccaaattcattgggaggcctcaaaagtcaccaatttgaactaatctaaagctttgcaagcaagtatcgacttgggatgaatgaagcttataaaactttgcaagctcttactaatgattccccataggtaatgatataatcggttcaataaattaattgaaatatttttgagtttaattatatgataattga

SEQ ID NO: 156441 - DNA, 588 bp, Cannabis sativa
tttaagttctatttctttaaataaaatgtttaattattaaaaaatattacattaggctgttatttattccaattcttaaactataataatataatttattttattttaatagaaattgaaattcggtttaactaagttttttcttaccttttattaatcagatatatttcttggattctttttattccatatgttgttgttacctcttttggtgacttgatttgtattacgaccgctaatatatctgtattttgaatgttaaaatattttagatttaattaggaatttgcatagaaggaaaatattattagtatattaaattaccaatttatttttagcagacatttaggggtccaaatcattaaaattgactattttgtattcaggttgctggtttttgtcttcattttttgtcaattcttctatttttgttgtagagataattattcattggtatatataatctttacaaatagaaaaaattaataataatataatttaaaaatattaaatgcaatattatgaaataatttaaaaactaaactttaagcaatgtttgattttatctttctatatattaattttttt

SEQ ID NO: 156442 - DNA, 673 bp, Cannabis sativa
  modified_base (428)..(443): a, c, t, g, unknown or other
ttaagtgaatttttgctatagtctatattaaaaaataaatttttgaaagaatttgtaaaagattcatttatagatgatgttcttgatatgaaaaagagacgcttatattttaattttaagtattaattaacaatactttttaaaaaaagttgttacttaaattttaatatagttttggctgaccctaataattgatcctggctccgtccttgtatatgtatagttttgtaatgttcaaaatatatcttgatttgatttaaaaaaaaaacacatataaataaagatttacatttcttttattttgatatatttagaaaaatatatcttgatttttttttttattttggcatacttgaaaaaaatacatataaataaaaaaatatatatttttctaatttgataacgaatattaatataaaaatatttannnnnnnnnnnnnnnnaaataaataaaataccatcatttaagagtgagaactttatgttttcaaaaaaataaaaattgggaaccaatttattaaaagatataatttgaggattagcttgccaaaatttatataatttagggattaatttatcaaaaaaataaaatttaaagactaatttattcaaacttatataatttaaaggcttataatacaaataaatggtactcataattatgtgggatgta

SEQ ID NO: 156443 - DNA, 549 bp, Cannabis sativa
agtttcctaaagcaccacaaaaaataagaccaaatcacaaaaataaaggatacacaaaagataaaatgcaatgaaaacatgtttccataaaagaaaaaaaaatagccaaaaaatagaaaaaattattgccccctttttctttatttttttcaaaatatgcccccatattaatttgcaaagaacgaacaagacaacacataatgacacataaagcaccaatcaacatttaagagaaaaaatactgcttaagaaaataatgaagcataacaagaaaataacaataatttttagaaaagctcaattgacaaaatcggtcacaaaatttttatttatttatttatatttttttaaaaaaaaatagaaaaataaaataaccttgacatttttgcaacaaaaagtacacaatgtccgcttgtctttgcccctggtgaaaaaatcaaagtcacaagaatagtcaaaaaattattttatcaagctaatgaagtagtagaatgaggtcataccggttacgcaagaaaaaaattaactcggtcaccaagaatattaaag

SEQ ID NO: 156444 - DNA, 641 bp, Cannabis sativa
  modified_base (602)..(609): a, c, t, g, unknown or other
aaaaaaaaaaaaaaaactgatatttcagactaaatatatatatcgtaatattttatttgtagtaagtcataatattaaatagtatttaaatttatttattaattcaaaaatgatattcaaattaataaaatggaatgaaataattcaattccacccttttttatagtatcaacattacccttttcaatggtagttatattactagggaaataacatcccaaggttaaactctcaaaacaaacaaggtaatgtttcacattagctttcccttgctaacattaacccattccaaacaatcccttagtaatataactaccttgaggaaggtaatattgataccttaaaaaaaaggtagaacggaattattaccttccattatattaatttgaatagtatttttgaattaatgaataaatttaaataccaataatattatcatttattataaataaaatattacgataatatttagtctgtgagatcaatttttgtaactgagttatttttatattattagcagtaacatatatatattcattatacatatattttatgcatatggtgtatataaatgacatagcgaacaaaaataaataacatannnnnnnnatatatagaaatgttcattttaattaataaaa

SEQ ID NO: 156445 - DNA, 686 bp, Cannabis sativa
  modified_base (82)..(91): a, c, t, g, unknown or other
aatgacacactaactaaataagtgatgattataccttctgtctctttattgataattgaatgataaagattacattgaaatnnnnnnnnnnttagggcacaaagcccaacaaaatattacaatgaggcatccgcaatgtaaagcgaaaagagtttgttgagctggtacaggctgagaatatgtcaatgactgagtatacgaccaagttcgatcgcttggccaagctagcctctgggattgtgccaacagactttagtaaaaaggaaaaatacttggtgggattgaatgctaagattaagcacgatttagttattaccaccaatgacaccacaacctatgctgaaatggttgaccaagctcttcgagctgaaggagcagtaaagtttctgcaagaaacccgagagattccttatactacagagaccactactctccctaagtctggtcctggaaaaatgagtggtgattccactattgagcaaaagaagagaactttcccacctatagggagttcagagcaaaacaagaggtttcgtggatgctagggtaaaggaggacgtcaaacatattcctatcctgagtacccgagctgcaagaaacatcaccccgggacctgtagctaaagggcttatttttagtgtggatcagttgggcacctcaaaaaagattgtccccagttgaagaaa

SEQ ID NO: 156446 - DNA, 573 bp, Cannabis sativa
  modified_base (431)..(432): a, c, t, g, unknown or other
agcatcactggcacggaagaagtcgaaatgattgatacttccccaaactggatgacaccgatagccgcctacctcaacactggggaactcccaggcaatcggaatgaagctcgaaatatgaggaggaaggcagcacggtatatcatagtagagggaattatgtacagaagaggattctccatgcagttgcttagatgtgttacttaagaagaagccgcacgacttctatctgaagtgcacgatggattttgtggaaatcatgccgctgggtagagtttatctaagaaacttctaaggcaaggttatttttggccgacaataattgaagactcaaaggcctatgttaagaaatgtgataaatggcagagatttttgaagatacctcgagctctgcccaacgagttaactcagatgcaaagtccgtggccctnngccatttggggaattgacctgatcagacaattacacaaaggcaggggaggggtgcagtatgcagtggtagcagttgattacttcacaaagtggatggaggccgaaccactgccaactattacatccaagaaagttcaagac

SEQ ID NO: 156447 - DNA, 623 bp, Cannabis sativa
cgtgagtatactacttgattgcgtgcacttgcgtagtatttaataattttcgcaacacttctacaagtctaattggcacattgtgggtgaggatgtaatttgtgttatcctgagcttctttaattgtatagctatcatcaaagccatcaataacaccatcattgttcttataccgaagaaggcccaccctgaatgtcttcttgattatcgtcccatcactctcttttcaacattgtataaaatcatccctctatctcttgttaatcagcttaagcccattctttctaaaatcacatctcaaactcaaagtccattcttacctaacaggttggtctctgataatatcattattgcctaggaggttactcattctctgacccacagattttgggtcgagtgttgtgataaatccaacccacaagtatacgtatcgttttaacaagtaatactcaggtaagtgagatcgttcccacgaggactgtagctaagtaccaatcaattgaattcttgtttctatttgatataatcaataataaggttgaataattaaataagtaaaaattgaaaaccaggaaaataataataaaaaatataattaattatggatgaatatttaggaatat

SEQ ID NO: 156448 - DNA, 570 bp, Cannabis sativa
  modified_base (339)..(341): a, c, t, g, unknown or other
atgaaattttgaaaatttgttaatttaggtttgaatagaaattttagggtttctaaccataaaattttcaaccttagggtattttgttttatttaattattttatttatataaaattgataatatcctaaccataaaatatcttatttttaaattgtttatttttgtaatatttaatttattaaattaagattaagaatataatattagaaatatataaattttaaattcaagatattatattatcttgctagatatttaattaatttaaattataaaagtaaacttaaaaatttaaaaatttgttagatattagaatttaagttagaatttaggatannnaggagatttgttagattttaaatattttcaaatattctctaacaaccgaaattataaattctggttaatatatattttaaattttaaattttaaaatagaaatatcttaacctactttccactatctattacatgttggtttgtaatgtttgtttattaatttatttatttattcaaaatttttttacaaacctattatttattaaatctaaattgctatgattaactt

SEQ ID NO: 156449 - DNA, 768 bp, Cannabis sativa
tacatgtactagtaaaatcgtactgcacacgtggatgatccatcatgacacttataacacgtaaaaatggatggaaacaccaaagtgttaacagaacatgagtttttgaggttttaccgccaaaaaagagttttgagggttaattgcttgcgaagtaaaatttttggagattttgtcacaatttactctttattttatcactcattcacattatttttgacactcctaaaaatactctaatagtataacactctttaaaaatattataattataatcacacacacattattatttattatatatcttaatttttagcatcaataatttttaaacttttatttttcattaaaaaaaaataatgactatataaattccatgcaaaaattttagagcttctagaatcacattctctcttcaataatatagtatctcaatattttactagcaaatatcctcttaatttttaccattacatatgcttttagatggcagcttttaagatttctcaaacaataattaggatgtcatacttagaagcgtggtacgtagttaggtaggaaaatagtaatggttaattagaaagatctttttttctttctctttaaagagttggtggtacgtggttagattttcttatatatatactcaaaactttcctataaatatatgagacgatcacaaagccagtgataaactatagctccaacaaaacaaagaacatataccgagttatatatatataaataatggaggtgagcattgtctca

SEQ ID NO: 156450 - DNA, 507 bp, Cannabis sativa
gactatccgggactcgagttgaaatagatgctttgcgcagcagctagagccacaacaccagcagagtttgactccagaatggaagagttaaagaatcaaaatgagagtgcttacaacttgttggctgctaaaccaccaacagaatggacaaaagcacattttaaagagggagttaaatgtgacatgttactgaacaacatatgtgaaagttttaaccacgctatcatggatgcaagtgacaagccaataattactcttctagagagtataaggttttggttaatgtgtcgattttgcaagagaagagaatctgtgttgaggtggacagaaactgtccaccacaacattgtgaagattgtcagacaacggctgaacgtttcacgacactgctcagttacacgtgccaatgcaacaatgtttgaagttaggatgaacattggaggtgcatttacggttgatttggataaacgaacttgcacttgtagagtattccagctctcaggaata

SEQ ID NO: 156451 - DNA, 841 bp, Cannabis sativa
  modified_base (469)..(479): a, c, t, g, unknown or other
ttggatggtttcatgatggtttatgtgcttattttatgatagtttggaaatcgcattatatgttgcaaaaatatttcttttttcgttctggaaatatttttactgtaaagtacacaaaaaaataataaatttaggcttttacagaacccaatttggattttttatgaattagttatgattttttgattttggatggaaatatatagttctggatgcacaggtctgtgtgcgtggggctaagcatcactcggacagcacgcacgtccagacaggagctgaccgagaattctcgaacacagccctgtttgaatggctgctcacgcctagtttcctacacatctgagactgcatgcagccttgttcctcgcccagcctcctccatccacgcgcgcaggggtatgcattgcatacccctgtgcaccaattttaatttcatcattttttttattcaaaaatcgtttttcattgnnnnnnnnnnnaaattttggtagaattttgtgtataatctaaatttttaattaaagatctaattatcagaataaaattaatttttaataattttttaattaattaaaattagttttagatattagtaggatttaaattttgaaattttgagttttcacaaaaatagccatatgtttaattttgaaattttagattattttatttatattaattttagatcagatattacattttttattattaaatttgaatgatcatattttgatattaaaataattttttttaaaaaaaataatcttgtttaaattttcaaaatttgctaacaatatcgtattttttcaaatttgttattttttgaaatatattttattaa

SEQ ID NO: 156452 - DNA, 741 bp, Cannabis sativa
gcaatgtatttccaccacaacacttaacgtttgcttgaatgggagccaggttggaaagattacgccgtcgtgtgggctacgccagggcgatcccctctccccttacctatttatttgtgctgcagaggttgtctcgagactcttggaaaaagctttgggacaaagaaatatccatggtataaaactctgtaggggtgggccgactattacccatcttctctttgcagacgatctcatcttggtggggagggccaatctaattgaagctacttgtgtttggaattgcttggagcggttttgctcttggtctggacagaaagttaataaacttaaaacatcaatattctttagcaaaaacacccctgagggtatgaggagaaggacaaagggagcattgggcatacaatcaccagatggcactattaattacatgggtctgccccttttcagatttaggcagaaggatgcagactttaactttattctggataatctcacctctaaattgcagggttggaaagctaaaacgttatcgaaagcaagccgagttactcttatcaagtctgtgggtttgtcgctgcctgtctatgctatgcaaaccactaagctctcgagcagtatggtcacaagggttgatggtttagtcagggatttctggtggggttttgaaaaaggaaatcatggtcttcatctaaaagcttgggataagttgtgtcttcccaaatctttgggtggactagg

SEQ ID NO: 156453 - DNA, 1314 bp, Cannabis sativa
cattttaaattttattttattctcattcacattcccctaaaccctaaccctgaaccctgacccctgaccctgaacccttaaccccaaaaccctacccctaccccaaaccctacccctaaccctaacatataacccctaaacaccaatccttatcctaaaccctaaaccccaaacctcaaaccccaattcccattccccaacccattctcattcccattcccattctccattcccattattgttccccaacccattcccatccccattaccattaccattcccattcccattcccattcctattcccattcgcattcccatttgcatttgcattcctagtcccattcccattccttgacctattaccattcctagtcacattcccatttctattctcattcctattccctttcccattcccattcgctggccaatttccattccccggccaattcccattcccattctgattcccattcacattctcattcccattcccatccccattccctttccctttcccattcccactcccatttccattcgcattccaattcccattcccattcccgacccattcccattattattcccattcccactcccattctcactcccattcccactccctagcccatccccattcccattcctattcccattcccattcccatttctattccccatcccattctcattccattcccattcccatttccattcatgttcccattcctattcccattcccattcccattcccatttccattcctgttcccattcctattcccattcccatttccattcccattcccattctcgaacccattcccattcccattccccagcctattcttattcccaatccccaacccatgcccatttccattcttattcccattcccattccccagcccatttccattcccattccctaaatcccaatactctaatggcatgtttactaataagtaatcggaatcaatgaccttacctttacatttgtttacttacattattaaaatcaagaaatggagaacttgattaaataagagagaaaagaaaaggagaactttccccaccaattttgtaaggaatgccattaagggtaatggattttaattattttattttatatttttaatattaaatatataatgacaattttgtctattaaaatatatcttacaaaataactaccatataatatagtttaactcaaaaggaaatttagttaatttaagccttccgattatgtttactaataaagtaaacaagataaatcacaactattccatttctaaaaaaatttagt

SEQ ID NO: 156454 - DNA, 559 bp, Cannabis sativa
atctagaaaaacccccttaaatttactttttttttttttataaatttaaagtttgagttagatattacagttgaatactgtctggattactactgtatcgacttcgaggtttcactggtacatatacacagatgtatatagtggtcatccaattgatatttaacagtaatatttaattggcgtgtcaaatttacaaagaaaaataaatataagggagttttgctaccaaaagaaaaagataaagatgttaagtgtataaaaattaaaacataagagagttttgctacaaaaaaaaataagagaattaaatatataaaaattaaaacataagaaaatattactgcaaaatactcaaatatattgttgcattggagtagatctttctaagtgacaacaaatatatagcatcgaactatagttgcttagattcaagttgtatatctattagtgaaatctacataaatattgttttttttttcttaaaaaaaattaacatttttatagttaaattttttttatatatatatatattaacaactttttttttttttttttcaaa

SEQ ID NO: 156455 - DNA, 769 bp, Cannabis sativa
  modified_base (727)..(731): a, c, t, g, unknown or other
aggactaggaccaggaccaggaacgaaacccaaattcgaacctagatcaaaacctagatagagacctcaaccagaaacgagacttggactcgaacatgaacttagaccgggacccaaacccacactataaccgggacctggaccaagaatcgggatagggacctgggaaacagaactaggacttggacctagtacctgacccagatcttaacttgaacctatgacccagctcgtgacccgacacaagaaatcgaacaggactggcacctgagattgggatctagatctggacccagggcttggacaaaactcgtagtcggtgtctgggtttgggaccagccctaaacctgaaccccgacaaggccccgaacccacacccagacttgaaccagtcccaaacccaaaagttgacccgaacccgtaccctctgacccaacattggaaccaaaatcggaagttgatcaggtctggaactaggacttggacttggaatcataattgaaattggacctagaaccgcacatcagtctcgataccgaacctaaactcagaaacgggacctgggacctaaaccagaaccagacagagacccgtgacagtgatccagatcttaactcgggattcgggtaacggggcctggaacagaccactgctcagtgtctagatctggcactgagactaggaccagaatccagacgaagaaccaaacccgaacccaaacctagannnnngacccaaaattagaacctgaacaagaatcaccgaacca

SEQ ID NO: 156456 - DNA, 534 bp, Cannabis sativa
caagcccatgccatagcctagcacacacatatcacataattgcatcacctaatcaagtgagcccgtacctacgctcggtactcatatgtcactgatgttcgtacctacgcccggtacgtcgtgaagaagaaaccctacatcggtttcaataaatgccataacctagcaattttcatatcattgacgcccgtatctacacgtcgccaggaggaaaccctacaacggtttcattctattccataacctagcaattttcatatcattaacgcccgtatctacacgtctcctggaggaaaccctacaacggtttcattctatgccataatttggcaattttcatattactgacgcccgtatctacaagttgtcaggagtatcacatcacctaatcaggtgagcctatacctacgctcagtactcatttgtcattgacacccgtacctacgcccggtacgtcaccaagagtatcgcatcacctaattaggtgagcccgtatatcacattcatagcatcattacattatcattgcttaac

SEQ ID NO: 156457 - DNA, 646 bp, Cannabis sativa
accggtagaccggttccccaaccagaattttgattctgggaggaaatcctgaaagccaactagaattccggttcctacatgcctctctgaacttgaactccggttcagtgcaggaaacactaaaaattctataactcgaccaaatcagccccaaaccaattcaaacattgcagaccagttctatacaccctagataacatatttaaggcaacaaaacagagcttcatgcacatatacaaaaatcaccattgatgagccaagcttgagtttaaaaactccaagcttgctcatccaattaattagcccttaaaacctgcttaaatcactttaaataaacataatatagctgcagaaaacttcccaaacacaaacaacatccacagtagttaaatcaccatttcaccattaaaaccgaagttttgagttcaaactccaaacttacttaaatccaaccaacaaccattataacctgattaaattaacacaatcaaacatactttaacctctgaacacaacaacaatcaaccacagaaaccacagcaagcataaactcaaaacatgcgaaatttcttttccttacaactcaagaaatcaagaacaagttacaaaaaaacttactaagaacttgagcttactaaaaccttga

SEQ ID NO: 156458 - DNA, 550 bp, Cannabis sativa
  modified_base (457)..(460): a, c, t, g, unknown or other
  modified_base (521)..(522): a, c, t, g, unknown or other
tgggtcaccaaccggtcgaccggttgccacaggtcccccagaactggaattccggttctgtgctgggaacccgaaaaattctccctttgacctcaaaatccatctaagcttcatcaaactttccagtatacctatacaatgtattcacaacattttccaaccaacaattcccagaaaaaaccactaaaactcaagttgccattaaagctcaaagctactcaagcttgcttaaaactaacaccatgcatcaaaatcaagtaccagaacctttaatcaaccaatattgagtatagaaaccgaaccctaaccatttctaaacttaacagcccctattactaaaaaacacaagctcaaactaagaaataagcttaaaaacacatactcaagagttctagggctttaccttgattaaaattcacaaaaccctcgcttaaaagtggtatctcaatcatagtgnnnnagattgtgtagaatccaatcaagaaggagaatcagtatcaaaggaaggagagaaagagatnnaggttcagatcttgattatgttatgcta

SEQ ID NO: 156459 - DNA, 505 bp, Cannabis sativa
gatgattgaatgtgtattacgaaaattttgcatgaaaataattttattttcgttctgaaaatattttatttagattccttgtgaatagttaagcaatttcgatttttacgaaactcgattctgataaaaattgaaaaagttatgcaggtttaaaaatcaggtgttaatggtgtcgagatggtgctcatgcgcaccaggcatctcggacaagataccatcagcaaaattgggagttttgttgaggagtacttcacgatggatggcgcgggcatcactcgtagccggttccagtagattccaacatatcatcgccctcccctcactcttactctccaggatatagttcaaaggcttcctcgactgccgggggaagactgaaatattatccagttgacctccaaggataactgtgtgaagtacgggctccgaagaatttcattcccaagcaaattaaggggaggaagaggaaatctgatgttggacgggctgaacgagctcatcagga

SEQ ID NO: 156460 - DNA, 579 bp, Cannabis sativa
acatgtatgttgattaacacccgaaatatgaattctctaaactaatagaataaacacatataaaatttagaaaaccttacatttattgcagtagaataatatgtctccttcaggttagatctctatcccttgttcctttctgtcgtagagtgataacaagatctaagcctaaatctccttccccttcagtttggttacccaccgtcttccaaactatgattgagtacttgacttgttatgtgtgggcatggtactctatcactaaaggtttgaaatattaatagaagaacatcaagaaggattcgaaatcactatagaaggaaactctcgcttagtagttgtttaacagagttagaaaactaggtttagattggttgatgtaggtttgatgagaattagagcatcatatttcttttatagtatttcagctagaatttaggatataattatattgagtaaaaagataaaataacaggaaaaaatacactaagtggtcggcctcactagttacaattaaactgctttatttcaaccatttatctttttttcttttcaataatgccatattttctaatttca

SEQ ID NO: 156461 - DNA, 500 bp, Cannabis sativa
  modified_base (30)..(30): a, c, t, g, unknown or other
ttccgatctatattgaaatgagttttattnagggcataaaacccaacacaagttctagccccagttcttggtctaggtctgggtctcggtctgggtctaggtcccaatcttggtttaggtcccaagtcacaagtcccggccgggtccaagtcccggtccgagttcttgtctgagtatggatttacgtttgggtcctattactgtctcatgtctgggttctagtccagacctagtctgttatattgggttcgagatcgggtttggatcccggtctgggtctgagtctaggtctggatcccggtcttggtctgggtccaggtataggtacggatccaggtccgatcctagattcaaacactgactacgggttaggtccaagccttaagtctaaattcggatctcaatcttggatctcggtcttgttccagtcccaatcccgggtcttcggctgggtccttaatttgggtttgggtcttggttcggggttgtgtccctgtagt

SEQ ID NO: 156462 - DNA, 705 bp, Cannabis sativa
tagaaagatataacagtaagtatatgatatcttatctaatgtcaatattggtccagtcttatgtatactccatacatccgatactagctgttatccaaaattttgtcaacctaacgtggcacatccacgtacgtaggccaaagatagagtacatgtagagtacaaccctgcaaatagcagagcaaggcctctatgcaagatatagcaaagttaagcagcaaccgaatagagtaaagcaagcttttaagagctatatcaacatccttggtcggccaagaaaagcctataggccggccagggtgagcctataggtcgaccagggtgagcctataggccggctaggatctgtgcacaagctggttggctaagaagtgacttctagaccaaggagccttcgttcgactaagggaacccgacctcttcaaggaaacaatgtacaaagctgtcctcaacttgcaaaggctggcctccacactttaaggctgacctcctcttggtggagatatagtgacctaccaggtcctacaggccttatcctgccagatcctacaagccttgtcctaccagatcctagcaggaccatggttggccaggattgacctggtaggaccatggccggccagacttccttgtaggtctacgggtggccagtattgacttggcaggactccatgtataactctacacgtggacacaagacatggg

SEQ ID NO: 156463 - DNA, 662 bp, Cannabis sativa
  modified_base (46)..(46): a, c, t, g, unknown or other
  modified_base (395)..(409): a, c, t, g, unknown or other
ataaaaaaaagaatcgttaaaccaagaattgccgttagatagacanttttaatatataaagatatatagggtttatctacggtaagaccactcatttttacttcatactatggggaagttttgtggcccaattacagtaaatttacttgatgtcacatgttatgattgtgcatatgtatgcatgtgattttttatttattttttttaaaaataaaaatttatatctgttggcataagtgggctgttttttttttggtctttgttttcctttttattttatcatttgttttgctttggattattttttttttttagagtttttacaaaaatactagattttggacaaaaatttacaattttactgtcacaaggatttttttttttttacaaaaatnnnnnnnnnnnnnnnaacaaccgtaaaacaacaaaatattataattaaaaataatagtagaataactaaaaaataaccgtagaacaacagtgaaaacttaacacagtacatagtatgaaacttacataatatttttgaaaaaaaatctgctaaaaatataataagaaaaaagttagaaatttcaatatgtggtgtaaaaactcttttttttcttaaaaaaaattagaaatatatatatccaaatatgtcataaaaattatattttttt

SEQ ID NO: 156464 - DNA, 527 bp, Cannabis sativa
aattatgattggatatccgattctattagatcagttgggattggatcggtcggttggaattggatcggatgactttctgcacacccgtaatcgtggtaacatcatgggttagggacaccatgtcccaccacactaatgcgtcctcttgaaattgaaaggtggcacaggccaccctgtcatcaccgatgacgcccataaaattcaagattctagtaatcacttttagccactgcttggctttcatgatatcgggacctcctaggaaaactagaggtgcctgcttatggaacctttcatacagaggttccattcggttcactgcagctacaggtcctgcctgcacagcgaggacaggagctactggtatttctggagcagggattgcaggagcaccctgctatctcaaccgccgaatctcttcatcttgttcattaatcctggcttgcatttctgcaaacctgttttcccaatcctgggcggcttgggtagcttgagcagcctgtggcgggttagcatcaccccggcca

SEQ ID NO: 156465 - DNA, 613 bp, Cannabis sativa
gtgtagttcaagtgcttggtaagatccttgtagcttctcttttagttttcttggtttttaagaaagttgagtgttgcatgcttgaaaatttgtggatgtggttattgtttgtggttgtttttgatttttgaagtttaattatgatttaaattgttgattcaagcttgattgtgttggtgattagttggttttatcaatatatagaatttttactcaaaactatgtttttcaaagaaaaaatgaagaatctgttgctgcatttgttgtagatgcttgctattgttttcagaggttattatatgcatatttaggaagatttgagctggtttgaatgcatgttaatgatgtttaaccatgtttgagttttgaactcaaagcttggagctttaatggtgatttttgattctgtgttttctggactgtgttattgctttggaaatgttctttggggtatatagaacagttctggaaggtttggtttggattggatttgatttgagggagttatgaatttttgaaagattcttgcgaggaaccagaattttagatgtgtaactggaattccggatggggtgtaggaattcatagaaccggaattccggttgcagaaccg

SEQ ID NO: 156466 - DNA, 548 bp, Cannabis sativa
ttaaccggactcctactgttgagtgggagccatctaagatataatcaaagaaggaacattaggagatagtcaagaaaaatctcagaaagtgacctatatgttagataggggtgtatattagagtccttatatctacacaacctcataaccaattcgagatggtggttactctggggtggaggaatcattctagaaggatgtaagaatccatctataataatttaagctccatcagtgaagataaataactttgttgttccgaaaagcactgaaagttattcaactgaagaaggttcttattgtgttatctctattccaattttggatagaattagagacaagtcttctttatattcagatgcacataataagtagtaaggaattcagtatccctagattagtaatgcatatagaaaataatgttgcataatgttttatgaacccaaaggaagtaatggtgggaaaagcagttgcttaccacaatcttacagttcctgtaatttgggtttagtcaaatatactacacttgatctagatatcaagacaat

SEQ ID NO: 156467 - DNA, 680 bp, Cannabis sativa
catattgtttcaattaatttactcaaaatattagtcataaaccataccaaaaatttgaattaaattgtttacaccaaactatatatttaccaaatcatactgtaacatatatatatattacacaatattgaaacatatataaatatatataaaacattaagggcacagagataaccgctgaagccaagcccaatacaattcaaaataacaaaaaaaaaaaacgattgatgatataaactaacattaaaaactgaagccagaatagtcgaatgaaaatatatatacattctgactgcacccaatgcatatatcgattacatatatggtgcaagttaaaaaattaaattgcatttataaacaacatatccaaacatcaatacatgcgactgaagtcatgccgaggtgatgaaaaaaaacggcatctttgaatccattgacaattacatattttatacataaatataatttatctcctttactcgtacagtaaagaaaaacaaaacaaacgatggtatcttatagcaatatacagaatatatatatgtaattgtattcaaaaaatttgcggcagcagcaatataagaaaataaaatctaattttcaaaattcccaaatttcataaacaaaatcatcagatcttcaattaattcaacaaaggaggctctggtaccacttgttag

SEQ ID NO: 156468 - DNA, 553 bp, Cannabis sativa
aacaaaatgctttgttcttcttcagaaaaatgatagtaagacaagatacataatggttaaagaaaaataccttggaaagaattgatatatattgaagagttgaactgaatttttatttggacatgtcattgcgaacttgctttatatacttatgccatttaatataaggtaataggtccacatttcaaattgaaataatctttgctatgttttaaatttttacttttttatttttgacaaattaagatttccatatgtctattttatatagtttatttctttttatattttgttccaattatgttaatttggtgcattttttttttatctttatttatgttgagtaattttttttcttcgcgaagggaattgatgctgcataggactgttcatccaatccaattcatacttttttggtcaaataacatccaatccgcactaagtgcggatttcattttttggatctaattcaaaccgcacaatagctgaaatccaatccaatctgcaaaatgcggattggatcggttattttggattgattactttttaatat

SEQ ID NO: 156469 - DNA, 611 bp, Cannabis sativa
tttaatttattgtttttgttgtacatttatgtaaaaaaacccaatatttaattattaagttacaaattatttattattattttttttaatttctaaattaatcataaccattcaatgtataagcttgcatttgtaaactttctttctaaataatatttttttggtacatagattttttacatgtttttttgatgcagattgctagcaatatgtgaagatatttatgcagcaagagcagaaggtgaactagaagttgaagaggttctgtattggacacttgttaaaatttaccggtcaccccatatgcttctcgagtacaccaaactagattaatttatagtgagaaagtaattgtataatttttttttctttctcatgtgccatgttctatagtacaaaaaattataatgaccattctataatatatgatctatatctataacatttatataaagatgagtatttatttttcattttggttcatctatcatttagtatggttaaattattttgtcttatatatatactagcgaaaagctacgtgcgagacacgtatactaaattttatgctaagttttgtctactttatttaaaaattaaagaaaaaatat

SEQ ID NO: 156470 - DNA, 627 bp, Cannabis sativa
ctatgtcaagaaggaacttcaacacatgctacatcaacaaaaattacaccaacaaaatataaaacttattgtttgtagtatatataaaacttattatgtatagatacaaatattgagatctttgattttaaagatgcttttaggatgtaatcggtaaatgattttggagtaatgaatatacttctaattcatcaaaagaaaaccatcaactaaaaagtgaaagattattgataataaatttaattgattatatagtatttattttagtaataatttaataaaaaataatatataatatgatataaatatatgaaaatttttatgtggtttaataattaaatgaaatttatctactcaatgagtttatttttgctagagtttcattgtaccactaaaaaaatgcttctagtgataattttttagtcataacataaattttttatgactaaatgtgatttttactcgacaaaaagttacttatgaataaaacataatatttagacacaagttgtcactaattgattagttttagacacaataagtattgtgactaaaaatatgtttaatcacaacaaattgtgatttttgtaactaatatctttaaccacggactttttagtcacaaca

SEQ ID NO: 156471 - DNA, 818 bp, Cannabis sativa
atccggcagcagggtgaacaaattcgagaactgagagagcaacgagctcaggctgctctaaacctcaatcctgatcctacggtacctcttgtagtgccaccggatgcagggaatcatttggaactgttctatgagcgattcaagaagcaaaacccgacagtgtttgagggtggtgctgatccactcaaggcggagtagtgaaagagtgtgataacatccatttttgatttgatgcgggtcgaggataatggctgggttaggtgtgcgctatttatatgcggcaagagatgatgcccgtatctggtgggagattgtgtctcagggtcatgacctaaataacatgacctgggatgccttctggactttgttttatgagaagtactataatgagtctattcggtcagcgaaggtagaagagtttatacaattaactcagggcaacatgacagtaacacagtatgccactaagtttgatcgactggaaatttgcttctgatgaagtggctactgaagctgttagaaaagcaaagtttattcgagggttggatgaacatatcacatgggatgtgattgttgcttctaaacaacctggggttgctcggacttatgcccagatagttgaacttacgaaagaaaaatattgccagaagagattcatggaagcaaagatcaggtgttggttttggtaggggtattgatcccggtgaccgcaagaataggcctaatgaaccatcaattgctggcccaaacaaaaggttccagggtaaccaaggttttgttgggttttatgccttaaataaaactcatttcatagaatc

SEQ ID NO: 156472 - DNA, 697 bp, Cannabis sativa
aaagaaatgaaccaggctttcctggctaaatgggggtggaaccttctgacaggaaaccaatccttatgttgtcggattttggaagctaaatatcttaaaggcagacactttttggagtgtaagccgaaagcctcggactcgtggttttggaagaatgtgactaaagcaagagcaattattcgcaagggtgcctgtaggcgaataatggatggtaaggatactaaggtttggcatgacccttggatagcccatatgaaaggcttcttacaccggccaagaggcccctttctgaatgaggatttaaaagtcgctaatctcctgctgcccgatgggggatgggatatccaaaagcttaacagcttgtttgataatgagactatttcggctatcttgaaaggacgcaatccttcaggcataggagaggacaattggttctggaccttagaatctaattgttactttctagcaaatcagcttatagggcccaagctgcagatcgagtgatttcttgtgaggttgccccggccttgtggaacaagctttggaatagtaaaatccctgagagactcaaggttctttggtggtgtatcctctctaaggctctccctgtccgtgcggtcatagcaaaaaaatttcctattgaggatgacagttgcccgttgtgtggagtagcagtcgaaaccatggagcatctttt

SEQ ID NO: 156473 - DNA, 637 bp, Cannabis sativa
  modified_base (398)..(398): a, c, t, g, unknown or other
agtacatattttgtttagatttaaggtgttttcaatagagacaattgttttagcaactatgttatttggaggttaaaaaagtaaataaatgaaaaataaatcacaacccgcaaaaatgaaaaaaaaaaaaaaaaaagatttctcagtaaaatatatatgtaatctctcttttattaagaaaaatgtataagatatttttttgataatttttttaattaagtagctataacattatatatgaatacttcatgcaaagggttggaaatccttgacttacttgttcaggaaaagaatagagtgctcatacttattgtaattgttgtgatattttgcacactcaagtacacgtatcgtttacaagtaatagactcaccaagagtaaggtcgatcccacgagnattgtaattaagtacgttaaaattaaacttattgtaattaagtacgttaaaattaaacttacttctatttggttgaataaaaattaagaaatgattaaaactaaaaaaataaaaacaacgcaagaataaacaattaaagtaataaggaaattaatagttaataaaaactagggcttcgacttcaattgtttctattgattatggcctaaaatgattatcttcttattatcaatttctat

SEQ ID NO: 156474 - DNA, 1172 bp, Cannabis sativa
ggtaatttatcaatcataacagcaacttgaaattgttcatcaatagtcataccttcagaaagaatttcgtgagctattttctgaagctcgtgagactgggattcgactgatttatcatcgaccatttgaaacttcaagtagcggctcacagcgtatttctttgttcctgcctcctcggtatcatattttttctgtagtgcttcccatatttcctttgtagatttgtcagaattataataatcatacaaatcatcagacataccattcaaaataaaattcttacacaaaaaatcattctctacccaagaatccctttccttaacctgcgattcgtactgctcgacttcaccttcttcttggcaggaggtggagtctcatacacaactggtttcaaaacagtaagcacaaacacaacttttctcatggtcagaaaaaacatcttctgtctccaacgtttaaagtgcaaaatctcacaacaaaaaagcttgttaatgtcagcagtagaaccgaaaaattcatcgatagtagtcatatgtcttaaaatttttgagtaaactgctagcaaaaataaaagatgaacaatattaccaaatgaaaattctgggttgagtcgcgaactaggtcgctctctttaagatgtttatggcactgcccaggagtgtggaagcagtcagaatatgtcggccgtccccaagatcaaatagcctagtcatactgtatcgaaaccccactgcaccgtcgaatacacccaaagattttttatatcgtagatggaatttaatttttatgaaaactgtatttttttccgatatgaaaaatatgtattcttcccatcagttcaatcacattatatagacgaatagattgaaaaaacataacgggaagaagaacattttctgaatcgtgggatgtagttggttgaacgtgtcccattaactgatacgactaagtaatcagtttcaattaaacacgtttctcaattaaagtaaaaaataaaaaataattattctattaaataatttttctgtaaaaataatagactgtcacaccacaccacaccaacccaacccggctcggatcggatggacggcgcgctcgtggtgggtaaagtgtgtgagtcctcacccattctcacaaaactgggaaccctttggggcccaaccccaaatgcc

SEQ ID NO: 156475 - DNA, 660 bp, Cannabis sativa
  modified_base (379)..(381): a, c, t, g, unknown or other
ttgactttgacagcgtcttcatcgctgaatgatatggttggctctcctgctcgaggaactttgggcctcctttcttccacggccaggataatctcttcttgttcgtgttgtgctatccgggaacacctctcctgagctttgtccgaatctccagcaatgtgcgggcctccaataatgacttgtaagtgtccgtctactggtggaggtagcaaatcttggttgttttgaccttggtcggccttgacatacttctgcaagtgtggattttttttccttattaggaattcaatttcccgtttcaagttgtagcattcgttagtgtcgtggccgtagtctctgtggaaccgacaaaactttgtcatatcccttttgttggtannnttcttcatgggcccgggcttcttgtacgggatcaacgactgagtttccatgtatacactttctatatctgcagtgtatttggcatgattgtcccggagagtctgtccggatttataagtgaactttcctttcttcccgtttccttgcttgtatttgttgcagggacgcttcccacttgagcttgaattatttgaatagttgggaagttgggcggatgtcccagtggaaggagcctttgacttgcccggcttttgttcaccttccgctcattgaatggct

SEQ ID NO: 156476 - DNA, 647 bp, Cannabis sativa
aagcatgcgatgtacacaaacaataaactaaagtacgagatgcgaagaacttacataaagcttgagaactgggcgttgttgttgatcggcagtaaaaagttgattggcaacgatgaaggaagatcactaagaaaactatggtgtttgagggtttttttgattcaaaggtttctttctctttgaaaaacttgaaaaaatttggtgaaagtctgaaagtaaccaaatgaagtgagaatgttggcttttataggccaaaacgcatgtggaacagccgcgatcatctaccaatcgaacggttgggaaggcacacgactcaaattcccaggatccaacgactaaattgattcgtggacacaaagggtttagcacttaaattaatagctaagtctttgtaaagaaaggcattatcttggacatgcctcccggagaaggcatgcaaggttttatatgctcccggagagcaagatagcatcacagcatctccgggtggtgtcaggcttcctttgagcagtcatctcgcatttaatgccgcatgggaggaggcgtgttagaactgccacacgcaatcaagtgtgacagctcaacccccgatctgcacctacaaggctatgaccaataaagtctaatgacggctactttgtgaagaa

SEQ ID NO: 156477 - DNA, 601 bp, Cannabis sativa
  modified_base (26)..(26): a, c, t, g, unknown or other
tatatattatgctaacaaaattatanataccactattaaaatatgtataccataccaaattttttttatatataatgaaatagaaactaaatatcatcttaaataaataagatactatacacaacaaaaaaatatataccatacaataatatatatatatatacctataataaaagataaaacaaaataatataatattattaaaaaattgtatatattatacttacaaaattatatacaaccataattatattatatttacaaaattatataacaccttcatatatatatataaaaaataaaaattaaatatgcatgatatgaaataaaataatatattgtacaataaaacttatatactatataacaaaaaatatataccttacaatagaaatatatatagcatgataataaaattatatgtcatgtgttattggcataatttaccctcccgcgagaagcacttggctaaaatacacctcgcatatttaaggaaaccacaatatcaataagaaaaggcgcaaacacacacacacaaatcaacagaaactaacggtgaagcatttaatgagtaatcatggcaagtgttacatttatttta

SEQ ID NO: 156478 - DNA, 594 bp, Cannabis sativa
acttgagatgatcacaatgctacaaaccataaaacacagttttcggccctggcaaacaaaagggataatctgttattaatacttcgatgacttaaatttgacaacacaagtaaccaattatggacagccttccaaacaaaatattgaacttttgacggaattttgagggtcccaaatattattttaaagttcggagttaccacaagactagaagcttgaccaagaccaaccaaacgaaccctattccagtacctagtatggacattgtacaaccgagacatgtcatgataccataccaactggtcaaataagggtctattatactgcgggataaacatgataaaatgagaattcattttttttaaaaaaaatgaaacaatcaactaattatttcaatttctattgtcatccattaaacaattaacctaggcatacaaagagaacataggagcataagagattttattgccactcattgagggaagcccataatcattgtacactgacagagaagcaccaccaataagctagcgactaccattttggaataattctggtacatcattaataatatcatatgaaaactctgtaaac

SEQ ID NO: 156479 - DNA, 648 bp, Cannabis sativa
  modified_base (44)..(46): a, c, t, g, unknown or other
tagccaattgcaagtcgacacatttagaaggtgctaggcaccannngtgcccaatagcaatgctctttttatcgttattaatttaattaagtatttaatttcatataatataatttaagtatcactagtaccaaataacaatattctacaactaaataactttaatcttcctggtatttttgtagacttcttcaatgtaatgaccattggtcttattttatttttttatttatataagactaattagtaatttttttccttaaactttgacatgtattaaattgtgctccctaaacttttttggtcgttaaaaattcttcctgaactattgagattgttaaatttaagtacttttgtctaatttcattcaattatactgtttcagtgattgtttatatactaaaacatgctcctcacactttgatatctactaaattatgtccctcaaactttgatatgtactaaatcataccccttaaactttcatctatgctagaatttttttactaaaattaaacaaaattccttaaatttaacaatctcaatagttcatggagaatttttaacggcgcgtttatatattacaaccgtgttttacacgggactcgaacccaggacctccaagacacacacacccacctatggcca

SEQ ID NO: 156480 - DNA, 501 bp, Cannabis sativa
  modified_base (468)..(475): a, c, t, g, unknown or other
tgacttgattatgatcgaggtaatagtgagaaacgattattattgtttgtgacttgattatggttgaggaaaaaaaacggtcattaccgttatgagtaattactcgttgaaaccgcgaatagatttcttacttatcgttcgctttatctggcaacgatagtgacatacatagctcatgaatgacaagtggtaagggtgctttatgaagcactgcaaatgtgtgaatatagagatgtgtgattagcgtgctttgtgaagcactaagaatgtatgattatgtagtgaacgaatatccgttcaatgaaatgatgaaattgctgattatgagctgctatgattttcttataatgtgtattgaatgtgttgtatagacgttaaaatgtgtatgtaaattgaatatgtagtgaatcgtgagtacgtatactatgtcgtgattgagaatacttgcattttcaatgcttacgatcnnnnnnnntttcttgttgagtcattgtgactcac

SEQ ID NO: 156481 - DNA, 853 bp, Cannabis sativa
gtaaataagacacatgattttatagaggttcgacatccttagttagcgggtaatgacctactccccttttggctgtattgataaaaagagataacgctactcagatcactgtagtgatgggatctgaagtagctctcttaagattacaatgtataaatcagtaggcaagtgtcatgagggagagatagagcctttgaggcgtatgagagatagggtgagagcccttggggcgtgtagcagagaggagaagagaggattaggatttttagacttggagttgagagctaatgacttagggtttgagacatcagactcttaaaaataaatattttccctctatttttgtgggttgttgaggcccggtccgttgcttgacttgctgtccataaatgagggttgcgcattaatgtcctgccaaggaaaagctagctgatcatgcacctacaggatgcaggctgatcgaccatacaatatctgtaggttgaggtctggtcggccatgctcctgccagggtttggccggccatgtgcctgccacggtctggccaaccatgtgcctaccaggatcttacaggtcatgtttctaccagctttggcaagtggaggccaacctttggaggtggaggccaggctttgtaagtggaggcgagcctttgaaggtggaggcgagcctttgtataccttttccttaaagaggtcaggcttccttagtcgaatggacctttcttttggtatgaaagtcaccttttggccaaccagcttgtgctcaaaccttggccaaccatacaagttcatcttggccgacctataaactccccttggctggctagacatggtggtacagctccttgatg

SEQ ID NO: 156482 - DNA, 573 bp, Cannabis sativa
  modified_base (520)..(521): a, c, t, g, unknown or other
tcgccgaacttgaaaataatccgaacttgaaaataattttattctacatatatttattctacatatagctattctacatatagctcatattacattcacacatgctatataaatctccgtaattaacaaattacaattattaaatcacttatagcaaaaatttaaattttattctaaaataaattagtaggatcatagtcccacttattacctgatttactcataatataaatataaaccctaattatttaccattagacttatcgggatattacaaccatcccctccttccaaaaatttcttcctcgaaatttatttaaacaattcgggatattacccccatatttatgattctaactctcaaattactacttttatcttgttgtttttctataacacatttactagtgggattgtctcatttcatggtacttcctttctctagcccaaaacctagataggattgttagcccaagatatgtttccaagaggggagtgaattggaaatttaagctaattnnagaaatttaaaaaccccaaagacaattcatgcaaatattcaagtttaatgca

SEQ ID NO: 156483 - DNA, 507 bp, Cannabis sativa
  modified_base (50)..(60): a, c, t, g, unknown or other
  modified_base (464)..(469): a, c, t, g, unknown or other
tttagttcatcgttttagaagttccattttaggttgttaaatcaacatannnnnnnnnnnatctaagttcctggtaaaatataattccaataggtatgaccctgcatgagtccaagaacagcactttggttttggatctcaatgtcatctccaatggttgtttgaatattggtggtgggcggaatgactatgttatgaatgctttggtcggctgctaaactggtattcccagtctcttgcacaccaggcgcaatttcatccacaggagtcgtcatacagtgacctacgattgacggctgtttaggatttacagatggtggagcccttgtgtttcccaggttctgcaatgcaggatccacctcctatggatttttcggatcaaccacgcccctacgagtctgtaccaccatcatacgtgcgattaaatttaaaatgaagagcgatccttgattctgctctcaatnnnnnnaccaaaatattgacctcgcttttggccaacgacagtga

SEQ ID NO: 156484 - DNA, 569 bp, Cannabis sativa
caattggactatgattaaaattaggtcattagatctgtcaccaagttaatcacaacaatttagatcaaataaattataggtttgttaaaaaaatttaaataaacaattagataaataaaataatttccatgcaacaaagttgtgaaataagatattcataatataattaaattattattcaactaacaaactattttaaaaatttaggttgttaaaaacaacctataaaatatcttttacaaatttaaaattcagaaatgacactaatttaaaatatgtaggtttatttacattattttatcaaatttaattaaatgtttaataagataaatgatttgaaaataatcaaataaatattttcagtattattttctaatctcataatttaataaaattaaaataacaaaataaactaattttaaaatagatatggttaggcaattattattttaagaataaaatgagaaacaaataataattatccaaattatatttaaaaatatcttaaatttagcatgttatcccaaattttgtactctgacgtggcatcacgggaatggtgacacgtg

SEQ ID NO: 156485 - DNA, 664 bp, Cannabis sativa
tcaattcaacattttcaaagaaaattgggattgaaagacatttacagtctatctccatcttgagggggagtattaaacttgattagtgaattgattagttagctatgttgttggttgtcggttagttagttagtgtgtttgtttctcttgtaatctcagctggtatataagatgttgaacactttgtatcattttagttttgatgaataaaaattgtattgatttaattctctcttcctctctttctttattactctttttcaatctcactcgagctaatactaagtaaatatgtgatcactaaaagggtagtaaaagtacaataagagaatcatatagtttaatggaataagaaaaagaacaaaaagcaaattcacttttataatctaagaatgctttccttgaataatgaaacaataaaactaacatagagccaaataacactaacaaaccaatgctactaatagcttttacgacattgacaaagagtaagaaatatggaattatggtataaaaagaattctcctgtttacacaacatatagatgttggttgaattcataaattcacacattttgttttgaagcttgaaattccgtattttatattcccagtttaattatttaattaagtgattaatcaaatgcggaataatgaaactggta

SEQ ID NO: 156486 - DNA, 654 bp, Cannabis sativa
gtcacaattccagttctgattctgggtccgggtttggttctgggcccgggtctgggtccaagttggtgtcagtgtaccgagtcttagttcaagtttggtttcgagtttttcggatctcggtctggatccaggtctgagtcaaggtccacgtttgggtcttggttgtgggtccctagttcgtgtttgggtctgcgtctgcatctaggtctaggtcccgtgtttcaatcccggtctaggtcttggtcggtatttgggtccgtgtatgagttcgtgtccatgtctacgtctgtattccaatttaggttaggcacttggtctgggtctgggctcgactcccgagttcgtgttcaagttctggttcaagtctcagtcctagtctgggtccgggactgggtctgggcccgagttctggggctaggttcggtttagttctgggtccgagtcaaggtccaggtcacggtcctggtcctgttccatggtcctgatcaccttcttgttcaagtttcggttttgggtcctaggtttgggcctgggtataggtccttgtccagcttctggtacttgttcgagttcccgatcaagacatcgactatgggtcttgtccaagctccggttctctgatcacgggataagatctgcatcccaatcacgggt

SEQ ID NO: 156487 - DNA, 601 bp, Cannabis sativa
cactctaaaatctctttaattagtattttttattttctccttaattctctcattttttaaacgagtaatcttaaatgagtctcataggagtccttactcagttcatccgggaacaactaaagatgtatcgaaatctcaagaccatgttttggtggccaggcatgaagaatgatatagctgaatatgtggcaaagtgtttaacttgtcagcaagtgaaggttgaacatcaaagacctgcagggttgctgcagccactaaatcttctggaatcaaagtcggaagacatcaacatggactttgtggttggattacataagactacgggataatatgactctgtgtgggtcatagttgacacatgtacaaagtcatcacactttttacctgctcagacgaattttttctttgatcagtatactgaactgtatgttagagaaaaagtgtgtctccatggtgtcccaaagtccattgtttctaatagagatctgaagttcacgtcaagattctgggagagcctacatcgagccatgggtactcaattgaaattcagcatagcatttcatcctcagacggatggacagtctaagaggaccattcagat

SEQ ID NO: 156488 - DNA, 660 bp, Cannabis sativa
tattttctcaacatcgagacatggaatacgttttgaattgcctaaagtgcttgaagcaatgctaatcgatatgccacttgtccaaccttctcgagaatctcgaaatgtcctataaatctagggcataacttgcctatcttcccgaaatgcttgatctccttcataggagacacccgtagaaacacatgacccctacttgaatttctacatctctacgtttcggatctgtataacacttttgtatgctttgagaagcaagcattttggctttaatcttctcaattgcttcattggtccgctgtactgattctggacctaggtattttctctcccctgtttcatcccaatggatgggacatctataatttcggccatataatagttcataaggagccattcctataatactctgataactgttattgtacaaaaattctatcaacggtagatacttactctaggatccctcgaaatccataacacaggcacaataaatctttcagtatctgaattgtcctttcggagtatccatcagtctgaggattgaaggctatactaaaattcagtttggtacccatagctcgttgcaaactctgccaaaattctgaagtgaacttcagatatctatccgaaacgatggattttggcacaccatgcagt

SEQ ID NO: 156489 - DNA, 589 bp, Cannabis sativa
cgaattagtattgggcttattcaatgaataataattatttaattaaggttaaattcctctcctttgggccttgtgtaagagttaaggagtcattagtagtgtgtacgacatactgaattcagccatcttttacatgaataaccccaattgtgaatgacaattcgccttatctaaataattgtaataggttaattacactagtttagcctaataaaattgattagtaacataaataattttcaaaatatatgaaatttatttttcattagattattttgaaactaatttaataaaaatacacttagtttaatgaaattaattccaggtaaactatatgaatttttctgtatttaattaaataaagaagttataactaattagatttttctagatacttaattatttgaattttcttacaaaatatatttaaattgaaaattatttttcaaattgatttcggatcaacataaattaaaatatttttttgaaattaataattaagtagatttttctaggaaattagttatttatgtattccgtaaaaaatatatttaagttgaaaatttgtcaattttagatcaacttaaat

SEQ ID NO: 156490 - DNA, 783 bp, Cannabis sativa
tcatatgcactatgtagtttatttaaaccaataggaacaattttatccatggtaaaaaggcacatcattcatctgacatttgggggaattcatgtgcttacctctgcaatttttcagcagcatagtactattgacggtgagaactcgtcaactaagttagtggtcggaaaatgcaaggttacccaaaaatgtgatatagataagataaagatgaaggtgaagagatgtctaaatattcctctccatattgaattcaatatctgagttacaccaaatgattttccaaccccctctcacatctgagatggagggtatttataggctctaatggcctggtgtacaaagtgatcccatggggacaagatgtcgctttcccgctgcatgctacaagtgttggaggcagcttggcttcctgtacccttgtctagtgtaagatggtccccaattgtaggttgtaggagggtggttgcagtgtgtggtcttcaggtgcacgtgcgtggtccccggttgcatgcgtggtggtccctaggtacaggttgtaggagagtggttgcagcatacccttggtcaggtcttcagaaagcgtgattgtacgctcttcccttggacgccttgtcctttgattcctctctcaatatcattctggtcgtcatgcattcacgtctcaccttatcttcacaccctccatgccaccttacacttaacacctttctcccatacactcaactccccccacattaacacacactcccccacatgcacacacggctcgcatgcgagccc

SEQ ID NO: 156491 - DNA, 686 bp, Cannabis sativa
  modified_base (318)..(328): a, c, t, g, unknown or other
ctccgcatctcggggcggccagtggtacgtcccggacgtcgcgggcttgattccagccacctccacaatgttctccagctggtgagggcaagttagagtggagtgaagctcagcctcttcccatcccgtagcacgctgtttgtacccctcctgggcaacgggacccagcatgacgtcttccagggtggccagacgcttaccccctttcttagaagattttgaaccggatgcgtacattttttattctgaaaaagagttaaaattccagcaattaggtctcataccaaatcctaaatcaaaaaagggaatgggggtccnnnnnnnnnnngaaagaggccccctccggacatctctcaacaagaaagccttagaaggatttcctggacaaaattcgggtgtaaaaatctcacagatggtgacattacgcatgaaagaaaaagaaagaagggcagaaattcgagaaaaacgaagtcttctctatgcccttgaaggccaccacacgaagagtgtatgatcctttacaaaatataacaacagtgcgtaacaagagtaaccctaaccccagaaaagggaaatctagacttattacgtgaaaaactcaagggaatacattcccagaaacttcaaataccaaacccagaaaaacaaacagatagtaaagcatgccataaacacaaacagtaaag

SEQ ID NO: 156492 - DNA, 606 bp, Cannabis sativa
ttcgtatactgtacctagttttgtcaataaaaggtttaggtttgaaaatatttggttggaagaccctgatttttattctactgttaaagatgcctggtctgatcactctattccaatgtctacttcggggtttcagtctttctttaataagcaagatcattgtgtcaatcatctcaagtcttggggtaaaaaacataattctctctttaagaccagaatttcccagcttaacttggaaattgatcaactccaaaataagatggcccttacccttcaggagtcccgtaggcttagtcatctgaagtctgctcttgactctttgctgtataaagaggagatctattggaggcaacgagcgagggttaaatggttgaatgctggggacagaaatacaaatttttttcataaacatgcctcttttaggaagaaaatgaatacaatcaaatttcttaaagctgaggatggctctcttgtgaatactcatgaggggattgtaaatcttatcactgattactttcaaaacctcttctctacccaaggcagtgatgtggatgctgcttctactatattttcctatcttaatctgggttagaggagtctgatgtc

SEQ ID NO: 156493 - DNA, 790 bp, Cannabis sativa
attttgtatgtttaacaaatgttgtttttaaattacacaggttaaactaaccactaaatatttatttgaggtaaccaaaatgaaagaatcatggacactagacctcaaagaaggaacatgcacgtgcaacaggttactaaacaagcttcgttcagattactacaccaagaaaaattgactagcaacataacaaattcagtaaatgtggagagctaggacaaaacaagaaaacatgcaggagaagacatcaaaaatgaaaagaagtaggacaactaaaaaataacagtggaacaacagaggaaaactgaacatatattggagcatagaatactgaagaaaataacttacataaaaaattaattatttttctattactattaaaagtagagcagtacaataaatttggaaaatgtgataaataaataaaaaataaaacagcagagtaaaacaaccttaaaataataacaaaataaaccagtaacagaaatatatatattcaatcttaaataatctaacagaaacatgtttaacatgaagaattaaagaacctgaatatagaaaaactacatattgcccaaaataatgagagatggaaaagagagagagagaagagaagagaagagaaaaggggaaggatgagagagaagagaagagtgaaaagatgatcccaagccttcaaataaattcatatgtcacatatgatgttttaaaccttcctttatatacatattgatatttcaatggtacaatcatcgtttgttacttataggatcaccaaagtttattatgc

SEQ ID NO: 156494 - DNA, 556 bp, Cannabis sativa
tatatcatttttgttttgatttcacaatctttattattgttgtgtaacaaatgtagttccttgatgaagaaaccattttcttggtgaagaaactggtttctttattaaaaaactacttactaggtgatttttctagtgattttgctggcgacaatgccaattctgacgacttttttgatgccggcaataactctggcgatttttctaacaccgagaactactctagcgacttttaaggcatcgacatcaaacagcagaatagtcgtcggaattggcgttgtcacctgaaaaattatcaagaaactggtttcttggtgatttttcctgtgatctttccagcaccaattctaattttgatgactttttcggcgccgacagcaactccggcgacttttccagcactagcaactactccggcgacttttccagtgggtagcaaactccggtgacttttccggcacgagtgacaactcccgcgatcactatagtattatttgttttatttttttataaaaataaatatgaatgaaattttaatattttttatggtaattta

SEQ ID NO: 156495 - DNA, 535 bp, Cannabis sativa
tagcataaagataatgtaaaagaataaaaggaagtgatattaaaaggaatgccaaaccaactcttttcttttgttggtcattctatctctgagtagatgtatgtgtattcttggtagatttgcaattgcattatatacaattgctaaccacaatctcaaaagatgaaaaataaagaaattaagattgataaaaatataattttaagttatatataattatgtttagcctattttgtttttaatatatatatgtctagcaaaaatttataaattaaaaaatggttatatatacacgttcatgccaaatatcttagttatatatattttttaatattaattaattttttaattaataaaatattaaaaaaaaataaaaatagagtcaaaaagctaagaaggtgtgataatatttttataaaactattaaaaaattaaaaaataagataattaaggagagaacaaataagattgaatagaaagattttagaatgccacatcaccgcctcatatctctcttttatatggatatatagat

SEQ ID NO: 156496 - DNA, 998 bp, Cannabis sativa
  modified_base (145)..(156): a, c, t, g, unknown or other
aaaaaattattaaaacttaaatcaaatataattaatcataaatttcgtctatatacatacataaaatatcaatcaatatgtctaccttaatgtttttggttttttttttttttttaaattaggatataataataataataataannnnnnnnnnnntaataataataataaaaaaagaatcaggtgtacgtgatacttgaaataatattttaattgctttttaccacgtttaaattttttattaaaaaatattaattaatttttaaataaagcccattttacgtcttttttagaaatgataactttaatgtcaagtatcacataattatatggcaccctacgattggttagcgatattcttaaaatcttatttttttaagttatatgggacctgatatttaattacaccaatagtggtatgatacaaatgatgattgccttttaacatttctcataactgaaatatcacattttttttatatatttttttcttttttaagattttaaaaaataataatcactttttcaatacattaattaataataacagaacaagctaatgaattttcttcaatatcttaacaatgttgaaaaatatttaaaattcgacataaaatttaagattaagatattaatttgggaaatataaaagtggcgactggaagtaaactacggtaatgacaagaaatgagatacagtaatgacaatgggtgagatactgtgataaaaaataagtaagatacaatgaaacaacaagtgagatacaataataacgatagttttaaatgatcgggatataaaaataatgcattatgagaaacaccgtaatttttttctacaccacctatttcattatattttttttaaaaataatttcttttaacatagtaatttaaaataccacatataataaattttagtaaattttaaacttcttaataaataattctaaataataattaataaaattgtgcattagtttttaataaataaaatta

SEQ ID NO: 156497 - DNA, 572 bp, Cannabis sativa
ggcataaaacccaacacttaaggtcttgatacatctttgttgaccctggatgaactgagtaaggagtcgtatgagaatcattcacgatctctcttttaatatcttcagccatagacacacatacacgatttattaattgtagcattcccgtatcatccactgtaaagtcattagtcctcccagctgaaaccctatctcgggatttcactaactttggatcttgcaactatgcttctctaattcgctccaaaagaatagattgcagggtaatattagctaattgccccacaaccaactctattttagctcgagtaatctcatttgctaactgctgggagatttgtttcactgtatttatctgactctagccctttctactcaaggcatcagcaacaacgttggacttaccagggtgataacggatctcacaatcataatcctttaccaactctagctagcgtctctgtctcatgatcatgtctatgtgaaatatccagtttatacgcatatattggtatttggtatattaagtgtgataaaattatattgttattattattattattgttgtt

SEQ ID NO: 156498 - DNA, 738 bp, Cannabis sativa
tgttctactagtgttttataataatacagtatttttgaaaaaatttccgtgtgacagtatttttgtaaaagttcactcaaatgccagtatttttgtaagtttccatattttattatatatatatttataatcatataatataatttatatggctatttgaaaaataaaaagttgaaactaatatattttttatggtggttgatttgaattttgaattcaatttatctatatctgtctcattattataagtaactaaaatataactattgaaagtaaaaataaaaaaaatattagtagtcgatttaaacaggttaatctgatcaaaccgatcaatttcattggacagggttttttttcttaattagacgggttgcacttagattttgtaacccaatccttacattgaattaaataaaatgtagcataaaccaatcaaaacgatcgacatatacccctaatataaatagccgtatttttttctaaataaaaacataaagttaaatccgtaaaagtgtagattatttttgtaatttcttttttgtcatttttagtattaaaaaaaaaaacccttacaatcctacatcagtttatcagaattattaatttaccatcgctattagtataatttaatatcagatcttatgtatatattagggttgtacaaaaaaatttgtaaaccgcttaaaccgaataacccgcccaaaccaaaccgaaaaaaccgataaaaattacaaaccg

SEQ ID NO: 156499 - DNA, 788 bp, Cannabis sativa
gttcggcgacaacggaaaatgtgagggatggctagttcgatcacatgggtaaatttaaaatcttatttcttagtgggatatatattggagaaaataaaataccgaggttaagcagggttatggaatttgactattttacccctagtcttgagaaatacctaagttataacctaaagggcattttagtcattttaattagaggattaggtggctgtgtgagggtgtgacaactgccctttatttttggattagttagtgaatagtaaatgcattatgtagaattattgaattaggaaaattaggaaaaatcacaaattaagagaactctctctgtttctctattggctgaagcaaaaccaggaagtttcatcttcaatcttggtgttttctgagtattaagcaagatctttgtgaggatcaagctaaggtaaaccctagaactcttgcttatgtttgtttttgaagcttttacttggtttgagtatgtgattttgagatataggggttgttatggttagattatgttgtaattcaaattctaagcttagtttgagttgaatttaattttagcagctggttttgatgtatgggattggttttgtgcaagtttcagcttagaaagcttaactttgatctctaatggcatatttgaattttgtgagtttttggcaaattactagttggaatatattgtgtataccctaattaggtaccctggaaagtttgggtgcatttggatagtttttgagcaagaaatgagttgttgggggaaacctggtgcaaaccgg

SEQ ID NO: 156500 - DNA, 769 bp, Cannabis sativa
  modified_base (409)..(423): a, c, t, g, unknown or other
acgctaatttttggggttaacacaaaataatgaaaaaaattctaactcatgggcttcactaaaagggttcaaccataatgaggattttaagccattgtatctttcaaatcaacccatttagctctgaccctaaacctaatgaatccctatgaaatgaaaagtgtagctcttattttcagataacaattgacttcaatctcttctgtaagacaagtagaaactaaagagagagcctcttcttcttcttcttccaatttcgaaattatttttcttctatactgaataattcaaagccattgtgattgagagtatgcccaatctcatcaaagcaatacctagcatagtgtggaagactgtgtctaacaaaactaaagaagagaagatccatgttcagatcttgataatactnnnnnnnnnnnnnnnatcaagggctagagatctgaatgggaggagtcattattatttcgctgccattaatgtaaggatttcataatctcttatgtgtttatttcattatttcaggaaattcatgtttaggatgttagattatagattatgatcaaatacatgttgttagtaatagtaaattaaatctagaaccagaacctggtaaaataacttccaacatatatataaatgcataattacctaacacattatttaatctatatggaattccgtattttaatattcacagtttaattatttaattaagtgattaattaaatgcggaataatgaaactagtactgaaaacagtttttccgtag

SEQ ID NO: 156501 - DNA, 595 bp, Cannabis sativa
tacaaaattataaaatttgttgaaaatgatatttcttaatgtataataagtacatttgaagtttttttgagtgatagataattaatgcatgaaattctcaacataaataattcatactcatttttgtagatgtcgtattagtatcaaaaataaaaataccaaaattaagtgaagtatttataaaataaaacatgatatattttttggaatcttattctattttaaaattagaaaattattaattattatctttatcacatcaactaaattcattttttttttgcatcctaagaaaatattaaattataagtggctcaaagtaataatttataataaatacattaaaaaattagaattattgactatcttacacatgaacaatattatgaaaatactattatttagaaactaattaacagaagtgggaaccaaaaaaaaaagacaaatgacacaaataaacatcaaaatggtttcacaataacaaatgaaacaaagagaaaagctggataattaattggcaataaaatgtcaagacttacaaatataatataagaatcaaggagagagagggagagtgacaaattgtaacgtcccc

SEQ ID NO: 156502 - DNA, 581 bp, Cannabis sativa
gtttcctcataggatgttgaagaaaggaacacacttgtctgttgactttgaaacaaatctactgagtgcggcaatccgaccaattaaactttggacttttttagtttttgtaggcgatttcatatacaggagagcttgaattttttctgaatttgcttcaattcctcgggcattaacaataaagcccagaaacttacccgagttgactccgaatgagcactttaagggattgagtttcatgttgtatttcctgaggactttgaagctttcatccaggtcatctatatgcccccagcctttctggatttgacgagcatgtcatccacatatccttttatatttcatccgatctggtccttgaacattttgtttaccaatctttggtatgtagctccaacattctttagaccaaatggcatgaccttataacagtatagacccaaatctgttcagaaacttgtatattcttgatccggtggatgcactctgatttgattataccccgaataggcgtccatgaagcttaatatctcgtgcccggctgttgcatccacaatctgatctattcttggaagtggaaa

SEQ ID NO: 156503 - DNA, 828 bp, Cannabis sativa
tattatccaatcacctaaatactactccatatatatacctttcaatttatcttccttaaaaaaaaaatacacaattaataattgtgatgactcgattatagatatgttgtttcttagaatatatatatatatatatgtatgcatatatatggaacacttcttaatgggtactacccattgatagataaaaaataaatttaattaaatattaattttaaaaatattaagccattaaattttaatccgatggtgaacaataaaagagaaatttaaatttctacgcttaaattagctacttaattaaagaaaatatcaaaaaaatacatctttttacactatatcaaaaataagtttatatgaaaaatatttaagtaaaactcaatatttttttatcatttttttgctgaattttttttttattattttcttttcagccgatgaaataacctcaacccatataatggaaaaagaatgagagatttttctaattaaatagaaaaattaaacataaaagctccattttttttaatattacctattcatgggtaatactcattaagagtgcacctatatatatatatgtacataccaatctttcaaaaaaaaaattgtacatacctaaactacccgattataatatagttgagtgttattattatttcaatccaacctaaaaaaaattataacaaattattaaagtttttatttttaccttattactgaaattcgaaactaataccgactaaactttgaccaccacgcacaactacaagaacacaatcttaacaatctaggaaaatcctaaaaaaatttacaaaataaaatata

SEQ ID NO: 156504 - DNA, 537 bp, Cannabis sativa
  modified_base (307)..(314): a, c, t, g, unknown or other
ataaatagttttgacatttaaaaggattgaagttggaaaatatggcatttgtgaaagaaaggataaattattgaataaaatgacaaaattgtaactagtaaggtccacatcctatggtcaaccacttaaggtatatttagccattaatttatcatttttgaatgtcatataattcaaacctaaacctagaaggattcctataaataggtagtgatagattctaaacttgacagacaagaaaaagcataacataagcctttcagtcacatttatcagatagagtcttcttctctctctctctctctcnnnnnnnntatatatatatatatatttgaatccttctctctgtctctttctctttatattttcgagccttatagtgaaagagtacatgctcacccatagtaagtcaagtactcaatcatagtgtttaagagtacgaagaatccaaaacctgaaggagaattgggctcagatgttgataatactctgcgacagaaaggaacaatggttagagatctgagtggaagggggcat

SEQ ID NO: 156505 - DNA, 709 bp, Cannabis sativa
  modified_base (232)..(234): a, c, t, g, unknown or other
  modified_base (370)..(381): a, c, t, g, unknown or other
tttcatgttatttaaaataaaatcaaatattaaataaaataaaatgataatttaatatcatttttctgattttataatttaatttaaataaaaaataataaaatttaaaagttagcaaaatgtcatatttcaatttaaaatttcgtgattaaaataatcttattttaaatttctaataaggtcattttattaaaaaaaattaaaatataaatatttgaccttaaatttaaannnaagataaaataatcaaatttttaaaaataagataattaattaagcaaaaaattagatttttccctattttcaagcttcaaatttcactaatatcttaaatcaatttaaaaaatactaattaatttaattctgatannnnnnnnnnnnatatgaaaaataaaaatctaaataaaaaattacacaaaaaattagaaattaattccatgaaaaaacatgaaaaaaaatggaaaaatttgtatttggtgcggatggtatgcaatgcataccatccgcgcgcatacaaaggtgtgcatggctgaggaaacacggcccaggaggctgctagcagcctctctgcgcgcgtagggacaagattcagacatctcagcccatcctgaccgagaaaactcgaacaaggtttgtccgaatgcgcgtgaacccctggaatcaaggggatccgcgcgcgcacgtgggggtgacaccacccctgattttt

SEQ ID NO: 156506 - DNA, 607 bp, Cannabis sativa
  modified_base (48)..(51): a, c, t, g, unknown or other
aactgtaattttcttccagtttcatcagtacagactctgttttgaatnnnntaaaagaacatttgaaagtaactggatactacatatttttatctagactcaaatgatctagaattcgatccttatatgtactctgtttaagacaataacagagtttgtactgaaaaaattagaaaaaattacagttttacaaacattaggtacttatgccgctaaaaataaacattagatttataccgcttacaaatataaaactttgggtacttatgccgctatttatactttataaaataatccctttccttaatatgtgttatgaagagaatcttgggccatgctgagagaagtaaattcggcccactatattgaatgaagaatagagaaaattgggcttgctatgaattggacttcatatttttccacttttaacaccatttctaaccatctcaaaaatagcaaatagtttttgaagttttaaaaatacaagtcacgtttggttagtatttttttaaaatcaatattgaccaaaagtgaattagtttttaaaatagaaaataacattttgttgttttcaaaattcttgttatttgtaactttgttttctgaa

SEQ ID NO: 156507 - DNA, 692 bp, Cannabis sativa
ttacatatcacaccatttttttttatcttaatatagaaaatacctctcctaatctaataacctatttatttgtctcatatatatatatatatatatttaataacgtttgtagtgagcttaaataaaaaaaaataacgtttttagtgtttaaattattaattctttatttttttattatctctttctctatttattttttcctcttttcgttcagcctccatttcttttaccatcttttctttgccattcagctcttctatctctattttctcaaactttaaaaattatttttaatcacatctttattcgattaagcataagaaaaatgtcattataatctactcttgaacgtgatcattttaagatataaaaaatatatatttttttgtagtttccaaaataaagaaactatatatagagttactcataattctaatcatatactaattagttactattttatatatatatatatctttatttaaactaacaattcacgtttattttttaaatttgactaattggacagctaattaatttctacaataaattttaatttatcaaaaatctcacttgtaagttatttaaattattttattttattgtaacatataagcttcttaaatatatttgaaggtaatacaaatgttactaaaattaaaaagtaatgtgattttttttttttttttaaa

SEQ ID NO: 156508 - DNA, 660 bp, Cannabis sativa
acacacaattacatatggtattatatgtacgaacattttttaatggagatgtaaatgggtgatttattgctaaaatatagtttatttggtaaaaagtttgttctaattatatgccaaaaattgattcaaatttatccatgtaaaaattaatttaaatttattacatagtaaaaattaatataaatttaaataaaatttgaatcacaataaatatattatttttataattacttttatgctatttttaatattttattattaaatttatctattgcattaaattataaataatttatatttattttttattgttttaaataataataaaatttataataaagttattattttttatatatatttattgcatcaagtttttgtaattgtatattggaatacaatactaaaaattaatataaatatatcacaaaattattttttgtgttatatataacacaatttttaaaaggaataattacacaagtcactatttttcgtaaaaaaaattacatttttatgtttaaagattttttttttagttttacggttttctttagaaatgacataaaaacaacaaaaaaattacataaaagtaacatgtaaataacatttaaataacaaaaaataacatacatataacaaaaaatcaacaacacatta

SEQ ID NO: 156509 - DNA, 571 bp, Cannabis sativa
aaccgagaagttatatcctaacatgcaaacaaacgttagaaagcacaaagtgtccagagaacttacatgaaagttgagaactaggggtcggcgttgatcgacggtataaagtggactcgaaacggcgaaggaagagcagcaagaaatctatggtgtctgaaattttttctctccaaagtgttcttgagaaaatatggcgaaatggagaaagtaaccaaatgaaaggtaaaggctggcttttataggccaagaacaggtgcgaagcagctgtgatcaggcgtcatcgtgcggtgagaatcgcaatcgattcgtattctgcagatctaacggttgggataagtgctcaccaggacggctggaaacgcttgagtatttgtttgacacccattaaatgcgtcggataattaatggacgggaaacgaatcgttgcctgccaaaagtaataaattttaaggatgacattcataacttcagcccacacgcccgaagtacgtgccaggaaatcaatgagatagctggaggcacctaagcaagcctcatttacgtcacaccaaacaaggcttggggggta

SEQ ID NO: 156510 - DNA, 512 bp, Cannabis sativa
  modified_base (339)..(339): a, c, t, g, unknown or other
atgcgtctcagctaatactagtggtaatgtcagtcgataagctacctgttccactctgtccaatatctcaaaaagacctataattttggactttgctttccccgctttccaaaatgcataacccctttcatgggtgacactcgaaggaacactttatcacccactacaaattccacaatccttcgctttgcgtcggcataacttttctggcggctttgtgcagtaaccattctatttcgaatcttttctaccgcttcagtggcctcttttactaggtatgggtctaagtatcgctcttcgccaacctcatcccagtgtagtggtgatcgacacttcctnccgtacaacatttcatagggtgccatccctattgtagattgataactattgttgtatgagaactccatttgtggcaaatagttaatctagttacctgggaaatccaacgcacaagctcgtaacatgtcttctagtatttgaatagtttgttatgattgtccatcagtttgagg

SEQ ID NO: 156511 - DNA, 752 bp, Cannabis sativa
tctctctctctctctctcaaacccctagaaccagctagggtttggtgtgttttgcatcaattctaggaaaattcaacaaggttcttgtgagctcaagctttaggtaagtttctattgcttttcctctttggtttctagagttttaagttatgaacttatgcttaatttatgaaattagctactgtagttgttgttggtgtttgatttgtgtttctgaagttaagttgtgattagataggttgttttgagttggatttgttggttgtagtgctgattgagcaagcttcgagttttagaactcaagcttggccctttaacggtgatttttgatcctgagcttgtgtagttattttattgcttgaatatgtctattggcgtataatatgcaagtctggaaggtttggtaaggtttggaatcgatttggttaggttttggaatttttggggttttttggtgtaaaccagttaatcggttttacaggacctgtaaaatcggttaaccggatttgctgctaagttccccaaaaaatttgtgttgtcgatttgtgttagtttcagagctttggttggttaattccttgttagtttagggtattgccatgttaacttatagtaggtaggtttttggtttaaaacctaagtcccccagttgtcatttagcgtgtcacttatccatgttatgatcgatgtgatttaggggcctataattcaccgagcagttgttccacttaggttggccggcacacctgaat

SEQ ID NO: 156512 - DNA, 500 bp, Cannabis sativa
aagaggaaaaaactcagcatcccgtgtactatgtcagcaagcgcatgataggagcagagacgcgatacccggtgatcgaaaaactagtttttagcctcctaatggcctcaaaaaatttgagaccttacttccaagctcacccaataaaattattaaccaaccacccgctccggcaagtcctacaaaagccagaggcgtctggaagactcctcaaatgggcaatggagctaagccaatttgatctacactacatcccatgcacttccatcaaagggcaggtgctagcagacttcatcacagagtgccacaaagcagaagctaacgctagcatacccacaccgcaagtcccagcgtggaaggtatttgtggacagcgtctccaacgagaacgggttcggagcaggggtcacgatggtatcccaaacggacttcgactccaggcagccctacggttcgaattctcagcttcaaataacaaggccgaatacgaagccttgatag

SEQ ID NO: 156513 - DNA, 773 bp, Cannabis sativa
aacataaagaaattaaagaggaatagagaaagaaactgttggcggaatgattctagatcttcactctgatttcctctgttcttcatgccgctttctattgtgttttaggattccaaatcgcctcctcttacttccaatcgcagttttatatttatatctaatttttagggtttgtcagacaaaaaatacccctgatcgtacggacgctcgccgcggccacagggtatctcgccgtggccagatgagcttttgaaaaccacgtttctgttctcgagttatggccgcagccatggtgatctcgccgcggcgactggaatttttctgcttcgatctcttttagtaaaatgagcataactttctgatacaaactgcaaatgagctgattcaagatgcgttggaaagataaaaaagagatattaaacttttatgttttgactttatccaatatctgatcataatatagtcgaattcaggcttaaagttttagctttattttcttttaaaattttctttattttatcgatcactgttttccgaaatttatccaatttatacattccaagtgtagaaacttgaaaccaaagaaaacaagcgcaattctattccaaaagtaataataaagaagaaaaacaactataaaatgtgacccgaaacttaggctaaaaatatcctaacgaattcccccaaattaaatctttactcgcccccgagtaaagctaaaactcaaactgaaattaaacaatgcaatagataactaaaccttccaatgattg

SEQ ID NO: 156514 - DNA, 565 bp, Cannabis sativa
  modified_base (527)..(530): a, c, t, g, unknown or other
attaatgttgttgatgaatattgtatcttaactcaactgaaaatgtcatttttggtaaagtaaatatacattacttttatattcaaatattaatataaaaaatccatttcaatccctatttacctttttcttttcctaatgtaatttatgtaatgttatatgtttaaatttaatttttgacgataataatacctaagttacatatttcgagaacttctaaagtacctgaacgttaagtatcaaagtattatttacgtgtcatttttttattgatatatatatttaattaaattttttaataaaaaataaaaaatttaatgacatgaactaataaaggattgtcatgtaacaatttatttgagatttaatgactaggtacttacattagtttcagaataatagtttacatattattactgctaaaaattaaacttaaatatttatttacaaccaaaaattaaacttaagtatttataccataattaacactagctaggggtgctcatcaaatcgctcaaaccgctcgnnnngcaccgcaccacatcgcaaaaaaatgcagtttgaa

SEQ ID NO: 156515 - DNA, 746 bp, Cannabis sativa
  modified_base (688)..(696): a, c, t, g, unknown or other
acttccaagaatcgatcagcttgtagatgcaacaacagggcacgaaatattatgcttcatggacgcttactcaggctacaatcaaatcaaattgcatccataagaccaagaacatacaagttttcgaagagatatgggtctctattgctaaaaagtcatgccgtttggtctaaaaaacgctagggctacgtacaaaagattggtaaacaaaatgtttaaacattagatcgggcgaaatatttaggtatacgtggatgatattctcgtaaaatccagaaaggctagggggcaaatagacgacctggacgaaggcttcatcgtcaatgctcgaggaattgaagctaatccagaaaagtgtcaagccctcctagatatgaactcgccaacaaaaacaaaagaagtgcaaagtttaactggttggatcgtcgggctcaacagattcgtttcaaagtcaacacacaagtgtgtcccattcttaaacatcctgcgaggaaacaagcagttcgagtggacagaggaatgtgaaaaagctttccaagggctaaaggcacaacttggaaaacctcccgtactctcaaaagctctagacagcgaggaactgggaatatacttagttgttacggaacatgtcgttagtgccgtgccaattagagaagagaatgatctacagcacccagtctattacatnnnnnnnnnactcattgaggccgagggccgatatccgttattagaaaaactcgcttact

SEQ ID NO: 156516 - DNA, 537 bp, Cannabis sativa
ccctcctcgagactcctttgacttggcaacttttggagcggaggggtttgtaaccgttagctcctaaaaaagatcgatgacctccttggcaggcatcctttccttagaagaggtcccctcaccgcctttagacttcttggtcgggggagatgcgctggagcttccaccaatcctcttcctcagagcatcaagcatcatttgaaacatgtctacaaggaacaaaaaacaacatggttagaggaaacagacatcagaaacataaagcataaaattcaagaagctcaaaaacaagatgaagtagtatgcaaggtgattgtccgaacaggcctcgaaactccatctcaccttacatgcctcttattttggacataatagctttcccttttccgagcacgggaggaggtggccgagcaggagagatgggctccataatgcgaatttcatgttcaacaggcctgtgctgggccgaaagtttgttcctccttttgagtagagtaacatgctcctcctcaacttcatcttcaagattcaagggct

SEQ ID NO: 156517 - DNA, 913 bp, Cannabis sativa
aaacctacagataatgttcttgacgacaaagtcaaggactttcttgtaggttatggagacgaggggctcgacctctgtccatttagtgaagaattcgaccgctactactgcatacttagcttctcctcgccgagtgggtaatgccccaataaggtcgattccccatatagcaaatgggtagggcgaggtcatcattctaagttctgttggcggtacgcgaggtacatgtgaaaacctctaacacgtatcacattttttgacaaactcgtgtgtgtccttattgatcgttggccagtaatatccttatctaatgatctttttagatagactttgccagccggcatgatccccacaaaagccttcatgaatttctctgatgatttcatttgcttctgcaagaagaacacaccgaagtaggggcattgaatacactcttctatatcgtttgccttcgatcattgtgtagcgaagcactaaataaaatagtattcacgcctcgtttttgtcatttggaagttgctcgctgagtaaataattgattataggtgtcatccatgttggagagttatctatcatctcgacgtcttcagtttcacatatagttagctcgcttagcatctctaccgaaaccagattcagttcatccaggtcgttctgcgaggccagttttgcgaaggcgtcggcgttggagttttgttctctcagaattttttgattttaaagtaatcaaatttgttcaattttaagcctttggcctggtattccccgagaacctggttcacgatcaactacgaatcactatgaaaaatgagatttttgactttcagtgcctatgttatctttaagccgccgacgaaggcttcatattctgcctcgttattagatgcgtcaaattggaacctcagagcatagt

SEQ ID NO: 156518 - DNA, 703 bp, Cannabis sativa
tgaataacaataaatatttttatccaaatttggaatgttccaactttaaggcatggaaacgagatgtgaaaattactttagacataatacatttgaacttatgccttcgagaagaaaaacatgatgatcgtactgataccagtactgctgcccagaaaactcttcatgcacaatgagaaaattcaaatcatcttagtcgcattgctatgaaaagtccattccttaaaatatattgagtggtttgcaagacactacaaatgccaaagagtttttcaatgatgtagaaaaactatatagcactggtgaaaatgctgaagctagacatcttatggatgaaacagccattaagcatgatgaatcaaaaggagtgcgagattttattctgaaaattgtgaaggttcagtccaagttgaaaaatcataatattcctcttcctaactcttatattattcatcgtgctctttgtacacttcctacctcttttagccttatcaagacaacctacaacacttataataaaaaatggagtgacagcgacctaatttctcagtgtgtagctgaggaaagcaagctgaaaaaggagaagaatgaatcttctcactatgtttatcaactcaagcccaaaaatggataaagaaaattagaaaagacgcaagcacaaccaggggctaaaagatctcaggaagccaagtgagagggagtc

SEQ ID NO: 156519 - DNA, 1024 bp, Cannabis sativa
ttttaaaaaatatattaataattaaaaaatttattaatttttattttgaattattattatttttttatatagttaatttgaattattttatataggtatttattttaaaaaataattttacttacgaattttgttattaattttttttatactaatagttaattataataaaattaattacttaaatactttcgctaccaatttatttgtatacatagttttactataattatcttttaaattaatttgctttaataattttaaccctttactttaaattgataaaatatttgtagaacttcaatgtcgccaccaattataaaatttcatggtaatcaattgctttaaattgaaaataattcctttaaattaatgtcaaatagatacaaaaatataaaatattacgattatagttacaaatatactaatgtgaaatagataaaggaattattttcgtatattattttatattagtctttaaattaattatttgtggcgtaaatatttaaatttaattatcggttataaattatttttgacggttttaatagctaagttatatttttaaacttctgttagtacctgaccgttaaatgtcaagtcattatgtcatttattgttggtatatttaaattaatttttaaataaataatataaatttatgactttaactaatcggggattatcacgtgattattaacttttacacttaacggttaggtacctacagaagtttaaaaaatataattatgtattattaccattaaaaattaaacttaagtatttatttgtaatcgaaagttaaatttaaatatttatgtcgcaaattactcattttgcaaatgataaaagtataagaataaaataataaaataacattattacttattaagaaagggccaaagtctaaatatcaagctcacttggatgaacccctgtgccaatgtcctcaatcaatgaaacaagggataatttcacaaatgcacaaaaacaacaaaaatatagtttcacggaattttaaata

SEQ ID NO: 156520 - DNA, 506 bp, Cannabis sativa
aaaaaaaaaaatcctaattttttaacagaactctctctctcattgataaagtaaaatataaagtcttttttattgagaatgtaaagacaccaaaccctagcagcaattagaaaacccaaactctctctctcattccgtttcttcctacggctgtagattcacacacaccaaaaaaagctttcgatgagatcgacgttcccggcctcccactgcgtgtgacgttcccggcctcccaccgcgtgcgacgttcccggcctcccactgcctgcgacgttcccggcctcccaccgcctgcgcacgatgatgacgaatgaagttctcccttcgactcccactgctccaccgccccaaacgcccatggtctccacccttcggttcccttgtctccccgatgtcgttagccacgaacccctcgccggagagaagaacctcactctatttatttttctcaaagaaacccttttcttttcttcttgcttcactatcctatggaacaatttatctat

SEQ ID NO: 156521 - DNA, 500 bp, Cannabis sativa
tagtatattagtttaagtttgtggtatattcatattagtcttaggtatatcgtttgtatgtgatatgatatatcgtgaaggaaagaaagaagaaaaaaaaatgaatcgtagtttaaatttgacgtatatataattttcactacattatatatattatgcattacattatttcattaaaaaaaaataaaagacaaacaaaaaagaaacttataaaaaatttaagctcgtggtatataattttacgctatgggatatctatttaatctacaaatatatcatttttatgtgttgatgtatatcaagcaagaaaaataaagaaaaaacttaaaaaatagtagttttttgaataaatacatatcttaatatgacgaatgaaataaataaagaaagaaaaaactaaagatggatattctttgattaaaaatatatttatgctatacaacaaaattaatatacaatccaagtttttttattttattttctgaatggtataccatagt

SEQ ID NO: 156522 - DNA, 682 bp, Cannabis sativa
gcccttcttatcagtacggtggccgaccttgtacgatcatcgatggctgcctgatgtaccattataatttccatcttctggtccctccattttatgaagtgacgtctttgctcgtcaaatgcaaggtttatggctgcttgtaggtcctcctaaccatgatgcggagtgttattatagccttgcatgagcccaagtgcttcttgcatattttagagtttagtgtcgcctccagctagcctttgagtattagtagtagacataaccttagggttgggagtggtttggttggctaccgaactggtgttcccaatctcttgtacgcctggtgtgatcccaaccagaggggaagtcactccatggcctacattggtaggttgtgtattaacctacatggggtttgtccctggtggtcctctcatatttctaggagtttgcacattgggatttgtcaccattgggtcactctaatcggcaaggcctcccctacgggtttgtacaaccatcctgtttacctgttaaaacttaagacaaaggcttgtgttttttctctcaatgaaagcacttaaatgttgaacacgcttctagccaacgacaatgagtcaaaaataaagcgattaaacaagataagtaaaagaaagcaaaaatagtaaaataaagtgaacactaaattttaaagaggttc

SEQ ID NO: 156523 - DNA, 581 bp, Cannabis sativa
agttcagatcagatggaactaagttcaaggtgaaagacatacagagggatatgttttaggactatggcattaagatgagttatgagaaggtttggaggtgccgggagaatgcacttatgtatgcgaggggtacgccagagaagcttatagtcagctacctggttacttgtacatgctggaacaaaagaatatgggtactattacagacattgtcatagaggacaacatgttcaagtattatttctggtcactcgatgcttgtaggaggggatttaagttttttcgtcatgtaattagtattgatggcacgttcttgaagacagggtaagggggcacaatgttagttgttgtagaatacgatgcaaacaatcaactgtttctgattgcctttgcaattgttgacagtgagaatcatgactcttgaaagtatgtcttgtagaagttaagggaagtgatttgggaggttaagaacttagtgtttgtatcgaataggcattaaagcattgaacatgctgtcgaggttattttccctgaagcatgccactgtgcatgctatcaacatatttctatgaatgtcacct

SEQ ID NO: 156524 - DNA, 569 bp, Cannabis sativa
atgaagtataaaggtcaaagaaatgtaagggagtacattatgaaaatgcatcatattgtctaaagactaaggacacttaagattgaggtttctgatgatgtgcttgtattcatagttttgttaatgcttctttcatagtttaaccaattttaaattagttacaattgtcaaaaggagaaatagactcttaaggagctcatttctcattgtgtgcaagaggaagaaaggttgaaaaatgacaaaattgaaagtgctgacttggccactgcccctaaggataagggaaagaaaagaaaatttgagaatgaagctgctaagggtctagttcaaaagaaacaacaatagaattctaagggctgtttcttttgtagctaacttggatatgtgaagaaagattgtgccaaatatcaggcatgacataaagaaaggtattaatctttctttgttctgttttgaggtcaatttaccttcagtacctagaaacacttggtggatagattctgatgctactactcacataagtgtttctatgcagggttgcctgagctaccgaaagccaagtgatggtg

SEQ ID NO: 156525 - DNA, 602 bp, Cannabis sativa
  modified_base (105)..(110): a, c, t, g, unknown or other
  modified_base (261)..(286): a, c, t, g, unknown or other
  modified_base (546)..(568): a, c, t, g, unknown or other
agaaaagataaaggccaaagaaagaattccttaggatcaacactgggaggtctcagatatgctttgctatgcattagacaagacacatgctgttgagtgggagtnnnnnntaggtatcagattaatccaagataggaacattggaagacaatcaagtaaagcttaagatcaagaagaggaactatatgttagtcgataaggctggtatttaaaactctaagactacaccaaatcaggtttctagacttgccttagtgctannnnnnnnnnnnnnnnnnnnnnnnnnactctggggtggagtagtgatttttggagaactgtaaaaccgatctggaatctctaactctaccgtgagactgaatgttaaagttgcaggaaagatacttattcagtttatggaaaggtctatacattttagaggagtagacatacagagaggaattttacaatatcaagaattttgtgattaaggatatgtaattgttaaggaaaggttatattgtatacaacctgtcatatcgtattacggagagaatactacatacnnnnnnnnnnnnnnnnnnnnnnntgttgagattatttaaaatgcactttttgtttta

SEQ ID NO: 156526 - DNA, 590 bp, Cannabis sativa
tttggtgaggtaaatgacctctttaatattccaagattaattttgataagctcatttggaattttgtaccattttgtatggatttagaattttacaattttttgtgatgaatttgtattttgaaattcttttattattattttaaaaaaataataaataaaataaaagaattattgactgatattttaattaatcattccacaatttaggagggataaatttttttatcaatctataatatctctaattcggttgaattttggattcaaattttatcttgtatttgaattggagcatcatgaaatatcatatgatatatcatactttagagaggtatataaaaattagcgcacaactgaaagtaaacactatttcaaaaatacttctttgtttttggattaaagctataaacatagtatagctttatatatgtatatatatatactagttagatattacgtgcgaggcatgtatacttaattttatattagtttttttctgtatgcaaaaaaatcaaatctagctgaactgcaacagaatattttaaaaccacaaggttaaagaaagtgtaataattcaacgattaaaag

SEQ ID NO: 156527 - DNA, 659 bp, Cannabis sativa
  modified_base (32)..(61): a, c, t, g, unknown or other
tttagaaagttcttatttaggatgttaataannnnnnnnnnnnnnnnnnnnnnnnnnnnnntaaaataatttccaacaatctctaccttcacgtaaaaggaccatgaatcaattaatcaggtctgggagaggtttaaagatttgatgggccagtgccaacttcatggatacgaaagttggcgtcttgtcagctatttctacgacggtctcatagccgacaaaagacaatttgttcaaatgatgtgcaatggcgacttccttcagaaagatcccgaagaagttttggaatatcttgaagaaatctctaaaaaatcctacacatggagtgcgccaagttctatggacaagccacgaacaaatggagcctaccaatttaaggaggatgacagtgtgaaagctcaactcgaagctttgaaaaaacaattcgaggctttcaaaactcgagaaggtaaagtactccagatgtctacaaatacggaaaagcaagaaccatgctttatttgtggagggacagatcatcaactacacgagtgccctactcttagtatgttgatgggaggagatgaggaacaatgtaattccttaagggattacaagaagccgtataatgcctactccaacacatacaatcctggtgggtgttgttgggttttatgccc

SEQ ID NO: 156528 - DNA, 559 bp, Cannabis sativa
  modified_base (524)..(526): a, c, t, g, unknown or other
ttttttttctgtacatttaactaaaaagaaaccacaatactctaaaataaaatgaaattaaacaatagatatgtagtataatgtagacaatactacacactatgatttgtcatcttctatctatgtatataattcttttttttaaaaaaaaaagaaataaaataataatcatatacaatatatagtctaaacaaaatttgatttgactttctttcaactatttatttatgagttcatttaaaaaaaataaataaataaaacaatatattaaatatgatgtgatggtgatagtgatcatgattatgatcatatatatatataaataaacaatggtataaacgttacatgtatataatataaaagagaaaagatgattgtgatgttgatggtgatgttgctggcagagaaaaaaatgaaaaaatgagaaagataaaaaaaattgacctagatagtgatattgcggcagagatggcagaggaaaaaaagagtgtaatacctaatgtgtaaagtgaaaaagaaaaagnnngagagagatatatattaaaaattttaagagccc

SEQ ID NO: 156529 - DNA, 978 bp, Cannabis sativa
  modified_base (928)..(934): a, c, t, g, unknown or other
cggtttgggagtttgggattttgggattatgggtttcgagagaacaagaagaagtagatttttttttgacaataagaagaagcagattttttttttgggtgtttttcctttttgagtgattttgggatattgactatttgactgaatatttaattaggggttttacttttatctaatttaattttgtaaatgtttttggtttttattttattttaattaggaaaaaaacttattgcttttccaccctatcaattagtatgacatggcaattcaacatttaatgggtaaacggttgggatggacggaacagtgcaaacagaattaaactaaaggaggtttttccaccaaaaacaaagaaaaagaggttaagtgttaaacaaatgaaacatagggaaatttggccgcaaatttctcttgtttatatagagaaagttttaatatttataataaatatataattatgatagttataattatatttagtagattattattgaataggtatgattaatataaaaattaaataagaataaataataaataacttataacttaataatttattattttttataaaattttaattaagattaattttatttttaaataaaattaattataactattaattattattttttttataatttattattaaatagagatgttttaacaattaatataagttaataataatatggtctcaagtaatttaaatgcatagaaaattacataataactacacaaagatgtgtgtgagatggattatatgtgatataattacataattcttttttatcaaatctatataaatatgttaatctaatattaatactttcacgttttagcatattatattatttgttacatgcatttgaattgaaacattaactacagtagaacttctattcaagaataacctctaatnnnnnnnaaaaaaattaagtctcaatttaggccagttataaataagaataa

SEQ ID NO: 156530 - DNA, 757 bp, Cannabis sativa
ctatttagttataacctcccaattagaatataatttacttggtcccaagtgtattcttggatagaggttctactgtaaatagaagttgaacctattggaataaactactaagaaaaatctcattcactctctcattctgtttttctctttgtgtcactataaaaaataactacctttagttaggggtgttcattgtatcacattcaatggatttagatccaaccgatttaatctaattatttattggatattaaattttgtcatccaatccaatcgaatttgagtcaccatattatatcctctacgagctacgacaggctttttcccaagctcatcatccaaagtcttgtgttgttggcgttgccaagcttgaaggtaattacaacaataactttcaagttatcctgcatgacgcttattatgggcatcgaccgcttgttgatgtgacgctcaatttctttctttttagtgtcacattagggacaatgtgtcactttattagtttgggggtgaacttaaatatttatttttaattggtttttaaatttttagtttttggttgtttctttgttttgagtcaatttactaaatgtgagtcaatttgaaagtaagtagatagcatgatttgaaaattttatttatttttcgaaaaatttgtgtgcttggtgatattacatctttgactaatttcaattttgtgctttaaaagaacatggaattataataagtaaattttttagcaattgaattagtttat

SEQ ID NO: 156531 - DNA, 529 bp, Cannabis sativa
agaagcaccgatttttataaaggggtcacccatgacttgggagagggatcctaaaatttgagtacttagagaaaataaaaaaagactcttctattgttatcttttgcattcaagaacttgttcttgattttgtaactctgattaataaacacaaggggagtaagctattaccgacatctggggtcgaacctctttaaattttggtgtcattatttacatttatagtttgttttttggtttaaatctcatttattacaactccgcgccggttggttaaaaatcttttggtactttcattgagagtttaaaccaaaatcttgaagttattcactgggaaaaatggtgcttaccaaaagatctcaagaacgacccgatgaggagatggataattcccagcaagttccataagcaaacaatcttgctaaaaataatggagaacgacccatacgtcctgtaatggtggtgcaaccactactcatgccactacccagactactactggtcaggggacagtcgaccaaatgttagg

SEQ ID NO: 156532 - DNA, 570 bp, Cannabis sativa
ctaaatttccctaaggatttaaaaccctcacgtctcgtcatacgatgagactatggattcagtcgctcacctcaacaatttcaatactgttttgctctagaaccgtcaaagaaggctaagactgaggaacctccgattgtgctttcggtggaagacacaaagcacgtgaggtaccccacaggtcgacccactcgtgattacaatccacctcgccaatgagagaaaaaaagggtgttggtggataatggaagttcagtaaatatcctttacaaggatacactgaagaaaatgggattgcaaaatgtgaagttaaaaccttgcatggtggatttgtgaggattcactggggacagtgttgccagtcaaggaattattgaactcacgttaactctgggcgaaccacttatttccacaacattgatggaagattttctagttgttgacttgccctcggcctacaacatattgttgggtcatcctgcgctaattgggctagggtagttagctcaattaaacaccggcaggagtaggtgtagtgcaaggtgaccaactactggctcgggaatgcta

SEQ ID NO: 156533 - DNA, 705 bp, Cannabis sativa
gattttatgtttcaggaaattagatagataaggtgcttaaataatgatgtattttttgaagtggtataccaattacctataaacacattctttcaattgaaatgtgtatctaaatcttagaacaactttatgatcgttctcttatcgaatctcaattacaaaggacaaaactctctatctcagaattcatcttccaagataagttctcatggctcaacaaagatatcaaaattctcacataaattcctgttgatgaagaaggctttcaattcaaacagacaatctttgattttcacactaaggatgttgtgatattgtcatcgtgtcagggtctcattttttgtagtagttgcttccctacccaatacctaacaatctacatttgcaatccattaaacaaggaaaagaacaaattgagttgggattcacttggaaatgatagcattatatgtttagctttcgatccttctcagaatcctatacacatttctacagaattcaagttagtgaatgttgaggcatttgagattggagaagaagaagagaagtgcttcacattcaaaatatactcttcaagaaccaaagaatggttgaaatcaagagagatttgaagtcaaaagaacaatattatgttcttattccatttaaatatctctattaatttcaaccattcttttgttcttgaagagtatatttcgaatgtga

SEQ ID NO: 156534 - DNA, 1001 bp, Cannabis sativa
tcatatttagggtgtttaaacatcatacttgtgagtagatctaagatcctagtagaataaattccaacaacccgaactttacagcacgaacaaaaggaagtatttttggttgtagaagaaagaaagccaaaatttccatgggtaggggaaccgactataaccttcactaaagaagatgctatccacgtttgcttcccgcacaacgatcccttggtcgtagaagtgcagatagcaaacaaaatagtggcctggaccatgatagataatggagcttctgcaaatattctattcaagacactatatgaaaagatgggactctaactcaaagatctgatcccatgtacccaatcggtgtatggtttctccggtcagagtgtcacacctttggggtaaattcgcctacccctcacagttggacaagctccgaggagcataactgtgatggcacaatttctgataattgatgttccataagcctttaatgttctgttaggccgaccaaccttatatgacctgaaggctgtcacatcaatttttcattcgtgcatcaagttaccaacaaagaatggggtagggtgcctaaaagggaatcaacaagttgcacaggaatgttataaccttgcgctgaccaaggccaaaaaggaagattcctctggccagagtttggacaaggggaaaagcattaccaaatagggagccgcccaaggcggggacgaggatgtggatccccgacttggggaaccaaatacaaatgttgggccaatggaagaattggaagagatagaaatcgtcccaaatgtcccgacaaggaaactcaaaattggcaaaggtttgctgcttgaggtaaaatcagctttgataaaatttctaagagaaaacctagacatttttgcatagtcacatgaagacatggtcggtatcgatccttctataatatcccatgccctaaacattgatccaaacttctgtcccattcagcaaaaaagaagattattagacaa

SEQ ID NO: 156535 - DNA, 520 bp, Cannabis sativa
  modified_base (41)..(44): a, c, t, g, unknown or other
cccttaaatgaaaaacgctattaacgttcggactaagcttnnnnaagttccaaactcgatttctaattcaaaatcacctcaaattcaagtaaacatcgaaattagtcccatagttaccaaagaacaattctacaaagtcagaatctccataactactgtaaatcacaaagcctctatataaaaccaatcgttttagcttaaacgtaattaaaccataccttaaatttttcctctctaaggatttgctatcccgctactaccagagcttagatcactaagtttcaggttaaaaattgaagaaaaaaaatataaaaggagaagttttatcgaaagacaaaaaaaatgagagttttgttccttcgttttcgtttgtgcttactgatataacttataatatatatatatatataaacttaacaacgataaattttttatatatataaaaataatattataataaaaagagattttttctattataaacttaaaatgtaataaatttacatttatgaccctaaaa

SEQ ID NO: 156536 - DNA, 602 bp, Cannabis sativa
tgtgaactattacaaaatcataacaaaaccaataaaattagtttcgaccatataaaagaaaatattatattcagcttacaaagcttatcgtaaagtttcttcataatactaattatattgagtgtaatcactacccatgggacacccaaaatctacatggtagacaaaatttaaatcttctaaatttactagaacttaaccttcatctaaatgaaagagataaataaatgatatatttcttaacaaagtaaacataaatatacgaagcaaatttttaccaaacaggcaatcttgatctaatgatccaaagagcataaattcatacacggggagtcgttggtcccatcattataatatctaattttaaacacactaaattagagtgatgtagaggctgagcattaacataggcaaatttgaattttcatgcttaataaactcataaattgatctcttaaattaatactatatataatttgtaaaatagaataacttttttctaaaccccaaaaaacccctcccatttttcccaaccgtccctctctctttctctttttccaaaaaattgactgaccatcgggccctatatcgggcctttgtct

SEQ ID NO: 156537 - DNA, 638 bp, Cannabis sativa
cattgtcaacgaaaaaatcaccaagaaagtgatttcttcatcaagaaactggtttcttgaagaagaagaagtcagtttcttgttattttttcaatgatttttccgacgacaatgctaattctgacgaattttctggcgctggcagcaactccagtgatttttccggtaccgacctactccggtgacttttccggcatcgacagcaaactccagtgacttttccggcattattgacaaataaaacttcctaaacaaatgaaaacattaaatatgtgatttgaaaactaattacatatatatggcatattaaataccatacaaagacctaaaaataaaaaaatactatataaattgataaaacttaaatgtattatatttatcataaaaacctttaaaatcccataataagtgtaatttcctctaaaataaaagggaaaaataagtccccccattcaacatgaggaaattatactttataccctttttatattgttctctttttatttttaccttcttttttaaagtttatcatttttatctctttttttaaacattacactaattttgcccctatgacttcaagatactcttcatgtgactctcttatgttagggtattttaggtacaatacatataaa

SEQ ID NO: 156538 - DNA, 600 bp, Cannabis sativa
tttaagttatcattaagcagaatcttaaagttggaggtttaggtttcccagattagggttttggcgtgttattatcctgattatattatgtgattagggcatccatccagcacgaggttttctgttcaggtcagccaactcacttgaatttggaaacgaggtaagaatagcgtagaacattatatatatatatatatacacgaatgtatgtatgtgtgtaatatatatgcatgcttgttatgcttagtaaattaccaacacttgtatggaagtggtacatagtgcatcggcatagtgtataataattaaagagtacattacggtgttacaccagcacaagtacgagaaagtacagggtgtgtgtggtgtatcacttagtggtactcagggtacaaaacaaaccctaccaacactcgtacaatgttgatacgttgtgtatgtggtacaatggttgtaccctagtaaagaacgttcttgctcatttgttaagccttacaaataggtgtatgggcacctagatacaagtcgatattatattatttgttatatgattttcttactgagtctgttgactcaaagttctactttcatgtgtaggta

SEQ ID NO: 156539 - DNA, 516 bp, Cannabis sativa
ctcagaaaatacaacatgaaactaaatcccttaaagtgttccttcgaagtcagctcgggaaagtttctaggcttcattgtcaatgcccgagaatttgaagctaatccagaaaagactcaagccctcctggatatgaactcgccaacaaaaatcaaagaagtgcaaagcttaactggccgaatcactgcgctcagcagattcatttcaaaatcaacacaaaagtgtgtcccattcttcaacatcctgcgaggaaacaagcagttcgagtggacggaggagtgtgaaaaagttttccaagagctaagggcaaaacttgcaaaacctctcgtactctcaaaacctctggacggcgaggaactgggaatatacttagctgtcacggaacatgccgtgagtgccgtactaatcagagaagagaataatgtacagcacctagtctattacctcagtaaaagactcattgaggccgagggccaatacccgttaatagaaaaactcgcctactgcctcattcta

SEQ ID NO: 156540 - DNA, 536 bp, Cannabis sativa
gtatcatggttaagattgggaagaagaatgatttttcagtttcatgaaggatgcaaggatctcaaattgaatcatttgagcttcccagatgatgtattactcttttctcatggggacttcaaatccatctatctcttacttcaaggtctcaagttgtttgcgagcacttcgggacttcaaccaagtgattccaaatcagctttttactttagcgggatggatgattttaaaattcaaaaagtgtaaaatgcttcgggttccacaaggagcaagctaccatttagataccttggcattcccattactgccaggatactttcaagtgctgaaactgaagttttggtagaaaagatgacgaaaagaatcagcatttggagctcaagaaatatctcatttacaggtagagttaccttgattaattctgtatggatttccattcacacttagtgggcgcaaatcatgattctatctaaaaaactcttgaaaagagttaatgtcgtgtgtcgggcattcctttggaaaggcaattcagaata

SEQ ID NO: 156541 - DNA, 653 bp, Cannabis sativa
ttataaaaaagtttaaaaaaccaaacataaataaaaatgtaaaaaaagtaccaaatttgacatatagtgtaaaaatccctaatttattaggtttgtagactcaaggcttttagggcaaatgttatagcataccattcgtgagccaatgcctcatacttatttagaagttatataatataactttatataactactagaaataatttctatttatataacctttttttttttttaatattttgaaaggaaatcacattaattacaaaagagaaatgctagtggtgcctagcaccttcctatgtgttaatatcgctattggtctaactaagtatcgagtcccatatagtttaatataataatttttagggagtatcactagccaatggcaacgcaacatgacgagaagatgttaggcaccactggtgcctaataacaatgctcattacaaaagtaattcagttagggagaggtccaactacacaagagaaagtcattgggggaacccatcccaaaaacaagaactcttattaataagagcatgcttgtaattaattaggggtgttaatatcttgttagtgcatgcaaattttatattttgaatccaattcaatctgtaaaagtacagattggatcaattattttaaattagttac

SEQ ID NO: 156542 - DNA, 864 bp, Cannabis sativa
atatctgagaagattataaattacttgagtaaacctgctattgcatagaatttagtaataagaattgaattatgttagaccataatagatgattgcaattgaagtcattaatcctaaattctaatcatcattaatttacatatcaatttacttgctttctgtttttactatttttattatttttctagtgttaatcttttctcttaaactcatataaccaaattgaaataaaagtttaattttaaagtacttaactacaatttttgtggaatcgacctcactctttgtgggtttataacttgataacgataagtacaacctcctgcgcgcataggaggctgcttgcagcctgtgtgcacagcccagggtgctttccacccaaaactcgattttttgtgattttttcacccaatattgaatttttccatttcaaaatcctaaaattcaatataaaatattattttttttttatttgaacataaatatcaaattttaaagttaataatatttaattattctaatagtttattattaatttttgatattttgaagtttgaatttaaaaattagtcattttatatttgaattatggttagattttaaaattttgttaatttcttaattctacagattatttaataataagattagatatattttaaattaaaagatatatgtttcatctttttaatttgaaatattatattataaattatcctatatgttaaattaaataacaataaatttgaaattaatttagatattttcatagttatcctaaccataataattttaaattaataaattggttattttatgatataatttattatttaaaaatcataagttagaaaaataatattt

SEQ ID NO: 156543 - DNA, 793 bp, Cannabis sativa
  modified_base (345)..(345): a, c, t, g, unknown or other
  modified_base (471)..(490): a, c, t, g, unknown or other
cctagttcaccatgggttgatatctcaatggattttgtgttgggtttacctagtagtaaacgtgggaaggactcaatttttgttgtggtagacagattttctaagattgctcattttatcccatgtcataaaactgatgatgcttctaatgtggcagatttgtttttcagggaggttgtgagattacatggtatgcctagaaccattgtatttgatagggatgctaagttcttaagttacttttggaaaacattgtgggggaaaacttgggacataaattttattttctactacttgtcatcctcaaaccgattgtcaaacagaagtagttaatagaactttatncactttattgagggctatcataagtaaaaatattaagaattggggggattgtttaccacatgttgaattttcttataatcgttctatgcattctgcgactaaattttcaccatttgaaattgtttnnnnnnnnnnnnnnnnnnnnccttcagatctatcacctttacctgtttctcagcatttgaatttagatggcaaaaagaaagcagaatttttgaagcaaatctatgagagggcatgactaaacatagaaagaaggaccaaagaatacataaagtgagctaacaagggtcgtcacaagcaggttttgagcctggtgattgggtatggttacacatgaggaaagaacgattcccatcccaaagacgttccaaatttctacctcgaggagattgtccgtttcaagtgcttgaaaggatcaatgacaattaataaataaaacctagaa

SEQ ID NO: 156544 - DNA, 686 bp, Cannabis sativa
tccacagaatacaatggtgatcaacagatccacatgggtgatggttcaggccttaacatccaacacataggtaaaacttttatcctctctcctttccattcccaagaacttgtcttgaataatcttttacatgtccctcacattacaaagaatcttttaagtgtctctcagtttgccaaagataacaatgtctactttgaatttcaccccacttactgttgtgtcaaagatcaggtaaccttgaagaccttgttggctgggaagcttgatcaaggtctttacaagtttgactctcttcaacttcataatctttctcaaaatagaggcacctcagcacctggtttcgagtcacaaactacaccagccactacctgtcaaagtcattgtaacagcatctcattacctcatttaaattctcaattttctctttggcacaatagactaggccatcctactgctaaaattgtacaaagtgccttgtcatcttgtaatattcaaattagcaataaaattgatgtcaatttttctgatctttgtgctgcatgctgtctaggaaaacatcacaaatttccttttcctatttctaccactgaatacactgaaccattacagctgcttcactctgatttatggggtcctgcccctattacttcctctagtggatacaaatattacatcagttttat

SEQ ID NO: 156545 - DNA, 708 bp, Cannabis sativa
tgggtcacgttgtgaaccaccatgtaggactttattcctatcactccagatgcaccataacacacatattaagagttctacttcagttttttgcagtgtttttgccaagtgtattagatagtccccatttaacatgccatgagcacgttgataatcaattgtaaaatgggtctttttccaaactgatttggcaaaattacatgagaacaatgcatgtccaatcgattcccaagcattcttacacctcgaacatgatgctgagtcaatgattttccttttatgcaaagctgaggctacaggcaaagcatgttaaatgactttccaatcaaaaaatttcactttcggaggtaactgtaaagcccaaaaaaatttctaccagcttttgaaatcatcagaagatgattcccgattcttctcggagatagagtttgcaagatggaaacccgtctttactgtatataccccagtcgtgttgtggtgccaaattagccgatcttgtgattggtaaaagcttaagggaattgtgactatacgatcgatgtcaatttgagcaaaattatcttgaagaagaggcaaattccattccatggtgtcaagaatataaatatgataaattttattaaaatgaaaacaaatatatgtgaggatataaatttaaaatatatatattttataaaaataaatataaaaaatatgtgagaataaaaa

SEQ ID NO: 156546 - DNA, 829 bp, Cannabis sativa
  modified_base (616)..(618): a, c, t, g, unknown or other
ccaagtctatgtttgggatcgggtgctagatttaggtctaggtccgcgtctcagttccgatctgggtacacaaccgtgtccgggcatgaggtctagtctcagtttggctatgaggctaggtctgtgttcggttataggtctgggtccgggtcctggtctcggtcctagtcttgttctagggtcatggttcggcgattcttgttcacgttctaattttgggttccaggctaggtctaggttcgggtttggttcttcgtctgggttttggtcctagtgtgtgtcctagatttagacaccgactactggtctgttccaggccccattacccgaatcccgagtcaagatttggatcactgtcacgggtctcagtctttttctggttcttgtcctaggtcctgagtttgggttcgtgattgagactggggtgcacttttaggtcccgaccctggtcatgtgtcccttgtctggttccatatttagagctgagttcaggttcgggtttgggtcccgagtccaggtttgggttaggatccggtccggctcccaatttgggtctacgtctgatttggagtctgggtccttgttcggttacgattctggatctaggtccaatttnnnttatgattccaagtccaagtctaattctagtctcgttcaactttcggtttgggttccaattttcggtcacagggtacgggttcagatacactttttggtttaatactaggttcaggttcaggtccttgtcaaggttcgggtccagggctgggtaccaaatctagacactgattacgggttttgtccgagccctgggtccagatccggatcc

SEQ ID NO: 156547 - DNA, 532 bp, Cannabis sativa
tcaaaggataccgtatctcatcccctatcatgcgcttgctaacatagtacaccggatgttggactttgtcctcttcccagactagggctacgctaacacagcgcaattctctcggagacagctaagtatagtaacaagtcttcttcgtgaactggctttgatagaatctcagtggtttatccatgtgttcaatgcctccttgcattcttcagtccattcaaattttcaacacttctttaaaatgttgaaaaaagggatgcacttgtcggttgatcgggaaatgaatcgacttaaggcagcaacctttccagttacgctttgcacatctttgtgcttcttgggggaaggcatgttcaataaagcttagattttttcgaggtttgcctctattcccctttggctgacaataaatcccaaaaattttcctgacttaactccaaaagtgcacctcttcgggttaagtttcattccatacctccgtactactttgaagcattttgcaaggtcgtccgcatggctcatgcatgctttg

SEQ ID NO: 156548 - DNA, 573 bp, Cannabis sativa
atacattgcgatttccatacaatcatcaaatatgcacataaaccatccaaatcaacacaaacatttttaaatccatatttcatgaaagtaaatcaataccattactctaaggccagttgttggattatgttttaccaggatctaaatttactaccttgtatgttacttaacatcctaaaatatgaattttctaaaacaatgtaatataaacacatataaagtttgagaaaccttacattgggtgccgaggaataaaatgactccttccgctcagatctctaactattgtatcctttctgtagcatagcatcaccaagatctgagcccgattctccttctcttgaatgggattcttcactgtcttacataatatgattgagtaccacttgatgtgtgtgggcacgtactctatcactatagggttcaaaatattgaagagagaaagagagagagaatggattcgaaaaaagagagaagagatggctaaaaatttgactgaaggcaagtgaattcatcatcttttaatttgagaccatcactatctatttataggaatccaactaggtttaggtt

SEQ ID NO: 156549 - DNA, 520 bp, Cannabis sativa
agtcttagtccgagtctgggtatgagttttttggatctcagtctggatctaagtctgagtttgggtccaggttcgggtcttgggtctgggtcctaggtttgcgtctgggtccgggtccaggccccgtgtttcgatcccggtctgggtttgggtcttggtcggtattcgtgtccaggtctgggttcgtgtccatgtttaggtctgaatccttgtttaggtcaagggctttgtctgggtccgggatcgaatcccaagtttgggtttgggttcaggttcgagtctcaatcctagtttgggtgagggactgggtctaggaccgtgtttgagccctagttctggggctgtattatggtctacttctaggtcccggtccaggtccaggtcgtggtcacggttccagtcctgttctagggtcctagtcacgttctgtttcatttttttgtttcaggtcccatgactaggtctaggtctaggtcctggtccaacttttggtccttcttcgagttccagatcaagacac

SEQ ID NO: 156550 - DNA, 854 bp, Cannabis sativa
  modified_base (62)..(65): a, c, t, g, unknown or other
aaaaaaaagaaaaataaaaagaaaaaaaaaaaaaaaaaaccctaaaaaaaaaaaaaaaaaannnnaaaaaaaaaaaaaaaaatcggtatagaaacttgttaattgctatcttttataagagcattgttattaagaattagtaatgtttagtgatatttagaagtgacactttataatttgttagagatattttttaaaatttatttaattaatttatatgactattgtactaattgaaataacactgatgctttttaacattaaccattttatagtgtggacgttgatgctttttaacattaaccattttatagtgtggacaccaatttaattaataataaactaagggtaacaagtgttgtttcaatttatttatttttttaatttcaccccaaaataacatacacaaattatttatatatttaatattttttattttgaaaatgaactgttgcttcattttaaacaatagcaacgctattagatactggtacctaccactattaaaaagaattaaactattcacaaataattatataagatttaatatttaattatactaaaatttcaataaataatgctaaaaaatattggaagaaattaaaaaatatctatttttttatactttaattaaatttatctattaaatgaaatttaattcaaatatatatcttttttatgagtattgtgcctaaattatttttacaccctcacatatagtgataggagtaaaattaggggaaacttatcaaaatactagaatttagattaatttttacaaaaatactctcacacggaaatctttttaaaaatattgtatttttataaagcaacagtagaatacaaaatagaat

SEQ ID NO: 156551 - DNA, 720 bp, Cannabis sativa
agaaaatgcatattggtgttcaacaaattcaattaactgtcaatcttgcaaattttttcacaaagttatcaccaacatcaacatttgagaagacagcatacaagatcgaaattcgttgattagaagatcacgaatggctaaatgagggcgagttagtttacattttactctttttcttttgaccaagtttttcagcaaagtttttattgaggcaattaatatggacatccaaggggggtattatgaaatattatttatggatgtccaaatcattatattaattatcactattaatgctttattgtattttttttattacatattaatttagtatcacattcctttagtcaatacttttgtataaataggggttcaccccattagaataaataactgagaaattctcatttactttctctttatctcttcatcatcatcatcatcatcttcttcttcttttcttcttatctattttatattattttatgttattttaaaatatatataattaattatacaactaaaaatatatataaccaaagtaaaaattaagaatataactaagtataagtatatgcattctacataatattaatagattttttttttatttttacacttcaaaatagtttttttttttgttttttttttacatttttacgaaattttacatagaaattcctattgcaactagcgttgaaacctaaattgcaacaaaaa

SEQ ID NO: 156552 - DNA, 566 bp, Cannabis sativa
  modified_base (510)..(541): a, c, t, g, unknown or other
gacaaaagggtgctgctgcgatcgctgttccagaaatgcaagtagatcctgccactgttatgcaggcgggaccggttattgcaatgaatcgtatggaaccactgtatgaaaggttccacaagtaggcacctccagtctatctacgaggtcccgatgtaatgaaagtcgagtagtggctgactgttattacaagaattttgaatttcatggtcgtcactagtaatgacagagtggcctatgccacattccagtttcaagaagatgttcttttatggtgggacatggtgtccctgacttatgatgttactacgatgacttgggaaaagttccaggagttgttcaatgtaaagtatttcgatgaagcagttagaagtgcaaaaagaaatgaatttactcagttgacccagaaagagaatatgactgttacggaatacacaacctagttcgatcgattggctatgttggcctcgggaatagtgttggactatgttttaccaggatctagatttnnnnnnnnnnnnnnnnnnnnnnnnnnnnnnnntgaatttctaaaataatgtaaataa

SEQ ID NO: 156553 - DNA, 515 bp, Cannabis sativa
  modified_base (42)..(46): a, c, t, g, unknown or other
  modified_base (303)..(306): a, c, t, g, unknown or other
caacatagcagactagtatttgaagtgaaaaatacatgccannnnnaaagtaatcaaaattaagatacatgccagagatatctctcatatgttgcctttgatttttcccaaaatacgtggacgcggataagggcgacacgtggatttgtaagatcacccacgtactaaaaaaaactaagtcttggacaaaaaagaacacaacagggagtgggcctcccggaggagagcataagacacatctttactctccggcaggctagagccatgttaaggcatttccgggaggtaaagagattacttgannnntcacttcacatttaatgccgcatgggggaaaacgtattagaacttccataaaacatgtgacagatggcgtaagccctttttacagcgattacacaacaatcgatgagtctagtgataactacattatgaggaatcacattagtcaagagaggataaaagattatatccacctaactcctaagatacctacggtataggtcatgtatttc

SEQ ID NO: 156554 - DNA, 508 bp, Cannabis sativa
ataaaggtatggctatcctccctcattcacaagttaagttagtcatttttttcttccctacaaaagttatagatatatgtatagcgtcaaaaatataagatattaaaatatgtattgttgttgcactgcaatgaagatgtgtaaaaaaaaaaaaggattggtaggtactacaaccgtgtgttgtaagtgcattaacggaattttaacaattcaataaatcatctcataataatttcgggtaataactctactctttatatttatttatttctacgctatatcactagtatttctttcgaaaaatttatatgtatgtactatatgtaaatataggaaatgttgacaaagacttcgaatgggtggagtaggctggatggaacaacttccaacacagctaagtctgccatccaactgaagctccccttgtcgctgtccacaacgccatcgtgggatgagcgttgttagatttgagggaccgaacacgggtgcgccaaaccctccaacaaaa

SEQ ID NO: 156555 - DNA, 530 bp, Cannabis sativa
  modified_base (52)..(55): a, c, t, g, unknown or other
tctttctaaaatatcacaaggcctacccaaaagatcaattattcttgtagcnnnntatgagcgtgtagctcccgaatcaaataatactgtaaataaggagttgttaacaggaagttgacctgtcataatagaaggactagctgcagcatcagcttgggtaatagcgaacactcgagcaggaaccggtttcacctcagctttcagctcctccttctttgcctgagggaaatctttcttgaaatgccccaccatgccacagagaaagcatgtcttccggttgcactctcccgggtgatgtttttttacaacgaggacactcagggtaggagtaaccctagcatccacctctaccgtggtttccacgaaaccgcttactttgtcccgaaccaccagaagttgaggtaactttccttttctgatcagtggtcgagtcaccaccaaccctacgatagacaggagtaggaaaagtgggggttccaccgacactcggagtcactcggggctcctgaagaaatttcaccgcaccctcg

SEQ ID NO: 156556 - DNA, 1040 bp, Cannabis sativa
gataaaacggcttagggcagcaacctttctggttaaactctggacatctttgtgtttcttgggggaaggcatgctcaggagagcctggattttctctggatttgcctccattccccgctgactgactatgaagcccagaaacctccccaacttaaccccaaaagttcacttctttgggttaagtttcattccgtatctctggactacttcgaagcattcttctaagtcatccgcgtggctagcgcatgccttcgacttgacaagcatgtcgtccatgtatacctccatattttgccccagaaggcctttaaacattcggttcaccattctttggtaagttgcaccagcattctttagtccaaaaggcatgaccaggtagcagtatacccccttatcggttctgaagctagtgtactcctgatccgcgatgtgcatcttgatctggttgtaacctgtgtatgcgtccatgaaggacaatagcttgaatccggaggtggcatccaccatcttgtcgattcttggcaaggggaaacaatctttggggcaggctttattaagatcggtgaaatctatacaaacccgccatgttccgtttggctttggaaccagtaccggattggctagccattctgggtaatatacatcccggatcatgccactagttagcaatttgcccacctctttttctagggcttcggcctttactaagtcgagggggcgtcttttttgttgaactggtggcatgtctgggttgacgttaaggacgtgggttacgacgtgggggcttatgccggtcatgtcttcttgacaccacgcaaaaacgtctgtggcagcccttagagtctttattattttttctttttcctccggttctaggctctttcctagccggaggactttggtggggtcgaggtcgcacactgacactttctcgacgtcctccatggtttctacaattttctcggatcccacacggggatccaactcatcttcttccgccatttctggctcaataatttcacggaccattaggacgggta

SEQ ID NO: 156557 - DNA, 719 bp, Cannabis sativa
tatcatcttttaatacaaatatatgttgtaactaattaaaatccatatacatttttttctcgatttttttttcagggggggcagtctgtgggtccgcccctgggctgatgggaaatcagagagaactatttagatactagaagatttacagcgagtctgtatcatggactttgaggattcatggaataagtagtttcctttaattgaattctcccacagtaacagttaccaaagtacaataaggatggctccctatgagatgttttatagtagaaaatgtcattaccctattcattgggatgaaactggagaaaggaagtacttaggaccagaattagttcagaggaccaatgaagctatagacaagatcaagactcggatgcttgcttcacaaagcaggcagaaaagttatgttgatccaaagcatagagacattacatttcaggcaggggaacatgttttcctgcgggtttcaccagtgaaggttattaggcgcttcaagaagagggataagttaagccctaggttctttgggccatttcaaatgctcgagaaggtcgggttggtagcgtatcggctagccttaccaccagcattatcggttgtccaaaatgtaattcatattttaatgttgaggaaatatgtttcagacccgactcatgtcttgagttacgaagcccttgaactacagtcagacttatcctacgaagaacagccag

SEQ ID NO: 156558 - DNA, 539 bp, Cannabis sativa
cccaatcttcacccatctcctcgactttgatgttaggagcgtgcctggaatgaataagatgatcccggaccgacactgtagactcactatctcgaatctcaatggttcctggttcggcgagctcctccaccatcctctcgatctctgcagaggacagcggacccagctctgtgtctccagcagtagggacctcctcttctgagatcgaggtcggaatgaagctatcttcttgatcgccatcgaacgtgttacctcctgagccaatcatttggctatccgatagatcgctcatttgaaagatagaagatcttttcagcgtggtgaatgtgcgaaaacaaagtaagtgaccgcacccgcatataaaatgtaaaatcgtcttaaagggctgatttgaattcttgcgaaaaccaatcagaccaccaagacacgaaatgtcaagtgtgcgaatagaaggatatctcaaaaaacagctgggtgtatcccagtaacctaagcgacatgcgttttcgagcatgaccttgaagtgactgggaaacacc

SEQ ID NO: 156559 - DNA, 504 bp, Cannabis sativa
agctggtcaggagtgaacctaaacaggtgcgggcacctactccacctttgtcagtgcttccagaggccaagaagggcaaggagatccggctggttcctgaggtcagtgagcaactggctggtgcacacaatgactcttctttggacttgttggtgggcggattcttgaaggagttcaccagggttagtctttctggacatttcctttaatcttctatacttagctcgaatgctaaagttttttctttgtgcaggccgatctgaagttggccaacacttactccagggctaagtctgccgcttccaggaacacggctctgtccgataccatgagggcggaggtggacttggcgaggaaggatgctgaagacgccaggacagaactcggagctgttcggtagaagttgggtgaagccaacaagaagctgtttgccatccagaagaagataactgagctgactaaggatctcgaggtttctgaccgtcttgaggagaccatcgagac

SEQ ID NO: 156560 - DNA, 517 bp, Cannabis sativa
taaaataatttccaacaacatcttggtcagtaactacaacatttggcttcttatgtccatgtcattcaagaaatttttgaaatagcaaagaatagggtggaagcttcttgtggaggaggagagcaaacccaaagatgcatgtgttgaaatggtggttgacgccaatgagaacaatgagaggcttattgtactcatttgtcatgcaggttctatcaaaccctagtacattcccgaaagtcgcatagtccacacgtgagtttccatctgcccaaaataagttagccaatcgattctcctcgtcaacctgataattaacaaagaaatttggatccttctctgcgagacaatcaagaaatcccaactccccttctgagtccgtctctatcttttcttcttgcttggcatcaacaaccctgttgtacacatctcgaagttgacatggcattttctcgtaacctccactttgcaaagcaacatgagacattatgttggcagttttaattcctacggagttcat

SEQ ID NO: 156561 - DNA, 650 bp, Cannabis sativa
gttattttgtctgattgaaaccttcgtttcatgcaaccttcgaccaaccacctagaaaccacccatcaaccttcatctgatgcaaccttcggccaaccaccaagcaatttgtgtctgattgaaaccttcgtttgatgcaacatttggccaaccacccaacaaccaatcatatgattgtgtaaaagatagtgtaagaggtattttagtaattaaaagcacataaaagatataaaatattgtccataccttatggaggtatttttgtaaataaagtgtcaatttatattttttattttataattctaaaaattaatataaatacttcacaatttaatgttatagttcaatatactaataaaataatacaaatgatataaatataaataaaaaaagtagtgcatttattgtgatttaaattttacaccatagtaaatgttgtgtcaaatttgacacaagatctgatatgcgtcaaatttacatcattttttggcacactattggagcacactttttgttaaatggactatattttagctttccaccacttatttttatgggttaatttttacaaatgcacaaaaacaacaaaaatacggtttcacagaattttaaacatttttacgattttttcgattttatttacataaaat

SEQ ID NO: 156562 - DNA, 691 bp, Cannabis sativa
  modified_base (658)..(666): a, c, t, g, unknown or other
aaataggttttacttagggcacaaaacccaacagttggatcttttgttggggtctctctgggagctatccctatacaagggtggattcttccggtaatgtgtatttttcggatggagaagtacacacgttcctgagaatctgtaagctccatgtattgagtgtattgtggagtatacccccttcgctgtcttttgtcctcagtctacgtgctacctttggaggatctcttactctgggagctttgttgagctcctgccatactggtggctggtgcggactgggacagaatttagacactcaccccatatgggttgctcatgggcgcaccaaaatgcgacaatgcgggagttaaagcgaggctttggttgtaccctagggtagcggagaactctattccacttgtttggggagtggcaggaggtggagctctcgaaggctgtgctcctggcgcatatcttgataccccggtcgggtaataccctcagtaagccactatttgggcttcttccaaattattgtatttttggactctcttttgaaagtcctggaggctaggtgctccttcctgctgcaactcattctaaaaaggggttcctgtacagatcatggcctgaagaaaggccagctgttgttcatcgtgttgggttttatgccctnnnnnnnnntccatttcaatgtaatccattttat

SEQ ID NO: 156563 - DNA, 888 bp, Cannabis sativa
tctctccatctcttctacacgcaccaggctttgtaaaagggactaagtctctttcatcactttcacttgagatttgcctactgattctcatattgtaatcttaagatagccacttcgaaatccacaacccttatgacctgagtggtattatttctggtattaatacaactaaaaagggagtaggtcatacccgctacctaaggggatcaaacctctataagaatattatgtcacctgtactttcttgttcttattgtgtacacgtggtagcatcaataataaatatgacttcgctatcagttagccaaatttgagatcaacagtttggtgctttcattgagagctttgtcaatttatctgatctaacaccatggttaacacaaagagaactccaactacaacttttgcgtcatcaagtcttcctcaagaccctacggctgctaatcctaatgttcgtgttctagccacaactggaatctccacgaatcaaacgaatgtggctaaccctgctaacctactggacactgcaaacttggctaccacaactagtcaggttgacacgaacaaccctgttaatctcaatggacaacctttgtcgccctgggaggaccctccactggcgcctcatactgaaggaatggccaacatggagtttccccaaggcaccacaattggatctggtcctagtattatgttagaaagacggggctaggattttgtgacagataaggcagggtctatagataactgatccaaccaggttcttctagaactaggataaaacttttacaacctgaaggcggacaagccttgccatgaagatctgggggcgagaatagccagacactggcaaccagcagcttggggggccagctaaggatctttagc

SEQ ID NO: 156564 - DNA, 544 bp, Cannabis sativa
  modified_base (39)..(39): a, c, t, g, unknown or other
ctccatgatattcacaccgtttagttggatcccttttangcctcacatgtttcataggttttggctcgctaaaaatggcttcctacacatgcacgaggtagatattctcctgagtttcattgagctcggtatattcaacaaaaagagggatatatttgttgtgtttcttatccttgggcagccttttaaaggcatctcttctctttgatcctgaggcttccgaatcaaattctccaacagtatcatgccccggttgtctcttgggtttcgtgactcgatgccttctaaacttattttccaacttgtccattcgcaaatggagtgaatccttttgctttggaccgagtcgttgatgaaggtcaggcttccttaacttcagatgctctcgtagatcactcttgtcgtgactgcaatcgaaccttgctcttcctcttaaggtttgattcaccttattctccctatatgggtttgtgtgaatttctttctgatgaacctgaagagagggttggcaatttttgtccgatgttccacgtatcccaggctg

SEQ ID NO: 156565 - DNA, 605 bp, Cannabis sativa
tttgttttttaaaaataaattttttaaaaacaaaaatttactttcattttgtgattaaaaaattaaaaaacaaaaatgttaccaaacgtcatagatgaattttatttttaggatcaaattcaatctacataataaatcaaactcaatctaatttaatctataaatttttaaattagattagttattttaaactgattactttttaatattaaattattgaatattaattaaaaaaattacataactaacacaaaataaaataaatcattattattttacaactccaacaacaaattaaaataaataaaataaaaaataataaaaacaaaagaagaagaaagaaaaattgtatgtataaagaaactacaactaaataacaaaccgtattttgcatgcggttgtattttcttaagacgattgtatattgttgtaataattaagttataaaataatattattaacacaaaaatctagccaacactagcttgctagattggcgagatgaataatgagaagtaaatattaagagagacacacataatttatattacttcactccccatatcgtgatggtaatagaattgcatctatttcgagtttttagt

SEQ ID NO: 156566 - DNA, 909 bp, Cannabis sativa
cttggttcctccaactacatactcaaaagacatggtttggagacgatgtaagtttttaagacttttttacatctttggtttttaaagaatttatttaacttttttatttaatctctgacatatttaattttcatgttttagcatttgaatgcggcatttcatttgataaggaggcgacaacacttttatccggaggtgtacccaaatagatgtgtcatcatgcctcatattttcccatcaggagttattggtcggtggcaagctgcaggtgatgaccacactaactttcagtgggatgatggcatattggattttattcgaggggataatgtccaatacttggacagttggaagaataaggagagaatatacatggccctcttcttcgatagtgcaaagcattgggtgacattagagacagatcttgatcgttggatgttgagcatatttgactcgagccttggatcgattttcccggatgaattgaagagtcacttgacattgttggaagagttattcccaacattgatgttgcaatctggcctatttgagattcatgaaatgattgtcatacttcaactaaccgtctcaaagagccaggttagaacttttagttcaaaagtcatcgacgggagcattgtacgacagacgaaatcaaggtaacttaattacaagtgattttttattatttaacttgaatttatgcatacttttatttatttacttgtttttatcttatacagcggtgattgggggatgtatgtgatagaacacatcgagcatagtatgctggatcttacgtttgataatgtgaacgatgcagtatgaaaatatttagagagcggtggtgtgtagatttattttaccagaatttagcatgaacaattatgttttttttaattggtattt

SEQ ID NO: 156567 - DNA, 1038 bp, Cannabis sativa
  modified_base (44)..(44): a, c, t, g, unknown or other
tgaattccataaataacagcataaattatttaaatagctataantaatttcataattaaacataaacaactgctaatttcccaaattaactaagcgggctttacattaaggctcaagcctcttccgggaggatcctccaggtagaggctggtaaagagcgggtgccttcccggcctaagctgctggtcctggttcccaacactggggctcctgacgccagcacctccggatttggtaagtctcccttagttgtttgtcatgtcccttctgctcaagattattctcaatgtagacctatagagtttgatgagcgtctccttagatttaagatgccccctacccgatggggtgatcatgccaagggcttttatttttcaaacctaggtcattttctaggccggtcacggatggggtctgggtctcccgcacctatccttctggatcatttagcttatctgtcttctagctagtttctcccctcggacaactttcttggggatgacgaagctagtattatagtgcaggactttgctagggctaaattagattttctgggtaggattagttctactcctttgttcttgtgtgcataatttctcgtgaccattctgacacttgtttgtttgtttcttgaaacagctaggcaaatggacgagcttttggcgactcttgcccagacttacagtcccgaccccgcctggcctcaggcacctgacctgacggtaaccccagggaggtcctctacgagcgttcccttaggccaaatcatcttgatcgatgaggacggggaggctgaaggggaagaagagggcgagattctggcccctctagatcggaagcgcaagggaaagatggtggaggttgagtctaccaagaagcacaagagggtcgatactctggctcccagctttaactcagggatcccacttgaggcggaggaatatatgttaggctaaaattagtctaagtttcgggacgtattttcggttagttttcactctttgtttctagttttaggactattttacgcttgattct

SEQ ID NO: 156568 - DNA, 641 bp, Cannabis sativa
gtggtgctacacgtgtgagcactctccacttattcgaagattcataggtggtagtacttttgtactcactaaaggaacaatcgaagttatatcaagatcaactcagaagatttattcagcacttgagagtgccttcaggtctatgagctgtaattgattaatttaaatgaagtaccaaaaaaaactttgttcaacactttttctaatcaaattaaatacaattacatccctatgagctaagttgatagaaaaaagtacactttgaggtagtagttacaaatttccttcttcatccaagcttagctgaggtgatcctcactgtactaacgccctgttcgactctacagtataggagccataccttagcgatggacctcttaacctagagacaacttcatcacatctcgtcagtttaagaggcgttcaattcacttgcacaaggtaaagtgaatctcactgtgaagtaaggtattttgaagacaattgctattattggtaataccgtcgtagatgcaccccattccagtaccttggtaccgacattggatttagcacaactctatgtacactaatactgctattactgattatgttatatattaggcattcataacatgcacactaaacatgtaaatacatat

SEQ ID NO: 156569 - DNA, 579 bp, Cannabis sativa
atattccaagtaacaaaacaacaatcaaagcttagaatcaattttcaccattaaagcttcaagcttgagttctaaaactcaaagcttgaaaaaaccttcaaacaaatatcaattcatgcttaaaacaacatattctaacatatcttaactacaagaacttaaattaaacatcaacagcaactatagagctcaatctcttaaaacatacataatttcataacttgaatttcaagaaaactaaaggaaagttgtcaagaggcttaccctaacttgaaatcactaagaactgctgtaaaatggcaagattgaagacaaaatcccagaaccctagctgcttagggatttcgtgagagagagaggttgaaagagagagaattttccaacttttctaatttatcctatttttgaaaaatgaataattaaaccttgttttattaaaccatttcagccaatatctaattaaaaaaaaacagattattaatctaaaaaaaagtccactaaaggacaaaacagaaatgggcaaaaagacaattttgcccttcccacactaaaaggcataaaagggtacttaggggtatt

SEQ ID NO: 156570 - DNA, 1392 bp, Cannabis sativa
ggagtgtgacgggacttgtccactcatccctgaaagattcccaaagtgagaagatgcaggggctaaggcctgactctgactatatccgggggtatcggaaaattgtatgccgctcatcggtggggcggttgttggtaaggttcctgtgagctgagctccgggtacatatcccgctatcctggtggggtagtatcccccataggccattatctaggccttttttaggttgatgtatttttggactctttcctagaagtcttgaaggttagaggctccttcttgttgtaactcgttccagaacggagtccctgtacggatgcctgcttgaagaagagcaagttgttgtccgtcgtcaactttcttggtcttcgaggcttcttccttgaacctctttatgaaattcttcaacgtttccgtaggcagctgcttgatgttagtcaaggcgctaacctccagattaactttcctcgcggcgacaaacagtctccggaagctggtttgcagcttattccagcaatccagggatcctggctccagtttcttgaaccattcctccgcggacccgcttaaagtaagcgggaagcataaacacttggcgtcattgctgactctcatgactgtcatgactcggttgaatcgtgacaggtgactgcttgggtccgagttcccggtataaactgccatttcgggcatcttgaaatttttggggagctccgcttccaagatgtgcctggcacatggctcccggtcttcacagtcagagtcggagtcatcacctttttgtctccgggagactcgggcaatgtattttctaagtatggcaagctcagccatgattctttcgtttaacgttcccgtagagattgtgggcacgtgtttctttttgtctaggtgatcccggaggtcaccgtgtttcccattaatctgatgtctcagatcgacgggagggtatttttggccccttcttcctcttcctccgggctcctggtgcacagaaacgctctttcgatcctctcgatcctgagggccaagactctctttttggagtttgcccctctatggacctttccttttcgggaaatctgagcggacatttcgcggatcctgcacctttttctttttcccaggagtggaagtagggtttttctgatggttctcttcagagggataccttatagggctaggttccctagatttcttcttttgggcacttggcgaggactctcctggtgtctctctaagtccagtagggatggctttatgatgcacgtggattcctgctacctccatgtcttttttgcatggccagcatcacctcttgcatcttttggttttgttctttttgggctgcgattttagcttcatgatcagcagccttttgtctcaagagta

SEQ ID NO: 156571 - DNA, 622 bp, Cannabis sativa
acttgcataccaagattattatgttacctaccaagatttgctgctaggttggagactttgaggttgtcttaaaaaaaatagtgaaaaggaaaagtgcaaaacaacggctctttctttgtgtgtgtttttcataaaaaaagtaaataaatgcatagaatagaagcattgagcaacaaagagaaacaaaaaatgtataaaacgacaagccaatcaagaatgtcaacgtgcaaatattaaagcatattgaatagttaaattttgtgcattgctgttagaaattagtggtgtctagcaccttctcgacatatcgcgttgcgattggctaacaatactccttaaaaactactatattaaattatatgagtcccgatacttagttcgactaataacgatattaacacataggatggtactctttagcatttatcttaaattttaaaggatgcttacttatgtagattgcttatttggcaaaatacaaaaatattataccaataaatagatagagcctatcatagaaaagagaaatgttaaagggtaccggtggtgcctagcaccctcctatgtgtcaatattactattggtctaactaagtattggctcccatatagtttaatataat

SEQ ID NO: 156572 - DNA, 687 bp, Cannabis sativa
atagtttgaaatataattatttttcatttataaacttttaagagcatatatttttcatttttaattaataaataaaaatattagtaaagataacacataaatattttggagaatttttccgtttattttatctcaaattgcaacatttaataaacaaatgaataaaaattaataccatataattgattatcatcttcttttaaataaacatgtgattatagtgatacctatatttgtaataagttagaggtagcatctacccatgcacatgagaattgctaaaaagtattattgaatttttgaataaagtattcttagattatgtaattagaaaaggctaattaggattttcgcctactgaatttttacatgtatcaaatcatgttttataaacttttttagctgttaaaaattttccctaagctattaaaattgttagatttaaagatttttatcaaatttaattcaattttactaatatgacgattgtctatgtactaaattctgcctcccgaacattcacatctactaactcatgcccctaaatttttaaatgtataaaattatgccttctaaatttccatcaaggtgagacattatttagtaaaattagacgaatattcttaaattcaattatctcaattcgagaaaaaattttaatgacctgaaattttttaaaaaagataa

SEQ ID NO: 156573 - DNA, 857 bp, Cannabis sativa
tattttatttttttaaaaaataaaccctactattagcggcggatttagtccgcccctaataattccgccggtaatgtaacattttcttgtagtggttttttagtaaaaggaaaaaaaacatgttttgaacgaatttattgttttgaactgcgttttattgttttgaacgaatttattaattaatatattttatgatttttattaaaaataaagtaatattaaaaatatcttttttttagataaatattaaacatgttttttagtaaaaggaaaaaaaaaacgtaaaatgataccttagggatgaattttctaatgtctacacaaatgtaggattatgcattaacactaaatttttaatttgaattaattttagaatatgtgacaaagtgatattaatggcatgcatcgttgatcatgcaatcaattctttagtctcacttttggtagttttatatatgtcgcttctatttacaagacttatgtgtttttttgaaaaatcattgtaaatgtactaagtgaagtaggtcaattcttgagtcaccctaaaatttatttgattttaaaattgttattcatcaaaaatgctctcaatgccacgttaatttttttgttcaagctgtggacggggatgatgaaggtatgctaaccagtaccatgaaaacatattgttgctagagcgaaatgcatggtgctcatctcgggtctaaagttattacaggttaggcctatactatttacaaattaaataacataatattaaaattaaaatgatgatatattatgttatattatttttaatataataatatgtagattaaaatgtggtaatatataatattatgtgaataatatatatt

SEQ ID NO: 156574 - DNA, 567 bp, Cannabis sativa
  modified_base (212)..(214): a, c, t, g, unknown or other
  modified_base (511)..(517): a, c, t, g, unknown or other
aagaataaggaagaagattccttttcttatagctctgacaataatatctccgaatatataattcttagatagccttagcttatagcttttcggcgtatgatctctcttttacagttttcgatcgatctctcttgtctattttttcttctccttttcccagtgaacattcctcactatttatagggcaagaaacttgaggaggaagagtttcnnntctcgttacaaagcgcataaacaccaagatcgtgtgatcattgctgaatgctaggatcgtgggattgaggccgtatacaccgatactgggatcgtgtgtatgccacatccacggaagttgatccctgagttctagggattgagctggtgactcacgaagtgcttgggttaattcgctaagtgttgttcattctgcacggctcgttgactattccatcatggacatgccagtgaggcatcttgccccgcatgttgatccgactaggtgctctaagtagatgccacgtgtcaccattcnnnnnnngccacgtcagagtgccaattttggaataacaatttccatcttagtaataa

SEQ ID NO: 156575 - DNA, 519 bp, Cannabis sativa
tttttttgaaagaaaacgaaaaatataattaaaagattccaattaaaatataatttatttttatttaataagcataattttttaagaatataaattagaaaaaaaaggtgttgtaaaagaaattaggtgtaaataaaatttatcctaacatgaaagactaaaataactttaaataactatttaatatgcatttagaattgaattgtgcgaattaaattggtttagatattttatgaacaccctaacacacattctggaacaagttgagaaaaatcattttttcgtatcaatttatcaaaaatatactcatattatattttattaaaatactcacttttataagtggattatccaatatactctcactctttacttaagtctaacatataataaggatatctattatatcttaccaaatgtgaaaatggaactgaaaattaaatgaagtaaagtaaaaatgaggaaattagactctataccattttcatattgtcctttttttttttttccccttttttt

SEQ ID NO: 156576 - DNA, 633 bp, Cannabis sativa
  modified_base (378)..(381): a, c, t, g, unknown or other
ttcaattttaattgtagaagcaagtaaaagtattaactcgttttggatgttatgtccaagataatgaatgtgaatatcatcatttgtaatgcgtttattatgttctcggataacatgatcaaactctgccaacatttcaattaagcttagaaaaaaaatgccattaccattttgatataatttcttattagatccatgaaaggccaaattatgtttagcaagaaatttgattattaaaataattctttgtaaaatttttttcccagtgatctttttctttttcaattagtctttgagtcgatttatcaatggtttgattgttttagagtcttagacgcaattcgtacctagttgtcatatttttaacatgttccatgnnnntctcatgctctctaagtcttttaccaatacgcagccaatcactaaaatattcatttataaattgtcttctaacaatccctattttaaaaactttgcaacaaaaacaaaatactctatctaactcttttgaataaacaagccaatctttattacaattctctcaatttgataaaactctagtatacaaattagcagtgaatcgtctagaaaatttacctttaggaccaaccataatagaacaatctctttttg

SEQ ID NO: 156577 - DNA, 567 bp, Cannabis sativa
gaataactcacaactcactttcttttaactcacatacaatacatgtcaaaagacaagaccctttactaaaaaaataaaattattgaactaatagtcatacatgtatatttatttcagtcaatagagtaacagatgtttagttctctgttaatgttaacagaataaaaaaataatacatttaaattaaaaaatttccttaaataatcacttttaatatatataaaaaaatattttaaattaagaaagtataaataataaaacaaaattaatgagcaacaaaatataaattttattttatagaaacgaccaaccgaatgtgatagatatttttatgactaagaaacaataatattatatatggattatggatggaatgggatagagatataataaatatctttcaaaaaaaaaaaaaagaaagatatatattagatattatattatagataaatatagtatttgtactaagattagattactgaaaccattatatctattctatataaagtgtgcctataactaattcttagtttatgaaaaatttatgggtgactttttatttttatt

SEQ ID NO: 156578 - DNA, 761 bp, Cannabis sativa
  modified_base (293)..(306): a, c, t, g, unknown or other
tgcccttagggccatataatacaatataagtattcaagggtaattttgtcatttaaaacctcatgatactcaaataaattcaaattattcacactattaataaaatgccagcaaataatcccaaaattgtattttgatgtcgaacccagttcggcccgataccggttgtgactatattgcgccaatttggcagaacacacctgaaaaaggacaaccagatataatgtataataatatagttcataagcacatcataatataaatttctcagttttacccttctcgggtcaaannnnnnnnnnnnnncctggctcaccaacagggttttaacatgttatatatcaaattatttcacttataataaattatataataatataatttcacaatattacacaattaactagttagggtttgctaatcaattttcttaatcttagggtattacaggtttggtgtgatttggggtcaatttaaaattgtggtgtggttttgtgtgtttcctgtactgaattggaattccgactcagagggacctgtaggaaccagttgatcggttggtctccaggaaaccccatagaatcggaattccggttggggaagaaccagtctactagtgggggcattctaaggaaccctaatttttcccctttttgcgatgtttagggtgttgccatgttattcgtcgataggtgaacttttagtatcaagtttaagtacttgaaaagtgatttagtgtgtcactcatcagttttacgaat

SEQ ID NO: 156579 - DNA, 638 bp, Cannabis sativa
aggaaagacttacccttgtgaattttgtcaagactcctcccatcagtaactctaaagaagagtcattgtcagcaccggccagttgctcactaacctcaggaactaaccagttcatgtagtgcgtgagcatctccttgcccttcttggcctctggaagcactggcaaaggtggagtaggaggtcgcatctactcggatccacccttgatcagctcggatccaccttttggttgctcaggcctgtccgagcttcctccccgagaatccttggacttagaaacttttggagtggaagggttcgcagcagttagctcctcgaaaagattaataacctccccggcaggcgccttttccttggtaggggtcatctcaccatccctggacttcttggttcggggagatgcgcttgagcatcctccaactctcttcttcagagcctcaagcatcttttgagacatgtctgtacggaacaaaaacaacatggttagagaaagcagacatcagaaacataaagcataatagttaagaaactttaaaaaaaaaaaaaaaaagacagattagtatgcgagacgatttcccaaggaagactcgaaagtccatcatcacctgacaagcctcttatctcagccataacagctt

SEQ ID NO: 156580 - DNA, 600 bp, Cannabis sativa
  modified_base (47)..(62): a, c, t, g, unknown or other
tacttttatgtgtttaattttgcatcgttttagaagttcatatttannnnnnnnnnnnnnnntacttgtgagtagatctaagttcttggtaaaataacatccaacagagtataaattgggaaaaagaaccacctttgcattacttttgccatttcagaaactctagaaattttttcaaacttttttgccaaaaaaccattcccagatttgctcaaaactttgcatgccatctttatcgttaacatttttcctacgagtttcatctgatttaattttcgacttcaagcattcagagggatcttcacgccattcgttgatttatagattgcaaagttgttcatcatcccacaaaccaactccaaacagtaagtgacttttcttctcactttcctacatgctattgatgttgtgtttctggatttgatttcttatttcttagtcaggaccttggttacctcatttttttttttagaaactttagagcagaattatttctgggcaaatatattagggtttaggcagaacgtaggtttttcaaaattctcttgtttactaacttctggtttgataaatttatattgggttttgtgccataaataa

SEQ ID NO: 156581 - DNA, 780 bp, Cannabis sativa
gccttggggtccacttgctgggcctcggcttccgaagctaaggctcggaaaggaacaaactttgaagccggtgcagatgaaaccctagctaacgctcttctccacacgccggtcgccattgccgccgcagcctcagtcgatgattcaaattttcagggaagaaaaaggtataaaataaaatttgataaaagagagacgaaataggttgaaattttggtataatgacgaaaatgggattttatatagggtatgataaaaggcggcgttgaagggtaatttcgtaatcttcgacgattataactttctttttctagtaccgtggattggttgtagtccctggaattttgtgatgatgtggcggaatatcatccgttggttatgatgccacgtggtttaatgtgggatcaataattaaatagcttagtcgtgtttttcgttatgtgtataaaagtagggccgagaaggcgcgtgtctaccataccacccatgagtccatgacctttcagagttagttctttaaaagtggatcaaacgacatgtcgtttggtgtttattttcctttcaatttattaattaatttgggaaagagtgctcatacttcgtgaggataagacgacaaaaaaactatttaaacaaagagcattgctattaggcagagtgatgtctagcactttctcgacatgtcgtattgcgattgactagcaatactctctaaaaattattatattaaattatatgtgacccgatacttaattggttgacacataggagggtgctaga

SEQ ID NO: 156582 - DNA, 536 bp, Cannabis sativa
tactgccttattctagcaacaaggaagttgaggccttatttccaagctcatcctatttgggtatacactgaccatccattacaccaagtactgcaaaagccagatgctttaggatggcaactcaagtgggcggtagagttgggccaatatgaaatcacttttcaaccgcgagcagcaatcaaaggccaagccttagcagactttgtggtagaatgcacaagaaagaaagaaagcatacaagaaagcaaccccgagctagtacaaacaccacagccaaataacaatgaagataagccgacctggaaactacatgtagatgggtcggctacaaatcaactatctagagcagatttcaatgtgttcggctttcatctcccgcactaatttcagtcaaacaattagggcttcatagccggcctcgttattagatactttaaatcaaaacttgactgcagcgtgcaggtgttgcccccaaggtgtgacaagggcaattcctgcaccaaatagctgatctgtagctgacccatctacatgta

SEQ ID NO: 156583 - DNA, 640 bp, Cannabis sativa
agttagaaaacatgcgacgtactaggtctgcgattaaaatcagttctaatccctgggactttgaagatgtagaaccattttgatttccagcctcctatattcgacaccattccttctaccccattaatttcagaagtcccccatttgctaaagcagtcgaaaccgttattaaggcctatgctttttatatcgtagaagtagctgaactcttctaccgagggagccctatgaacgtactccatatacatcgcgtaaaggccagggcagtgcgataactattgggagttagttggaaaggtgatacatcatatcgtctaaggatggctgcgatgaagggatggaaagggactgataccccacatcgaagaatgggtattgagatttccacatcctctgtgggaataatcgcaggattagtaagaggaaggtgagccctctgggtcagtttaggtcgcaaaaacgcaagtcgcagcaggtttagcctcgtgaaggtagtgaagtttgatttggtaactctcgacattagatcctcgcacgcgaaaggctcgttcagctgggcgtcatcgaccgagtctgtcctgctcccctccgcctcttcttcatcctcgcctgattcgcgagctggggccgtccagtcatc

SEQ ID NO: 156584 - DNA, 831 bp, Cannabis sativa
  modified_base (378)..(378): a, c, t, g, unknown or other
  modified_base (617)..(620): a, c, t, g, unknown or other
  modified_base (708)..(724): a, c, t, g, unknown or other
tatatcatgtatttctagatgaatcccagttaatcatacacaaatgccccttaagtaattttaaagagtaaagcattgcttccgagtcgaatgctagcgaggaggaagagtgtcccgttgtcgtcttctcggtagttttgtgagcccagagtacttgagatagctcgtcgacccacatgcctttggcagcatctaacttcttcttgatggtatccttcaaggttttattaacagcttccacttgtccattagcctgaggcctggatactgacgagaagctcttaattattttgttcctctcgcagaattcagtgaacaagtcgccatcaaactgggttctgttatcagatactatcttcatgggaattccaaacatanagacaatgttcttggtgacaaagtcgaggacattcttgcaggttatggaaacaagaggttcagcctcagtccatttagtgaagaagtcaactgctactaccgcgtacttggctcctcctcgcccagcgggtagtgccccaattagatcaattcccaatatagcaaatgggtaaggcgaggtcatcatcctctgttccattggtggcatgcgaggtatatgtgaaaacctctgacacttnnnnatttcttgacaaactcgtgggtgtccttgttgatttctgggcagtaatagccttgcctaatgatctttttcgataggctttgccaacnnnnnnnnnnnnnnnnnaagccttcatgaatttctctgatgattttttttgcttctatagggagaacacaccgaagtagaggcatcgaataacctcttctgtatagtttgccttcaattattgt

SEQ ID NO: 156585 - DNA, 540 bp, Cannabis sativa
caataagtgcgtaagtgtggtattggtgcctgactcgctggggttgttgattattgggttatttgtagaatggaccctctttaatcatccagaccgtagggcgagctagtagagcttggtgtagaccaaaccaatccacctgcacttcctgcacctccgctgaatctaggggatgatgcgggggttggcaatgctaatccgcctgctgactgacagcagatgttccaagtaatgcgaggtattgtacttcatcaagaagaagagttgcgacgattaaggcaaccggcatcgactacccctgttgatcaagtgttaccaccagcacttgtgccagtggtgggtaaccaagggtatattatgccgcaccgggattctgtgttcgagcggtttgtgaagctacaacctctgacttttctgggaggtattgacattattaaggctgaccagtggatgagcaccgttgcccgcatcctcgacgatatgggagtgacgggaactgagagggtgaattgtgcggccttcatgtttcaagaccatgcc

SEQ ID NO: 156586 - DNA, 621 bp, Cannabis sativa
  modified_base (101)..(111): a, c, t, g, unknown or other
  modified_base (560)..(564): a, c, t, g, unknown or other
ctgcaaccactataaggtttcttatactttatatgtgtttatttcatatcgtttttgaagttcatatttaggatgttaaataacatacttgttagtaaatnnnnnnnnnnngtaaaatatttccaacaatatgtggggctgtcttatccttcttggatttaggtaacatactgaaagaaataaactctaccataattactttggtgcttaagaataaatgtcctaattccattaaagattttagacccattgcttgttgcaatgtaatttacaagattgcaactaagttattgagttctagaatcaacaatatccttcctaaaataatatcacattctcaaggtggttttgctcaagggaggttcataggacataatatcttaatttgtcaagacttggtgagacactatggtagaaaggcaaataaacctagttgcatgataaaactggatctccaaaaagcttatgatacaattgagtggagtttcgttgaggagatgttaacaggtttaaacttccccaagaagtgttgggatcttatgccctaaataaaacccatnnnnntctaatatgttttgttatcaataagagattagaagtgatttatgttaacatgtagtt

SEQ ID NO: 156587 - DNA, 515 bp, Cannabis sativa
ttaatgctatatcggtgtggtacccaataattagttagtaattttttttgtctttttttttttaattttacttattatgaataatctttgtactatttttttagtatgtgacactttaaggtgtttaataccatattgatctagtacccaataattagttagcactaatattaatatgtacttatctttagtaacttcaattagaattttaatttttttttacatttaatctattaatttaattagatattttatctatttttatttaaatacaattgataaaaaatatgattaatccattaattttaacggaagttacttgccaaaggcacgtttttaatcacctagtatatataagaataaacatatatctccatatatagaagaatgaacatgtcctccttttgagcagtttaaaaaaaaaataaaaaataaaaaaaaatgttgttgttttcttgtagttaaagtcaccacttccttatatatctttatttatttattttttttttgacaaa

SEQ ID NO: 156588 - DNA, 731 bp, Cannabis sativa
gtaaaataatttccaacaaagttcagggtctgtggtctcagtccatgtctgggttcgcagtctgggtctgggttcgcggtccaagtaggggtcagggtcgaggtcggggtcagggtcgaggtcggggtcagggtcgaggtcggggtcagggtcgaggtcggggttagggtcagggtcggggtccgagtccgggtctggggtccggggttcgggtcaagggtctggggtccgggtcctggttaggattggggttagggtctgggttggggttcgagccttggttggggtcgaggttttggttcaggtcggggtctgggtcaaggtccaggtgttaggctattttgagcttaagtttcgaatcactttttatagttgtctttcttctttcttattatttttggaatataattacgcttgttttctttgattttagttttcaacacttggaatgtataaattgatcatattttgaaaaacaatgatctataatataagaaaatgaagctgaaacttcaagcctaaattagactatgttcttctcagaatttggaaaaagtcaaaatatagaagttttagatctctttttttatctttttaatgtatcttgatgttacaaaaattatggacaatacgcaagtgcacgtaatcaagtagtaaactcacgcatgtgaggtcaaaccacagggaattgaactgaataccactatattagacttatgattctatttggt

SEQ ID NO: 156589 - DNA, 566 bp, Cannabis sativa
gacggaggtgtgcagaacaaaacgtaaccagggtttaggtagtttagccgccaaaaatttaatttttgtggttaagtgttacaaaccgtaaaattcaggtggtttcgccgccaatatccctaaataaaacaatcttaaaatacaaaagttttgtcaaactgcctctagcattggaaaattaattgcaagttaagtgaaaaccacattttcattgggttttccttgcaagccaaactaaaacccaccactttcacttagccaacattaaaatattaaaaacctaactaaagatagtaaactttcagattctcattctcacttttcctaataccgcataccaaacagcccataaaactcaaacattaaaaacacacacaataaaagtcgaacccagaacttaacacgcacattagaataataattaaaccatgaatgaagatttatgctaccatttttcgaattttagtatttattagcaacaaatttaatattttaaatatttatgtcacaaattttttaataataaagttaaaattttaatataattttactaagtaattattatt

SEQ ID NO: 156590 - DNA, 1106 bp, Cannabis sativa
gttattgctgatctagagatccctggctggcccccaaagtcgtcggttgccaagatatggctgttctcgccgtttgacctttaaagaaaggtttgtccttcctctagcaagggaagatctatcctagttcatgaggaacttggcgacatcttttctttaaaatggatccttaaggagatcctagcctcttctattagttctctaattaaaccatcttataagattgctggtcctaattgcagtaatctaattctgcttggtgagatcaaaggatgtactcctagtcatccatccatctcaggaatttgcatctttgctgagtgaatacatcgcaatcagcagcttgtggctctttagttaggcctgcatggcctacagcttccctgagacttgccaaatcaaggtctttccctaagtcctggcgaggttcgccaattgctggctcgcccactcccgggcctgtctctccactgtataacttgagttgaggtccgattgttgttccaaagggatgtcgcccctaggtccttccttcagtgggaggtgccaatcgtggatctactcttggaggcgtgggcctaccacttggatctactgggatgctcgtgtcaggttggccagctgaggcggccagagttgttgagcctgttgtggtaacgggatttaccacatctctagtattcatggggattctagttgtgactacaaactaagtgtctggatctacaatctgtgggtcttgagggagacctgaggatgcagatggtgtgataggagttcttcttgtgttcaccattgtgtttgatcagatcacgatagcaacagtcgaaatgaaagcaccaaactcttgacctcaaaaagtgatcaaccaatagcggggtcgtgtagatatgatgcttgccgcgtatgtgcataaatgagaatgcaaatcaatagacaataggatttgttatagaggtttggccccgttgtgatagcgagtaatgacctactccccttttagttgtattataccgaaggaattactatctagatcactataggtgggatctgcaatagtacccttaagattacaatgtataaatcaatgcttgtgaaaattcaag

SEQ ID NO: 156591 - DNA, 832 bp, Cannabis sativa
  modified_base (27)..(27): a, c, t, g, unknown or other
aagggctcctgagcatactgcttggcncttgcacctcccttcaacttagcctcgcgcttcagttgaatcaactcgttccgcccgtccagcaccagacttccttttcttcaccatcaccgacttaggaacaaagtcctttgaatagagcccgtacctcacaaagttatcttcagaggtcaattggataatattccgctcttcccccagcagttgggcaagtttttgagctcaatccctaagagcaagagtgaggggagggtagtgatatgtcggaatctgctagaaccgagtgcgagtgtgtaacgccctgactctcagggacgccacctgcgtgcttttataaacttattattattactaatctataaatttttagaaaaagtgcggtttaattaaaacctttaattaaattcaacataaagacttccattttaaacactgccgtaatacggggatcccctgctaataaaattcttttataactaattacaaatccattagtacaagagtaggttatacatccaatcatagaaaagggttgatcctgcttcacgaaaaccaagacaacacggttgatatgtacactgctaagagacctctgacccatggccgaccagaactgctaatcttcttacctgcaccatgaagtactcgtgagtaacagtgactcaacaagaaaagctactagatatagaaaatcatggaaaataatagtaaattatagtaccacggattatacataccaagagatcattctctttcaacgtacatatacaattcaacgtctatacgagcaaacttgttacaaaattaagagtatttatagttatac

SEQ ID NO: 156592 - DNA, 619 bp, Cannabis sativa
tactcaccttggggtgctccagtattgtttgtaaagaagaaagacgggtcactatggatgtgtattgattagtgagagttgaacaagcttactatcaagaaaaagtattccctacctcgaattgacgatctatttgatcaacttaagggaaagacggccttttctaagatcgatcttcgctcaggttatcatcaacttagaatttgagaggaagatatcttaaaaattgcgttccgtactcggtatggacattatgaatttctggtgatgtcttttggactcactaatgctccaacgacattaatggaccttatgaatcgaatgttcaatgattacctggatagatgtgtgatcgtgttgattgatgacatactggtttattttgaatcagaagagggacatgagatacatctgatatcagtactgcaacgattatgagatcacaaattgtacgccaagttcaaaaagtatgaattctagttagctcgtgtctctttcttagggcacatagtggataaagatgggatcatggttgatttggccaaaatcaaagctgttcggtattggccaacactaaaatcggctacagaagtttgaagctttttgggtttagctgggt

SEQ ID NO: 156593 - DNA, 671 bp, Cannabis sativa
ccccggccatgtgccctgcctctaggacctctccctcagccacgaacatttgggggaatctgaactccctgaccaccactagatctaaccgcattacccagactcttggtgtttcgcctggtgtccatactattagaatagcctgcgtaaccaagagctactttggtcagatcgttatcaagtatacttactaattgctgcttatttggaaattaaaaacatgcacccattcagctatcaggctactatcatgcttcctaacatgcttttcttaaaccatgctattaaaataaactattaaagcaataaaagcttactgaactgtggaacaagctgatcactgatgatgattgtacatgtcgtgatgatcttcaaaagacaacctgacagttcttataccaaattgtaacaccctaactattttaggcatgttagcgtgatttttaacttactatgcagcttgttgctaatcaaagaggttatcgaaaatcgtgtttaattaaaattttacttatttaattaaaaccataaaatatcatacatatgaattctgggatcccatttacaaaagtttaactttacttatacaatagtctgtcgcctagcgactatacagcaaaagccctgatatcccaaagatcgtacgttccaggcataactgccccgacatg

SEQ ID NO: 156594 - DNA, 995 bp, Cannabis sativa
tctaattctaagtgtttgtgataattaaaatttctaatattgtcaaatgtattttaatcatgataaagaacagaacataggttaaatgaattatatgcttcattaatttactgcctggattagtctatctccataaatcttaaagccttatctaagttaaaaaaattacatgctttgtggatttactgcttaggtaaaagagttaattattgagcgctttgccttgattacatgtaatagggagattgggataatttgactacttcagctttatctgtgagattaatagtttgattggataattgaaattactttcattaataggagttcagaatcattgttgagggtagagaataacctttactatttatctcatatcgtaatatcacatctaattcattattatttttgttattttaatctcatcatcaaaacctccctttttaattcttgttactaatttttgaataataaattaaaaatagtcctcgcgggattgacctgtaattaccgttatactgaattaattagtaatatagaaataaaaattagtaaattttttgtggtaaacgacatgcatcaaatttttggcaccattttcggggactattttattcatttttttcttgttgctaatttgttcttcgagttgtagttttaattttcatatctttctttagaaacatggcaatgtacaatcaccaatactgtgatccatattatatctcaccattagtgtattaatatgatccctactacgacacttttacacatccaataaacaatggagagattattcttacacttcctatagtgggatcaatcaatatattcaaacaacttcttactattctcctgtagcaccacaaaattaaaaccattctcttactgatttgcttaacactttggtggcttctactacttggatggaaaaaaaataatgtacaatttcaacaacctacttgttgggttttgtaccctaaataaaactcatt

SEQ ID NO: 156595 - DNA, 738 bp, Cannabis sativa
cttatttcctaggtaatacataaaaataatataaattttctctaactttctaattcagcctagaaagcactaaaggacaaaaataaaataaaaccttggtaatgactattttaccctcattcaaaaaaacttaagttatttactaacctaagggtattttggtcaaaccaactatcccgatttaaaccgaaatctcaaattttaacctaatctcgtataattctaatataacataatttcaaccatcgtgacatttctgaccactccgtcgagtttcacaattgcttggcccgaaaatattttattcaaattatggtatctacgatacctacatattctaatacactttatgtaattaataaattatgtttgattattcatttactcatatttccctaattaactcgtaattagtttaagtaggattataatcctactctaatacctacttaatcatatatttaataaaatatgtcaaattcaaataccaatatattattatttttttttgggaaattacaagcgatcagctcgtctcacagttcagtaagcctttactgctttagtagtttattttaatagtatgatttagaaaaagcgtgataggaagcatgttagtagcctgatagctgaatagatgcatgttttaaatttccaaaacaagcagtaattagtaagttattcttgatcgcgatctgactagactagctcttgttggaagttattttaccaggaact

SEQ ID NO: 156596 - DNA, 556 bp, Cannabis sativa
tttagggttttctatattaaagaatatgtttagatctgtgatttatatatttcttgagtgttttataaaccctaacaagtggtatcagagccacctttattaaattaattgaaaatctgatattttttgtttatgaaatttggagattttaaaattagggttttgatctacttagtatattatattatatatatatatatatattcaatggtgatgcgtaatttgggagttcggaaattcaatattgaattgtaatatgattgtggcttcaatgagactcgccaccctatttttctttggattaatacatttatgatgtgctatttgtatataatttatgaatttatgaatttactgttattgatatattaatagttgggctcaaaatcgattacattcttgcgccattaataaatgtaatgcaattttgttttatatactgtaccatatatgtacgtgtatatatatgtttggctatatatatagtttcaattttttttagcagagaaatatgtattcaatgtttctttctttttatttattaatggttaggaat

SEQ ID NO: 156597 - DNA, 844 bp, Cannabis sativa
gtcatattaagtatgtcctcccactttttggaatttcgttcagatcgcaataatccaccaagagattttattgctaatgggaggcctttgcacttgtctactattgatctacccaatacctccaaatctttgtaaaagtgaaggttagcattgtttccgaaagcatgtttgacaaacaattgccaacaatcttcatttgacaaaattcggagatgatgaatattcccagtggtcatagtagaggcgacattttcgcttcgggtagtcacaacaattttacttccatttgctccagaatcgaagcagctctttaaagtgtcccacaaagaataggactcattccaaacatcatcatgaacaaacataaacttcttccccttcaatacttccttcaattttcttcgaatttcgtctgggttctcaatatcacactttttgaaagtgaccccctcaaagatctctcttgtaatttttgaaatatcaaactcatctgacacagtaatccatgctcttagctcaaaatgttttctaactcgatcatcgttgtaaacaagctgagcaagtgtggttttgccaacaccacccatcccgacaattgggatgacagaaatggcatttcctccttcaaccatatcatctttgagcaacagatccacaatggtttccttttcagcatgcctcccataaacatctgattcttcgactaaaggagcaggtggcctttgagtagaattgttttggagacattctctcaagccaagagcatccttttgagcaagaagatcatctagtttaacaaggatctcagtggcatcactctgtacagctttttgaaagttaaaca

SEQ ID NO: 156598 - DNA, 547 bp, Cannabis sativa
  modified_base (110)..(113): a, c, t, g, unknown or other
  modified_base (391)..(393): a, c, t, g, unknown or other
tcctggtcctagtcctagttcggttctagctccatttgcaattttatgttcgaatttgggttcaggtcggagttctagtcctggtctgagtttgggttcgggtccggatnnnngtctaggtctagatcaggctccgtgtctgggttcgcgtcctgggtccatgtctaggttgtgtccaagtccaaagttccaatcccgatctgagtttggatttagttctgggtctaagtccttggttccgatcctcgtctgagttcgagtttgggtccgcgtccgggtctagctttgtgtctgattctagggttgggtgtttgagtttgggtgcgagtctgcatcctggtttatctccaggtctagaccacgatttgggtctaggtttgggtccaggtcnnngttcgggtcccgagtgcgggtctaagtttatgtatgggtcaggatctcggtcgagatctaggtacaacatttcgatccaagtctgggtcttagtctgagtccagtttcatatcttaatccctatctatgtccaagtctgtgtttgggatcgggt

SEQ ID NO: 156599 - DNA, 955 bp, Cannabis sativa
gaggcgaggtccattaccttggctaaatcgattagtgagctctgtccacgtatttgctgtagtgtcgagaaacatgatacttatgttgatgtcatgagaaacatagtggatggtccaagacatcaccatttgtagtccttctattaggttctgtcttattattcagtttaaaagttgttgtgtctttgtaaattagtaactttgccccataaactttgacagctatcaaattgtaccccctcaaaataaaaacaagaaagattcaacattttttttagtaaaatcttaaaaaattaatttagatcttaagaaaaaaaatcattttaaatgattaagaaaattagacaataaattaatattataaaactaattaagtgatttaagaaattctatattttttattaaaaaattcatttaaatattaaaaaatatatattaaaattcaatttttgttaaaattaatttttacaagaataaacttgagtatattttttttccttatgaatgtatatttgtttaagtaaatattacatttttataatttaatttattttttttttttcaaaataattttatatttattgaactttttatattttttaagatatgagtttataaatataaataagtttgattttttcttcaaaaaatcttagtttatttaaattatttattagattctctataattttggtttaattttttatgatacgtgtttataaataaaatacactttaaaaatatttttttaggaataatttaagtttttttaagtaaaattaatattttttaaattaatttaatttttttaataatttttattattaatttttcaaaatcaatagaatattataattgctttaacaaaaagaatattatatgttgaccgaggttttcggcaaccaatatactaataataattaagagagctataaggaattaagagagagatttt

SEQ ID NO: 156600 - DNA, 594 bp, Cannabis sativa
tttattgcttttctagggctgcctgtgtagcctccaactctgtggttcctcacaccaaactagggtcatgctcataataatgaccatctttataatatccatctttgctcatcatgaccttatgcgaagttctcggtgttcctttcttgattctcagtagtggtgttcttctcttggttttcagtagtagctacaccttctccatcattttccacctgtgtgtcgactggacgagaggtaccttcctccatgatcgtgtctaatagagttcctttaccggtagtctttcgcatttttaccatgatcaaagaatgatgaacactaccaggcttccttcagctctcaatgaaagcaccaaaatgtttatcgagtttttttgaaaaccaaatatatttagagcttaaagaagataaaagctaacaaataatagacagacagatttttacgtggttcaggcgttaaagatcctttgtccacgagtctatagtattggcctccttgggcaaatgtttatgagattacaagatggttacaattgttgggttttgtgccctaaataaaagccattttaatatatcagatttacttattaat

SEQ ID NO: 156601 - DNA, 690 bp, Cannabis sativa
  modified_base (618)..(632): a, c, t, g, unknown or other
agctggattcattggagcattacaaggttttgctcccaatttttctgtctcagttaacaaatcaagtacatacttcctttgagacagaaaaataccctgtctacttcagtaacttcaatacccaagaaatacttgagctcccctaaatccttcgtgtgaaactgggtatgaatgaaagacttaagggatgagatgccttcagtatcattttcagtaataacgatgtcatcaacatacactactaacaaaatgatgccagcaattgatcttttatagaaaacaaaatgatcttacttttcaacaaaccgaatttctcaacagcctgactaaatttaccaaaccaagcacgagggctttgtttcaatccatataaagatttgcaaagacgacaaacttgccctaactccccctgagcaacgaacccagaaggttgctccgtatacacttattcctcaagatctccatgaagaaaagcatttttaatatcaagctgatgcaaaggccaatgatgagtagttgccatggaaaaaaacagtcgaatatatgcgagtttagccataggagaaaaagtatcactatagtccactccgtaggtttgagcataacccttggcaacannnnnnnnnnnnnnncgagcaattgtttcatcttgattgaatttaaccataaacacccatttgcaccctatgg

SEQ ID NO: 156602 - DNA, 518 bp, Cannabis sativa
aattagtctattgttgaactgaatgttttgaattttattttcaatatttgtaaataattcaaaaaaattcaaaaataatagacaaaatttttattataactataatatatatatcattatataaaaaaaattatttataacttcttcatgtaccaaaaacaaaaaatgcatgtgagcgttgttagttaatgatattaacaatgcatgtgagcgttagatgaaacctgtgttcaatacgattaaggtgaatgttgacggagctatttttgaagctgagaataagtttggtgttggttgtgtggctcgtgattccaatggatgtttgattgcagccttgtctgtaagttgttttggcttagttaaggcggaaattgctgaaataattgggatcaaagaagtcttgagttggataaagaagaattagtggactaatgttgtaattgaaactgatgctttggtggtggttcaagctattaatagcgctattcttatgccttctcagtttggattattagctc

SEQ ID NO: 156603 - DNA, 617 bp, Cannabis sativa
ggccttatggccgaataagataatataaaaaataaaaggataaaagaagaagtatttaaacagttggagtcccaggctcttggttcgggtcttctgggcgggtaggagctggaggaatcgttgtttgaacaggaggtatatcagcattctgaccggaggtagaagcagctgcctcaatttcaccataaaccacttgggaagtgcagaactcgagttacatgtccttagcttcacccaagtaatcgaagtttgcttgaggattagccttccaaaagtcatagaagagctcgagaccaactgtttccaacgcatcaactttctctcccagcctcgtcacctcagccgtaagctcctcctccttagacttctcctcttccagccgaccaaggatcgcttgaagggatgttctttcatcttgaaggttgttcacttcggcagataaggtctcgatggtctcttcaagtcggtcagaagcctcgagatccttagtcaacttagttattttcttctgggcgctaaaaagcttcttggtgacttcacccagttccatccgaacagctccaagttccaccctggcgtcatcagcgtccttcctggccaagtccacctccgccctc

SEQ ID NO: 156604 - DNA, 524 bp, Cannabis sativa
tatgtctaagttgaaacacatcatggtgtgaattaaagtgtccctaccctaacattaacctttatggaattataaacgtactataagaaaattatactatatatctcttttaatttgatgtctttaatttttattttctcttttaaaatcttatgtttatcacttttttaatcattctaccaattttacttctatcatttcacgataatttttatttttctctaattaaaattgtctcaactatcccataaacttaccaattttacttctgtcatttcacgataatttttatttttctctaattaaaattgtctcaactttcccataaacttatacatctatctacaaaaaatacaaatctattatgtttattattatgtcttagttatgtgagtgtgtgaaaataatttaagtgcaatacttataaaaatatatatttgaattaaattttatttggaggtatatttagttaatgtatatataaatatatatatatatatggggactattacagtaggtattgg

SEQ ID NO: 156605 - DNA, 582 bp, Cannabis sativa
tgcttaactttaatatgaaattattagataattagggtttaattatgaaacttgcatgatatttatgatttatcgttttatggagatttatttgaatttagcattcattatatatgccatacataaaatttaatgcttttgcatattttgtgctcggcaacattggaacgccgcttttggccattagaatcacattttagtattttagtagtaacggggcattatagttaatgtcggggatagtcgagattttagaattgaccaaattatccctagggggtttggtgacttttagttagtgtggggggtaaaatagtctttttgccctatgtcctttcgccttttagtgaattagttaaagttattaaatttgattttttatgctggtattaattagataatcacctaatttattcattttattttacaaaaaagaaaagaaatagaaaatcaatcaagaacatctctctctttctctctctcgagctccttggaaaccagctagggtttgagctttttcagctcaattcgaggaatttccagcaagcttttagtgtttccacccaaggtaacctctctagc

SEQ ID NO: 156606 - DNA, 838 bp, Cannabis sativa
tgagggtatctcacgttcttttcgtcttcctctgtgaatgtaatggggggttcctcgattttcaccttctctgaagattttggggtaaagaccgactgctcgttctttatctccttcacatatctcttctgagcattactacttccccctggaatatgtgaccctcccaaaatgaccaggatgtcctcccattccacaggaataggttgtaacccctagttctttgggttactaggctgacggggcgggttgtatccctggccctgtcttttcacatactatttaaaatggcctcgagcgatgagactctctatctcacctttcaattggcgacattcattggtcgtatgcccaatattcttatcaaatttacaatatttgttaggatctcttttgctcctcgaattcttcataggctcgggttcgccgaaagctagctttttctcatgtgcgaggtaaatattttcctgagtttcattaagcttgatatgaatagtatacattggcacgtatttgtcatgcttcttttgtttctttttatccttcgatggttccctaattccatcctttcttttcggaccggacgcccccgagttatcaattctcgtggaagcagtccctattgaaacattgctggttttacctcccgagcttgatttcatcaagttcatttcctttcgggcttcttccttttggacaaacacctgagccctctcgttgaactcaatgatgtttcttactgaacgtgcttggaaatcatcccacaactcgccccggcggttaatggatcagtggagatccccacctgaagggccgtaagttgcatgctatcatccaa

SEQ ID NO: 156607 - DNA, 507 bp, Cannabis sativa
atataatttctaatactaaaagggaatataggcttttaaaaaaaatattcataaatcacaaaatatatatgtgttatcaatttaattatatatacacatatataattcttttttattatattataagcttattaatatatagggatggtttcattcaaaaaatatatatataggtatggttatataaataataattattagtaaaattagcttaaaaaataaagaagcattatttatttgaaaatatacttattgatagcaataaaaaaaaaaaaaaccataagacaaaataattattttcacaaatattcacaaaagataaaatgttaattagggagaagcttagtttaggaaaaaaaaaaaagtaaatagtgtacatgtttcaatttcttagttaaaattttttgtaattgaatatataataaaggctaattatgtaattcaattagtgaaagcccaaaaagctattctcacttttatatagattataaatatatatatatatat

SEQ ID NO: 156608 - DNA, 1283 bp, Cannabis sativa
tttttttttttttttttaatgatcttatttctttttttgttatgaattttttatatatataattatttgtacaatatttttttttgtgaattatatttttttttattattaatagaatattattatttaataccttaagatgtccaacattatacagatatgacatttaataattggttagtgatatctcatattattcactaaattaaaatttgtgagacccgataataaaatacaccaataaaggtatgacaccatttatgatgtttagcgcattccttagtaatttccttatcatttccaataaatggtgtataatttgagctaaaaaatgagtcaaattatatttggcctaaattttataacaatatttcaatgcatttagaataaaatttactctcttttgatagaaatgtataaaaaatcaacaaagcattaagttattactaaattatataaaattctattaaatatataaataaaatataaaaaatgattaatgaaattaataagtggcaaagagtaaataaaaaaagaatatttattatgttataaaatttggcacatactatatttgtgctaaatttaatataacttttagtatgtgctaaatttggaccactttatataccactattagagttcacttttataaagatgacttgaaatatgcatatacacaatatttttagctcttcattaaagatgctcttaatatgtacatatccttaatcactttaattataattttaactctctctttttttttttttttttcaattatacataatttcttaaagttttttttacttgttacgcaccgcttaagtaaagttttcctatagtcattgctcttatatattttttcaaactaaataagattatcatagtaatttatattttttttggttatctttgaagttgtgcattatgttttgtttgtaccaattattattgtttttgtcatttttttagaacctcaatttttttactttttctcaaaaaaaaaaaaaaattactccatttttgtttttaaaatattttttaattcttttttttatatatattttttttatcatcttttttctcctgttttcttttttcaattttattacttcttttttattttatttttatttttatttatttattagaaaatatataatagcgtagaaaactatgcgtgcatacaaatgatattaatcattttttgtgttgttattcttcttttttttttttcatagatttttattaattattattttatttttcttctaaacttt

SEQ ID NO: 156609 - DNA, 650 bp, Cannabis sativa
  modified_base (354)..(363): a, c, t, g, unknown or other
  modified_base (593)..(623): a, c, t, g, unknown or other
tcacatccatttgatacaatttgatatcaagaacacaagaaatacacaatagcaaacgaatagattctaatcttgctattggagcaaaggtttcaacaaagttaataccttctacctgtgtatagccttgtgccaccaattgagcgttgttcctcacaattgtactgaattcatcatttttatttttaaagatccactttgttcaattcacattgatatctgttggtcttcgaaccaaaatcttgttagattttctgccctaaataaaactcattttaataaaatcagatttactaattaacataatatcaaaaattgcatttatgttgtatggttcacgtgatttatttcatnnnnnnnnnnaatgtataaattttattaagtccacaacatgcacatatatttgttcatgattatagtgtcctcagaacagtagaatataatcaagattatatgttcaaaagtttaattcccataatttttaagttcaccggatttagaatgacatgataatcggcgataaggtatacttaaaccttagataagtattatgtctttttaggaaattggcaaactttaccagtatcggatgnnnnnnnnnnnnnnnnnnnnnnnnnnnnnnngatcttggataagatatcataaacata

SEQ ID NO: 156610 - DNA, 551 bp, Cannabis sativa
tgggttttggtgcggtaaggtccttgaccaatcgggttaactcgtccaatcgagcttggatcaccgaatctgtggctgtttgagattgagcaacagtgacaccaacatttgcttggtccccttggaccggctcaggtgggttcactatgttggaaccacgattgtctctatctttgttgagggcgtcccgcaggtctctaccccctcgagggcctacctgttcaaaaattggtgcggatgcttggccaacactaaagacccaacagcaggagtattggggctaaattgggaaggtccatacgaaattacggaatttgtaccccccgacacgtataggatcggccggtatgactctaacatgaaccttatactagtaccccaatattggaacggccaacacctctggaaatattatcaataacagttgctcttcggcaacaattcaagctaagggtatgcccgtaagcaacttagaatctttattagtgtttagtcttttcttttagatttgcttttgtttactgctgcgtagtgatgtaataaggcgttgt

SEQ ID NO: 156611 - DNA, 1141 bp, Cannabis sativa
tttttttttttttataaaaaaatttttttttttttttttttataattgtgttttaagttttagtttttttatttgttattttaggaaattaagttttatcagttagtttttattttggttgctttataaattgggttctcacattccattgtttttatttttttgttattcttttaaggtttttattgctttttgtctctttaattttctttgcttcctttttttttctctagttttagtttttaattctccttgttatatttgctccatattgtatgcttaaattagctctgatttttgagcaagtaaataaaaaattaaatgccaaaatagaaaataaagttagaagtttagttattaggtattgatataaaatttatatgttcgaaactggttatttagtatcgtttttaaaagtttggttattaggcattggttatttttcattatattgttgataaaattgatttttttggcatcttttaatgaagtaattagtttcttttaatattgatgaaactaatttttaaagttagtattgtttttagattataattttttttattatcttgtcgatgaaactattttgtttgcttcttttaatgagattattagttttatttttttaatattgatgaaactagtttttaaagtttgtatcatttttaaattataattttttgtactgtgttttttttagtatgatgttaatgaaattgatttttttttactgcttttaatgaaataattaatttcttttaacgtatagaattaattaatttattaagttattgtcttaataaaattatttaagtattatcactgtctaaaaaaacaaaacaaaaaaaaaaaagagaacttcaacttttatatataaaaaaagaaaaaaagttgagatctttttatttttatttacgtgttacttttcaaaaaaagaaaaaagaaaataaggaaatacaattttaaaatatttatagcattcctctttatataaaataattttttcctatatttttaagtttttttttaaatatcatatttagtataattaagtttatatgctatatatatattttgagtttctagcgctaaatcttttccactatcattttacttgcacttaactctctaagctcaaatt

SEQ ID NO: 156612 - DNA, 569 bp, Cannabis sativa
  modified_base (300)..(300): a, c, t, g, unknown or other
ataagatacattcaatagccaagctggagagtctgcaccactctgaagtactaataactaagttgaagagagagagcggggtaggccatagatgaaagtgaactcttaagagattgggtttttttacaaaaatactagattttgagtaaaagtttacgattttagtgtcacacagaattttttacaaaaatactatctttttagaaaacaatcgtaaagcaacaagacagaacaatttaaaacaacagtagaacaacaatgaaaacttaacacaatacacacagtataaaacttacacantatttttgaaaaaaattccaccccgcagtaacaaaaaagttaaaaattttagtatatggtataaaaattcctaagaaatttcactctcattatcatgggtgtatgatatatatacccatgtaacagtgatgtgtatagttttaaataatgaaattttttttgagataatgaaattttttttgagataatgaaaatttaagtattaccctttaaagtcatattttagtagaactcttatttattttagtatttacaaaaaaaaaaaaaaa

SEQ ID NO: 156613 - DNA, 544 bp, Cannabis sativa
gccgctaataccccaccgctaatagccctatataaaccccatcagacccaactttcccatttttcctctcttctcttcaaattcaaaccctaataccccacattccccattttcaaactcctccctaatcggcgccggacatctccaccggaactgaattgggattttggtgaccacatacctcacgacgccttctccgatttcggtgaccaacacaggtatcgaatctacactttcccattttttaatgttgtatcatgtatattttttgtatgtaatctgtgtatatatttatatttagatcgatttaatttttatttttgtgttagatcagtatatataatgtcatttgggtagatatataataatatgtgtatttatatatatatatattttatttgggtatatatattagtttgtgtatatatatataagatttgcgtacttatataatataatctgtgtatatatatttaatttgggtatttattgttttatttgtgtatatatgttaactgtgtatatatatttgatttgggtattt

SEQ ID NO: 156614 - DNA, 613 bp, Cannabis sativa
attgattatgggttaacatgtcaaattaccaaattcaatgcaataacatgtttactaaagtaatttatagtcttctcagatatatataaacctcaattacatgtaaattttctaactctcatgataaattaaatatgtaaaaggtattaaatacagaaatcgtataagctatccaaaccatataggtactctcgtcctatatcgaaatttggttctatttcactatagcataattgacactcacttctcagattttgtatcaaaattataaacaattaactgatggtcaagcaattaaaagaaattaagtacgaatgaaataaaatacatagaaattgagggaaaacttgtcctttgcgggtagggctcaattgatccactcggtcttgctttgaataaggaacttttggatgagcatattcattctcccctctaaggtcatggctgctattgataagagttgccgagattttcttttgggttctaatggtaacaggagcaagcttgtaagacttcgatttgaccgggtcaaaaagtattatatatatataataaataatataatatatatatgtatgtaaaaaaaaaattattattttgaatatatactgaa

SEQ ID NO: 156615 - DNA, 712 bp, Cannabis sativa
tcatattaattcacatataatatattatataataatataattccacaataatacataattaactagttatggttttcttatccattttcataaacttagggtacaacaactaccccctcatagaaatttcgtcacaaatttacctgaacaactttggatatttctgctgcatatccgtctcgagttcccaagctacctcttccacattactgtttttccataatacatttaccagtacaattgtcttgtttctcaagactttctcccttctatcaagtacttgcaccagttgttcctcatatggtaaatttggttgtagttccaatgcttcataactcataatatgggacgaatttgagacatacttctgaagcatcgaaacatggaacacatcatgtacagctgctaacgctgggggcatagcaaccctgtatgctacttgccctatcctcttaaggatttcaaaaggtccaatgaaccgcgggctaagctttcctttcttatcgaagtgcttgatgcctttcataggcgatattcggagaaataccatgtcccctatctgaaagtcaatatcccttcactttggatcagcataactcttttgtctactttgagctgggagcattcacgctcggatcttatccactgcctcacttgttctttgaacagcttcagggtctaagaatttcctttcacccacttcatcccagtg

SEQ ID NO: 156616 - DNA, 531 bp, Cannabis sativa
tgagcggtttgatgtacacccttattgctcagacgagatctttcaaatttgaaatttctaggccagtcatcctgactatgaagatgtggttaggcgtaattggtcttcgttagcaaggcaagatattgttcggaagatacaggaatgtagtactactcttcagcattggggaaaggatgtgtttggcaacttttcttctcgcattaaacaatgcaatcggttgttaaagcaatataagaagcgacgtgatgaggacgggaagagattattttatgaggctaaaaaggagctttttgctgttcttaaccaaagggaggtttttgggcgacaaagatctaaacagttatggcttcaagcgggtgatcaaaacagtaagttctctcattctaaagcttctgcgcgaaaacgaaataatcacattactaggtagaaagactctgagggtaatttgagacaatgggataatgggcttgagaatgtcatggttgagtactacaaggaaatctttactgctgaacctactagctggga

SEQ ID NO: 156617 - DNA, 781 bp, Cannabis sativa
  modified_base (698)..(709): a, c, t, g, unknown or other
ccgcactagttgagataatattgtcttatagaatcagttaattaattttaattaatcaattagaattccaaattagactatgtcttatttgtaaatttttactaagcaatgacgtatttgagaagaaaagagattttaggatttgtttatcaattaagagactttgaaaggtctaattaataaataagttaattgcaattttatttgataattgattataattattaaatagataaaattaaaatttatagagatagaatttaaatatgatatttgagaaaagaaatataagttttaataaagtagtaaaattgaaacccaatggacccaatagggatttcggccatagggtttgaaataaagccattttatctttttttattccatatttaaattctaacctaacactatcatataaatagaaaattgtaagctcttattttcagaacttgataacatgataacctagttttcactttgtcagataaaataagagagctctttctaatttttaaaattctttagcttcttctctcttgatttgtgccctataatgagagagtacttttccacacattttaagtcagtactcaaatatagtgtggacgattgtgaagaattttgtcacctaaaggagaaactaggttcaaatcttgatcatactttgcgacacaaaggatcaagggttagagatctgnnnnnnnnnnnncattatattctgctgccactaatgtaagattttctataaatttatatctgtttatttcattgttttaggaaa

SEQ ID NO: 156618 - DNA, 507 bp, Cannabis sativa
aaaccacgagtggagagggagacaaaggtatcaatctcgaaatcctggttggtagctaagaacctcctataatattttctagatagatagctctgtgaaatgtgtttcattaaccatcttaaaaaaaagaaaaaaatcttatgcagaataaaaaaaaacaattgaaatttgaaagaaacatatagaaaaggtgagaagagggaaactgaaaaaagctttgataatttggattgagggctttaaagaacaaaataattgaaggaaacatatagaaaaagagaatagagaggaagagaggtgtggtctccggttgatgacagcttttttaaggaatttgcctttcccatttttcacaaaactttgtatatatatctatttgcatattttcttttagaattgattataaataaccattggaattaattttcatatatccattagcatatttacttttagtcctatatccttttctaggtagatgatgagccaacgttttgattttttttt

SEQ ID NO: 156619 - DNA, 696 bp, Cannabis sativa
agaagatttttgggggttcctgtaatgaaccggtcgaccggttcaatatgatcctgtagaaccggtctaccggttcatccccaagcaaaccccacagcaatggtttttcagttgggaaccgatctaccagttggggcagtttatggcaccctagattttcctatttttacgatatttagggtattaccatgttatccatcgatagagaaacttttagttttgattttaagtccctaaaaagtgatgtagtgtatcactcatcaattttatgaatattgtgacttaagggcctgtaaatcgtcaagcagcaattccactcaggttgaccgacccacatgaattcagaattgatgtaagattagtataatgatatgtatatgtgattacatgctcagtatacatgtttatgatcgcctgttatattacattagaatagcaatattagtatacgtagagttatattagatattgatgaatgtatgtttggcataagtacacattgatgctattacatcggtacgactagagtaccgagtataggctaatattatggtcgatagtactgccatatgaatgttcttgactcggtaccgtgtaggatgtggggaagaaatatggttgagtgtataggggcctaattgtaattcaaattatatctatgttatgattatgattttcttactgagtctgttgact

SEQ ID NO: 156620 - DNA, 692 bp, Cannabis sativa
  modified_base (337)..(340): a, c, t, g, unknown or other
agtggaaggagatattatattctgctgcaaccactgtaaggttcctgaaactttatatgtgtttatttcatatcgttttagaagtttatgtttaggatgttactaacatacttcttagtaaatgtagatccttgtaaaataattccaacaactggcctccgagccattgtaattgatttactttcaagaaatttggacttaaaatgatatatgtatgatttggacgtgattcatgttgatatatgtgtttttgatgattgatgtttgtagattttttacgaaaataatttgaatttttttctcgaattatttttgttggatagtttggaaaaaattnnnnaattcacttttttacagaactcaatttcgatttcatttgaattagttatgattttttgaagttttaaaaaaggataggggttgtgtcaccttatacgcgcgcggattcgagtgatcactcggtcacgcgcacctcaaacatggggttgtccgagttttctcggtctgaagccccgttttttgtctgaatctgggcctccgcgcgcggacgaggctgctggcagcctctctggccgaggtttctcggccatgctcccatccctacgcgcgcggatggtatgcactgcataccatccgcatcaaatccaatttttccaattttcttcatttttcatgctttttcatgaaattaa

SEQ ID NO: 156621 - DNA, 552 bp, Cannabis sativa
caaccatcaaatgagtaataagaaaaataataatatatatagggatatttgcgccataaatacgctacgttttttattttatacacttaaataccgtatgttttttttttcgacggattaaatactttaagttacattttcgttacttccgtcactacttttctgttaaattctattcaaacataggagtatttgcaatataaatacttgatgttttagattttatacatttagataccatatgttttttcttttagtatattaaatacttaaagttacgttcacgctacttttttcattatcaattcttttaattctattaaaatagactaagttgacacttgtcaacatattagtgctccactaatatattctcaataaaaaattattaaataattttaaaatttattaaactgtaatgaaattccgtattttaatattcccagtttgattatttaattaaaggatttaattaaatgcggaataattaaactggtactgaaaacagttttctgtagttacagaatgcaactctgtaactccagagaaacc

SEQ ID NO: 156622 - DNA, 1540 bp, Cannabis sativa
  modified_base (927)..(929): a, c, t, g, unknown or other
aaagagggatatatttgttgtgtttcttatccatgggtagccttttggaatcgtcttttctctttgatcctaagatttccgattcaaattgtccaacagaatgataccccagttgtcttctgggtttcttgacttgatgctttatgaacttattctccaactcgtccattcgcaaatggagggaatccttttgttttggaccgagtcgttgacgaagatcaggcttcctcaagtttagatgctctcgtaggtcactcctatcttgactgctatcggactttgctcttccttttaaggtttgattcaccttgttctccctatgagggtttgtgtgagttcctttctgatgaacctgaagagagggttggcaatttcgatccgatgttctacataccctaggttgtgtccccagattttccttagttttgtcaagatgcatctcttgagagttctgagtatatctttgggttgtctcctcccccttagtttgcgagttgcgaggtttgcctcgtgaatctcctctcccaagctcaggttgattttgggaactattctcctgcattgcccttactatggctatttcacgttctaattcggcattacgccggtttgcttcctccaatcaatgcccaagatggcaattttctaattccacgattggtatgtacctagttgggtcgtaagcgccatcctcatcaacctggttaggatgtgaccggtcgttgtttacccaaggtacttcaagctagggactccaatagtgggttttctgagggcttgcagtctgttcatgcgatgactcaatagataccagaggactcaatggccctttttcagtgcgatgactgattccgtcatccattacttttatgtcaggaggctttttttgagctttttcacagaggctctcaatggaagcaccaaacnnntaatgcaaatttttgttaacaaaatttgagcctcacagtagtgatttcacacaaaaaaaataaaagctctagatataaaaaaatgtgaacacagggttttttacgaggttttgcagttaaaattttgcatagtccacgagtcaattttattcagatttatgattttttttcagggcctctcctgtaagagtttttttttgtcccttttttgaacttgtttgccactatttataataatatagtgtacagtatattacaaagttgactgtaatctttacatcgattattccctcaaatcatgggatttgattacaaatcacgctaagtaaatgctgtttatatttagaattcacacaactgtgaatatcccgctttaattgggcagagatgaacgcatgttaaagacatacagtaagcctcatctcatggggatgccttgttgggaatagagccaagttagctttgatggcgagctgggggctcgtcatataagttctcggggttgataatgctttaattctgataactacagtttttggtgtcgagatgatctttctcgcaagcatgccatcttacagcgagatagatgccttgctatctatcaccttgat

SEQ ID NO: 156623 - DNA, 644 bp, Cannabis sativa
  modified_base (419)..(431): a, c, t, g, unknown or other
catcatagtatagtgtcataagtacagggactaaaaaagctaattattctattaattaatgctacgtgtgtcttttaatatttcttttcgtaggatccaaaatttggcggaaaaaaatggattttgattatatttagtttattatttataattatgcttataaaatacgaaaaaaaaataattaattaagttaataattatttaatattttatttaaaaaaatacaaaaattattatttcttattttttattatttaaataataataatatagtaaataaagaatgtaaagtttagtataatttatataaaggctaattaggattttttttttcctgaactttgacatgtatcaaatcatgctccctgaattttttttacctctaaaaatttcatctgaactattgagattgttagatnnnnnnnnnnnnntccaattttagtaaaaaaattctaacatggataaaagttcaggggacatgatttagcatatatcaaagttcagggcatgatttggtagatatcaaagtctgaggagcatggtttatttcataaataatcactgaaacagtaaaattgaatgaaattagacaaaagtacttaaatctaacaatctcaatgattcaaggggaatttttaacggcc

SEQ ID NO: 156624 - DNA, 603 bp, Cannabis sativa
cttatcacactttttgacaaactcgtgggtgtccttattgatcgttggcaagtaatatctctgtctaatgatctttttagataggctctggcaacttgcatgatccccgtagaagccttcatgaatttctctgatgatctcgttttcttttgtaaggaggacacaccgaagtagaggcatcaaataacctcttctgtatagtttgccttcaattattgtgtatcgaggcactgaatataagagtttttgcaccttgtttttatcagttggaagtttcccgtcaagcagatagttgaggataggggtcatccatgtaggtgaactgtctatcatctccacgtcttccctttcacatatacttggctcgctcagcatctccaccgaaatgaagttcaattcatccaagtcgttctgcgaggccagttttgccaaagaatcagggttagagttttgttctcttggaatttgctcgattttaaagtaatcgaatatttccaacttcttccaagccttctctaaatacttagccattttcaggcccttagcctagtattccccgagaacctagtttacaatcaattgtgagtcactatggcagatgag

SEQ ID NO: 156625 - DNA, 517 bp, Cannabis sativa
taatgaaagttatgaaggtttgaattttgggtggccatgggtgtcgagatggtgcttaatcgcaccagagacctggacaaaacaccctttacgcgcgcagaatgggaaaaaaatccttgtctgaagccgcatcttgcacctgttcggacatgcagcacgcgcatgaagtgccctgcaattgccgagaaaactcgtcgcccacccctgacatctctcacctacgcacgcagaacagggtgcttgcaacctgtttctcgcccaaggtgattttttgcccaaaaaaatccaaattttgtgagatttttccccaatttcgaatttttgcaattttcaaaccataatttcaaaatcaaatattatttttaatatattgaaacttaaatatcaattttaaattaacaatatttgatttttaatagattatttgacttgtgtgagcctatatgtttgctattgcgcttagatacatataggaagtccagttaagttttattaagtaaatggactaggtcgctaa

SEQ ID NO: 156626 - DNA, 1095 bp, Cannabis sativa
  modified_base (160)..(171): a, c, t, g, unknown or other
  modified_base (221)..(225): a, c, t, g, unknown or other
  modified_base (283)..(288): a, c, t, g, unknown or other
  modified_base (383)..(383): a, c, t, g, unknown or other
  modified_base (1061)..(1065): a, c, t, g, unknown or other
ataatcatctcattcgcagatggatgtacatataggggtggatatgagttttcttaagacgatcactctagattttaccttaagcataagaaatataaaatgtttaaaattttttatgaatttctaagcaatgttgaaaaaccattaaggtaagtggttnnnnnnnnnnnnaactgataggggtggagaaatatttgatcgatatgcagttcaaagatcannnnnttgattttttgaattatatccaaccttacctcaccagaaattcgatttgcatattgannnnnngttactagtcgttgcctaagtcctcctagggatataccccagtaaaaggaaaatttcagaatgatggaatggttatgtaaagaccgcttagcttnaatttggaaattagcagataattgaggtttaattatgaaaattactcattaattttaaattaattatttatgatgctttatttgaattcagaatgcattttgtttgtcatatatagaaatttcagatttttgcatgttcagtgcccgataacattggaacgcggtgtatggctcagtagaattacattttagtttttagtatagcggggcagtgttgttagacattgggaatatcaagattagtcaggaatttagaatttcccaaaatacccttatgtgactttatgactttttggcttaagtgagggcaaaatagtctttttgccattagtagtttttcctttagtggacttagtttaattgatgttttatgttgatattagttgaattaagcaaagaatattaattcattttcaagaaaaatcaaagtaaggaaggaaacactttttctctctcaagctcactctctctttcggcccccttagagcagctagggttcttgtttttgctccttcaattctgtgttttccagcagtttttagtgtaatccaagctaaggtaacatttttgcatgctttgaagttttagttgttgttgttgtttaaagattgtttatgtagttattttatgtttgtttgagttgattggaagtggttttaggagctgttatgttgtttnnnnnagctttggagttttgaactcaagcttggct

SEQ ID NO: 156627 - DNA, 500 bp, Cannabis sativa
cactccattttttgctttgatgttgtaaaactttaccattgttggtaatcttagttttttacaaccatcgagcaggggtttatctgcatcacttagaaagttattaaattttttaggatcattaagaaattcctcctgtgcttcattaagcaagtccaatggatgatcatcaaaatcattaccctccatatcatctaccacccgcttccctactggatattgatcatcagctaaatgttcgtcatgttaataccaagtagtataacttctattgaaacctcataaataccatggtccttaatcattgtaatatttcctttagatctattacaacaatttacacacggacaatgaatacgttcggcaattttagaattctttaaggcaaaatcttaaaatgcatcgaactctacttgaaattgcagtgtgtctctctcctcacgcattcatgatttatccataacaaatatcctaacaaaaaatttcaatatttagtaact

SEQ ID NO: 156628 - DNA, 535 bp, Cannabis sativa
caaagccatatagactttggaatgtctgggcccaagatggagtaagtaaatcaaagtgacccattgggttaattttgctcttgtgggccaaagctgaaatacatcttaaagaattgggcttgggccttacttggtagggtttgagtgcaaagaagctcctccccaccatcatcctctttgccagccgaccctcctgtgcgactgctcctcgggaaaacgtcttcaagctttgaatctccggtgaagcttccagcatccacgcctccgtcttctccgactccggcgacgacttccgtggtggattcggctccgtcactgcccacaaagtgatcggccttgggatcggcgatgaaatccatcccaacgccaccacccgcagttcgaccctcttctctgtctccggtgaagacgccctctgttggttcggctccgtccccgccagcatcgtggtcggccttggcaccaccagcggttcttctccctccgccactcgcactaacagtgtcttcgtcttctcttcctcgtccgacaccac

SEQ ID NO: 156629 - DNA, 684 bp, Cannabis sativa
gtgggaatgcgctgattggttgctgaactcgtatttccagtctcttgcacaccaagcacgattccactcaaaggagttgtcacacattgacctacagttatcgattgtttaggatttgtggctggtggaacccttgcattccctggattctgcagtgcaggatccactgcctgtggatctgctagatcaactatgcctctacgagtctgtaccaccatcgtatttataattagatttgaagtaaagaacgatccttgagttcagctctcaatgaaagcaccaaaatgttgaccttgcttttggccaacgacagtgagtctgaattgtaagcgacaagtagtataatatagatgtaatatgatgaaataaataaagacattagagtttttatagaggttcggctgcgagcagttcggtaatagcctactccccttgatttgtatttacttaagaacaaagaatgtaatgattcattttcttagagctcttacaataatgtttctgaatatgtattcttagataagttttcgaccctttgcccagtgagaatggatcgctatttatagggttataagcattagggaaaaagtttaccttctgtttacaattgatataattggcaagattacacattaaaatacaaaataaattgatcaagggatttgaagagcttgccatatctct

SEQ ID NO: 156630 - DNA, 524 bp, Cannabis sativa
ctacataaatacataagtttaactattggttgcttataaatagctaagtttagtttttgactgtattaatacttaagttatatttctgaaactttctaggtacttgatcgtttagtgtcaagtcaataatcacgtcgcagtctttgattagttcagatcattaattctttttttatttaaaacttaatttaagggttaatataattttaaatcatgtgttttgcaaaaattactaatttcactatttattttattaaataacaaaatgaacttctatttttcaaaataatattaaataagatactgtgtttaatttttgataacttttttaatataatgaaatagactctctattttttaaaatggtatttaagcatttacgcgtcacaaattacttattatattatttaagggctcgtttggaatattgtattaggttgtattatattatattgaattcgattatatatatcatatttttatataatactatattaaattttaatttatactaatatattata

SEQ ID NO: 156631 - DNA, 560 bp, Cannabis sativa
ttttcggattagaaccataaaaactaaaaactgaattttggattttttttttgtaaaaaaccgaccgaaccgaccgttgctcacccctagtggacaaagaattggacaggatatatgggctgaggacccactttctaaagggaaacctataaaaacactgatttttgacccaatctttacaaaaatattaccacacggcagaaataacttttatcctgtcttggccatttgttttcttttatactctagacacaaaaaaaaaatgaggcctccatcttttacacccacagatagaaccaccacagatacacctaaacaatcgcaaaacaaccatatttcggtgagattcagaaaaaaaatagtgaaatcgacgtcaaataaataatcatgacaaaacaactgtaaaacaatactaaaacaaattaaacaaaagaaagaaaaaatggattaaaaaaataataatgttctgcatagcctcaataccaaatgcaataacagttatatttgcaagcccaatcttaaaaaattagaacaaaaaaattactaaaacaatacaaaaa

SEQ ID NO: 156632 - DNA, 779 bp, Cannabis sativa
gcaagtacttgatagaagggagaaagtattgagaaacaagacaattgcactagtaaaggtattatggaaaaaaagtaaagtggaaaaaagtaacctaggaaatcgagacgaatatgcagcagaaatattcggagtggttcaggtaaatttcgggacaacatttctataaggagggggtaattgtaatgccctaagattaagagaatggattagccaaccctaactagttaactgtgtataattatggaattatataattatataatttattatatgtgaattattatgatttatgacatcttaagaccgtgttggtgagccaagggtattttagtaattttgacctgagaagggtaatactatgaatttaatttaattatgtgcttatggactatattattatatagtgtgcatgttttgtcctttttcaggtgtgttctgacaagttggcgcggtatagtcacaaccaggtatttcgggcaaaatcgggtttcggggccgaaatacaattttgggatgtttaattggcatttacttttatacgagaaatccaaaatttattatttatgtatgaaatgtgagaattttatttttgcccttatatgcttgaaaatgagaatttggccctaagggcaatgtggtaattgtgcattttgggttatgattcatttaaaaggaaatattaagcaaaatgagattttatttctgcattttactccagccctagcagccagcctctccctctctcaaaaactcattttttttagctttgattttgt

SEQ ID NO: 156633 - DNA, 805 bp, Cannabis sativa
  modified_base (323)..(327): a, c, t, g, unknown or other
aaagtttgaagttttattatcaatagtactcgcagtgtatcatatgtactcgttatatatttatacttagtcaatttatctataaatgttctatctcttgaggataatgaacccttctcatgtcctctatctcttgaggatatgtgggacactattccttagatagacggataccaaatctagaaggcatttgtgtccctttggcattggtcattgagaatctctctaaaaccttatcaatgtaagttgtaagttgtttatgaacaacggacatggtttgtagatccagaatcaagaatccagatggatttatcattctctannnnncatgattcaaaaactaaagcatcattgcttaatcattgcttaattgtttttggattgtttttggattattggattattcttaattattcttattgctggttcaatctgttgtgaaggatactctgaggaagtgggatcactttctctattcttctcaactgagcttgaagtagtaggattgtcggaggaattattctcaatatcttcagcttttcttttgcccttatctgcatcactggagaagaatctccatgcaagtgacaatgttcgctcataagcacgcaattcagcgtccaacttgtttatgtcggatgagttctaattgtttaaaacaaattggttaaactaaggtgataagctgttgagaaaatgaattctctgctctttagataaaacaattcctaggagtcatcttcacactttgaagttcattcctaaaggcatattctagatgaggattggggtgtgggttgtacat

SEQ ID NO: 156634 - DNA, 741 bp, Cannabis sativa
  modified_base (592)..(604): a, c, t, g, unknown or other
actgttatgcaagacttcttagtcgtcgacctgccctcgacttacaacatagtcgtccagcactgatcggacaaggggcaattagttcgatgaagtacctatatatccttgaaattccaaatgccagaaggcgtgggagtggtgcgtggctaccagatgctggctcgcgattgctatcgcatagagctgcagtatagaaaagtcggtcattagttgatggtgatcttggtagaagaaactgaacaaaaagacgaagatcttgaccctcgagtttaagatgaaagaaacgtgctaaaaccaatcgaagaattggaagaggttattctcgactcccaaaaaatgtttatacattgggaagaacctggatgagtagctaataagctttttgaaggcgaaccaggatcagtttcttggagccatggagatatgatagggatcgaccctaatattatctgccatcatttaaatgttgatccaagtttcccagcgaagagacagaaacggagacccttggattctgagaggcaaggggcattgaaacagaaaatggacaagtttttaattaacgactttatacgcgaggtgttttatnnnnnnnnnnnnnccaatcctgttctcgtcccaaagcctaaccgaacttggagaacttgcatcgaattctcggatctgaataaggcgtgtcgaaaagattgtttcccacttcctaggatcgaccagttagtggatgaaactgctgggcac

SEQ ID NO: 156635 - DNA, 549 bp, Cannabis sativa
  modified_base (418)..(418): a, c, t, g, unknown or other
ttatgaaccttgtgaaactagattcgacactatgaaaaattataacgatatataaatgctaaacaataaagttaactgaaacaagtcatcagaattgtcatagtcgctggagttgctgctagtatcgaaaaagtcaccagagttgttgtcagtgtcgaaaaagtcatcgaaattggcattatcgccggaaaaatcacaaaaatattaccaataaattgtttcttggtaatttttttggtaatttttccggcgacaatgccaataccgacgaatttccagaagtttgttatcggtatcgaaaaagtcatcggagtagctgccagtgtcggaaaagtcgtcggagttgctgccaacaccagattagtcgtgagaattggcattgtcgtcagaaaaatcaccgaaaaaatcaccaagaaantggttttttcatcgagaaactggtttcttcatctagtaattggttttttaatcaagaaattggtttcttcattaagaagccagtttcttggtaatttttccggcaactatgccaattccgatgacttttcc

SEQ ID NO: 156636 - DNA, 506 bp, Cannabis sativa
aataattttatgcatattttttcaaatttgcctatatattttaggttaacatttaacgtatatttagttatattttttgtttttattttggtattgtaaatttttagttgtataattagtttattttatgttattcattaaaaaaaaaacatcatttttaattaaaaaatatttaatttaagtattatttataaaaaagaaaatataataatattcaaaatttattattaattataattttagtttagccgtaatattttttttttatttttttaaaaaaatatcatacactttttatttttatttttttaaaaaaaaatattaataaaaagatatttttttaagtaactgcaataagttatagcatgacaatagtaattctttaagaaatataaactttttttattatattatttaaaaagaaaacaacaataatagaaaaatatttttttgaatgaaagcaatttttattagacagaaacatccgctaatataatggactgaag

SEQ ID NO: 156637 - DNA, 517 bp, Cannabis sativa
  modified_base (302)..(307): a, c, t, g, unknown or other
  modified_base (473)..(479): a, c, t, g, unknown or other
cttacttagtaagatgctggagtatttttcttatggctaattctacaggaagtcttttgacttcgacgtagatttttttttatctagagaaaagttttaactattccagaaaagataaaagtcatgaaaggaatttcttaaggatcaacagtgagaggtctcaggtatgctttgcaatgcattagtctagaaaaatgttgttgattaggagtaatgagtatatatcatattaacctaggaaaggaacattggaagacgatcaagtgaatcttaaggtcaacaagaggaactatatgttagtnnnnnngggtggtattttaatactcttagactacacaaaattaggtttctagacttgcgttgatgctagaaagtctactgatgaaatggtgattactctgggggtgaagcagtgatttttagtaagtataaaaactgatctggaatctctaatctaccagtgagactgaatnnnnnnnttgcaggaaagatacttattcagcctatggaaagttct

SEQ ID NO: 156638 - DNA, 541 bp, Cannabis sativa
catatgtgtatttgtctttattgtggatattgtccacgtgaaataaatggtagagaagtgagccatatataagaacatggactactccattcattgtcaatttcttttgaaatggaatcccatgattctcaacagtctttaagaagagtgttattgttaattttttaaaacattctcttagccaatatttgtgtctgaaatatagatgttagaatattttttttaaaaaaatttttgtagttgtgtttgttatagtcacaacattatttctgtaaatttttaaaagtttcgagtaatttattaaaaataggttggaagatttttgaatacgcgtggtaaacttgaatatcaagaacactgttttcggtactattaattattcggtactattaattatttagaattttttaaaaatttacagaaatgatattttataactatataaagaaggaataattacgtaagccactattttttgtaaaatatttataattttacgttcaaagaatgtttttttacatttttacagttttccaaaaaa

SEQ ID NO: 156639 - DNA, 508 bp, Cannabis sativa
  modified_base (476)..(482): a, c, t, g, unknown or other
acatgagcctttattcgtcgaacgcgagatttactgtagcacgcagttcgtcctgatcatgatgcagagttttattatgaccctgcatgagtccaagcgcgtcactgagattttgtagtttagtggcatctccgatggtcgtctgggccttggaacctggcaaaacagtcgtattatggatgccctggttgggtgcggaactgttattcctagtctcttgcacaccaggcgcaattcaaataataggaactgtttcccgttccccacgcttcccgtctgtccaagattaacagcaggcggagcccttgaagttctggggttctgtgatgtaggatcaagcgtctgtgaatttgctgggtcagactgacctctacgagtttgcaccatcgtgttggtagttggatgtcgaataaagcgagatttgtgatccttctctcaatgaaagcaccaaaatgttgacttcacttttagccaannnnnnngagtctattttataagcgataaacga

SEQ ID NO: 156640 - DNA, 640 bp, Cannabis sativa
taatgctatgtttcattttacctgctattatggttctccttcttcttctgcacgttttgttacttgggagttgttagacaaacttttttattctttccctaatctgccatggctcattaggggtgattttaatagttttttggactttgatgataaaactggtagtaactattataatttttctgatatggatccttttgctcaatttatccataagtttagtctttctcctcttaattttgtaggtagtaaatatacttggcataataatactgtttatgagcgtcttgattgggtgatttgttctgagtcttggatggtgttattccctaatgctactttgcatcatttgcccttttatggttcggatcatcgagctattaaggttgtcctgcaccctgactcaaatcctagtcgaccccataaatctaaaaagcgttttcaatttgaaaatatttggctggacaaccctagtttttatactacagttcaggattcttggaataattcttcccacttttctgataaccaagatgctcttggcatttttttagctaggcaaaattcttgtgtctctgctttgacttcttggcataagtctgttatgccacttttccagcctcgtattcaggatgttcaa

SEQ ID NO: 156641 - DNA, 516 bp, Cannabis sativa
cagtaactcgaagtacttccacgccactgctacggcaaggaggcgcagaaactcaattcagaaaatgaagaacgatgatggtgtgtggtttgactggcagaatgggcttgactctcttgtaagtgattattttacacaacttttttcgtcttctgatgtgaattttgctgagattctacattgtactcctgtcacggttacacctgagcacaatgaaaagttagttgaaccgattgttgatgatgaagtcaggcgagccctttttcagatgcacccagataaatctccggggccagatggcatgacaccgggcttctatcaaaaatgttggactacggttggtaatgatgttaccaagtttgtgaaggacttttttcttgaaggttctctcccaaatgaggtaaatcatactaacattgttcttattccgaaaaagaagcaacctgtgatgatgactgatgttcggccaatctccttgtgtaatgttctgtataaaattatttccaaggtgcttgc

SEQ ID NO: 156642 - DNA, 566 bp, Cannabis sativa
agggtaacagggtaccaaaccccaaagcatatatatcacatcgagcctttccatccagacattatgaatactgcattcccctacggattcaagaaccctcacgtcttgtcatatgatgggaccacaaatccggtctcgcatttaaataattctaatacaatcatgtgagccagcaatgttacgaacaatctaccttgtattttgttccccacttcgttagttggagcagcaagcagctggttcaacaaatttacccatcattcaatcacctcttgggaacagttgtctaagaatttcaaaaaacagttccaggcagcaagggacaggcgacccgaggcatcctcactcactaacataaagcaacagccgggcgagacgcttaaggcctacttaagtcattttagcacaactgctacgagggtgagaaacctggacaatagtacccaacttactacttttcaggcaaggatcactactgacctctccactgctggaggcgagctatgggatgacctacatggtcgcccagtaaaaaacatcactgagttcaatgaaagagctcaagt

SEQ ID NO: 156643 - DNA, 524 bp, Cannabis sativa
ctacttgtacttatagtatggattgatgctaccaacactagtatgactagattcttgagtgcatgtggtattatggtcttttgtactacgaccaagaacattcgagatagagttttatatgttaaacatggtttacatgacttgacgataggtgtatgggcacctaagcacgggttggttatatgtttatgttgtatgtttttcttactaagtttgttgactaatagttcgttggaagttgttttactagcatctagatttactaacaagtatgtttgattatattctataatctaacaccctaaacatgaattttctaaaataataaattaaacacatataaagttctagaaaactttacattggtggcatcagaatattatggctccttccatttagatctctaacctttgtacctttctgtctcagagaaataacaagatctgaacttggatctccttcaagtgttggaattcttcataatctttcacactatgattgagtactaacttgatatgagtggg

SEQ ID NO: 156644 - DNA, 560 bp, Cannabis sativa
gaattcagtttctgaaaagcaaatataccaagtaaatctaaagctttaaaacctcaatactcaataaatacccaaattaagattcaaacaaaattgctccaaaaaaaatcacatcaagccaacttaaaaattaaattgaagattttgaggcaatttagttaaaaagtgaaaggagaatataaggaaaagagtgtagagtttcacttgattgcaagatgttgtgtgttttatcaattcataattccattcagcaaacaaaaggtaaagaaaaaagcttggcccgtggttactgtttacctccggagcttagcagagcagagcagcctttgcctgattttcgatctacttaatcagttttcacatagggaagagtgatctatatattgatcagttatacatgcatatgatgcatcttcaagaaaactctttaatattattaattaatctataatcaatattaatttataattaattatatgattctataagtaattttattcaatgtcaaataattttggaagatcactggacagtaagttcataaccatgtgataacagaa

SEQ ID NO: 156645 - DNA, 819 bp, Cannabis sativa
ccccgggtcctcgactcggaccgggacctaggactcgaacttggatatgggacctggacccaggacacgaccattagaactgggattgaaaactaggatccgaccccggacccgaaccctgacctacaatttgtaccgggacctgggacccgaagtggaactagacttggacccaagaatgtgaactagatctggaccgggggcttgaacctaactcgtagttcgtgttttgatatgggacccatacccggactctccaaccaagaccttgacccagactctccaaccaagaccctgacccggactcagaccgagaacctaaccaacaccctgacccgtaacccacaccaaggtttgagtccgagtcttggtttgagtcttggaacatgaatctgactaagacccaaacccagacctgaactgtgacccagacccgaatcaaaacttggattgggtctcaggttacgaacccaaatccagattcaaacttggacacagacctagacccaagacctggaccgggattagagtctcagacctgtacccaggacccagacctagattgggcactcaaactcaaaattaaaactagaatcaggactttagactagggttgggacccaagatatgacacaagtcttggtcttagaccaggacccggacacggacaaggacagagacccaagatccgaagtggaacgtgatcgggaccaaagaattggatctggcccaacccgtattcggcgtctagatcttcgaaccataccaagatccaaatctagaacaatttctagacaaagcatccaaacccaaactcgg

SEQ ID NO: 156646 - DNA, 653 bp, Cannabis sativa
acttagcgtataatatacattatagtaagtgtaataacttgaaggacatgattaggaatcaaggtgacctccgggatcaccttgaccaaaataaatacagatccacggtctccacaggaacgttaaacgaaggaatcatggcagaactcgccatactccaaaaagacattgcccgagtctcccggagacagaaaggcgatgactccgactctgattgtgaggaccgggagccatgtgcccaacacatcctggaagcagagctccccaaaaattttaagataccagagatggcagcttatacctggaactctgaaccaagtgatcacctgtcacggttcaaccgagtcatgacagtcatgagggtcagccatgacgccaagtgtttgtgcttcccgcttactctaagcggatccgtggaggaatggtttaagaaactggaaccaggatccgtggattgctggaataagttgcaaaccagcttccagagacaatttgtcgccgtaaggaaagtcaatttggaggtcaccgccttgactaacaccaagcaactgcctatgaagacactgaaaaatttcatcaagagattccgggaagaagcctctaaaacaaagaaagtagatgacagacagcagcttgctcttctccaagcaggc

SEQ ID NO: 156647 - DNA, 519 bp, Cannabis sativa
attagcggtaaaactacataaactatttgtgacatttaactgatttgagaaatgtaactaaatgactttatatctaactttggtaatagttaatgtcatttttttttaaaataattaagcaaatgtccatttatattttttaatacctaaaatatccttttattatataataggtatatatttaattttttcaatagaaattagaaacgatgcagagcaatgaaaacctttttacttatgttataggactcactaacttcaccatttcctttctatttatgttataggactcactaactttaccattttggtttgtgactcctctccttgtgttataggactcactaactttatcatttttagttgtataggctcctctccttcagctgacccaaatttaatagtgtaaggagactgttcagcaggacctggttttatcaatctctttccaatttctttaggtacctataacaattataacacttgctttgattttaactaatataagaattcatatac

SEQ ID NO: 156648 - DNA, 856 bp, Cannabis sativa
tgaagtttgttccttcttgataaaaaaaaaaaaaaatatatcttataactactatcatcaaaagtcatttaggcttttgttttagaaaaagtatttgtttagaaaaggaaaccaattttaaacttaaagaaaaactaatatacaaaccaacaaaatagattagtctcaatttttggttgtttttacattaattaaagttaccaaatggtatatttttttaaaaaaaaattaacgtgtttaaaaagttataaaataaccaaatagtattttaaacacatagaattaaagttacattatgaacattattacatctattaattttactaataagttataaagttaccaaataatatcttaaacataaataaaattagttacattttgaaaattattatatacaccaattttattaataagctaataatttttgtaggtaataaaaatattgctcaaaaaagacgtgtaaagcattttaaacaaaagacaactttttttttaacaaaagataacatagtgttacctaaagacaaatttttcttatgtaattgattccataatatttaagatactattaatttccatataactagtttaaaaaaatatatcaaatttgttccataaaataagtttatttaaagacatattttatataatttaaagacatcttgcaagtagcgaaattttcattttgaaattaagatagtagataaatatttttttacaaaaaaaaaataataatataataataataacaagacaaaaagtaagacattaaggaggtaaataatttttataaaagaaaatggaggaatacacataagagtgagacaaaagaattaattaaagaaaaaaaaaa

SEQ ID NO: 156649 - DNA, 741 bp, Cannabis sativa
atatattattaaattggttgtcgaaaacctcggtcaacattttggtgctctcattgagaggtgaaggaagcatctctagatagacaacagtcttatcagctcaagtaacaatggtggaaactcgcaacacacgtcagtcccgtcctcctcaagacgctcaaaaccctgaagacgaggaagtggcttcaagagtcaacgtggattctcaggaacgagagcaggccaatgatgacgagtacgaggaaaaccttgacgagtacgacgcctacaacaaagacagttacacagagctattgctcttaagacaaaaggctgctgatcatgaagctgagatcacagcccaaaaagagcaaaacaaaaagatgcaagaagtgatgatctccatgcaaaaagccatggagatagcagggatccacatacaccctaaagccatccctgcagcactcaaggaaacaccggaagagtcctcaccaagcactcagagcaaaagtccagggagcctagccccatacggtatccctctaaaggaaaccaacagaaaaaccctacttccatcccagggaaaaagaaaaagatggaggatccgcgaaaggtccgctcagagttcccgaaagggaaaggtccgcagaggggaaaactccaaaaagggacccttggccctcaggatcgagaggaccgaaagagcgtttctatgcatcaggaacccaaggaaaaaggaagagggaaccgaagataccctcc

SEQ ID NO: 156650 - DNA, 693 bp, Cannabis sativa
tttgtaaggccaatgtggctaatttttttgtatggccaatgtggctatttttttttttttttttgtacagccaatgtgactagttttttggttttgtaaggtcagtatggctagttttggttttgtaaggctagtatggctagtttttggttttgtaaggctagtatgactagttttaattttgtaaggttagtatgactaattttagttttgtaaagctaacatggatagtttttggttttgtaaagttattatatggctaattttattttgtaaggtcagtttggtctaataataacacatcaaatgtagtgtattcaccgtcagcaatggagatgagaatagataagttctagtattttacttcaaagaattctatgtgactatttatataaaatttcatgttttaatttattttattttatttgtaagggaaatttcatattttattaaatatttatcatgtattaattttctctctttattttgtaggtgttctattagtggggcggatgtgacaactctcagttttgaagtttttttttttatattaaggttttattgtctagttctcctgggtatctctacaagtccttaggataaacaatgaatggtttagatggaagaaaatcctcttctggttgcgtaattttgttacttttgttattttaacctgtatcggtttcccttcaa

SEQ ID NO: 156651 - DNA, 628 bp, Cannabis sativa
acgttaaattgcaatcatgttgcacaaacatcgcaggagctcgcaaaatttcacgcatagtaatcgcacatatattgcactatatcgcccaaaatctaataaactttataagctactgtcattaaaaatcgcaaaaagattgcatagtaatcgcactatatcgccaaaagtctattatacataagtagaaaagtttataagctactgtcattaagaatcgcacagtaatcgaataaaagtcgccaaaaatatacaacaatacaagtgaagatttataagagactgccaaccaaatcgcacaagaatcgcataaagtcgccagaaaaaatacactaaacaactgaacatttataatgcaccgttaagtaaatcgcacaaatatcgcacaatgtcgcatcaatatcgcacataacacacagattacacttatagcaaagataaacaacaaaaatagagaaagattcacgtacccttttctcaaacagtgcagccacatcaggttgcttcacatcgtgtttcgtgactgagtcgggggtgctccagttcaacattcgaggaaatcgagtccatttgcactggccatacttcttccccaaaacttgcatggcctcaaatgcccaatattgca

SEQ ID NO: 156652 - DNA, 510 bp, Cannabis sativa
  modified_base (345)..(346): a, c, t, g, unknown or other
aaaaattaagcaattttattttttactgaactcgatttcgataaaaattgagaaaggtatgtttttttggaaaaatcagatttagggtgtcaatgggtgctcaatcgcacgcattaggcttcgcacaacgaagccgtgcgtgcgcgtgagcctcaccaagaatcttgcacgtccgcccgtgcctatgctgcaagcaccggggttggacgcatgccagaccctgctcctctcgccatgcgtacgcggaaggctgatttgcagcctcctggggctgcacgtgcagcccctcctgggcagccaacaccatattgcgatttttgtggtttttccccaaaaatccaattnnttatgggattgtttcccaaaatttgatttttgccaattttaaatattgataattatggtaagatttaaaaatttgttaacttctttaatatttatatattatttaataatcagattagatattttgatatttaacatattttaaattaaataattaataaattt

SEQ ID NO: 156653 - DNA, 562 bp, Cannabis sativa
  modified_base (422)..(452): a, c, t, g, unknown or other
  modified_base (499)..(502): a, c, t, g, unknown or other
tcgcatccttgcggcaaccttggaggataatgctcatgatttgttcacccaattacctgaagcatctatatcaacttaggagacttttgtagatctattcttgacacacttctaagccacgatcacgtacaaactgccttatacaactctggctaacataaaacaggaagtcggtgagtccttacatgattattttaaatgttttaattctgaagtaaccaaagtggagaaggccccctagtcttcgttggtgtgtatgttaattacaggtctctttccaagaactgatttttggaaggacttacaagcaagacggagtcgctggtggaattctttgccatggctaagccacataagagaattgagaactctttggctgaactagaaagggtaaaggaaaaactgttgggttttgtgccctnnnnnnnnnnnnnnnnnnnnnnnnnnnnnnnactaattaataaatatcaaaaattgcttttatgttgcatggttcacnnnntttatttcatgattatacttaatgaataaattctattaagttcagaacatatataaatat

SEQ ID NO: 156654 - DNA, 695 bp, Cannabis sativa
  modified_base (621)..(631): a, c, t, g, unknown or other
gatctgagcccgattctccttcaagttttggattcttcacagttttacacactatgattgagtcctagacttgttatgggtggacatgcactcattcactatagactcgaaatttatgaagaacaataaatgagattttgaaatagaagaataagaaggaatgaaggctctcaaaaactctagttgtctcacagaatgtaaactaggttatatgagttgtattggataatgagaccatcctattccttttatactatttcacctatggttatgatttaaattatatgaaataaaaaatgataaaataatagcaaaaaataagcaataatggccgaccatatagatgggccccactagttatgattttgccattttttctatcattatcttttatttcacaaatgtcatatttattattttaatgctataaatacaaaaactatttttttaataattataattaattattaaataaaattgtcatttatcttatatattaattagattttacaaaatctcttaattaacaaataaacactaaaatctcttttcttcacaattaagtcattacttagcaaaaattcataaataaaacatattctaattttaaaattataattnnnnnnnnnnnatcaattaactgagttttacaagtagtattatctcaactagtgcggggaccatgagcctatata

SEQ ID NO: 156655 - DNA, 513 bp, Cannabis sativa
tttaatggacaaaaattctaattaacattaaacttgaggagtgctaattacaacctcctattataacttattagtcaacctccacatccgaaatcacatgccgaaatattttttttcaattttttttcatagtggtattcgttatagttacagtatcatctctgtaaatttttgaaaaaatttgaatagtttacagtaccaaaaacaaaattcctgatattccagtttaccacatgttcgaaaaacttcaaacgtattttcggcattgtaaactattcgaattttttttaaaatttataaggatgatgttataagaataacgaacaccccgtgaaaaaaaaatgaaaaaaaatattctaacatatattttcgagcgtgaagattgactaagagattgtaacactaaggcgtttggtaaggaggaatgggaatgggaatgggaatataagaatgagaataggaataagaatggaatgaaataaaatttagaatgcataaaaaaaattgataaaa

SEQ ID NO: 156656 - DNA, 609 bp, Cannabis sativa
aatctgaaatttatttggaattaattatttatggaatgacataaatacccttgggagggtgaatgtgtgtattaaggccctaggggcaaaatggtcttttgaccatatttgatttacacttaataaaaattgatttttgagggaaatagaaaaattttctggtgttatcccctatctcacccgacccctctctctctctccctaaccctctctaaattttcgaaactaaattggtgaggattgcctgttattggtgttaaattaagctttgtaattgggaattaagcttgattgtggcttgaatttgaggtagttcttctcttcattctttaattttgaatttgtaattaaatttagaattggaaagcatgctcttttaagttttgaatgttctttgttgcatgttaagtggattggtgttaatcttgttgaaattgagcttgttgttgttgtatgcttcattgttgagtttgggcagagattttatgatattttctaggttggaatttcatttttaattggtgttatgttgctggattttaataggaatgtgttgggtttaagttcatgttcttgaacttggaatcttgttaagtttaggcaagattt

SEQ ID NO: 156657 - DNA, 548 bp, Cannabis sativa
acgaccttaaaagttcaggggtataatttaatacatgtcaaaattcagaaaaaaaaaattcataattaacttattttttatatctatatacaatcacgtagtttaaaaaaaattaaaataatttagagtagagaaactagattcaaataatctatcacaaacctatataaaataaaaaatacaaacgtacaaaaaattagttcaacattatttgtagcacattaattttttccaaattctgtggaggatatcttaaattatttggtaggttaccataaaaaattaaaactaaaactatttagatgtggaacacaaaaaagggtgtgcataatatagaatttctctattattttattttatttttaataaaaatcataagatctattaattaataaattcgttcaaaataatataatacacttcagaggaatagtcctccaactaaagcatacgacctgtagaaaaacaagagtctcttgtcaagcaatgaacatacttatttgcagatcgttttacaaaatacaaatcaacaaaagataaagccaaaa

SEQ ID NO: 156658 - DNA, 659 bp, Cannabis sativa
tattatttatgttatattaatattctattattaattgttaaaactatttgtattcttctactaaaaaaataaaaaatattgatattctttatatagctcttacccctctatgtgtatatatatagtctcaaatacaacttaaagttttgtatccacccttcactcttaatttagaagtttttgttattatttactttttctaattcatattttttcttttcaaattttttagccatgactatttatttttaaagttttgttattattttttttttctaattcttgatgttgtttttcttcttcttcttctccagattactatgacaagggatagtcatagataaatttttctctcatggcagattaccatgaaaatggctatttgtagacaaattcttcttcactagatatttgcatcaaacataaggagaacatcaaatttaaaaggtcatgtggtgttctcttctactttatctaatttatcatctttttttttgttttttgtatttaatttatactaataaaaaaaataaattgataaaaaatagaaatctaattgacattttatattgaattttttatacatagtgacagtaataataatatttattatctcatatttcacatactatatttatttaatttaataaaaaagatta

SEQ ID NO: 156659 - DNA, 711 bp, Cannabis sativa
gaactacatatatcaataattctttaacccccaagtgttatagatatcatgtggagttatgaatatagtctagagtttaaaagatataaaacatctttgaactgcatacattgtttcttaacttcttccacccctatcagatcaaaagatctttttattaaacaaaatcttaataattgcttaagaaatgacaattattcataaacattgaatttaaattctaagtgtttatgtgatattatctctttgcaaagaataatataccatagattttacatcaataataaaacacaaaatacataaaacatgataaacatataaatataattggtattagcatacaagttaaagtagatatgaagctcaatttcataaaagaaattcataatgaaaatctcttaaagagaaaattttattaacattctcaaaaatatcataatgaattatttgcaaaatatgaaataaggaataaaatcccaaactaataattgaaactaaattgttcattgactaaaacaattaattaaaaatttaaagaagataaggagcttcatcttcaacttggacaatctccacccttctgtccaaccatctgactcaactcgctaggataacaatccaagtttaagcagctgaagctgaaataaaagaaaatgaacatggttagtgttgggattttataccctaaataaaacccatttcaatctaatc

SEQ ID NO: 156660 - DNA, 952 bp, Cannabis sativa
  modified_base (454)..(456): a, c, t, g, unknown or other
gatctggacctagacagaaatccggactcgaacccaaactaagaccagttctcgaactccgacacgaactcagactcgcaaatggaactagatccgaactaggcatagcaccaggaccaggacctaaaccaaaacctgaacctagatcaaaacacagatagagacctaaacccgaaccgtgattaggactcaaacctgaagctagaccgggacccaaacacacacaataactgggacctggacccagaatcaggataaggaccagggaaacacaactaggaccgggagctagtacccgacccagacccgaacttcaagattgggacccgatattgggatccgaatctggacccagggcttggacaaaacccatagtcggtgtttggatttgggactgagccaggacctgaacactgacaaggacccgaaccacacccggacctaaaccatgtcnnnaacccaaaagtggacccaaaccctttaactgtgacccaaaattggaaccaataccggaagttgaccgggcgtggaactaggacttggacttggaatcataactaaaatttgaccttggtccagaaccgtaacttgaacaggacacggactccaaatctgacctagacccgaattgggaggcggagccggatcctaaccaaaacctgaactcaggttccgaacccgaacatgaactcagatccaaaaatggaaccagactagcgacacagaaccatgtcgggagatagaactgcaccccagtctcgatcctaaacccaaactcagaaatgggacttggacctgaaccataaccagaacgagacccgtgacagtgatctagatcttgacttgggattccggtaaacggggcctggaacaccagtagttggtgtctagatctggaactcagactaggtccagaacctagacgaagaaccaaacccgaacccagacctag

SEQ ID NO: 156661 - DNA, 813 bp, Cannabis sativa
tctgattgaacccttcgtctgatgcaaccttcggccaaccacccagcaaccacactgcaaccattgtctgattgaaactttcatctgatgcaaccactgcgcaactattctgcaaccatcgcctaattgtgtaagtaatagtgtaagaggtattttggtaattaaaatcgcataaaaagtataaatattgtccacactttatggaagtacttttgtaaataaagtgtcaattttttttttttttttatgtaataatttcttaataaaatgacaagttttaataaaaaaaaatacaatataattaccattatgctaaagtaatcaccactctaaaaattaaaattactcttatacccttattttattccctcctcctagtaccataaaaattgaggatattcttttttgcaatacactgatttttattagcattccaaaaataaacaaaatatcctattttattactattactgttaatattacctttccaggtttttactttgccactcatttttgtttcctaataaaccaaaaaagtacaaattttgggagcggtactgaaaccggacctggccttggcagagaggataagagccatgttccaaaagggggaacttggaaggaaagagagaagggaggaaagagagaagaaaggaagattgaatatgtgtatgcagtaatcggtgtgcgcattatgtttatgggtagttaagcaattacccaaaaaattttcccttaaatgcaaagttattaaaattggtaatatatgcccatttaaacaattttcctaaactacccctctcatttctctca

SEQ ID NO: 156662 - DNA, 593 bp, Cannabis sativa
ggtaaaataaattccaacaaagagggtggtggagttgggtcaatacgaaattactttccaaccccgaacagcaatcaaagggaaagccttagcagactttatggtagaatacacaagcaaggaagaaagcataccgaaaagaaaccccgagtgggtacaaacacctcaaccaagtaacagtgaagataagccgacttggaaactacacgtagacgagtcagctacaaattagctatctggtgcaggaattgcccttgtcacgcctgggggtaacgcctgcacgctgtagtaaagtttggattcaaagaatataataacgaagccgagtatgaagctctaatcgctggtctaaaactagcccgagagatggaagccgaacacatcgaaatctgcagtgattcacaacttatggtaaatcatgtatccacagaatacaaggctagcggagaaaagatgatagcgtatgtgagcaaaatttgtgaatttctttcacaattcaaaagttacggtctcagacaaattccaagggaagaaaacacaactacagatacgttagctcgattggcaagcagtaatgtaagtgataaggcgaa

SEQ ID NO: 156663 - DNA, 917 bp, Cannabis sativa
  modified_base (763)..(775): a, c, t, g, unknown or other
cttcttaatctgtgactcaccagccttaacatcaacgtaaccgacgacattctcaaacctggttgatccatccactggaacccgagtcagctcatctcgtgtgcaaattttggggcgcccaactccataatccaccatgaacgtttcttccctcaagcgcaaaacttgagcttgtagaacatttccattgcgtaagagaaaactagaatttgattgggggagtaaccagttcatatagatactcattttaagcttgcttgatttaaaaatcaagggctttgaactagatattctctgaattgagtgggagaaaaatttctgcgtacaaaaactcaccctcaaacactagcaacctccattcaacccacgctaacaactcctagcaaccttcgaagtcgactaaacccccagccaccataacgaaccaccttcaccagcagccaccttcaaagctctgtcatgtcgagcttattatcgagctcaaattcctgtacctgttatattaattatttcattatattaatttaaatatttaaatatttttttattcaaaaataaaaattaaatgatgtggaccaataaatatatgacaagtgtacacttacttgtcacttaacaatagatatttttgaatattttagaaccataacagaaggtatatttttgccttaaattaaatttaggcattaatttgtgtagcgtttggttggaggtaatgaaatagaatggaatggaatgaaaaggaaacaattttcattccatnnnnnnnnnnnnntgcattttaaagtattggaatgatattccaatagaatgctctttccaccattttggtggaataactatttcattttataaaaaaaaaaatgacaaaaagaaaaaaaatttaattatttttatatcaatttttttttatgcat

SEQ ID NO: 156664 - DNA, 525 bp, Cannabis sativa
taaacgtacaaatatacaattatgtatattcatcatcttacattacaaaaaatcttacttttagtgacaacacactataataaaatttgtgactaaagataaaaaagttgtggctaatgataaattatcattattatattgtgactaaaaggtctgtagctaattaaaaatataattagtcacaaaaattaagatttattgtgactaaatgtatttttagccacaatatttgttgtgactaaaactaaattagcgacaaattataactaaatattatattttagtcacaaataattttttgttgtaactaaaaagttaccactaaaagtaacagtttgttttagtggtataagctacataaaatctaagtaagttggtcatgaaattagtggtaaaaatgattttaaaagagaattaaaatattattaatattgttaatggccggatatctttaattattttgtttaaaaaaagatacatagatgagagtttataaagagataattagttatatatatatatata

SEQ ID NO: 156665 - DNA, 788 bp, Cannabis sativa
tttatatgcagcatatagatgcagcaatgcatatgctgaggaggcgacgcaccgactatccactgacatttcctcagaatagtatcattctctctacatttgtcaccagcatgatcagcagtgcatggacgaatcacaggggtccgaggagaaactttgtgtgggagggttatatcctggagtactgcagaggggttcacaaggtcttgttttagtaagattttaattgttgaactatgattataagtttgttattgtttagattttctccataattacagaaccagttctttccgagatggatgggtaatgagttcatttacttcattttgcatcttcccgaccagcggtactgggtcacagttgaagttgacatagagctgtggaaaattaatgtgtacggctgtgattctagcatttgttattggaccgccatggtatccatcttgaagacttgggaagaactgttgccctcgctaatccatgcaaccagggattttccacttaataaccagatcctggcgctaactaataaggagatcaccgtgcttctgaatatgcatgcgagtcgtgccactcacgacttagttccgaaggcaacaactaggtacatagcgataaaaaagtactttagtattaaaatatactttgcattctactaactttatattttatattgcatttagtggtaattgtggcgtttattgcattgagtatgtggagcatctcatgatgcaacgtggattaactgatgtcacgcaaggccggatcaagttgtttcatgaacg

SEQ ID NO: 156666 - DNA, 557 bp, Cannabis sativa
  modified_base (490)..(502): a, c, t, g, unknown or other
tataagagccatcatttcgtgggtgtaaggacccaatggaagcttgaaacggggacattacactaccaaaatgttgaataatgtgtagatggatccaatagtcgtaaacacatgtgtgtcaggatagctcgacccatattttgaaagcctacaataatatcagttgtgtcgtgccaacccataaaaaaatatataggtcatactgtatcgtgtcaacattttaaaaggtaagttcagcatggtccgttaaacccatatttttgtgtcatgatttacttgggccgactcatttttcataaataggttagcttgtttttttatacgagctcaaatttgagctccactttactattttttttttttttacaattaatgagttaatcactaagctatatgtattttttttatagtttcaattgtttttatataattttttaataataatttgttagaaaaattactagtaaacccaagatcaatttgtatatannnnnnnnnnnnntaataatatataataattaggtatccatagcaattaccacaatttgatagtgcaa

SEQ ID NO: 156667 - DNA, 520 bp, Cannabis sativa
aaactgacaaaatgctgagttggaacaggaggcagtcgcggccaaggcggcacaggaaaacaacacccaaaactaacctaatcccggagtctgaagaccacgaggcagacctcacggttcacaaatcagaaggcaagagacgactcaagagaatcctctgaacgctcaggaagaacaacttggggaaactgagggtctccctgataataaacaaacaaatgaccaattggagccttctcacagaaatgagaatagaaggcgacccggtaccaggaaataggaaatcccccgtgaaaacgagggaaatcctgggactgaacctgggacaggtgggttgccaccgagacatcgccaacatcctttttgcaccaatagggaaggggcacgtgcaaaccccggtagggggcatgcaacgacccatacccaagggagaaggacgggatgtgatgaggtgagtgtcagctcaagatgcacaagaacccatagtcgatcaacatgagggggagacgaaatgcatcgc

SEQ ID NO: 156668 - DNA, 730 bp, Cannabis sativa
cgtggtggtgccacagtcaacgtcaccgcttctgcagatgctttaactatcgtagatcgattccctatctcagactctcgctgagggcagtgggagcactaagtaagatttatacgactccgcttggtcgacttaatattctctttcaagtcacttactcgactccctcttcatcattcacttatattttttttttttcaattatgtgaactgtgtatttactttttaatggaaattatggattggcaatacattttattcctagttttttagggtttttggttttttcctcctttcgacaaataattgagaacctatcgacgactcattgagagaggtttttcctaacattgagacattagtgtcgagaaccttttgagaacgtattgacaacttgtcgagaaaggtcttccctgaccttgagacattagtgtcgagaacccatcgataacttatcaagaactcattgagaaaaatacgaatacacggaataccctgaacaatgagatctcgcaatttcagcaaaatttatatcaaaaaagaaataacaaccacatagatctaataaaaatatactatatttttacaattatttaacaaaatattttaaaaaatacttacccattaatctaccatgagagggaggtagaggaggggcggcgattgagttgatgagagaaggttggacggctgagtataccctaatgctaaaagagagagagagagagag

SEQ ID NO: 156669 - DNA, 552 bp, Cannabis sativa
ctaaggggcaaataggtcttttggtaacttctattttgtcttatttgatttatattaaggctgtgtgtattgttttattttaaaaaaaaaaagagaagaaaggaaaagctcttgcttaggatagaaggaaatcaaggaaaagtgtggaaataggtttcatctctttctttttcctctctctttctctttcgatcctctagggcagcagctggagttgggatttttgagtttgtagcaaggagttttagtgatttttgggagctttgatccaaggtaattcttcatttttttaattttcttaagtttaggttaggtttctcttgtgaatttaggttctaggttgctgtgtggtttgaaatggtttaatttagtattctgaaaatggttggaggttgtttaagtttatttgaatggaatctataggttgaattgagatttgagcaagtgagagtttaagaactcaaacctagctctttaatggtgatttgagaatttgtgtggattgttgagttttattgcttgggattggtttagtataatttttacaggtat

SEQ ID NO: 156670 - DNA, 640 bp, Cannabis sativa
  modified_base (596)..(597): a, c, t, g, unknown or other
taggtcagcaaacgccgaacgtcattcccctgggagaaacggaggatgacccgacgatgaatacaaccaatggttagccgtccaattcccggttacgagttccactcttgggcctagaggtaggcaggtagaccttgtccgggaattcatcaggaggagccatacctgaccgatccaactagaataatggtattattccacctgtcgaccaagcgaatcaatcactaaggcagccaagctcttctgtgttaaataggttgggaacaatccatgacctaagaaacgatctaaacagaagaaggggaatagatgaacagaacactacaacgatcttacagcccggagcccatactcaaatccccactcagaaagacgctgacgtaatccaaatcgaccaaaatgccgagcaagttagtccagtcgtacaggcccagcttgacgagttgaagaatatgtttcatggcatggccgggcagcgtaataatgatcttgagttagaccgtgcttgcggaactcccttctcaccagagatcaatctcctacaactgcctcacaagctcaaaatgccaacgtggaagatgtatactgggagagannatcctctttcccatctcaagtattttgagatgcaaatggattt

SEQ ID NO: 156671 - DNA, 760 bp, Cannabis sativa
  modified_base (39)..(72): a, c, t, g, unknown or other
  modified_base (178)..(187): a, c, t, g, unknown or other
  modified_base (730)..(733): a, c, t, g, unknown or other
gtgtttatttcatagttttagaaattcatattaggatgnnnnnnnnnnnnnnnnnnnnnnnnnnnnnnnnnntggtaaaataattccaacagcttcttcttccaacaactggccttagagtcatggtaatgatttactttcatgtaatatgtattgtttgtgttgatttggatggttnnnnnnnnnnttatgtgcttatttgatgaatgtatgtgttgtatgaattttttccatgaaaaatatttttttttcttactgaaaatattttatttggattccttgtgaaaaattaatttgttttttacggaactcgattccaataaaaattgagaaagttatgaaattttgaaaaccaggttaacatggtgtcgaagcttggtcctcgcaagcaccaagagtttcggacaaggaacaccacgcgcgcgctcactcagacattccgtgtcttcagacacggcacgccaggcttcagacacgactcgcccgcccagacgctgcactttcgcctgtgtcccagcctgtaggggccaaagaatgccgcacacggaaccctgcatctcccctctccacgcacgtaaggaggctgcatgcagcctcttgctacgcaaccaagtggttttccccaaaaatttgatttttgtgggattttttgcaattttcaaaccctaaaattaaaataaaatgttattgttgatatatttaaacttaaatatcattttttaaattaatnnnntttattttttaatagattatttttaat

SEQ ID NO: 156672 - DNA, 616 bp, Cannabis sativa
  modified_base (231)..(242): a, c, t, g, unknown or other
acttgttcttaatggtaagcttgttcaactcccggtaatcaatacacattcgcaggagccattcggtacggtacttgttcttcttcccaaacaataccggagcaccccaaggtgagtagctcggtctgatgaatcccagattcaataactcttgcaactgtatctttaattccttcaactcagctggagccatttggtacggtgctttagatactggatccactcccggannnnnnnnnnnnacaaattcaatttcccgggtaggtggcaatctcggcaagtcttctggaaagacatcgaggaacttgcttaccaatctcatattctcaggccctgatgtcacaggttggctggtatccactgcggtaactatgaaacccagacaacctcttctcatcaggtccttagctttcaacaatgttattcttggtatatgtgccccctgaattttacccacgaacaccgccgggttagcactatcgggctcaaacaccaccatcttccgtttacagacaatcttcgctccatatttagacagaaaatccatcccaggattatgtcaaaatcagacagttgtaactcaattagattagcggtcaactcacaaccgtcaatc

SEQ ID NO: 156673 - DNA, 566 bp, Cannabis sativa
tagttttttattgattttgtttgtaattttagtgttaaagatagattttgttagatttaagaatagatttaggttttagattctcagatctgtgatttgggtaaggtccgatgtaggtccgattggggtccgatgaggtctaatagaactgtgagtttgcgaggtaggagacgtaggtccggtggagggtgtgatgggtccaatatggggttcgatgtggtccgatatggggtctgatgggtccgattgggtccaatgtgggttcaacggtgttcgatgtgtggtccgatgagggggtccgattgtgtaaatggggtgatgtaaatggggggtattttagggatattataaaagttttcatatcctacaaatataaggtattatgagtttagggaaaaaaatttaagcacgtgcaagcatgaaaaattaaatttccctttcaaaattccactctttaacctaactttcccattctcattctttatcttcaccatggatgcttcatcttcaagagcaaagaggcaaagattcttaatgcaacaaagggaacaaaggtccaaggcaag

SEQ ID NO: 156674 - DNA, 562 bp, Cannabis sativa
tttatttatttaagataagaatgtaatattttaaaatattttagtacattacccaaaacaaatataatataatatttatatattttttttttattttttgctctataaggaggtaataaaattttcttataataataaaaatgcattgccaaaaaaaataagataatattatgttatgtataaatttttgataagcagcaaatattatatttagtacaatatttttagaaattactctaatgtatagtgtatagtagtatttttaagaactaactgatgaaaaaaaataattacgataataataaataaatcatatatttaaaaaaaaattattgagaatattataacttaaaaatttaatgacaacattataacttaaataaaaagtatatttatttattaattattagaggaaattacactacttacatattttaaattgatgcttttaatttttacttgctcttttaaaattattatgtttatctcttttttcaatcattctaccaattttacccctattatttcataatagtcttcatttttctctaatcaaaatttt

SEQ ID NO: 156675 - DNA, 648 bp, Cannabis sativa
atttgtgtgttgtgttggctgactggattgtgataatctaggccatcgcaggggaaatttggacaactcggtcttgtccctcgcaaaccgatatgccgcagggcatattccttgagacttttgctttgcaacttcgtgtggtgtaagcggctgcctaccaaagactatctccgctggactcattcttgtggcagaggactgttgaatgttatagcaaaattgtgtcgtatcaagcaactctacccaattcctctgagttgctgttacataatgtcgtaggtattcctcgagaaactggttcatccgctcagtctgtccatcagtctggggatggttagtcgtcgagaaatttaagtctgaccccaacaagtttggaaagtgaggttggattgactatagggtgtgagacagacaaattggatttctcaagagtgacatctgattgaataggcaaagaaggcaaggaatgaccttcgctttgatgttcgtgtgccacgactttgggttgaggaaatgcagtttggttatcctgaagagtttcccaaagctaatattcttgtgaatgctccccctcgataccaaatttgggaaagaaagattggtgttcaaaaaatgtgacatccatagtgttataaaccctttttgaaa

SEQ ID NO: 156676 - DNA, 677 bp, Cannabis sativa
tgttaatttattttgtagagatttgtattattttttagaaaaatttgtttttattttagttattaatattaaatttgtaatttaatatatatatatataaaattgtttcacattagtttttttttttagattagaaaattaaatatttgacttattagttaaattattttattctatgttaactttttgatactaatcttacccaaaaataattattaaaaatttattctaaatacttatagatgaaagatcttcatttgaattaattattactactaaaattaaaactaaaagtaccaagttactctctgaagcaaaaataatatgtaaaatttaacaaccaggttacttttttaaactaacacgttactttgtaaaactatagcacaacacacactacggataccatgttactttttgaagaaaaattaaagctaaaaatttaactactaggttactttttcaaattacaaggttatttattaaaaaataaagtcacaattcaacacactcaactatatttagtgatacatgtcttaggttacttacaaactaaaatgtaattactttactcaaaaatagaatcaaaattaacaaactatacaaaaagcataggtaaaagtgccaggttacaatttgaagcaaaaataaaatttaaaattcaacaactatgttac

SEQ ID NO: 156677 - DNA, 537 bp, Cannabis sativa
aataatataattcctcaattaactcattattatctaattagggctttgctaatcattttcttaattccgggtattacatctaatgccatgcttcatgaaacttcttctgttgatactgcaactcaaaatggtgccgcagaacgtaaaaacaaacatctttttgaaactgcacgtgcccttttgtttcaaatgaaagttcctaaacctttttgggctgatgcagtttccacgacatgctttcttattaatcgcatgtcatcctctgtccttaatggatgcagtttcccatttaaaattctttttcctaataagtcattgtttccagttgctcctcgagtatttggcattatttgttttgctcgcgatgtctgcccgtttgtcaccaaattagaccctaaggcactaaagtgtgtctttcttggttattctcatcttcagaacggttataggtgttattgtcccgatctcgacaaatatcttgtttctattgatgttacctttgtagaaaataccccttatttttcatcttccactact

SEQ ID NO: 156678 - DNA, 638 bp, Cannabis sativa
  modified_base (124)..(130): a, c, t, g, unknown or other
  modified_base (366)..(368): a, c, t, g, unknown or other
tgttccttgtttgattacatcttagatggctcccactcaacagtaggagtttggttaaaattgtacatagaagcacatttaacctcttactattgtttctcagggatatcttgttgtgacatannnnnnnagtctgaaactgtaagttccttctaaactaagtcatcaacatagaaatctagtattaacattaatgtaaaatacttgcttaagattaagtaatcattcgagataccataaaacatttcatgaagattagggaatttttgcctaagtaattcgaatagattatgaaaaattctactatcttattctcaaaattttgataagttatttctatccatataaatggttagatttactttnnnagttgtattctaaagttcctatcacaagtgtcatcaaaatgaagatgggcttagaatgttaaaattctcctactcaaataaggtattgtgatactatgtccaagaactttattggtatctattttattacagcagtaatatattaattggaacagaaatacaggatcaagaataagttctaataatatgctaatttggaaaacctaaccaaatcaactccaaaccttaccaaaccttccagacctgaatattataccccaatagacatat

SEQ ID NO: 156679 - DNA, 605 bp, Cannabis sativa
  modified_base (550)..(571): a, c, t, g, unknown or other
agcagggtgctcctgtagtgcttgctccagaaattccagtggcacctccccctgctgtccaggtcgaaccagtggttgcagtgaatcagatggaacctttgtatgaaaggttttgtaactagcacctccagtttttctgggaggtccggttgttatgaaagccgagcaatggctaacggtgattactagaatattgaatttcatgggcgtcaccgaaaatgatagggtggtctgtgccacttttcaatttcaagaggatgcgttagtttggtgggacatggtgtccatgatacatgatgttactacaatgaccttggagaaattctaagagttatttaatgccaagtactataacgaggtagtctgaagtgccaagagaaaagaattcacccacctgactgagaaagaaaacatgagtgttacaaagtatatgacccagtttgatcgcttggtgaggttggcctcgggtatcgtgccaaccgatttgagtaaaaaggagaaatatctggatggatttaatgcaaggattagactgttgggttttatgccnnnnnnnnnnnnnnnnnnnnnntaatcagatttgcttattaatatagatcagaaat

SEQ ID NO: 156680 - DNA, 551 bp, Cannabis sativa
  modified_base (270)..(275): a, c, t, g, unknown or other
aaatttgagaatatcaataggaactacaataatcacatcaactttatatgattggaatataaaaataatgcattatgaaaaaatttgattcataatttcacacatttttcttcttctacatactctcacacctttttttttttgttcaatttataatgtttgattcataaaaaatattttctataaaaaaatacttttcttttattctgcaaaataaaaacaaaaaaaaaaactccacacatatatagttatgaatatatatatatatannnnnntgaataattatttaattttaatattattaatttattttatatttattgttatgtatttttttaaaaaataattaatttaaaatggatatttttatagaaaatttattaaaataatagttaaatattaatttataaatttatgctctaataaaatattaaaaaattgagagaattaaagagaaaaaagaaaaataggtttagagagattatagactgtcatgtcaccgcctgatattctcctttatatttattctatataaaatgtgtctatataac

SEQ ID NO: 156681 - DNA, 674 bp, Cannabis sativa
gtaaaatgacacaaaaactttttgtgtcggttgtgtaaaccgacgtaataacagcagacgcaaatagtcaagttatttgcttcatttctaaaccgacgctaactttttttttttttgcttcgactgagaattgaagtaaaaagtacgctatattagcgtcagttttggaatgaagcaaaaaacttagcttcaagtaataaccaaagctaattagattattgcgtcggttacaacttgacacataattttacggattttttttttttactttttgtgtcggctataaagtgacgcattgctgtaggtaggaaaaaattgcagatttctttgcaatttttcccacgtgcatttttcgatattaaaattagctttcataacaatatttataaactataaaaaaaaaaacatttatatgactaacaataacatttataatataataatgataagattttcatgtaacttagaaaattatataactataaaatacatctaatataatcaaaagtaatgatcataaaaattgaggtctacatgtcataataaaaaattaatataaatatgaagtatatagtatcaccaaaagtaacaatcatatagctaaaagttttatatcctacatgtatcataacaaaatgtaaaaaatcgcatactcattcttttaatatataaga

SEQ ID NO: 156682 - DNA, 500 bp, Cannabis sativa
atagttgggatgcatctggcgtggaccctagtcatatgaatggtgcactctccggccacccttacagggacgtgggaccattcttataagatggttaggagcttctagtggctgaagtacgaagcaccgcacgctgccaaccctggggagtagagttggcaagcatgtgaccctctgagggttcatgatataagcaccattgcatcttggctaacggtctgcgctgcaaacaactaattttttattacataaaagaatttatttccttattatcaatactttaagtgccatataagtcgactagtccaagattggtttaagtgatttttttttttttaaaaaaaaaaaaaactaaaatctaatagcaattataaaagtaaagataatatttttactgcactcgacacatatgtacttcattccactctctgtcatgtaattcttctttctgagagaggaagttactttatccttcattttttgcagttctaaattaatat

SEQ ID NO: 156683 - DNA, 771 bp, Cannabis sativa
  modified_base (49)..(49): a, c, t, g, unknown or other
  modified_base (434)..(450): a, c, t, g, unknown or other
  modified_base (691)..(692): a, c, t, g, unknown or other
aattgtttagaagtctgggacattgttcttcctgatgtcccttctcatnacaatttgaacattgaagagtatgactatcaattgtacttgaagaagcaccattgttagaagcttcattcttcattcttttcctttgacaaaagtttgcaaaactggggggcggcattgcaatcaaattccattcatgagcttgcaattctgcttctagcttatccatgtcagaagagttaaaattgttgatcatataagatacaacaaatccattatactatgtgttatagtgagatttctttaacctagaaactcgagaccagactcctctttagaggacacatgtactcaattttcccaagaaaagttgagatgtccatgagagactcctcaagtttaaaccttgcctgagcgagatgatgcgaatatgaccaagtctaatnnnnnnnnnnnnnnnnncattatgtaggaccaaggaacaaatttaactcgtatgtaccaggatatgtgtgagtatcctctcaatcctcttgtgaaaacttagagatcgaatctctatgatgcgagctggtctcgatgacctaacaacctggataaaccaatatagactcgcaagtctaggttctataagaatatgaacagccaactcgataaaccaatatatcctaagcctgcgagcttacaccagaatatgaacagnnaactcgaacattagaagtcgcatatgttgttgtatttagtgaatagaaaatgttgttcatttattgacgttaccgtttt

SEQ ID NO: 156684 - DNA, 728 bp, Cannabis sativa
aattttcaaatcatcatccaaaacttctcaaatattcttatttattttgagatttttgacaaaccacaaattaaatttttaaaatttaaaaatattaaataatattacaactaatcagaaataacattgtaggtaaaaaaattgaatttttgtttcaaaattacttattttttaaaatataatttttaaaattatttttaggtgagagcatcacttttgctttcacatgtaaggacattttttaaacctttaatttttaatctgatggtaataatttgttgtagtttatttgttatcatgaggtagtactagcacatataaaattattatttatttatttttaactctcttattttttagccatgatctaattttttttctttctttaaaacgatatatgatattatcattattttttgctaactttaataaaaagatgaagaacgaggcgggttgggactagtacaactgggttcatgcgaagatggtgatgaggctatggttcaggtgaagagaagttgaggatgatgatgagatgagagtgaaggtgggcgaagggttttttaggctcagatcaaattatgggtttggtgatcgtgggaaaagaagagaggagaaatgtgattggggtcttataatggagtttctagaaaatggaggtggagaagggtagatgctggtcagggtggtcgtggttcaggcaaggggaaggtagagacgaggtggct

SEQ ID NO: 156685 - DNA, 947 bp, Cannabis sativa
  modified_base (877)..(891): a, c, t, g, unknown or other
ttattttgagtaggaaaagggccctagggccgagacaatggttttccccttgtggcactttttatgttgtgtaaagacaaattttctaggttggatggccaacttggtttttatctttatttaatgcctcgtactattatgtttgaaccctaatacatacttgtttgtttgcattttattcacaatttaaacaatcctattttgatcacatacaaagtactttaggaatttccatcgctcgtatatccctttgattcaagtagttaatagtctactatatacgtgtgcagtttattatctgccacacttaatttgtgagcaattatcaatttttcctcgcataatcagtggtaatttgtttcaagcaaacttgaatatacttttaatgatttataacttttgtatatttttgattgctcatatgaatagttagatcgtctattcacacactaggttcaagtacttttctcaagacaccttgatgtctcatttaatactttcctattcaatgcgagccattaatattcagcttcgcattctgagttatgagttatatctcattcataacttttgatttttctttctcatcaaacaggtttttaatcaaaaagttattcataattatttgatcctcctttgtcgtcagaaaggtttaatcaagaactttaaaaaatttcaaaatttttaaagtgatgggtttgcattatatcatgtatttctacataaatttcggttaaccattcaaatatgcccctcaagtaattttaaagagtaacactttgcaattacatgaaaaaagaaatgattaactttattcataactaaagttcaaaatattacatcacagatgtgagtgtttggttttgtgccctaaatnnnnnnnnnnnnnnnataatcaaatttactaataaagattagaaatcacattttatgttgcatgattcaca

SEQ ID NO: 156686 - DNA, 691 bp, Cannabis sativa
  modified_base (405)..(407): a, c, t, g, unknown or other
tggtcttaataatgatggtgttggaagaagaacaaaaaataaataaaaagaaaatgaagaagaatactcgtaagtatacaggggaaagaaaataaaaaagaagctaaaccctgattttgactcaagacccagatcttgtgactccaacaagggacttgtgttaggttgtttttagtattaaatttagattaattttagtatatttttaatttatttttactcgtgtttggagcaattttacgcttgttatcttttatttttgcagatttaaaatagagaaagattaaaaaaatatcaacggaaaaagataaaagatcgcataaaatatcactgtgcaaaaatcaggatcctgcctaggaaagaaagattgcatgccttgaaaacgtgggggaattgaagacgggnnncgacccaagaaaagggatgctgcggcatgtacacttaaagtcttgtatactcgtgtgaaaaatgcaaacgggttgcggcctaagaaaaggcatgccgcgacccgcccttagtttgaagcagaaaaaatgatttctcaacgtgggcttgttgtgatggcctaatttaaaggtgaaaaggaattttaacatgtgagatttttctatctttttaggccctcaatggctatataaggagggaacttcagttgatttcggtaagtaattcggaaggaaataaatagtag

SEQ ID NO: 156687 - DNA, 511 bp, Cannabis sativa
  modified_base (476)..(480): a, c, t, g, unknown or other
tatcatttttaaataaagtaagacacatctagcataaaacttagtatacgtgcctcgcacgtagctttctactagtatatataaatatatgtataaactacagatatatattattgataataaggaggtttatctcgaaagactgccaaaaaagaggagaagctcggccatggcctccctagatttttaaaagttaatgcatataataaattgattcatactgaaatgcataacatatgctcaaaattaattcatattttcgttattggatagaataactattgagcttgactttcaacatatatatatatatatatgtatatattaagattagatttcataaattaaaaaaaaaaaattggtaaatgtacaaatataatatactatctctgtattaagtattaaaatataggctaattagtaatttttccctctgaacttttacatgtactaaatcgtgcccctgaacttttttnnnnnttaaaaattcccctcgaactattgagattgt

SEQ ID NO: 156688 - DNA, 514 bp, Cannabis sativa
  modified_base (252)..(263): a, c, t, g, unknown or other
tagttcacttgcaccttggataagtgctatgtccttttaagggcattggttaaagtaagcttgagttggatgtatggagtatgcatcgaaagggactaatattaaacttggagaagataaataaacttatcgtaatatctattcaattcaatatcaccttgttgatcttagatcaaatgatctcaatcctgagagggttaggttctagttcaactgcattatttgtattcttcaatctattcgttaaagtcnnnnnnnnnnnnttctcgtgacatatagattaagaacatggtagttcatttgagtgagagcactaatcatagatacaaaaatatatagcatctatctggacatagaagtcaaacgatgatttcctttgagcttggcttaatagagataaatggcttagtattcatttaagtgattatattagttcactgaaatattatttataggtacctaagtgtcttaaggataaaatacattgattggtgtaacagtaaatttgtcccta

SEQ ID NO: 156689 - DNA, 593 bp, Cannabis sativa
ttatagagcccatgggctcttttccagaacgatggttagtttcctcatgtggggtgttaatattctctggattttcaaccataaaggagaaggtttttttataaaagaagggaagggtttttttgagctttttcacagaggctatcaatgaaagcaccaaactgttaacgtagattttcattaaccaaatttgagtctcacgatgataattcaacacagaaaaaataaaagctataaaaatataaaacatgaacaccgggtttttttacgtggttttccagttaaaattctacatagtccacaagtcaatcatatttagatttttgagtattttttagggcctctttcataagagttttttcgttcctcttttgagattgtttgccactatttataattgcatagtggtagttaaatacaaagctgaccaaaatatgattacagtcattatccctaaaatcgtgggatctgattacatatcacaaaatgtaaatgcgttgtatgattttgaaaagggcattttacaattttgtatacattattttaattaattacaaaatatgtgcgaaaaaacttattatcattttctcata

SEQ ID NO: 156690 - DNA, 676 bp, Cannabis sativa
aaaatcatgtcaaaagacaagactaaagaaccatgtcaaaagacaagactaatggaaaaactcaattaatttcaacacataaacacgatcacagcatgtacttaatattaattaattacattaaaaacttattatatattttattaattatgaaattttttaattttatatacgaattatatatagtaaaaataaataataaatacatatacatcaaacatatataaataaataatgaacatacatattttatttataaaattatatattaaattttaaaaaatacattagatcaacaattatcacaaatattttcataatacatatattagattaaaaattaataagcattatcaataataaaaatagtgtttatacataatgtaacatttaattacagtttcatttattttcttaaatacattttttaataactaataaacataagtgtttgtttaaaaaaaaaatatatgtgttttatttttataatttctatgaacttttaataggaaaattatattgattctattgaaatactatcataataaatatactagattaataattgcattataaacattaataatactgatcaaatatttaataagcatatatatatactagaataaaatttagtatacgtgtctcgcacgtaatttttttctaatatatatat

SEQ ID NO: 156691 - DNA, 526 bp, Cannabis sativa
  modified_base (493)..(494): a, c, t, g, unknown or other
tgaagtaagaaggttggcttttataggccagaacatgcgtgagacagctgtgatcagccaccatcgaacggctgggaaggcaatcgattcgaattccccggatccaacggttgatttgaatcatcatcaaggtggtggaaatgcttgagtacccgtctgacacccattaatgcgtcgtatcaataaatggacaaggaacgaatcgacgcctgcaaaagtgaataactgcagtaatgatggtcattaaatacaccatcacgcgcccaaagcacgtgccaagaaaccgaggaggcaaccagaggcatctaagcaagccttgttcacttcacaattaaacaaggcttgggggtaaatgttgcccctgatttcgtccaatatacgtggaccaaccgaatggtgacacgtggatggaaagggtttagcatttgaataaaatagccaagtcttcctaaagcgcaggattaccttagacatgcctcccggagaaggaatnnaaatctcgtatgctcccggagagcaagatggc

SEQ ID NO: 156692 - DNA, 712 bp, Cannabis sativa
tagtcctaccctgactatctaactcagccttagcaaagtcttgaactacagtgctggcttcgtcatccccaagaaagctgtctgaggagagaaaccagctagaggacaagtaggctgaatgatccaagggaatgggtgcaggaggtccagagcccatccaggatcagcctaagaaagggcccaagtgggaaagggcatcctaaacttaaaaaggcgctcatcaaatcctataggcctactggcatctggagcaccagtgttaggaatcgggaccgaaggcttaggcctggatggcctccgatccgtgcccgcttctaggcgaagggtcatcccggctgcagcctgggccttgatataagctagctcctgctcccttctgaaaaggtatttctgatatcgatcctccgccgaagtgattatgtccacccggagcgccctttccgcagcaggagttctgacattcgggcagatgaccttggaaaggttaaagtcatccaccgactgattctcggatatcagcttggccttctcacagttctctgtcgtgaccaagtccccaacgttgagggccttcttgtcataggtagagaaggtcttggcctgttggaggaacagctaagtaggcgcagtctacaggtagggagggatcctgacccactctgtaagaagctccgggcggtccatggcttggaagccggaggaaaagaagaag

SEQ ID NO: 156693 - DNA, 540 bp, Cannabis sativa
attactgttgttatgttctgagaatgctttgtatttatattccttcactcacatcatacaggttattattagtcttctaattcagtttctaaagtaaaacttagatttcatgatgtgttgtccttgtttttttggtctttagggagttaagaaagtcatctgcaagaaaaagtttcaatcttcttgttgttgggcctcaacattctatagttccactgatgttggccttataacccttttcaccaatgaaaaaattgagataaggtaatagtaaattttaaagaaatattactgagacaagtgtataatatgcctaaacatatgtgggttctggttttattttcatcttctctttaactggaccaaggaaaaaaaagatataacaataaagatagaagaagaagaagtccgataaatgtctttcaattcagttgttatcgctctaactctctgattttcagtgtactactgctatattttggtctctttggccagtgtttttcttctggtgaacaggtttcgttcaacacctttactgtt

SEQ ID NO: 156694 - DNA, 653 bp, Cannabis sativa
agaggagaacccgaccattcaagaatcaagaatcattcaccctaataatgaaaaagtatttttctaacaatttcttaaatattgagaatagtatgtagtctgtttttatcgtatgtgtgcgatgtttgtttgcactgatattattttgttgttttaatgtttgaaaggttgaggtctggttttctcgtggttgttaggggtttttgtttttttgttttttttttcaatttatcgatggtttgttgataatatattgatatattatcaatgataagcaagccaagatcagaaaagaccattatcgatagtatgtcgataatttttagatagtttatcaataatttgctagaattaggttttctcattatttgtcaatagaatatcatatgtcaatagagtgtcaataattttgttaaattttttattgccaagcttcacaattgtttgtcgcatgacatttttgtcgatgggatgtcgataatagtaaaaaaattatattcttactatattacgatattttttcgatgtattttcgactcgcacatattaaatattgaaaaaaaaaactttttagaaataagtaaaatcaaaacgatcaagataacaattataaaatttaaaagtaacacttaaacataaaatttaattaaaaa

SEQ ID NO: 156695 - DNA, 597 bp, Cannabis sativa
tacaaataaaaaaaagggtaaatgattataattaataaatatcatttttaagtgtaaaatgatgtagttaattcaaccaactatgaataatgtaattgtttgtatgtaaatttttttttactaataatcaaataactaaaatatatatttatattttatattctaatgtattataatgcatttttacaatagtaccttttttgagaaacaattgttaatatattctttcatatttacaatagtaattgtataattatattattatatatatgatagtgtatattgtagctataataaataatttgttaattttagaatttttaaataagagttcaaaatgtttgtttcactcttgaactaaaatacactttattgttaacacggcaaataattcaaataaaaaaaagtgttaaaatagctactataactatataaagactatcatataaaagtatttaaactataattatctaaatatgatcataaggggtgcaccattcactataaaaaattgttacttttagtgtgaattttttagttacaacataatttttttgtgactaaatgtgacttgtagtcacaacaaaatgttacttg

SEQ ID NO: 156696 - DNA, 615 bp, Cannabis sativa
  modified_base (185)..(185): a, c, t, g, unknown or other
tgaaagaaaattccatgccgagattgatgaaacaatatatctaatccgaaacatatatacgtatatatagtacagtatataagacaaatatatatatatatatttatatgaatccattatacagtaagaaaaaaaaactgtactacatattagtcatcgatctcaaaacaatatatatatatatntatatatatatataacaaaaggaaacaatatagtagtcaaactaaaataatttcagtatatatatattaactgagccgcacagacatatatatattgatcaatacaaatcaattctgtaacaattaacaccgatcaaagtacaccaaaaatatagaattaatcatcaacccattaaaatgaaacaaaaatttgattttcaatatcaaaatattatatatatatgactgaagccaaaaaaaaatgcggcagcactaaaataaataaataaaaccctaattttcaaaatccccaaatttcataaatcaaatcatcagatcttcaatcaatattttagcaaaaggtggctctggtaccacttgttagggatttataaaacacttaagaaatatataaatcacagatctaaacatattcataaagtgctttaat

SEQ ID NO: 156697 - DNA, 603 bp, Cannabis sativa
tcatttttgatactggatagtcaagaatattgagttggtaagcccacctgaggagacttgtctccggtttgccaagactaatcaggttctatttttccttgcttttttttttattttcggtatgatttaacttttgttttgtttgtttattttttctttagttttatttttctatgaatcaatatcatgtcgttttgcattggctcactatctaagtgttctcatttcatgcatttaatgtatatgttttctaaacaatgaggacattgtctaatttcagttgggggtagtgagcatattcaagcatttttcttaattttttgtcatatgaatatttttatggtcaattttttttgaaaattactcatttattcttgtaaaatgttatttttaagccaatttttgctatctttgttacttaaatttttctagagttacaaaatgcacatgccaaactttgtggtaagatggttgttagcacatattttgcttaaaaaagttaccaagtttaagtgttcatgtttttgttagtggcgagatttgagaaaataacttttgaatttttattgattcttagacatggttatcattattttggacatg

SEQ ID NO: 156698 - DNA, 515 bp, Cannabis sativa
tggctactaaggtacttaattgggacaactaaactaggactcaaatacaaacaacaacagggaaagacagctatagaatgcttcagtgatgcagactatgctaaagacagagacagtagaaaatccacctctgcctacatactacttatgggaggaaactgtgtaagttggaaagtgcaactacaactagttgtggcactgtccacaactaaatcagaatacattgcaactacaaacgctattaaggaaagtatttgggtaaaaggagtcctagaagagctaaggttgctagactctaaacttgtgatttactctgatagtcagagttgtgtacatctatgcaaaaaccctatgttccatgatagaacaaagcacatagagataaagtattactttatcagaaacaaagtgacacagggacacataaacattgacaaggtgcctacagaagagaatcctgcagacatggggactaaagtaatcaccctatctaagtttagacattgtctaaactt

SEQ ID NO: 156699 - DNA, 630 bp, Cannabis sativa
ccagaatttcagttcaattacacccttgacagatttcgatttattttcatttaactcataaaccatataatgcaattaactaacaattaaaccacttgatgcacgctaattaaaatcatcaatccactaacccaaaattccatatgcttgtaatacttactattctccactaatatatattaatgcacaaccaagaatcagaaggtctttctaggcttgtaatgttaggcttaggtaagggtaattgaaatggtcatttaggcttgcctataccataagtttctccaatcatgtcacccaaaagaaatttttcacacacaatcccaattccccttttctaattacatgagagaattttttttttctatttattttcaacaagattgcaacaactttaaatttatttatttatttttcaggttactgtcaatctaaattttcttcgtattctctcaattttcacacttttttccacacacacacacaacaaagttcccattcgaattccctcaaactaaaggtccacttatggtatacttagggttaaattttggatattcaaggtttatcttttctaggctcaaaatgtgtagaaacaaagaatacgccaaggctcaaaaaagggcaact

SEQ ID NO: 156700 - DNA, 663 bp, Cannabis sativa
gggctcatttttcgcgcgaccgtgtgcctcgtgcacacttccgtctctcgaacaactcccaccgagtcatgctggaaagcatccatgaatgcatccatgcatcgaggctctcaagccaagatactcacactgtccataggttcccgctatgataaggcaaatcccaacaccgacgcttaccttgtcactcgtgaccaaggtagcatgtgtggcaagatgccaataccaagctgacgtgccaacgcttctatcatgccccactcgatactgtccgaacagtctccctcgtcgcccaaggactctcatacgtccacagaccaatcctcaaggcgccatgcctccacgcattttggcaggccctcatgaaaagccaccaaactagttgcgtacattagaccactgtcctatcgcagcatggtgcttccgtcccatgcgtgtatgcaaactagcccacgaatgactacccgtgtcatctcatgttgagactcgtggccaagacacaccacaacgtatttggaaggtataggccacgtcccatgcaagcggcataccgacaagccaatagaaatgtacccgttaacctctgctagcttcttaaacgcactaccgggtcgacccgataatgtccatgagtactcaaactcatggagacatatgagtccc

SEQ ID NO: 156701 - DNA, 698 bp, Cannabis sativa
  modified_base (380)..(382): a, c, t, g, unknown or other
agtgttcaaagacttcctggatgactttgttattgtttttattgatgatattctaatttatttagactcagaagagactcacgaaagacatcttcggatggtgttacaaaagctcaagaagcataaattacatgccaagtttaagaaatgtgaattttggttacctcaggtgagtttcttggggcacgtggtaaggaaagattgtgttttagtggatccagtgaagattgaagcggtacgagattggcctcgacctaagtcagcaattgaagttagaagtttcatgggattggcaaggtattatagaaggtttgttgagggctttggaaagatttctacgcccttaacagagttgactcaaaagaactgcaagttcgttnnnactgataagtgtgaaagtagtttcgaggaactgaaacaaaggttgattaccgctcctgtgttaaccttaccggtaagtgatgaaaagtttgtgatatactatgatgcatccaaataggggttaggttgtattcttatgcagtcagggaaagtaattgcttatgcatccaggcaattgaaagagtatgaacagcggtatcgtacccatgatattgaattggcagcagcagggaaagtttgtgatataccaagtggatttgtcgttctctaaaacacataattcaatgacaaaagcattaccttcgtttgaattgttt

SEQ ID NO: 156702 - DNA, 718 bp, Cannabis sativa
agacaccatcaacgtccttctcgaactgatagggaaggggcacatacaaatcccagtagggggcatgtatcaacccattcccaaaggagaaggtcggtgcgtgacgaagcaagttttagctcgggacgtactagacctcgagatcacaattgatttgtatgagaaggggatagacctcgacgctgtaatgatcaagaaagtatgagttacacgaggagtagctaatctgagagttactcgggtataaggtctacaagtaatgatgatcgaggatgtccagatcttcgtgatcaattaaatcgaaagaagcttgatttacgtaaacaactcaataccaaccaaaagaaagaggatcaaatcaaattgcgaatcattgagttggaagataaattcaagagataccaagatggggaatatcggaaagggctttgttatgactcagacgaagaactcgagcctttccatctagacattatgagcattgaattcccctaggaatttaaaaatcctcacgtctcgccatacgatgggactacgaatccggtcactcacctcaacaacttcaatacaataatgcgagccagcaatgttacaaacaacttaagttgtattttatttcccacctcgttgactgtagcagcgatcagcttgttcaataaattcactcatcactcaattacttcttgggaacagttgtctaaagatttcaagaaacagt

SEQ ID NO: 156703 - DNA, 828 bp, Cannabis sativa
  modified_base (243)..(245): a, c, t, g, unknown or other
accagtagtcggtgtctagatctggggctcaaattaggacggaaacccagacgaagaacaaaaaccgaacccagtcctatatctggcacccaaaattagaacctgaacaagaatcgtcgaaccaggaccatagaacaagactaggaccgtgccaaggacccggacccagacctagaaccaaagacagacttagcctcaaacccaaactgagattggaactcgggcccggacacggtcgtgtannnagaccggaactgagacccggacctggacataattctaggacccgatcccaaacactgacttggacctagatagggatccggatacgaacatggactcagactaagaccctgacacggatggaaatgatggacctagatttggacgagaacccaaactaagaccaggactcgaactccgacccgaactaaaaaccaaactcgaaatcagaatcacaaatggaactaaaatcgaacaaggactgggaccaggacaaggacctaaacccaaacccgaacctagacaaggacctaaacccaaactgagactaggactcaaacccgaacatagaccgggacccaaaccaacacaataaccggaacctagacccagaataaggatatggacctgggaaacagaacaaggaccgggacttagtacccgaccaagaagcgaacttgaacctaggacccagctcgtgacccagcaccagaaatggaaccagactgggacccgagattggcatccagatctaaaaacagggcttggacaaaacgcgtagtctgtgtctggatttgggacccagccctggacccgaaccctgac

SEQ ID NO: 156704 - DNA, 537 bp, Cannabis sativa
  modified_base (39)..(57): a, c, t, g, unknown or other
tctctcaagtaaaatccttcgaccctttgcccagtgaannnnnnnnnnnnnnnnnnnggctatgagcttggagaggaagtacttcccttcttgaacaatggatataagcagaaagattgcatagtaaatacagaatacactgatagtgggatttggacaacttgccatatctctgtagtctgatcctcaagtaataggtatttccttggtgactctctatgcgaaagctgaattcactaagtgttggtcgctctgcgcggatcgctgattactttgccttaagcatgcatatgaggtatcctgttcggactatatcctccaactagatactgagagtcgattccatgtgtcaccatcatgtgatgccacgtcagagtgaaaaaattggaataacatttgctttgttccccaagtctctacgggacttccaaagatgcgtatagacttcatctgagctgtctttgtgtttgtatgggtgacacgtgtcaagtgcgtctgttcgcgactggatgagaagctgactgggtgtcccttcgg

SEQ ID NO: 156705 - DNA, 890 bp, Cannabis sativa
ttcttcgtaattttctgtttagataattgcagttcttcttttccaagtgattttcgtcggaatgaatggttgcattaccctcgttttggtttcattctggttgtgttgctgatttgaacgatggaggtatgttcatcttcttcgttcattccgtacggcttaaggtttagactatgtggtatttttataaatattttgttctgggctatataaatgtttaatgggccggcccatagtaattttgtaatttttttttcgttttttgtattttcctgttttttttctctttttttttgattatattgtaacttattaatttattaaatagacttggaagtaacaaaaatatttttacaaaagtaaaataaaaaataagtaacgtaaaagtatttaaataataaattacgtaattaatataatctaaaattaaaaacataaattttaaagtaaaaaaattatatattaaataattggtaaataaaatagtagtttactgtattatatgacaactcattagattcgaaaataaattttaaggttacgcaaatgtagttcaaagaaaaaaatagcacaatataacttaaaattagttaattgattattaagatatttacaaataaggtcttagaggtaaccaaattgtatatcaaattatataatttaaaaataaatttcttttacgtaaaagtaactaattagtttcttatcagcattataagtaaccaaaatgttatttttaaaaactcaggaaaataattaaaaaatggaatttagaattaaattcgtttcaggcatattattttaaaataagttttaataacgtgataagatattattgtaattgaaatttattaaagtaattttgtaattaatttatatttttaagtata

SEQ ID NO: 156706 - DNA, 504 bp, Cannabis sativa
tcatagtgtctcatgagttgagaacgcattgtgatcaatttttttttcatcctgttaaatctataaggccacttttatcctgagtgttgaggctagtatagaaagttcattactagattggttgattgaaagttcattcgaaaaaatacaaggaaacccttattagaaaaaagaggcaatttcctaatataacttattatatttagattatataatattgtgttgagatttagagtttaaggttcatatcatattacaaaattacttttttaaaaaaaacttgaatcaatttacacttctattgtgattctgatatgaaccgttaaaataaacacataccacgtgttatcacgcttgccatttcactctcattaaaatttgggtaaacacatattattgtagaagttttttgtcgaccacgttcatgttatgtgaaaagaattgggtcatttcctatgcttaaggaaattggaggaaagtgtgcactggcatcttcatcttcca

SEQ ID NO: 156707 - DNA, 507 bp, Cannabis sativa
ctgcacatccatgctgcactcagcatttccacgcgcggaggaggtttcaaaaaagaaccctggctgagcttccttggacaaaacgtgtttgaatgcgcatgctgaccgagtgatttcgggtgtgcgtgggcgcaggggagtgatccctacccttattttgtccaaattttgaaaatttataactaattcaatttaaatcggaattcagttctgtaaaaaaaatatttgcttagtttcttccatactatctaaataaaataattccagatcgtgaatccaattattttttgtgaaaatttcgtaaacatccatcaatcatcaaataaatacatagatcaacatgaatgacatccaaatcacacatttatcgttttaaatccatatttcttgaaagtaaatcattatcatgactctaatatcagttgttagaatatattttattaggatctagatttactaacaagtatgttgattatattctatcatctaacaccctaaatatgaatt

SEQ ID NO: 156708 - DNA, 531 bp, Cannabis sativa
aaaaaaaaaaaaaaactcttaaatttggaaaggaaaacaaattgattaccacaatcacaagctttatatgtttaagttcaacacaactataaaacattcaccaaatcaacacatttatacaacgacatattagcaattaaaaagaaaaaaataaaaataaataaatttacagcaattattaaccaaattagttaaaaaaaataataataaataacaaactaactaaattaagttaaaaaataataataaataacaaactaaaataagtacccataatccataactaaatgattataaataaaagaaaaatataaatttaagaaaattttacaatacactctgttaaaaaagatgatgcattcttatttagaacaattttttagttcaatttttttataattgtatacgttgtagttatttaaggcattttataaaatttgaacacttttttttttatattaaaaattattttaaattttttaaattttataaaatatctaaaataattataacatgtataatcatataaaa

SEQ ID NO: 156709 - DNA, 619 bp, Cannabis sativa
gactgtaacaaccccaacaatggcagaagacgtgtaatgtacaccacagtgaagaacgaagtatgagcagtgaagaaaatgtaaaatatgggttttacctaagctaaaacgaaaatagaaaatggtaaaagaaaataaaaaatgaaaaagaaaatgaaaaatgaaaaggagagttttgccctagcagaaacgaaaatggaaagagaaaataaaagatgaaaaacaaacaaagtgaagaatgaaatagaagagtggaggacaattgatatgactgatggaggtcagtttcaactttgtcaaatttaataaattataaattcaaaaacataaccagttaccatttttttaaccttaattacccctagatcaacccatagccctcagatcaaataactaccccatccaacggctgccgtacatcacagaataaatccccctaaagtacactaacgggacaaactcgtgtccctatatatatgtatactatactaaccaaattatatatcacaattaaaatatatatacaacgatcacaaaattatatactaccattgtatataataaaataaaaactaattaaatattattgaaaataaataataatataaaaataataatt

SEQ ID NO: 156710 - DNA, 763 bp, Cannabis sativa
taaagttaaaataatgtatattttaaggtacaatatttattgggttctcacttgtttaatttgattggattttttcaatttagtaatagcttgagcattgttattattaggtataaatggtgctttttgcaaattgtttaacagttaatttataacaattattagattaagatatagaatactagtctccaagatcattactcagcgaaatgacattgtatattattaggttctatgtagtgttagaattgtaagatttaggttcatgtagttttattttaaaattaattgataataaaaggagcagtccatatattttatatatgatattattatttcataaattagtgttaactctataatataagttatttttcatcattaatttttaaaattattttacaaatacaaaaaaattgttggaactgtcgtttgttattagaaagtctttagagttagacatcaaaagtaacacttttaattttctttctgctccttgtacttcttgtaaaatctttgcaaatgtctagactttctacagaagtaacactttcgactttctttctatctggacttcgatattgattgaaagtaatgttgtttactcttcgaacttattactttattgggtgatcttcctcttgccagatacactttttctttcttacttcttattattttttctccaaaatcccatccgaattcgcaacgaaacccatgggtttataaaaccctagaactcgaggttcagaacacaaagcaa

SEQ ID NO: 156711 - DNA, 644 bp, Cannabis sativa
cctaaacctcgccccgaacccaaatcaacactagaacccaaacacagacccaaaatcgacccgaactcgtaccttgtgacttgaactacaaccgaaacaagaaggagatcaggaccgagaaaaaagactagtactaggacctgaacccatacacaaaactgcaaccagaccaggacatggactcggacatagacccaccctatgattgggtcccaaacctgaattcagaccagaaaattgaacatgactcaggaccaagaactgggatcgagacccagaactggaccccagtcttgatccttgacctagacttaaacctagaccctgacctgggacatgaatgaaacaagactgggacccgtgattgggatgcaaatcttgtcccgtgatcagagaaccggggcttggacaagacccatagtcgatgtcttgatcggggactcggagaaagcgaagttggacaaggacctagacccaggcccaaacgtgggacccaaaactgaaacttgaacaagaacgtgatcaggaccctggaacatgagcgggagtgtgacctggacctcgatccggacccagaactagaccgaacctagaaccggaactcgggctcagacccagtcctagacctagactaggactaagac

SEQ ID NO: 156712 - DNA, 514 bp, Cannabis sativa
  modified_base (442)..(457): a, c, t, g, unknown or other
taggggaatctcaccgtgatctacaattgacaccgttgaagccgccgttagaacttgccagaagctattgccactacggggaaatgcgcaggacggacataaacaccgataaacggtgacaacaacgaaaaatgatggcaaggcacaatggaggaaactctagcatagtgatggttgctgaactgtctagaaggaagttgacccatttatttttcgaaatgaattattaattgttttaagttttaataattattttttataagaatatatgtatatattaatattatacatttgaaatttaaaatgaaaaaaaaaaaaaaataaaattttgataatatattttaaaaataaataagttttggtgatgtattttagaaaatgaagtagaaaaactaagtgatcttatattaatatatgcaagggtaaatagcggcataagtannnnnnnnnnnnnnnntgtaagtggcataatcccaatgtttatttttagtggtataagtacccaatgtttgta

SEQ ID NO: 156713 - DNA, 797 bp, Cannabis sativa
  modified_base (52)..(59): a, c, t, g, unknown or other
actcaaccaaactttccagacctgctaattagaccccaataaacattttccnnnnnnnnaaacaaagcttcatgcacaaatacaaaaaccgccattaaagctccaagctttgagttcataactcaagcttggataaattccaatcacatgcatcaaaacctgctaaaacctactcaaatatgcataaataagcctttgaagatagcagcaaacaactacagcaagcaaagcaacaaaattcaacatatttccataaaaaccatagttttgagttaaaactccacacttgcttaaaatcaactaatcatgaatcaaaacctattctatttcactcaattaaacatttctaaactatagaaaacaacaacaacaacaaccaacagcagctatcaacattaaatcaccaagcatgcacctatttttcatcaaacaaatcaagaacaccaagaaggtttcaagaaccataccttcttagcttgagatcactaccaacaagctgaaataatcaagaatttcagagcgaaatcccagccctagcagccccaatcaaaaccgaaaagagagagagagagctcttgaagaaaatgcaaaagttgcttcttttctttgattttttctaatttttgcaaagtgaataataaaagagtttttacatacttttattcagcataaattaactattaacataagattataaaatttaaataaaatttataaatgacaaggcacatatggcaaaatgacctttttgccctcacacaataaaatgacataaaaggggtactaaggggtatttt

SEQ ID NO: 156714 - DNA, 573 bp, Cannabis sativa
  modified_base (405)..(406): a, c, t, g, unknown or other
ctattgtaatggctaaaagtgtttgaataaagctttacactttaactcaaaaaaaaaaaaaaaacatgtatatggatattaagtagcactggtaccttttaatattttttattttttattttcttttaagttatgtattccggtttttttaatttagtattaaagatgtaatttgaccattttcaatttgaaaccactcctaaacttaacacaaaacttgtaattatgatccatgtacaatttttttttaacacgatcactttaattgattagaaaaaaaaagcactgttaaataggagggcatctttcataaaaaaaaataactcattatctatcataaggacaaaatattttaaatccaaattgatataaaatttataaatacaccttattttaataattttnnttttacataaaatatatattttattatattattttttataatttttttttttttattttgattcatattcttaaaaaatatatctatcaaacaaaaataaatcatatttcaaatatcataattaaaaaattaaaataaaaaagtatgtaaaattttattagaaaaaa

SEQ ID NO: 156715 - DNA, 654 bp, Cannabis sativa
  modified_base (172)..(179): a, c, t, g, unknown or other
ttggatggtttcatgatggtttatgtgcatatttgatgattgtgtggaaatcacaatgtatgctttaaaatatttttttttttggttctgaaaatatttttactggaaagtaaacaaaaaattaatgaatttaggcttttatagaactcaatttggattttttatgaattannnnnnnntttttgaatttggatgaaaatatcagaaatcgagccacacgttgtgcgcgcgcagatagggtctgacacggcttcagacacgcccatgtccgaattcacgcccatgtcctaacagaggtttgccccccaagaggctgctagcagcccttttctcgcccatgtgcagcgtattgtgcgcacgaggagtatgcaatgcatactcccctagtgcaatcttgtttttgtgatatcttttgattcaaaaatctattttcactgaaacaaaattcaaattttggtagaattttgtgtaaaatctgatttttcaactaaaaatctaattatcagaataaaattaatttttattactttttaattaattaaaattagtcctagatatgagtagtcttttaatttgaaaatttgatttttccacaaaaatggcattattattaattttgaaattttgatcattttatttattttaattataaga

SEQ ID NO: 156716 - DNA, 551 bp, Cannabis sativa
  modified_base (30)..(31): a, c, t, g, unknown or other
ggtctttgtttaggtccaaagtcacaggtnncgatccaagtcctagtctcggtatgggttctagtctgagtttgggtttaggtttgggttcggcaacttcccaggtgtgggttctagtcctagacctggtctgattcatattctgggtccgagatcgtgtttggatcccagtctgtgtccaggtctggatctgggtacagatccgggtccgggtcttgggttcaaacacttactacgggttaggccgaaacctcaagtctagattcggatctcgatcttattccagtttaggtccaaggtcttgggacgcatcatctgaatgtatttaagtccaggtttggggttgtgtcccggtacttaggtcttgcgttttgggtccaaggttgtgtcccgtgtctcgagtctggggtcgagttttggatctcggtcccggttttgcagcccagtttcgggtcaaagtcccctatctaggtctggatccttagtccaagtttggttccaggatcgagtttggggcctaggtcccccttctaggttcggatcctaggtcc

SEQ ID NO: 156717 - DNA, 842 bp, Cannabis sativa
tttagatgctttttaattggtaccctaccaacttgtttcttctaaacttattgttttttgacagaaaaaataaaatctaaccgacttaattaattaatactaaaagcgtactacaattacagtttgctttcatatgcttttaaggtagatgaaaagcaaaaaaaaaaaaaaaaagagtttaggagaaacaattattttttgaaaataaataccaatataaaaataattcaaataaacatataaaaaaaataataagtaaaaataaaaattaataaaatttttaattattaatatcattttattttttaataataaatatcatttttatattattatagtatgtataaaattttaattgtatacaagcagtcttatcgtaagagtatatacctcacatcataataaccgcatgattaaaaaatcaatggtcaaaaaaagttccctaccggtaggaaatttttgctaggtcttaccatagtcttgccctatatttatatatatcatgattgaacaaagagtgtatgatttttttttttaattttatttgccactcataaaattaccaatgtattctattttaataattttattttatagagggtttttttatttatacatttttttttgtatttatacgaaaattcaccaagcaacttaaattgcaactcaaatctacaaagtaacttaaaacgcaactcaaatccacatggcaacccacacaacaaagtggtatatgatggtgattcctctaaaatatatatctttaatttatattaatttttttttcctccttcttatattcttaaaaaatatacatctaaaataaaaataaaatatatttt

SEQ ID NO: 156718 - DNA, 696 bp, Cannabis sativa
cacaaaataggccactcgatttgctgatcgtttaataaaacgtaaactaatattaggtgaagaagacaataaaattttacaatcattagtaatgataaagccaaagactaaatattatttaatttgttgttaataactaaaacaacacaagaatatttttgatattattcagtgaaaaaaaataaaaattgaccttctctcaattaattctaccaagctttttccactataatattattggttaatgttagtctcaaaagttatacactcacaattaacatttggaatggaagaatctctaaaatccatgtatatatacacatataatatccaaatatcaaaaatatctctcaacaaaattcttaagttttacttatcactataaaaattttatttttaatatgtatttttagtcataatatttgttgtaactaaaactaaattataatatccaaataccaaaatatctctcaacaaaattctttaagtttcacttgtcattactttttatttacaacaaaactttaaaagtaaaaaaaaaatagtgactaattataaattattatttttttacattgtgactaaatgtattagtcacaaaaattacaatttattgtgacttcatgtatttttagtcatataacttattgtgactaaaactaaattagtaacaattgtatctaaatattatgtttt

SEQ ID NO: 156719 - DNA, 842 bp, Cannabis sativa
acatgtatctaatatttctctcgtaccacacttattaaggtacctaaccagtggtacatttaattatcacttttaaataaacacattgttgggggaagagattattttaagataatctaacctttatcaaatatgctcacaacatgtttctaatattccatttatcttctcaagttacccaccttttaagaataaaacatcatactatttttgctttaatctccatgattctcaataaccttcttgaattcttaacatcatagccaaagatatcaactttaggatttcacaagattagaccaattccttggtgaaattccatatcctcatttattgtataatttatctacactaatagacagcatattaactcgatatgtccaaccgttactactcggtcaaaattataagatcccatagtacataattcgtaattatgtctttctattccttctatgggatctcataagctgatctactgaattaacttaataacaagttatatattcgtttttaatagatattcaattagagcatttcttatccacccactaatatatactcatttcaataccttgtaaatttctacttattaacacattccttcctcttgataatctcttgaacgactaccgattctgcatcctaatataaatttttctagcatactttgtcctcactcatacgctttccttagaagattttccatcttgagattaccccaagttaagtatgcttaactcgatagtaagctcatggtgggttatcagaaagtagatgcttctttgtcgttcctaactgtattttttgcattcattctttcattaataaaattcaattgc

SEQ ID NO: 156720 - DNA, 887 bp, Cannabis sativa
tccaccatttggccgatccgtggtaaggggaaacagtcttttgggcaggccttgtttagatcggtaaaatctatacatacccgccaagtcacatttggtttaggcaccagcaccggtttggccagccattctggataattcacgtcgcggatcatgccactggtttgtaatttgtccacctctttctccaggggttctgccttcactgggtcgagggggcgtcgcttctgctgaaccagtggcatgtctgggttaacgttaaggacatgggttatgacatgggttatgacatggggacttatgccggtcatgtccccttggcaccacgcgaaaacatgcgtggctgcccttagtgcttagttattttttctttttcctcaagctctaggctttttcccaaccggaggaccttggcggggtcaaggtcacatattgatacttcctcgacatcctccataggttctacaactttttcggatcccacatggggatctaactcatcctcttccgccgttcccggctcaataacttcacggaccatcaatattggtaggtgggcggcaacattataacactgcctggcctctccctgtttacccctcactatccctaccccagcttccttattagagaactttagacacaagtgcttgatcgacgtaactgcgccgaagtccaccagggtcggttggccgaggattgcgttgtaagcagtcgcagtctaccaccacgaatgtgtagtatttaaaagtgctttggggtgtgtccgggcacaaagtgactggcagccttacttttcctattgggataagtgttgttccattgaatcccgtgagttgggaaccacttggcaaaagatcccggtctgtgaggcctatcgctgtgaa

SEQ ID NO: 156721 - DNA, 521 bp, Cannabis sativa
ttgcatatttcatcaaaaactcaataatactctcatccacatctctactttattcttcaaaatacattattataagttttttttttttattttaccttaaactcaagaatactctcatccacatcattaagcttcttttggcacttgggttgatgcattattgcacattggtgatgctgatatggtctgtcgtgctactgtactttgttgggcggtgtggaaaactcgaaaccataccgtttgggacaaaaaagaacctctactgtgaatgatgttattgtttctacttcaactacttttgatcattggaagaaagctcaggataaatcaactcttaatgaaggagttgagcagtgagtactagatgtaaatcacatcaaaataaacgttgatgcagctctttttcatcaagaaagttccttggctatgcgttggttgcaaggaatagctcagcaaatctcattgaagctaaaacatgttttcaaggtggtcattacactgctgaagttgtggaggctttg

SEQ ID NO: 156722 - DNA, 602 bp, Cannabis sativa
tgggatatcctcctctcggattctcaactgatgatagcctgatcggagatcaatctttaaaaagatagtctttccctgaagttgatcaaaaagatcgccgatcctaggtaaaggatattgattcttgattgttagcttattcaattcctggtaattaatgcacatccacaaagatccatctttcttcttaacaaacaatactggagctccccagggtgacacagttggccgagaaaaccctatgacaagcaacccctagagttgaattttcaattgtttaagttctgctgaagctatctttaaggagccttggaaaccggttctgctccaggtgccaagtcaataacaaaatcaatttctcttagaggtggtaaacccagaagttcgtcaagaaaaacatctagaaattcccgaaccaccttgatgtcttctggccgaacaaagtcaggccaagtggtatcgaataccacgaccagaaatcctagacatccttctcgtaataattccgtagtttttagcactggaattactgagatccgagatccctgaaccgatccgacaaaaacaaacggttcttcaccttcaggttggaagattaccat

SEQ ID NO: 156723 - DNA, 511 bp, Cannabis sativa
atctcggatcaggccattggttagcagcttgtctacttctttttctagggcgtccgcttttactgggtcaagggggcaccgcttctgctgtactggtgtcatatctgggctaacatttaggacatgggtaatcagatgcgggcttatgtcggtcatgtctccttggcactacgcgaaaacatctgtggtcgcctttaatgttttaataatcttgtttttctccttcagctctaggttttccccaaggcggaggatcttggtagggtcgaggtcacacactcgtacttcttcgatgtcctccataggttctacgcttttttcagatcccacgcggggatccaactcatcttcttcccccaactcttggttaacccactcacggaccatcagcacaggcaagcaacattataacactgcctggcctctccttgatttcccctcacggtccctactccggccttctgagtgggaatttcaggcacaagtgccggatggatgtgattgcgccaaa

SEQ ID NO: 156724 - DNA, 612 bp, Cannabis sativa
caccccattggaataaataactcagaaattctcattcactttctctttctctttctctcttcttcttctttcttttcatttactttatattattttataacaatatttttatttttccttctttttttcttcttcttcttcttcttcctttttttttctctgtaaactgagagccatcatcactcactaccaacacccacatcactcaccaccataatcccatctcttccccgtactctctcacttaacagtaggtatgaacattcatttaacctaaagactaaaaccccaaaaatgaatataatcacatatggaaaaaattaaaaacccatagccgttcaaatgggaatcgtgaatgagattcaaatgacaagatccaatgcccagatctctttgcacgacaccaccaccacctccttcccagacctccctcgaacataccacgccgattctcccattctggatctctctcactcctcatcttcttagtgggcgccgaggacaacgagatttaggctcccctttgtcaagatcatctttagcacgttatgtcgacggaggaactcgcaactgcaggaggttgggacaacgaagcttcgaatcgacgagctt

SEQ ID NO: 156725 - DNA, 927 bp, Cannabis sativa
  modified_base (443)..(443): a, c, t, g, unknown or other
gatttctggaggaccccatatcggagggactacccaaaaggagctgaaacgttacgtagcggccgtaaaacacagtgaggtttgggaaattactactaatggatcaaaggtcccggctaatggatcaaaccattacgttcacagaagaggatgctaagacagtctattttcctcaccatgaccctctggtcatagagactcccattgccaacaagattgtggccagaatcctaatcgacaacgagagttctgtgaatttattgtttaaagaagccttcatggcaatacgactcacagaccgggatctttcaccaagcggttcccagctcaaagggttcaatggaacaacacacatcccaatggggaaagtgaggctcccagtcaccttgtgcccagacacaccctagagcaccttcaagtactgcacatttgtggtggtggantgcccaacagcttacaacgcaatcctcggccgaccggcccttgtagattttggtgcagtcatgtcgattaggcacttgtgtctgaagttccctactcaggaagctgggatcgaaacagtgagaggcaatcaaggacaggccaggcagtgttataacgttggtgcccacctacccgttctaatggtccgtgaaattattgagccaggaatggcggaagaagatgcgttagatccccgtgggggatccaaaaaaattgtaaaacccatggaggacgtcgaggaagtgtgggtgtgcgacttcgaccccgccaaggtcctctggctaggaaaaagtctagagccggaggaaagagaaaaaataaataagacactaaggactgccacggatgtttttgcgtggtgccaagaggacatgaccgacataatgttgggttttatgcgctaaataaaactctatttcgatgtaatccaaattattcaatatc

SEQ ID NO: 156726 - DNA, 556 bp, Cannabis sativa
gttcttctccaactttcttgaagcctccttaaagtacttacctcgccagttcaacatagacgcccattgcctggccaaggacgccatcaagttgagggaagaaggtcatgaggaattattctaattccttttttgttgctgcttgtgcttagtgttgttgttttgcagcttgttatcttcttcttcaaaaaaaaaaaggaataaaaacattatttaagaaagagcattttaatagttattaatagtgtctagtattattttaaaaagacgtcttacaaatagttaacaatattctataataattattaaattaaattataaaaatttgatatttaattataataattatgacatcttaagtaatgctaagtaccattattattttttaatatttatctttaaaaaatatcttattgaaaaagtaatctaacattcctagattttgttttaaaagaaatcggatggccaatgaactatttcctaaatatccaattatcatgaaataaataacttcttattaattttttttttgataagtctatagtacatcttttaa

SEQ ID NO: 156727 - DNA, 628 bp, Cannabis sativa
tgaaattataatatgtaattctttttagaaaattaaaaatattaaaattatttttttaatgtgaaattataatatgtaagtaatagtaaattatatagggtgataaagttaaggctaaggttgctaaaaaaaaatctaaatatttatttttgcatactactattttacaaatatgtatatatatatatatatataaatgcaactatattgaataaaaaaaacaataaaacatgtttttacatatattgagtaaaatttagttttattaatcaattaaactcaatcattcagcatataattgataatttagttaaaaaaaaaagcaattaatcaccacatattttgtatatgattaacctcaacataataaattaagagtgagaagtgagaactttctagtaatttaatatgtggaagcccaaaacaagattgtcatttttataatagttatttaaaaagaaaaagcaattaatcaccacatattttgtacatgattaacttcaacataataaataaaggagatttttaatatttatacatgattagataattatttataaaaataacaaaagtaattttaattattaaaaataacgttagtaataccgaataagaaataatgcactta

SEQ ID NO: 156728 - DNA, 645 bp, Cannabis sativa
ttctcttcttcccggactaaggccgcgcttaccgcgttctcggagacggccaagtacagaaacaagtcctctctgagaacgagttttgacaggatttgaggcttggccatgtgctctttcagttttttgaatgcctcctcgcactcgtcagaccattcaaactctggcacttcttcaaaatgttaaagaagggaatgcacttgtctgtagatctggagataaaacggctcagggcagtatcctttccggttaggctcttcacgtctttgtgtttcttgggggatggcatgctcaaaagagcttgaattttttctgagattgcctcaatccctctctgactgacaatgaagcccaagaactttcctgatttgaccccaaaggtgcatttcattgggttgagcttcattcagtatctccagactacctcgaaacattcttctaagtcgtccgcgtggctattgcacgctttagacttgagtaacatgtcatctatgtacacctccatgtttcgccccaggaggcctttgaacatctggttgaccattctttaataggttgtccacctctttctctaaggcttcggccttcactgagtcgaggggacgtcgcttctgctggaccggcggcatgtccgggttgacattg

SEQ ID NO: 156729 - DNA, 763 bp, Cannabis sativa
ttttttttttttgtcaagtgaaaattttatttattttaaattaactattaataaataaaaaaaatattatttttagaatatttaataattttgtctcttgaattttcgacaatactgattctgtcttaaaaatatacggtttggtaagaatctcttcaactttatatttacaaaaatttagtaatttgtctcctaaattttgataaatattaatcgtacccctcaaaataaaaataagaaagattaaatattttttttagtaaatcttaaaaaattaatttagatcttaaaaaattatttttgaaaaaaaaattatttttgaaaataattatttttgaaaatttaaaaaagaaattaaatttaaaaaagaaattaaaattttaaaactaattaagcgattcaaaaaattatttatttttttatcaaaaattcatttaaataaaaagaaaaatgtatattaaaaattcaattttcaataaggatttgaggagaaaccttgagccaagatcaaagataaaccttagatactttattccttgttgtttttaaagttttaaacttgattctcgtatgtgatttttgggaatttgggggtttaatttatttgaggttaaataatattacaaactattttgaagcttgattttagttgtctatagcttgtttttggaagttatagcagctatagcagatttgaggaagtttgggttttgaaaactcaagttttgctcaactatggtgaatttcattgcatgttgtttta

SEQ ID NO: 156730 - DNA, 608 bp, Cannabis sativa
tcttttgagtaagctggaacattagtaagctggaacattgtaatttaagctggaacattgtaattaataggaacattgtaattaatagttatgatgaggatgcactaccatagaaaagggctaccttcagtatggtgatatagcatccaattgtgggatcaatttgaaaaaggcaaaaaataaaaatcttgtcaaggacaatgatcctattttcactgcacacacttatgtctgacaagtgaattaaagtgtgtaagtctcctccactcaactaaaaaaaatattatcctgattcacattatttgtaacatttctatttttttctcaacatctgttaagtatggttggtggttggtttttcagattctcattagctattctcttttgaaagcatatcatgtgtatttttcacttgttatgaaatttgattagtttcttactctagaacacctttttcattattgtacatattttatttatttttatatgtttcggattttcaaaaataaaaataaaaaaatataataaaaaataaaaaaagagagggaggcatttgtgacttgacttgttggctaagaaatttgtgctttgtttggtaagtatcaaca

SEQ ID NO: 156731 - DNA, 702 bp, Cannabis sativa
cagtttccctccttaaaagcaaatatgggaaataaaaaataatcaagtgcagccatcagccgtggtgaggaaaaattggattttgaaatattaattatcagagcatttattagccgaaaactgaagggacgcccattcagcctcccatcgagtctcagacagtcgcactcgacacgtgtccccatccaaaggtagaagcagctcagatgaagtctacatgcaacttcggaagtcccgtacagacttgggggcaaatgttatcccaatttttgcactcttacgtggcatcgcataatggtgacacgtggaatccacttggagtatctgctcagagggtacagtccgagcaggatgcctcgctggcatgaccagagcaaagcgatcagcaatccgcgcagggtaaccaatacttaccgaatttagcttttgcattgtgagtcatcaacgaaatccctataacttggggatcagattacagagatatggcatacccacgatcccacgatcagtgtattctacatttatcccacgatcaatgtgtttcgcatatatcccatgattaatgtatactgtatggatcgtgcaatctttttgcttttatccattgtaacgagaggagaaacacttcctctccaatttcatagccctataaatagtgatgcatattcactgggctagaggtcgcaaacagtttagtcaaga

SEQ ID NO: 156732 - DNA, 506 bp, Cannabis sativa
aaacactaagttctcaaccacccctattgcttccctcaacttttgtaagaaataggtccaagagtcattgttctcactgtcaatgataccaaaagcaataaaaaaacaattggttatttacattttatcccacgacaactaacattatgtcgccatacttcgccttttagaatgtgccatcgataataacaacaaatgacaaaaattaaatcccctcctacatgcaccaagtgataaaaaacaatattgaactgttcatcctctacatacaaatcaaaaatggtacctggattcttatgtagcagcttgtacaagtatctaagtaacttcatataggataatttcggtattcccctaacataggtaagtgccttctccctgcacctccatgccttcacataactaatctagataccatatgagtcaaatatgcccttctgtatgtcttaaacattgtacttagttccatcttggatatactttcccttaataaggtgggcaaccac

SEQ ID NO: 156733 - DNA, 597 bp, Cannabis sativa
  modified_base (427)..(427): a, c, t, g, unknown or other
tcactgcagatttcaatgtgttctacttggattggatcactaacacttgatctttaactccgattacagcaagaaaatcacacccaaagctgctgcttcctagggctttcgatcaagagaaagagagaagaaagttttctctcaaattcacctgttttttataaaaaaatttcttaattctccaaaatcatcaacactacacttaggctattttaacaaattgtggcgagctgccactttaaaattcagccacaaaaacaaaagggtaaatgactaaaatacccttccccacttgattaattaacaaaaagatcttagggtaaaatagtcatttctaactcacgactaatcctgacattcccaatgtctaactaaactgccccgctatacttaaaatactaggatatgattctaatagccaaacacngcgttccaatgttgccgggcaccgaatatgcaaaattatgaaatttctatatatgacatataaaatgcatcctggcttcaaataaaatatcataaattaataatttagaattaataaataatttctataattaaactctaattatctactaatttctaaatttaagctaa

SEQ ID NO: 156734 - DNA, 556 bp, Cannabis sativa
atatttttcggttttttaatttttttttctcgtgtaactctatttagttataacctccaaattataatataatttacttggtcctaagttattcttggatagaggttcaactgtattacggtatacattattttattttatgttagtttttttattattaaatgtcatatataattttaaaataataatgtttaatataggtggataattgtagaatacttaatagtaatttgacaaaaaaaattaaagtaaaaaatgttagtaaaatatattaaacacaataatagtaaatttatgaaattaaaagcaaaataatgtgtaaagtgttgataattttttttcgcaaactgatagttttcatttaaaacaaaaaattgatatcttatgttttgataattaaagattacaaatatacgaaattttaaaatcaaatttaaaatttaacaacaaatatcaaaattagaaaacgatttttaatgaaaaattaaaaaaatctcaacaatctatttaaaaaaaaaaatgtatcttggaatataattttaattttttagtgtaa

SEQ ID NO: 156735 - DNA, 500 bp, Cannabis sativa
acttgcccctatttataattacatagtcagacagttaattacagagttgactgtaatctttacaacaattatcccctgaaattctggggtttgattacatatcatgtattataaatgcggttaatatttcaatatcacacagttgtgattagtccgcttttactgggtcaaggtaattgtgtattaaacacgttataaatcttgacggtcaaggatgtctcgataggaactcggtaccaatgaccttgatagcgagctagagcttttcccctatctttctgaggttgataatataagcctcgtggcttcttcgcttgatgatataacacttcattttgacaatcgcagttcttaatgacaaagggtacttcaacagttaacattatttgtatgtcagcttctactcaagagaactgactcgtcaagactacaaatctcactaaaagatgtctgaagctgattggtgaaagtacaaggagtgtgccttcctatagggagat

SEQ ID NO: 156736 - DNA, 675 bp, Cannabis sativa
acataatgtatttttaaaatatagagaaagatgacaattttataaaaagatattagaaatggtggagcaaaaaatttgcatatgtttttataaaaaaaaaataacagcttctgaatttaataaattgtgcttgtgagtggtgatgtagtttttttttaaatactatttaaattctattttttaataaaataaacaattcaaatcctccctttaatttataaaataaattatcatttaagaaaatgaagtagcaaattaataacttttgtgatacacgttttgaaataatatttatcatttgtaataatagaaaaaatatatttatacttggttaattataatttttgcaatatagtcttagtgatgaatttatatattttataattagcacaaatacaaatgagcttaatattcattacaaaccaagtaatttttttaccctttaaaaatatattattattttactatataatatataatttataaatttaattgatataaaagtatttgttaaaaactttaatgtggttctataattataaattttttcttttaaattttagtatttttgtttaatttttaatttaaaagtttaatttttttatattaaaaaattaaattaaattaattattaatatattatgttatttaaaagttctttctctctctctctct

SEQ ID NO: 156737 - DNA, 629 bp, Cannabis sativa
  modified_base (44)..(44): a, c, t, g, unknown or other
ctgactgagagtacacaaggatgttgtcgataaacacaatcacntagacatcgaggaaatccttgaattacctattaatcagatccatgaaaactaagggagcattggttagtccaaacgacataaccataaattcataatgtccatacctagtacggaaagccatcttggaacgtccccctctcggattctcaactaatgatagcccgaccggagatcaatctttgaaaagaccgtcttcccttgaagttgatcaaaaagatcattgatcctaggtaaagggcatttattcttgattgttagcttattcaactcccgatagtcgatgcacatttgtagagacccatctttcttcttaacaaacagtaccggagctccccagggtgacacactaggccgagtaaaccctatgtcaagcaacccctagagttgaattttcaattctttaagttctgctggagccattctataaggggctttagaaaccagttctgatccaggtgcaaaatcaattagaaaatcaatttctcgctgaggtggtaaacccggaagttcatcaggaaaaacatctagaaattcccgaaccaccttgatgtcttctagctgaacagagttaggccgagtggtat

SEQ ID NO: 156738 - DNA, 550 bp, Cannabis sativa
  modified_base (118)..(120): a, c, t, g, unknown or other
ccaatttcttggtgattttttcggcgacaatgccaattccgacgaatttcccagagtttactgtcggtactgaaaaagtcaccggattagcttctggtgtattagtcgtcagagttgnnnccaacgccagaaaagtcgtcagaattgtcattgtcgttagaaaaatcactggaaaaatcacaaagaaactggtatctacatcaagaaactagtttgtttcttcatcaagaaaccagtttcttggtaatttttccggtgagtatgccaattctgatgacttttttgaagtttgctgttgatgccggaaaagtcgctggagtagctgctagcttcagaaaagttgtcagaattggcattgtcaacggaaaaatcacgaagaaagtggtttattcatttagaaaccggtttcttggtttcttagtaattttttcagtgatttttctgccgacaattctaattccgacgaattttctaacgctggcagcaactccgatgacttttccgttgccgaccgctactccggtgacttttccagcaccgacagcaaact

SEQ ID NO: 156739 - DNA, 515 bp, Cannabis sativa
  modified_base (221)..(224): a, c, t, g, unknown or other
tttctcacacagttcatgatccacttaacaaacttttcaggaaagcaataggccaccaaaagcttctcaagaaaatcccaattgaccgtgtcataagcttaattatgtcaattttaatagtgcatcttggggagcaattcttccttctataattcttcaagatgtcttggagaataaggatattgtaagcaatggagcgacctttaacaaacgctccctgnnnntggctcactaagttaggcagaacattggcaagccgagtatagatcagcttagaaacacatttgtacaaagttgtgcaacaagcaataggccggtagtcaaatgctttagaaggactctcagtcttaggaataagagagagagttgtgctatggagctctgtcgggaattggttggtttcaaaaaaaatgagcaatagcagcgtgaatatctttccccatctcaggccaaatcgaccgaaagaaccctgaaccgtaaccatcaagtccaggagacttagtgataggaatgct

SEQ ID NO: 156740 - DNA, 604 bp, Cannabis sativa
ctgtttataacattgaatatctactggttgagtagtcctgtggattaattctttagcctacttatacaaaaatattttttatttcatgtttagataacttttaaacacttaaagtaattttaaagtattagtgtaatatatttacttagagtaatataaatcagtacatgtatttatttaacttgtcaatttaattcttacttactctatttatatagaatttatacttaatttaaatatattaataaaaataaaaaaaaatatatatatatatatatatatacgaagaaaataaaacgtacccctatgatagtagttattacataataatcgctaccatatggcagtagttattatataataactgcttccataggtagggctgaatatcgggcgggttgaactagttttggatttgcgggttttaggttcaaaaaaattgtatccacacccgactcgtgaaatggttcgggtttccaggttttgggctcgcgagtctggaggttcgagttgatcaggttggctgttgaccccttaactcgttaatctttttttttttttttaaatgaaatttatgtagtttttctatatattaaattaaaca

SEQ ID NO: 156741 - DNA, 501 bp, Cannabis sativa
tagatatctcattatcaattgtttgagaatgttcttacatgattaatttcgtattttgcccaagattggaattacaattattttattttatgttcttaatttttcggattgattttgccattagatctacatattcagcctttaatacccaaaattagtagcgtagatcgactagaaatagattcctgaacaaaacccatctatttcccgatgttttccgtcagtttttcgctggattttcactgcacacccgaactggacgaaccgggtcgcgtgacctgtttcacaggacccgctggaggaagaaggagtccagctgtgaagcccactcgcgcaggcggcgcgtgggggcgtgtgaagccacatgcaacgtcgttttttgacgttctttttaccaacgtccttaaaatttaatttataatttttctatgatttttaattaattttttgactccgtttaataattattattattttaataataattatgtagttaaaaaa

SEQ ID NO: 156742 - DNA, 689 bp, Cannabis sativa
ttcgaatcaggtgggtgttttcacaccctttagcttccctttttataaaatgggttaaaaaagggaagctaaaggcacatattgtagtagtgtcaatattcattaaaaagaggaaagttttaatcaatattatactaccaaacgataatgaaaaagaaaaccacttaaataattagataagaagattgagcttaaatattacgaactattacctaatggaagataatttgttcaagcaaaactcaataataattttgcctagagtaaccgatcatttaaaatttaaaatttcaccagctttaaaaaaaatgagccttgaaatcaagaatgtgtgcacttaatattacagtaagggggcgtttggtacagggagttcaaaataatctgattaaggggaatattatgaaagagaatatgattatatgtaaacttattactgtgtttggtttatacatgggaatatttaactagattactgttaattagattatagtgtttgattgagtacatgaatcttatatattatttaaaaaaaaaagtgaaataaaataaaataataattgttatatctcttttaagttataattatacgtaaaataaaataattttttgttaattatatttattaattaataaatttatgtcattgtattaactaaaataacaatctttcacttatatttttatat

SEQ ID NO: 156743 - DNA, 629 bp, Cannabis sativa
acaagacaaatgagatgagagatagagattccatagagaaattcaaattcaaattcaagttggcctagcgaacattgatgctctcaaaaagatggaattaaatgaaataggaaaatatttttgccataactttatatgctgcccctttaacttttctcgtaagataacattaatacctccccaaagtcacctaatcaacaatttatacaagtatatcccactaaaactttgaacttctctcaaactcccttaaaattttgatattcactaaagctccataagttggattagtgcacttctctccactaatgtagtataaacttatccccttgatcaatagacttctcttgctatgtttattctctctttttttttttttttgaactaaaatgggggaacaccccaaacttagttgcaagcacacttttttttctttctttttttcttcattgctgatttttttttttcatatatatattagaaagaaaattattactatattatacttatataatagatagcaagagaaggttaattgaaagtgcataataaaatactttgtgacctaattcccccaccctaaacttacaacccaacattgtccccaatgtggctaaaagtataatctt

SEQ ID NO: 156744 - DNA, 631 bp, Cannabis sativa
  modified_base (428)..(443): a, c, t, g, unknown or other
attcaatattattcaatatatatatatatattaaaatggaattaacgtattattttaatattataaagcattcaaattattgtaaagattttttttgggaatcaccttatatactatttttatttaaaacttacaggttgggttacttttgtggtttctctgatgatttttatgtgggttgttatgtagatctttgtgacgattaaaattgctccaataattgctatgtagatttttatgtaaatttctgtaaaaataataataaaaaaaatattttaaagtgtaaaaatatttttttttcttttaacaagaataatacgataaaatttaaaagcatagttccatcacatctattaagaaaaaagaaagataaatacactttttgcaaaatatatatttttttaattttaactaaaaaaaagtaatannnnnnnnnnnnnnnntttttagttggccaaataaataaacatacagtccaaataataataaaaaaattattcaaatactcttacacacaccttcaacccaggatccatgcttcatgggcaaccatcacaaccacgcatcaactcaacgcaaccaaaacgaaaattcaaccagaaagagaaccaccattaattctggcgacttc

SEQ ID NO: 156745 - DNA, 515 bp, Cannabis sativa
tttaataatcatttttttaaatacatttaatttttaaatgtagacattttaaaaaaatttaaaattaaattaaagttgaaaattaattctttaattaattttatatcaacttaaatcaagtaatttttattagaatatcaatatttagtttatgaaatatctagatagttattgtctaagtagactattttgtattttttttctagatctatttaattaaataaaaaaattaatatttaagttgattcatttcaagacacttaaatattagatatttttttaagaaatttaatcaaatatgaaaattatatttatgttgaaaattattttaataattttagatcaacataaattaaaataatttttcaagatttatttaatttaattttaataaaatttgaaaatgtgttttttttaaatatattggatttaaaatttaattatatatatttatagaaaattaaatttgagttttaaattaattttaattaattttggaccaactcaagttaagt

SEQ ID NO: 156746 - DNA, 671 bp, Cannabis sativa
agttactaagtgttgtaacacatgcacgacgtaccccctggtactcgtgttggtaacactgtaactaccctaaaatcctacactatactaacacccttaaattcacatcccatatagtgttagtagtgtaaacaattaatattgagaatatatttaaatacatatcgtttatgctatcttacctcgttccgtgctcaagtgtgccggtcagcctgagtggaaacgcatctcgacgctttacagggccctaaactataatattcaaaactcgatgagagacaggctaaaacaattattggggatttaaaattgaaactaaggatatccctatcaataaataggatgctaaaaccctaagtaacaaaacactactacaaaaatatcagaattcgcgatggtcctaaaaatgatttttttcggggaccgtcgctaaaaaaattaagtaactatataaaaccgtcgggaaaaattaagtattcccgacagtttaaaattgtactgaacaaaataggcaacgttttttttaataaaatgcaattttttaatggacctttataggtaacgggtaaaaaccgtcgcctatactataggcgactgtttaaaaccgtcgcctatagtattaaaccatcgcctataagggtccattgaaaaattatcacctacttcttgcc

SEQ ID NO: 156747 - DNA, 551 bp, Cannabis sativa
ggaggagagtgtaatttcttaatcagtgataactaattcagttaatctgattatttatcccaccctcatgcaagtgagatttttttgttgtttttttaattttgattttattaatatatttgaaatttaataagaaattaaatgaaataattaccacacatttatttataatttttttttatcaaaatcttattcattaaaattagtgaaaatgtataattttgaattattatatattagttttcaaaatttaaaatattaataattaaacaataattttttaagagaaacaatatgatgataaaattatatgtttttttttaaattactaaaaaaattatatatatatttcaaaaaattaatatttatattaaattagtgattaaataagtgtttaatataaataattttatatgggtaaatggcgacaaaattctcaatactttcgttttgatttcactaaactctcaaaatctaaatttctgcgggtaaacccccaatactcgtgttctgttagcaatttaaccattccgtccaaatttagctgttaa

SEQ ID NO: 156748 - DNA, 514 bp, Cannabis sativa
ccaaaatttacaattttataaaaataaaaaaactatggcctatggtgacacgccacgcgtgtgagcaaacgtatttacccacgcgttatgtgcgtcgttaaagccacgtgaatcacgtggctttagtgacgcgcataacgtgtgggtaaatgtgtttgctcacacgcgtggcgtgtcaccatatacctttttattttaataaaataaataaaatatataattaaaaattaataaaataaatataaataaataattatattaaaaaaaaagaagaaattagatgagtataaattcatctttttctaaccaaaccctaaaaattcttcatctttttctaaccaaaccctaaaaattctaacctaactctctctccctctctgcttcgtgtgaacagaaccccaagccgccccctccaatcatgaaccccaagcccctccaatgcaaaccagaacctcaagcccctccacatatttgagttctccatcacccaaaaccccaatcgtcaactggtcgt

SEQ ID NO: 156749 - DNA, 646 bp, Cannabis sativa
ttgtccttctggattgacggttgtgaattaaccgccaatctaatagaattgtaactgtctgattttgatataatcttgggaatggattttctgtctaagttggggcaacgacttactgcaagtggaagatggtggtgtttgagcccgatagtgccaacccatcagtgtttgttggtaaagttcagggaactcgtataccaataataaaacttttgaaagctaaggacctaatcaacagaggttgtctgggattcatagtcactacagtggatacaagccaacctgttacatttggacttgaaaatacaagattggtgtgcgagttccttgacgtttttccagaagatttgccgggattgccgcctacccgggagattgaattagtaattgagttggttccaggagcggaaccagtatcaaaggcaccgtattgaatggctccagcaaaattgaaagaattaaaaatacaactgcaagagttactaaatgtgggattcattagaccgagctagtcaccttggggtgctctggtattgtttgtgaagaagaaagatggatctctgcgaatgggtatagattaccgagagttgaacaagctgttgggattttatgccctaaataaaacccatttcaatctaatctgatt

SEQ ID NO: 156750 - DNA, 1073 bp, Cannabis sativa
  modified_base (1046)..(1047): a, c, t, g, unknown or other
tatatatatatatatattattacagtcttttggattataattttgatttttgtaatttaaggataaaagatcttgaatttactctgaataaccagaaacgaccttaaatttacactttgtgaccatcatggtcttttatgttcttcaactaactttaaagaacttgaattttctctgaacgaccataaacgaccttaaatttacattatgcgaccatcatggtcttttatggtcttcaaccaattttaaagaacttgaatttgctctgaacgaccataaactaccatgaacttgcattatgcgatcatcatggtcttttatggtcttcaaccaattttaaagaacttgaatttaatctgaacgaccataaacgaccttgaatttatactaagcggccatcatggtcttttatggtcttcaacctattttgaagaacttgaatttgatctgaacgactataaatgaccttgaatttacactatgcggccataatagtcttttatgtccttctaccaatttaaagaacttgaatttgctctgaacgaccataaacgaccttgaatttacattatgcgaccatcatggtcttttatggtctttaaccaattttaaagaacttgaatttgatctgaacgaccataaacgatcttgactgtacactatgtgatcataatggtcttttatgttcttcaaccaattttaaagaactttaatttgctctgaacatgaacgaccttgaatttacactatgtaacttaaatttgctctgaacaaccataaacgaccactaaggtcgcacacggtcacatagggttgcacatggtcgcactatatattttcataccacatgcgaccttgttcatttagttaaatttgtaattctttttatactttttatatttatgttcttatcgtttatatatttttattcatttcacacatttttattgtagatgtccaaaactatattagtaatagagcttccatgtatacctcgtgccattactactaatacagctgcaaaatctaaagttaccatcaaatcnncgctaagtgtaataggccaaataaag

SEQ ID NO: 156751 - DNA, 530 bp, Cannabis sativa
  modified_base (207)..(217): a, c, t, g, unknown or other
aattttgtatacattattttaattaattacaaaatatgtgcaaaaaaacttattaccattttctcatacatttttatatacaattagaaactatttttcaatttttctttttataatatataaggtaataattattaactattgtatgtatatatgtctttattttattttctattaattaaatatactaatttaataaacaaaatnnnnnnnnnnncataagtttattatatcactatatgtgtgtcatgtttatttttttaataatatttcagaaaataattaatatacatacttgtttattttttttcttttttctttgtttatagtgtcatgtttttttttattctaattataattaaataatatttagagtttataaagttatgtttatttatttatttttcgatgtaagaattgtatttccaaataaaattcgtttactaactcattagaaaataatcaatatatagaaataatagaaagaaaatatatttattttagtaataatataaattggctatgtctat

SEQ ID NO: 156752 - DNA, 705 bp, Cannabis sativa
  modified_base (546)..(546): a, c, t, g, unknown or other
ctactgatcctcaagtggctcagcttgccactctgcacaatgccgaacaggattcgatcgtcccgattgaggaggatcgtgagggggacaccgaggtccaggaggttgaggagctggacgatgtgcgtcgcagtagtccctctgaggcggagcgagaggaagaggttgaagccccaaattacaggtggtacaatgaggctgggtagccagtcgatgctaacagagacgtcatggtcgagggtgttgactgcgtcagtgaggagcttgtcgcgacggttccgcatagaaggtagggtgccttgggcgccagatgggtaagtcctccgtccaagattacggaggcgtgccttcaaactcttgagcacgacgtgtacctgggcgagctggactgctacattcccgctcacaataatcatgccacaaaccctaacaaggggatgtgcgcctggtcgagggtccatttctagcaaagagcgttgatgcccttgcacaagtacttcaaggatgttgcggacttcttcggtctctgcccgacccagttcactnctaagggcattaagtatttgtctgccctcttcgtcctttatgcttcctaaggatggggtaaatccttcttctcacgaggttgcctggttctttgatttgaaggcgacccccaaacaaggcaggttggggtacttctatttctctcagccaagcttcaag

SEQ ID NO: 156753 - DNA, 510 bp, Cannabis sativa
tgtgccctaaaaaaaactctattttaatgtagtcttttctattcaattatcaataaaaaaatagatttattttcattacttatttagtgtgttattaagttcatgtgattatttatttgtttatttgatttataaattcatccaaatcattatcacattgatattcttatttattgtatcgtcaatacagtgaaaagtaattaagattgtgtgattaaatatattcatatgatttttctcaaaaaaaaaaaatatatccatatgatttatcagtaaatagggtttaattgatatgataatttacagtgtagtttactttcaccttggataagtgctatgtcctttcaagggcattatttaaagtaagcttgggttggatgtatggagtatggatcagaagagaacgatattgaacttgaatcagatatggtaaacttaccgtaatatctattcaactcaatatcatctagttgatcttagatcaagtgatctcaatcctgagatgattag

SEQ ID NO: 156754 - DNA, 719 bp, Cannabis sativa
  modified_base (26)..(27): a, c, t, g, unknown or other
  modified_base (302)..(309): a, c, t, g, unknown or other
atcattaatgaaaattacttgatttnngttgatctaaaattaattaaaattcatttctaacttaatctaattttcaaaattgaaaaatttcaaaatatcttcataaaaataaataaatccaattcgaaattacgtgggaaaatgattattaaaataaattgcaataaattctaacaattattctaatttaagttgatctgaaattaaaaaaaaaaatccaccttaaatataattttctatttaattaaattcatttcaatagaaataattgagtatgttgaataaaatcaacttaattattnnnnnnnntttaatatttaagaaaatattctaatttaaggtagtccaaaattaattaaataattaattttcaacttaaatgtattttctaatttaattaaatttcatgaaatagaaacaaataaataagtatcttgaataaaatcaacttaattattaattctatttaagttttaagaaaaatattataatttaagttggtccaaaattaattaaatgttaattttcaacttaaatatatttttctacttaattaaatattaggaaatataaattagttactagaaatttctatttagaatttttcattaaactaagtattttatctaaattaattttaaaataatctaatgaaaaattaatttcatttattttaaaactaattatgttgctaattcaattttaattaggttacacta

SEQ ID NO: 156755 - DNA, 544 bp, Cannabis sativa
ctgggtgtaggatgtttgaatttcgaagtgatcataaacactataaatagagacatcgactcatcctttgagacatactctcttttatcttcaaacacaaagctatgagaatgtcttttaacaactcccataacctccaaatcacccatttacacctaattaagagatggtaaaagtcattgggtgtaggatgtttgaatttcaaagtgtgtgatcctacacactataaatagagacctcgattcatcttttgagatacactcttctcatctttcaaacacaaagctagagagttctaaggcttgataattcccaaaagtatttccacaaaaccctaactatttcatagaggggaaaataatcttcttgaatttcaaagtgtgtgatcctaaacactataaatagagatctcagttcatcttttgagacacactcttcttttttatctttcaaaacaaagctagagagttccaaggcttgataattctcaaaaatatttccacaaaaccctaactatttcatagagggagaaataatcttcttg

SEQ ID NO: 156756 - DNA, 511 bp, Cannabis sativa
ggtctacacaatgaggcagcttccaccaattagccaacactatcctgagccaccattccaacatcgacctcattaatacagaatattaattatcagacctaggattgtacgttagtcggtttgatcggtttatactacatacttttaacctattgtaaaggtcgacttacaaaattataagtacaacccttctaaataaaggaaaaaaaaatctgatcgacgggtggtcgggttaacccgactaacccgatgaaaaaagattttttttttttttaaaaaaaaagataataaagtcaataataataataataataataataataaaacaaaaaagtgttttataatcattagtaggaactgtaactcattaaatgtatcactttttattttttatgcaaacatataatattacatgggtgactattcaattgttacatttttattgtaaccatcatggttacattttcctttgacctataatagcaagttactaataggtaaacattccttt

SEQ ID NO: 156757 - DNA, 572 bp, Cannabis sativa
aaaaataatctaacattaaatcaagaaagtggcatacccagcagctctgacccggccagagtgctcgggtgtccctaatgcttgaatcaatatgtcgttctgaccactggctaaaacttcacccgagtttactttttcctcgagttcaacctatgcagtatgattgataacggttagtactttataataataacaagacatatattcatgttattaaattgtgttagatatcacttactatccttgcggaaatctccctatctaagtccgtaactaggacattattcttcttacaggaattcaaccaaacttgatggcggggtggatcttgaattttgttttcttttttctacaacaaatacgtaattaataagggttgatatcttaaagaaaatacatagtatatagtaatgtatagtgcagcaaatgtaaccttttgtggatgtaaaattctgctagttttacagcatagtaaaataaatgaaataatactatgtaagataaactcaatggcctccttttgttcatgtatagaaaatttcaatctatatacaccaaaggcttaaagaaat

SEQ ID NO: 156758 - DNA, 590 bp, Cannabis sativa
  modified_base (26)..(26): a, c, t, g, unknown or other
aaatgccgttagatagacacttttantatataaagatatatatatttaattaatatttatatatgtttatattattatttatatatgaaattacaaagcacctctttaaaaaaagtacattgatgtacttttatatgttttggcatctgagagatttttttaattttttttttttttataatcgtgtatattataattatttaatacatgctaaaaatatattgtaaaatttcaaaaaattcccataaatttaacatgctaaaaataaggttcaaacagtctgttgcacgcataatttttttatttagagagtgcattgtagaagcacctttgaatttattgtgtttaaatttaaatgtgaataccataaattatttttatggtaataaaaataaattttcaatgcacctcttcaaaagtggtgcactaatgtactcctactcaggggcggagccacagccaaggaaaaggtggccatggccccccaacaattttaatatccttttatatatatatataaatatttataagtaaaaatacatatatataaatagaaacatactaattaatatatatatataatatataca

SEQ ID NO: 156759 - DNA, 575 bp, Cannabis sativa
aaaaataataaaactaattttttttaaagaaattattatcataatataattaaaataactaaaaaataataatgatacagtatttttttgatctgaataatgaagtcataatattaatattgaaaaaaaaaaaaaaaagcatacctttaattcttcttgtaaagaaaaaatgttgtaatattaaagataaatcaaaattattataattggtgtgaaagaaaaaaaaaacaaatgactagttatgcacaaatatgagaataataaaaatagtaaataacttaaatattctgtcatattatgtcataaattgttacataaaaaagaaataattatttataaatatttgatatagtactttttaattttaactattatttagaataatttccaagttgacgatgatggtttagtggccataaatgtacctaaaaaatcatatattcttgttataaaatgaggatttaattaattatataaattaagtaatataatatgtagagtgttttgtaaaaataacttttatgaaattttttatttataaaataaatttacaaaaaaagttattaataaattta

SEQ ID NO: 156760 - DNA, 502 bp, Cannabis sativa
ctgtaatataaaaataaaaaatagagaatttattctttaattaacatatgcacatattattacaattatttttatgattttaattgattattttaaacaaaattgtacttcatgtactattctctatttatttattggaattctttggtaataggatttgatatgtaaaatgatttatttaatacaatatactttgtttcaaatatttgaatatataatattagtaaatctataatctggtatatttttggctattattgttataataatatttttcaaatattaaaattacaaattcattcttacttcgtttttaatatccatttgatttcaatcactaattttgaattatactaaataatacctctaaaataatcaaaatattttgtagtttgtttgtattgtaatatttatagattgaaaagggtatatgtgtaaattaatcaaaagaagcccaaaatattgtggcttttatttaggttatagatgaagcaattaaatt

SEQ ID NO: 156761 - DNA, 639 bp, Cannabis sativa
gacgacttttttgacaccagcagcaactctgacgaattttctgacactggtagctactctggtgacctttctggtagcgacaaaaaacttcaaaaaagtcaccggaattggcattgtcgctgaaaaaattatcgaaaaaaagtttcttgatgaagaaaccagtctcttggtgatttttttggtaatttttctggcgagatttctaattttgatgacttttctggcgctgattgcaactccggcgacttccccagccccgacaactactccggtgcttttttcggcaccggtgaaaacttcggtgatcaatgtagtttcatttgttttattttttaaaaaaaaatatatgaggaattttaatatttttcatagtaattcagagtagcatattccatgtatgttaagtttttattttaaatactatattttttcctattaagtttccttgccatatatatctaaactagttttattttttctatatttatgtaaataccccataaataaattaggtaaatgtagtaagaggaaatgagattgtatacttattttattttatttgttttattttttatttttatttttatattctttaaaatatatacacttttattaatgatgttttcattatacctctta

SEQ ID NO: 156762 - DNA, 621 bp, Cannabis sativa
aatctgtgggcaccagatcaccagtaaacttggataaccgatcgaattccagagtatactcggccacagacatttttctttgagccaacttcacaaaatcttcctgatgtgaagtccttacagcaacaatatagaacttttcttcaaacagattcttgaattcttcccaggtcatcacactgatgtctcgggtctgacctactatgtcccaccagacgtgggcatggtcttgtaacatgaaggccgcacaattaactctctcagttcccatcacccccatattatcgaggatacaggtaacagtgctcatccactgctcagcctttataatgtcaatacctcccaaaaaaagtcggaggttgcagcttcacaaatcgctcgaacacggaatctcggtgcggcataataaatccctggttaaccaccactggcacaggtgctggtggtaacccttgatcaactggggcagccggttgccttaaacgttgcaactcttcttcttaaccaagtatgatacttcgcaattcttggaacatctgctgccagtcagtaggaggattagcattaccaacccccgcattatcccttggattctgcggaggtgcaggcagtgccggtgga

SEQ ID NO: 156763 - DNA, 725 bp, Cannabis sativa
tacaaagttagggtttcctgctaaatactgtaaacacatcaaatatgccactaaaggctaatagaatgactcgtggactaaggttaattaacacctgaaccacgtaaaaatctccatcttagaaattttagcattttattatttctttagtcctcaaatatttagtttttgaggtaaacattttggtactttcattgagagtcaaaaaaagacgtaaacttatacagttactgctaacatggtttttacacgaaaaactgtaactaagaagaacccttctgatggcaccgacattgttatggaggatgtaaaccctttgtctccaagcctcgcccaactaagcaacgcaggaaaggggatacatccaacccagacaaccgagaggccaaccttcataaacaacataacaatgatgatgacaaactgagatgttgaagatgagaaggaagatgacaatggagagtacgttaaagatggctaccattatgttcaagaccccaacatagtttgagtgtccaacgagttgctcgagaccaagcaaaatctagcctattaagaaaagttttctcaaaaaatggagaaaataatggcttgcctttgacccaagttcagagacctatattagacatagctaaaaagcagttaggtaaattattaaagacacttcgatcagatcgtggtggagagtatttggattctaaattcaaagactatttactggaaga

SEQ ID NO: 156764 - DNA, 677 bp, Cannabis sativa
tctaagttattttccaacctgtgaagacaacaaaatcattaaaccactataagaagtaacatgaaacaaataacaacattagagaaatacttgtatccatagtgtgcaatggcaaaaagatgtagtacgaagcaaattagttatatttttttttgaaacaaagattgcaacttttattaaagcaaataagctaacaaaatagcttccaaaccagaagggacagaccccctactggaaatacgatcaggatcgtttaacaaactaaactgaaacatgaaaattagaaaaggaccgtataagattaatacaatccgatataataagaccaagaggagaaagaatgtagctcttgctattgatagcattcaccaacacaagacaatccgactccaaaatcaccgctgtaggacaaaagtcctcaacaacctttccttctccccagcagctaggatttaacccaactcaaagtctccttcatggacaacgccgcagcaacaacaaggtcaatttcacctcggagtttgacagcagcagcagcaaagcacaacccagcatgatctctggcaatccaatccaatccatgactcctttctctagaaaaaagagcagcatcacaattaaccttcaactctcccaaagacggtttaatccagtgctcaacaccagcacgaggctga

SEQ ID NO: 156765 - DNA, 690 bp, Cannabis sativa
aagcagtcaagattggatgttattgtaaatttagccaataacaatctagtggagttgaaggagtatggtcagtgaggtcttcatttgggattggaccatgcaatccagctgtaaaccgagctactcaatggacgacacctcctcctgaatcttttgctttagcgacagatgctttggtagtgctggggaggggctttgttagattggagagtgatatgggatgcaaagggttttttggttggcgtggtcatcatgcgtgttaggtgatttctctgctaatgtggtggagtttcttgctattcgtttgagtttgactattgcacatcaatttggtttcaatatattccttattaatagtgattctactatggcgattgattggattaataagcttcatattaattgtagtattcagtctattttagtaaatgtctattttttattagctgttcgtggtggtggttcttgcagcaccattctgcgattagcgaatggtgctgcccacactctggcaacctctgctatagtttagaattttggacagatgcttgtccatgatttttaagttattctgtaatagcagatttttcttaatgaaatttatctttctttaaaaacaaatattattaacaatttacaagacaacacacacctcaaggtggtactagaaagctgttgggttttgtgccc

SEQ ID NO: 156766 - DNA, 512 bp, Cannabis sativa
aatctgatcccaaagttatagggacttccttgatgactcacgatgcgaaagttgaattcgctaagtgttggcgttctatgcggattgcccactgctcggttcagagcacttcatttgagcgaatgtacaaagtgtcctgttcgggctatgtcttgcgagcagatacctggagtcgattccacgtgtcaccatcgagtgaccacgtcggagtgtaaaaatcaggataacatttgccccccaagtctgtacaggactttcgaagttacgtgtagacttcatccgagctgtctttgcatttgaatgggtgacacgtttcaggcgcgtctgtttgcgactcaatgtgaggctgacagggtgtcccttcagttttcggccgataaattctctgacgcactcaatgcttcgaaatacaattttctctcaccacgtttgacagttgcacttgattgcttttgatttcccatattcgcttttggggggaaccgaggcgtctgaggttttttgaaatgatt

SEQ ID NO: 156767 - DNA, 644 bp, Cannabis sativa
  modified_base (53)..(60): a, c, t, g, unknown or other
actggacatgaatcttcatttgcatgttcattgtaaaataaacagcaattgtnnnnnnnnacatgaattgactcataccccaaccctaattttttcaattttttcgtggcatcataatagtttgatgaaattttattttcctttggaaaagcaaattttaataacttcagtaattcatcaaatatgttgttaggaatctttcccctaactttcaaatgtaataactttgccaaaaaggagaagatatccaatcacaactaggatacaactcggcctcaattttttcaaataattcatcgcgcaattgatttgcatctggattatcatccatttcgaatgacggctgaaggaagtcatccactattggaatcatctcgtcaatttcagtattatcatcagcggcatcatagtcattcattgcattagtggcactagattctgcttccccgtggtaagtccacttctcgtaaccagtaaaaaaactgcaatcgaatatatgtgctttcataacaggtaaagtttgaagcctattgttcacacatcttacacatgggcacctaattctaccatcacaatctttacatttcgaggccatctctaaaaatgcatttagaccatcccaatattgtggacatctacgattt

SEQ ID NO: 156768 - DNA, 782 bp, Cannabis sativa
cagaagaaaatgaaaagaaagacgaagatcttgaacccccgagttcaagatgagagaaacctattgaaactaattgaggaattggaagaggttattctcaacccaagatttcctgcaaagtgtgtatatgttgggaagaacctgggtgagcagctcaaatagcaactaataagttttttaaaggcgaaccaggatcatttcgcctggagccatggagatatgatagggatcgaccctaatattatcttccatcatttaaatgttgatccaaactacccagggaagagacagaaaaggagaccctatgattccgagaggcaaggggcactaaaaaaggaagtggacaagttgttagtcaatgactttatacgcgaggtgttttgtaataccctaggattgaggattggattagacaaaccctaattagataattatgtattattgagaaattacattattatataatttaatatatgagagtttatatgatttatgtatgctaagaccccgttggtaagccaggggtattttagtaattatgacctgagaagtgtaaaatagtgaaattaatttattaatgtgcttatgggactatattattatatagtattcctgggttgtctttttcaagtgtgttctgacaggttggtggggtatagtcacaacttggtatttccggccgaaccgagtttgggcccaaaatgcaattgggattgaaatattggcattttatttaataataattagtctaaaatttattaatgtgtgtgtgtgtgtgtgtg

SEQ ID NO: 156769 - DNA, 535 bp, Cannabis sativa
  modified_base (75)..(83): a, c, t, g, unknown or other
tgacacacaaagtgatgaaaaatatatctgtttctttattgatatttaaaagataaagattacattgaaatggannnnnnnnnagggcataaaacccaacattcactccccttatcgtgaagataatgcagttgcgtctacttagagcttttattatcacaaaaagtcatttgccttacaagagaactcaagaaaacatgactaagtctagcttcaattcacaatttctagagagagaaagtgtgaagagagagaagttctaaccatgtagtggggaagtaaagtgtgaaaattgagctaggggagctctccttttattatagtgaaggaagtccaattaaattacaataaataatagaaatattcgcacaaaatttccttggaaatccttcactagctcgtgagccaattttgatgcccgaaactttagaattgcggtggggtttgagacacacttagatgcgccttggaaagagctttaattttccacttgaatctgctcgaaattattttaacaggatcttagatctactca

SEQ ID NO: 156770 - DNA, 597 bp, Cannabis sativa
cgggtcgagggaatcctaaacctaaggagacgttcatcgaaccctacaggcctaaggctagcatattcgcgaacagaagggacgtaatgtattgttaaagtggacttaccagagccggaagtactggcatcaggagcacccgtattcggcacctggacggtaggccttggcctgggagccctcttctcaaccgggctcccaatgcgaaggggtctcccgacagccgcctgggtcctcctctcaaccgaactcccaacgcgaaggggcctcccagcagccgcctgggccttggtgtaagccttctcctgggccttccggtagaggtactctcggtacttctcttccgcagtggcaatgatctcatcccgaaaggtcttctccgtggccggaacccttacgttcgggcagataaccttagaaaggttggagtcctccaccgactgatgccctaggatcagcttggccttccggaaattctccgtcgtgatcaatcccccgacgtcaagatcgttcttgtcataagtggcaaaggtcttggcctgttggaggaagacctgagtgggcgcggtccgctcatacggagggatcctaacccac

SEQ ID NO: 156771 - DNA, 801 bp, Cannabis sativa
cccggtaatcaatgcacattcgtaaggttccatctttctttttcacgaacaaaacttgtgcaccccaaggtgaagtactaggtctagtaaattgtaattccatcatcccctataattgaacttgtaactctttcagctccgcaggtgccatcctgtagggagcattcgatacaggctctgcccctggtatttgatcaatctcaaaatcaatttcacgtttcggtggtaaccccggtaactcttttggaaacacatccagaaattctcgaaccactgggacatgctcaggtcccgtttctggttccctggtaatatccacaacatttgctaagaagccattgcacccctcacacaaaaaatctcttgccttaagtgctgaaattaagggaatccgggatccctgcatcttccccacaaatacaaagggatcctcgccctcaggctgaaaagttaccatttttctcttgcaatcaatagtggcgttatattttgcaagccaatgcatacccaaaattaggggtgggcatccgatccaatccaaccttttttaactcatccgatccaatccaattagtaattggatttggaaaatgatcatccgatccaatccaattagacctcaaaatccaatccaatctaatccaattactaattggattagatcggttttttaattggatattcacttacacacctaaattttaatatcaacttaaaaatataaagaaaaatacgtaaaaaacggagtatcactttttatttaagtttaatacttcataaacatactattcttacaagtgt

SEQ ID NO: 156772 - DNA, 807 bp, Cannabis sativa
  modified_base (746)..(748): a, c, t, g, unknown or other
tcaagattgactccggagtggataccattaagggagaacatgcaagctcttcatgcgaaaaatgaatataaccaccacctatcaagaggaggataccaacgacaattcatggttgttccatagaatcatggataagtttaattaataagtatatatattataagcatgatagtataatatatgttcaatatacataatttatttttcttataggaaacattgggtgtgtgctatattggtaccccaagcatactacgtatattacttagaccatgttaatgcacccatagcaaattatcttgtcattctaaaaacgatcaagaaagcatatgacacatacttaatgagaaggagcatggagatcccaaaaaacttaagtatcaaggaactgtatatgtaaatttcaataataatttaaggttttaataaattattaatgtatttatttaaattataaattattgtagtgtcctcatcaaccaagtaatgtagagtgtggctattatgttatgaggatgataaaagatctagttcaatcgcctaatcgacgtgactatattaagaaagaggtacataaatatttataaaataattatgaaatatatatttatgttttatttatatttattatataattaatttatttctcttttatattttgtagctaatagacaaaaagtcatatccaaaagctatgattgacaagatgagagaagagtgggcgacagatatgcttccacacttgnnnagtcatcgcattatgggtcattagttaatttttttaaataaaatttattcatgacaaat

SEQ ID NO: 156773 - DNA, 1299 bp, Cannabis sativa
  modified_base (879)..(882): a, c, t, g, unknown or other
  modified_base (1076)..(1078): a, c, t, g, unknown or other
aagcagcatctcgcaagaaacgacatttgtcttctgtaatttcttgcaagaagcgtctgtggcgactagaaatttcctctttgtgggttttcactaagtgttccctaatttttgcatcatttatctctaatttacatttgggtcttgaaattcttgatttgtatggaatggcaagttcagtaggatactctatttctaattcttttggacgataaaattttgaaccagattgggacattgctgcaaggagaaaccaatcccaattcgtgggaaaatttatcaaaccagaagttggtaaattggagaatcttgaaaacctacgttctgtctaaaccctaacatttacccaaatacaattcagccctaaaattgctaaaatcgaatgaggtaacaaaggtgctaactaagaatttagtaggcaaaaccagaaaacacaacattaaaagcatgtaagaaaataaggagaaaagtcacttactgtttggagttggtttttgggacgatgagcggatctgcaacctacaaaacaacaaacgtcgtgaagatccctccgaatgcttgaagtcgaaaattaaatcagataaaactcgtaggaaaaatgttaatgacaaagatggcatgcaaggtttcgggaaaatctaagaatggtttttctgcaaaaaagcttgaaatttttttagagtttttgaaatggcaaaagtaatgcaaaggtggttccttttttcattttatactcttgggttaatcttcgttagatcatggaaacgattgatacaactggtagaatttgaaaaagaagtggaaaatatggtcattaaatgctgatgtacctcgaaatcacagaactgccaaaatcagaggacatgcattttttcaaannnnattatgataaaaataccctctgtaatcatttaaaaagtaattttcatctaaaaagaactttctaaggggcgattgttatacccgaaattcagctgtcacttcagaggaggacacatgtcaacctgagagaatacgaatcaacaaatataatgataattatattaaagattattaaaatggaataactcattaannncagagctgatagagtatatctataacttgctgactgaaaagtcttgagcgagacacggatgatcaaactattatctcacatattgacgagaaaccatttcatatgtgaagacatgatcataaagacagtgtcagtaatgcaaagcgaggcatcaacctcgctacgcatgaagagacatagacgagacatgatgactattaaaacacttagcgtataatata

SEQ ID NO: 156774 - DNA, 517 bp, Cannabis sativa
taaactaagaattatgttatatagtcacactttatatagaatagatattaaaaatgtaaaaagaaaaccatgttttaatttataataaagagaatggtgtatgattatgctagcggaggagctcgtctagcactagtggccagaagagaaatagatgttgtttatcccacatttgttttgaagtaattgttagcaaaatcttaggctatatatgagcctttgctttgatttgaattacaccaaaaatcttgtttaataaacaagtttataacataaacaatttattcttctaggttataaagtttgggcatatttagttcgctaaaagtaaaaggtggtgcgccttgttactttattctattgtatcctaggatactttattttgttgtatcctgggagacaaacgctgttgaaattctctaacaccaacgggagaagacgaatctgttttaaggaaattgtgtgctacacaagcctcagatattctccaataggaattgcgttcacggttaatttt

SEQ ID NO: 156775 - DNA, 611 bp, Cannabis sativa
catttgcaattaacgctatcatttttatcatttttttcaatgctttttttttttgggcaattgtatagttgtaagtgaaaatttattcacaaatcatatattaatttaatttcatttatacgtttataaggtaattttatttgcaaacgtgtccatccatgacaaacaaactatgcccactatccccctacttatttctcatatgtttagaggggctttcaagacttttgcaattggaagaacatgctggtttgttgacaggtcttagattgacaaggaactctccttctgtttcacacttgctctttgcagatgatagtttattattctttcaatcgaatgagcaatttgccaggtccatcaagaaaacacttgacacatatcacaaagcatcgggtcaagtcttaaacaacgacaagtctgttatatctttctcgccaaacacctctcaagcagctcagaattttttctcccagaccttacaaatgccaataattgagtgccataagtgatatttgggcttgccttcctactctggccgtgacaagaacgagcttttcagcaacatcaaagagaaggtttggaaacttcttaattcttggaatgagaaa

SEQ ID NO: 156776 - DNA, 844 bp, Cannabis sativa
tataataaaaactaaaaagtttaaaaaaaaattaaaggtgcaaaatcgggttggtcagtttacttgagcgagttggacctattttcaatccgcccaattaacagattgagcggtttgtaattttttcgagttatttcggtttataatttttatcagttttttcagtttggtttgggcgggttatttggtttgggcggtttatgaatttttttgtacaaccctaactgaaacttaatttttttacatatttattttcaagccttatggtatttttgacaagtgttgctcaagctttgttagatttgtgataatttaattattggtgatagtccaaaatgcagaaattgcaaaaatcgtaccgcaccgcactattttttgtagtgcggtttctgtaatttttagtttcgcggtgcgagtacagtttagaaaattgggaaaccgcatgtgcagattgatttaaaaaaatagtcaaaaaccgcacaacctgtatggcgaataaccctagtgattaatatagggtgttagaaacatttttttaatcagttttttgcttttttaattaagaaagtgaaaatattttctaaaaatatattctataaaactatttttattttttaaatttttaattaaaaaatatcactttcacaatattttaaaaagttttttttccttaattaaaattttgaactccgactacaacttagattttgggattcggactccagccctagccccgatctgaacacggaccacggtctcggtcccaaatctggacctggacccgacttaaataaaatcaaaaaataaaaataaaagttataaaacacacttttgttttttattt

SEQ ID NO: 156777 - DNA, 520 bp, Cannabis sativa
tggtgctttggctttgaactttgaatcttcatacggtaattgatgcgccttaccgtattggcagctagcacatacggtctttgttatgacctcgagttgaggaagacccttcagcatagacttcttcatcatcaccttgagtttatgataattgacatctcctagccttgcataccacaaatttgttgtttcatttttctaagtcttgtctacataagtagattctgctgacattacatagacagactctaagcgttgtcctctcatcatctgtgttctagagattttaagatcttgacatcttgagggccgaatacgacatggtggcctatcgttgtaagttgcgccactgatagtaaatttttcttcatctcaggtacatggtagacatcttggagtgatacttcttttgggttgaactcaacgtgattgttgttttaccgatgtgcacgatcggtaatcttgagttattggctgtcaccactacgcgaccacctttatattctgtcatgtcttgcag

SEQ ID NO: 156778 - DNA, 861 bp, Cannabis sativa
  modified_base (625)..(626): a, c, t, g, unknown or other
gaacttttatctgtactaaatcatgttgtcttccttttcaaaaattaaaaaaaaaagtcatgtcgcctaatttttttactgttaaaaattgttaaaaattattgagattgtttttttttttaaattaattgagattgttaaatttaaatacttttatataattttatttaaatttactaatttaataattatttatgtactaaatcatattccacaaatgtctaccaaatcattattctccaattttaatatataacaaataatgacccttaaacttttaaaaaatcaatcataatttaatacatgaaaaagtgtgggggctaaaaatcttaggctaattagaatttttgccccatgaattttgacatataacaaatcatgctccttgaacttttaaggtcgttaaaaatatccctgaaatattgagattgttggatttaatgacttttgtctaattttaataaagaacttttgtctaattttaataaagaagtttaatatggatgaaagttcagggggcatgatttagtacatgtcaaagttcgagggacataatttagtagatatcaaagtctggagagcatgatttagtgcataaataatcattgaaatagtaaaattgaannaaattagacaaaagttcttaattccaaccatctcaatagtttataaaacatttttaacgaccagtttaaagacatgattttgtacatatcaaaattcattgacaaaattataattagccaaaatcttaatgggaaatttgaatttccatgcttaaataacctaaaaatttgtctcctaaatgcaaagttataaaaattggtaatatatgacactttttgtatttttcccataata

SEQ ID NO: 156779 - DNA, 600 bp, Cannabis sativa
cacttatatttaaaacaatttttttaagagtggaatgtactgatttgttttaaaaaatattttataaattatttttaaattttaatatttgttgattaaaatttaagattataattttaatatagatatgaataatctctcataacttaatagttattaataataaaatataactaaaaagattctacataaactaatttaactccaatagcggcttgattaaatatttgaatattctaagttcacggtatattttcattcaattatcttttttttttcttttttgtttgcttctgtgctctatgatactagattgaatattcaattattttctttagcttttgctttccattccctagcgatttctcagccatcatctttgattgtcatgcttagttatacatgtataattaatttttattatctattttccagtgctatagtatatgttgaacttgatgacattacaaaaatcgtcaatgctgtgatgtttgcacatatcatgaaaaaaatactttcatgtcctgctgcctaaataatacactttactgtacagatatagttttaaataaatagaataaatgtacttgactatcataa

SEQ ID NO: 156780 - DNA, 645 bp, Cannabis sativa
  modified_base (614)..(618): a, c, t, g, unknown or other
tgaaatcaataatacatatatgtttgcaataaatatcgattaagaaagtatgtatgaatagacttataaatatacttacgttgaattttgtggaacattaagtaatcatttatatgtccgtggattgtgatggcattgtgctatctcctaaaattgtaaagattcacgaagcataattagaatcatcgtttgaagtggtaacatcaaatcatccaattcttttgatgtggtcgctccaatactgcaatcatataccaactctagtgtttgtatgtctgctttaattgtaacccaatgatggtcctttatgtttaaagtcatatacaattttttttgcgcctttccaattcttgccccataaatgaggcgattcgcctgaaatgtatcgacttaactcattatgaatcatgtcagggttagatttaaagtttatggtcaccaattgaggaattttttcatctaaaatgattgcatcttgtgcgatcacatcttgatacaaatattgtcgcttttgaatcccaaaaagagcatcattaacatgttgtaaaaaagtaataacattgttgtaacgtccccgcttcaagcctctagtgggtccttacacccacggaatnnnnngctcttatacacgagtatgtcactatg

SEQ ID NO: 156781 - DNA, 596 bp, Cannabis sativa
tgggatttgggttttagggtttggggtttggggctttggggtttgggaatcgttatgggaatgtgcttgggaatggaaatgagaatagatggaaattggaataggaattggcatgggtcagggaatgggaatggggattgggaatgggaataagaaatgtgaatgggaatgggaatgggaatgtgaatgggaatgcgaatgcaaaagggaaaaggaatgagaatgggttggggaatgggaatgggaataggagtgggtcgggaaatgggaatgggaatatgaaagggccagggaatgggaatgggctagggaatgggaatgggattggaaatggggatgggaatgggaatgggaatggaaatgggtcaaggaatgggaatgggaatgggaatgtgaatgacaatgagaatgggaatcggaatgggaatagaaattggaatgggaatgggaatgggaatgggaatgtgaatgggaatgggaatgggaatgggaataagactgcgaatgcaaataggaatgggaacaggaataggaatgggaatgggctagggaatgggaatgggaatcggagtgggccggggaatgggaatgggaat

SEQ ID NO: 156782 - DNA, 669 bp, Cannabis sativa
ttgctgggcatgagcacccgaccaggcgcacattcccttttcagggtttgtggttcgattattgtgggcgggaatgtaacagtccaatttcctaaggtggccatcctggtcgagatcccgcacgtgcgcctcagtaaccttggacggagggctcacccacctggcacccaaggtaccttaccttctatgaggaaccgcggcagtaagttcctcactggcgtagccacgcccttaaccaggacgtcgccatcagcatcaactggctccttgacctcattgtatcccccatagtttaggggtgaaacctcctcctcttcctccgtctcgtaggtactgctagggcggacatcgtcctgctcttcaatctcctggacctcagcgtccccttcatgatcatccctctcctagacagttggatcttgttcggcgctgggtaaggtggcgtgccggacaacttgagagtcggatgcgccaaccctcagcattgtcttttttgtacgagccatcattctatggctggacagaagatttaaggaagaatgtatgtcacttgaagaagttggattagaacgaagacgaggatgatcctcgtgtaagagttgaagcagatcctgttcgatttggtgtttgcttccccaaaactcgcctaggttcatctataaaagacaa

SEQ ID NO: 156783 - DNA, 522 bp, Cannabis sativa
caagtgtgttggccgacctgaacggaaagtcttgcgctaaatggatgccctaatcacataatgaaaccgggtaaatcacatgatcaaaaccctaattagagaaattcgaacccaccactctaggttctgctatactctctatggattaccccaattcatgaagtaggggaacacccaactacagcactgaaatgcacgagagtacctaattagggtatacacaatatatcccaaccagtaattcacaaaaaatcacactaaatcaatttatgtcattaaagactaaagctttgagttcaaagctcaaacttgaacaaaaccaactccatacatcaaaaccagctgctagaggctgaaaccaactcaaatgaaccctaaaattcgaactatcaaacaacctaaccctaacagccattaatttgcaaaatcactacttgaaaccaattaaaatcttgagaaaacatagctagaaagtatctagggtttaccttggcttgattccctcggaatccttgctgaaaa

SEQ ID NO: 156784 - DNA, 617 bp, Cannabis sativa
cttctcttggccagccaaggatgttggtacagctccttgagggctcgcttcactcccttcggttgctgcttaacggttttgctatatcttgcatgaaggctctattctgctactggcagggcagtactccacctgtactctgtctttggcttacgtggacatgccacgtcaagtggacaaaatttgggataacatatatgaacaaaggcagtcccaccaaatgttttagcaggaagattgttgaaagagaaatgaggatatgaagtactgagaatatgatatggtgttttaaagctaagtgggtgacttggaagacggttaatgagataagcggcaataagaacagcatctccccacgagtatttaagagcatgcatagtgaacatcagggcccgtgccacttctaggaggtgacgattcttgcattcagcaataccattttgttggggagtatcaacaaatgaactctggtgaataatacctttttgagacaggtagggtcctaagatagaattgaaatatttaatgccagaatctttgaagggactactaaatcagaagaggatgtgtgggagcaagttaaattttggacagctacttgggtctttagaactaaa

SEQ ID NO: 156785 - DNA, 550 bp, Cannabis sativa
cgtacgtcaatcttccgtgggaagatggctcgagttcgacaggcagcatagcttcataaccgtacgccatcgcgaacgttgtttgtccggtttccattttttcagttgtacggtatgaccataggacttcagaaacctcttctggccaatttccttcggcatcttcaagttttttctttagtgtatccctcaaggttttgttgactgcctcaacttgactgttttccaaaggatgcgccactacgtagaaacttttgatgataccatggttcgcacagaaattagtaaagaattggctgtcgaactgcttgccattgtttgagactattttttacgatagtctgaaccagcatattatgttcttcacaataaagtcttgaactttctttgatgtgatggttgcgagttgttcggcctcagtccacttagtaaagtaatcaaccgctaccactgcatactccactccaccattacctttaggtaattgtccgatcaggtaaatcccctaaatggcaaagggccacggactttgcatctatgttaactcgtt

SEQ ID NO: 156786 - DNA, 782 bp, Cannabis sativa
atagttaggtcgtctattcatatactaggtttaagtatttttttcaaggcatcttggtgtctcgtttaatactttcccacaaaaaacgagtcgttagtattcaactttgcatgtagcttatgagttatatctcatttacaacttttaattttcatttctcgtcagccaggttctttaataaaaaaactttaaaaattttgaaaaattttaaactagtgggtttgcaatatatcatgatatcatgtatttccagatgaattctggttaatcatacacacatatatatgcccctcaagtaattttaaagattgaaactttgtaattacttgaaaaataattaattttattaataactgaagttcaaaatattacatcagaaatatgagttacaacatcaatttactggtagtagggtcgcaaatgtttcacgttcgagtagttctttatcagcaagccattcagctgagccaatttgtaaaccccggttcctactatcgcttcgatcacataaggaccctcccagtttgggttgaatactccagctgatgcgtctcttgtatttgcaaatactcgccttagcaccaagtccataacgttgaagagcctctttttcacccttttgttcaagtatcttgttactcggtgttggtatgctgcattagaaatctgcaactcagcatgtttttcatcaagtagatccaaggataattttaaaagttctttgttttcttcttaattataaaactctcgtctgtgagtcgagatatttacttatactggca

SEQ ID NO: 156787 - DNA, 674 bp, Cannabis sativa
tacaaaacttggtcatgtctcgcttgctgacatctttttactgggtgcgggcttcttgaatggggctagtgactgagtggccatgtaaacactttccatgtcctccgtcagggcagtaaatgcagtatacttagcaggattctcccagggagcttgttcggtcttaccggtgaactttccctttttcccattcccttgcctattattgttgctggaccgtttaccatttgaacttgaattcattgggtaatgggggagttggatggatgttcctgtagaaggagctttttacttgccaggtttttgttcaccttctgctcgctgaatagcctcttcaagtttgataaaaccttctacacggtcaaggaaatcactcatcgagtcgactggtccattcttccatatgttctaccaaagctcactaaggagttcaatgccccctaatatcgctaacaactttctgtcctcggttacctgtgaaaccttagtcgcctatgtcattaatctgctgatgtaggctcggagaggctctcctggtcttttccttacttcgactagatctcctaggtgcaaaagaagttagcgagaggaggaaaattgtgcatggaactttgaggagaaagtcttccatgagttgaactgtaataccctggaattaagaatggattagcaaa

SEQ ID NO: 156788 - DNA, 929 bp, Cannabis sativa
aaaagaaagcaaaaagagatgagctcctggcccccgttacctgccagcactgcaacaaacgttttgacgacggtgtcttcatggcctggcagactaacgacgagaatcttaagcttgacttctatcccaagcctgaggaggtcctcgtccacttctggtagaagaagaagagacttgacggcttgctggaggagtgcaggggtccttgccttccacctcaaattgattagccagttgttcaccactattatcattatcattattttcctcttttttttaatgtatttaatccttttcccctctctaagacaatttacttatttttttcttaaggggagacatttaaggcctgtccccaggcccttatcttttttagagcttttctttgggatccaaacactttatattcacatttgaatacatatttagctgttaactttgttaaacttggtctgttttacatttttccgtgtgatatgctttactaccccctgagtcacatgaaaattaattttaggtcactcagttttacaaactttaatttagaggttgcacatacttgtccagtacaaatttaatttacagaacataaaattttattctttcgactattggtaatactttcagaggtgatcagcattccaggccctaggcaccatggttctgtccattctttttaggttccgaagctgatttcgtccttaatttcgtacggaccttccgaatttggcccaagtacccccactccgggttcctgagtggctggaaagacccttcttaggaccagatcaccagtagtgaattttctatttttgaccttcgagttgaagtgtttggccacctttttatgataagctgccattcgtatttgagactcatcccggagttcgtcaatttgatccaacgcttcttgtaataaagcattgttt

SEQ ID NO: 156789 - DNA, 749 bp, Cannabis sativa
ttaattagtttttttgggtttttttatgggagtttcttggatttttttatgggagttttctgggttttatggattgtgagaataatgatttgtgttgataagaatgaaatggaagtaaaggggtttggttgaaatcgggagagaagccactattactgattttttatttttctgggcatatagaagaacacaaagaagtagaacaggaaagagaaaagggaaaggaaaaaaagaaagaaagaaagaaagaaagaaaaaagataaaaaaaattaatttttttatgatttgtaaataatatattttgttttttaaaaattattttaatcaaaatataatttggactcataaaattttaacacatagaatttttaaatgagtaacgactcagttaaaaaaaaggactaacggtcttacgaaaagtgtcaccttgaggattattgtcgctattttttgacgttggggacttatctgcatcaaactgaactttttagggacttttgtcgcaaattttccattataataaaataaatcaaaaagaaatatatttattagccgatcttataaacttagaacaactggttactaacttaatataatattaataaagtacataggcatcattgctatagtactgcgggaccaatccgtgattcacaaaatcgactgtctatatatatcaagtatgtaaaagaatgagtaaatactattttggaccatatgtttagcaaaagttatcaattggaccatt

SEQ ID NO: 156790 - DNA, 529 bp, Cannabis sativa
cataagataatactattaagaatagtaattaatactacatagatatttttggttttttcttaatttaatttattagaacacatataaatttatgtatatatatttatctaagaacaatatattacaagtataatagtttccaaaaaaaaaagggtgaaattattataacatgatgaaaatttaataaaaatagtatttcatcttcctaatttaagagggaatgtcattcttcttaaaaattaatctatacaaaaaaaaaattattcaaaaaaaattctatacaaaaaaaaaaaatccatttataatcatatattgaaaagaaatgcacaataaatttagtctaacagttttttttgttgaaaaatttagttaaacagtttgatatacactgcatcatatatttttacagtataatttatttcatatcatacaatttctcattttatttatgaaagaataaccaaaagtatttaacttgaaatttaataaattaattattttaccattataaattttttataattataaa

SEQ ID NO: 156791 - DNA, 513 bp, Cannabis sativa
accgcgaccacaacctggacccagacccggacccagaaccaaacccagacccggaatcagaattggaactctgactagaacccatagctgagagcagaatcgaacccaaaccataactagacctgggacctgagacctgggacccgaacctagaccgggacctggactcgacgtggtcctaaacccttgctggaacctgagacccatgacccagacaaggatccaaaccctgacaaggacccaaacctgaacacagaccatgattgggaccaagacctggactcgaacctagaccgggacctagactaaaaccaagactcgggacccaaactcgaacctagacccaaacgaagacctaggaaccagacacagatgggggacatagaccagagacccaggcctcgaaacctaaacctagatctaaattcgagattcgaacccgaaccaggacctgacttggacccaggaattcaaagtcagacccagacccacaacaaaaacctgccctggacc

SEQ ID NO: 156792 - DNA, 509 bp, Cannabis sativa
agaccttcacggttcactcaacagactagttattcattacaagcatcgagatgagtatcatggagattaattgttgttcaggctgtaaagtcaagaaaactagggacacaggcagagccagttatctagggtgaaagtctgtaggactcaggtactaagataacaccgtggcaatgttggcctaaggtgaaagtcggcagaactatggtactaaggcaacattgaaatgtcaaggggcgaagagtcagaatgatcgaggcattagttcaacatcttcatcaaagtgaaatgtggagtggaggaaccgtatgcgagtatgtggttagcttgcgagctgtaccttgaggggtattcctctcagagagaagttcttcccaagttgaagtgggggagccaactaattgatgtgtttgaagaatcagggtacttgttcagttttggtgtgtgaatccaggggaaacactacaacagatgggttgttcagtgtgaagacttgcatgattgctgca

SEQ ID NO: 156793 - DNA, 771 bp, Cannabis sativa
  modified_base (541)..(543): a, c, t, g, unknown or other
  modified_base (619)..(630): a, c, t, g, unknown or other
gattatagttttaatatataaattctattaaatctaaaatttatggatagtcatgattattgtattgtctatacagtaaaaaataatcatgatcataaacttcaaacattaagtctcacgatatatcagtgcacatgatttaatcaacgtgataatcaacgattagtttacttacacttggataaatggaatacattttttaaggtattagtaaagtaagctaagatcggatgtattggctatatatcaaactgaactgatatttacagtagaaaagatatcgtaaacttaccgtaatattttttctaagtaaatctctaatagttgatcttagatcaatgatcttaatcctgagatgattgggttctggcttaactgtattacacatgttttttgatttgttcgttacaagcctacccgtagggttgactcaatacttacatcttgggaatatggtaaagcgattgagtgggatcgctaataatagatatgaaatttatagcttctataactttatagaagtgaaatgatgtctccttannncttggctaatagacataaatgaaagagctcttatttcagtattataatagtttattgaaatatcatttataaaaannnnnnnnnnnnaaggataaaatacattgaagggtaaaacggtaattttagtccatattcaatattgtagacaatttatagaggattgttgattatttagattggcacaatgaataaattatatcatgtctatgttgaaattattttaccagg

SEQ ID NO: 156794 - DNA, 672 bp, Cannabis sativa
gggaatgatgtgtaagtggtattagtgtaataaaagaaagatgataagtaaaaatgttgatgtaggcgtgtaagggtaaaacagtataaaatgtgcaaaacagatttttggtgtaaattttttttttcttgaaatgaattaacgtgtgatttaaagactaagatatagattttaatttttaattaaaattttaaattacaactattataatttttatgaatattttttaattaattaatcaataaatatttataaactgaataaaaaattgaaaaaaataaaagaattaaggagaaaatagatagaagtgtttgaagagattttggagcgctacgtcaccgacttatacttttagtttatatatatatattgatatattgattgatgtgattatgtaacagaattttcggtttaagggtaattttgattttctacgttaactttaacagaatattccaattacttaacaacatattctttattaattttataatattattgtatatatttaaaaataaaaattatataaatattttatataaaaaaattatttttgttatatatatttaaaaataaaatttatatctatatgtaatcgcatttataaataaaatacatatattgaaaccttaatttcatgattaccttttgttttaaaaataattaatgata

SEQ ID NO: 156795 - DNA, 625 bp, Cannabis sativa
taaaattaacgtcctccagttatgggtttcgccaaaactaaaagcgttgcgagatgcctttttatgctctgaaaggcctattcgcactcttttttccactcgaactttttgttgcctcgtaatatgttgaagaatgacacacatttatcaattgacttctacatgaatctgttaagtgccgccattcatcctgtcagggcctgtacttccttaggctttgtcggggattggatgtctattaatgccttgatttttttttttcaggatttgcctaaatacccctcgcgttaactatgaatcccaaaaactttcccgaggagattccaaagaacatttttttgggtttagcttcatgttatacctttttcatattttaaagcattccgcgaagtctgcggtatgatcgttactctttattgatttcaccaacatatcatcgacgtaaacctccatgttttgccctattttgcttgtgaacatttcatttactagtcgctgatacgttgccccagcgttcttaagtccgaacatcatgactttataacaatagagtcccatgtttgttactgttgacctcacttttagccaacgacaacgagtcgaatttagtaagcgataagtgatt

SEQ ID NO: 156796 - DNA, 580 bp, Cannabis sativa
agagagagcgcttgaggaaatgatgaaggagaaaagcggcggtggtctctactgagagtgaagtcgattggtttgaaatggaagagtagattggttttttaaaattgttaataggttaacggcgttagaagagatctgtttaaaaaataaaaagaatagtctttgtcgttaaaaaaaaattggaatcgttaaaccaagaattgccattagataggcacttttaatatataaagatgtgtaattaattttttttcttgagatacagattacttttaagtcatatatatggtgcactcttaatgggtattatctatgaatgggtaaaattagtaaattttgagttttgtgcttaatttttctatctaattaaaaaaaatctctcatttttatatcatatgggctgacattgttccatcggtaaaaaaaatttaaaaaaagaagttttttagcaagaaaaatgagactagaatgactctttgctgtaaacaaaaattaaaagaactaatggcgcatttactaaactgtaattggaatcagaataatcaatgggagaaatgtatcggtttaaaatagaaaataa

SEQ ID NO: 156797 - DNA, 658 bp, Cannabis sativa
gtatatagaagagatataatatatgaatatataataaagaggagaagagggcagaaaataaatagaaaatagaagatgaagaagaacacaaataaacaaagggggatcaacttgaacaaggtttaaacacctttgtccaaaaagcttatttccccctataaaaaacacttaagggaatagaatggaaatgcttttgggactaaacaagcttctcaatattttctagcttagtgtttagaagatagaaaattgttgttgtctacaagtgaaccaaagacctctatctatagtgttttggggatcacatttgaaaatcaattctttcatcacatggctgttaccaacacattaatttgtgtttaatgggataaaaatattggacaagagagctagaaacatgctcaattaatttatatacgtttatgaacgttttcaaaaatctggttctagatgttcgaaaacaaccataaaacaacataaaaacaaatattaaacaattgtttccagagaactcaaaatgtaactccactccaagttaaatcttttccccacgtcccaacacccatttaaattatataattgagtattgtaatagtttctaacagctagaaacttatcccattaatttcataactcccatatgtaacaactcacataa

SEQ ID NO: 156798 - DNA, 554 bp, Cannabis sativa
catattgattagaagccatcaccccaatacggcacaattaccaccaataagacacaatcaccaccttcagccagcaaaagattaatacaaaccaaaaaaagaaagtcatcggaaatactaaggataaagaccaaccatgtcaatagacaagacatgagttcatcattatctaaaatttgataaaatatacttaattttagaataatgatcacttattttttttctttagaactttatactgatttttttctttaaaatataaggtttgttaagaatttttctctgaacttttgcatttacagaaatttaattcttctattaagttcgttccattattcccgtttaaatgttgacatatttttattaattaactttaacattgacaactattaaatcgtatctttcaaaataaaaatgagaacgatttaatatttttttaataaatcttaaaaaaataatctatttaaaaaaaaatattttgaatgattaaaaaattaaaaaagaaattaaaactttaaaactaattaaataatttaaaaatatttattttttat

SEQ ID NO: 156799 - DNA, 553 bp, Cannabis sativa
ccgctcttccgatctcaagagcaaaagattcatcaagggatcaaaaattcaagaccctattcaaaagaggtcttcaaaagctcagagtcaaaagtccacctgaaagtcaaagtcaaagtcgaagtcaacgctcaggaaaggtcaactttggatcaaaacatgaaaatcaagcttggaagctcatctacatcaagactacacacaatcaaatggtatgaatttgctttagtcttgttaaagtgatttgcatacaaatattggcccattcactaacttgtgcaacaagttttctcactgatagtcaaaattttttttgattggatttctaaatcaaatttcatttaactaagagaaaaaaattggaatttctaaaattggataatcgagtagagagttatggccgttttagtgcaaaaaattgaacttttcccactgtctggatttaggttgaccagtttcaaagaggttatgtaatgccctaacaattaggcacgctaccaaagatgattaagaaaccctaatcccctacacgagattactaataaaataagcg

SEQ ID NO: 156800 - DNA, 665 bp, Cannabis sativa
ataagattattattatcacttttaaaatatcaccatatattatttacggtcatatattttctataactcttctagagtatgtgtggacttctaatttatggatgaggagtttgtggagcatttatgcatcttatttaatcattcatgcatgcttatatacaatgttcttcatccaaaagtttgaaatttcaagtagatgtgaacataccacattagtgataatataaatttttatttctaagaatgatggtactccaagaccaatatatgtgttccatcttgttgtatgatcttattttccatatcaaatgatcatatatctataattcttgatgtatatgatgtacttcaggacttctctactaatgaacaactacacacatttaatatttctcaatatacagaaaaaaaaacaacaatttgttcttcaatcgtttataatataatcaaaaactcttcaagagtctatcacaacgtataatttataaatttatattgcatagacaatcacacatatttttcaaaataacaatttacttacatatctttatttcatacaaagatctttgttatatattgcacgtgtaacgcccgtattttatatttactaaactcaaaagttaactttaatatattatattcttataaccatatgggtcgggatc

SEQ ID NO: 156801 - DNA, 529 bp, Cannabis sativa
tccttgtgtactcttaatcaaaagcggagcatgagcaacacctttagatggttctacaacgactacaagaccataaactgtatgccaagtttaaaagtataaattttggctatctcaggtgtcttttcttgaacacattgtcagtaatgatggaatcaaggtggatccagagaagattgagtccggtagggattggttgagactgaagatagttacgaaaattagaagttttttgggtttggctggttaatatcgtcggtttgttgagggagtttctaagatctcaacacctttaaccgaactcactaaaaagaatcagcaatttccgtggacagataagtgtgaagcaagctttcaggatttaaaccagagattgatcacaactccggtattagccataccatctgataaagagaagttcatggtgtactacaatgcatccaaatagggtttggggtgtgttttgatgcaagccgatcgggtcatttcttatgcctcccgtcaattaaaagaatatgaacagcaatac

SEQ ID NO: 156802 - DNA, 502 bp, Cannabis sativa
acatcatatacagttgcattctggcaattcagattcttaaaaacaaaaaaaaaacaagatctgattctaattaaggaaccacatgttacgaataaggctgtttttaattttgtgcgttgccttacacttgtaatatcattttaaaatggtttgcaaattatgaaggagtgtcatttgacgagtacaaaaaactagcagatatacaaggtacgatttatgtaaatggtggcaaattagttttatattagttggaaattgatctcattcaaataaacatgatgaaaaggaacaatgacagcaactatattaatttgagtaaagagtagtggttttttagttgatttacagttgcataatcattttataatagtttaatttcattttttgcaagaattcattttgggaaaatggaaaaggagaaaacactttgagaaatggttagtttctcaaatattttttaacgtttcttaatagtttaattttagtttcctaatagtttatt

SEQ ID NO: 156803 - DNA, 504 bp, Cannabis sativa
  modified_base (38)..(38): a, c, t, g, unknown or other
aataggtggagtaaccactctttcgatatgttgctgtnatcttgattgaactatttccagaggggacaaaattaccgaagtcgcattatgagtcgaagatgcgattgcaaaatcaaggtttgggttatgactaaatagatgtgtgcaagtataattgtgccattttctggaaggagaatgagaagaaagagttttaccctatatgtggcgaatcacgatgggtgaaaaaaaagataaggggaaaaaagttcctcacaaagttatgcgttactttccactcacaccaagactaaaacgattatattactcaagacacaccgcggaggatatgcggtggcattactcacagagaccgaaagaagacggtgtgcttaggcatcctgcagatgctgaagaatggaagcggtttgaccgccttcatccgtcttttactattgaacctagaaatgtcaggccgggattggctactgacggttttaatccatttggcaacatgagcaactc

SEQ ID NO: 156804 - DNA, 503 bp, Cannabis sativa
tgttgtcttttgtagatgaatccaggtgagttttgggagagcgagcatcgaatcgaccaagacttgcttcaacttctgcatgaggaccatccttgtctttgttctagcccaccttcttccagtgaagggcattctccctcaattcttttatctagccatagaatgatggctcgtaccaagaagacaacgcgtatggtcaatgcgtctaaccctcaggtggctcaacacgccactttgcccagcgccgaacaggaaccaaccgtcctggaggagggggatcatgaaggggacgatgaggtccaggagattgaggagcaggacgacgttcgtcctagtagtccctccgaggcggaggaagaggaggaggttgaacccccaaactacgtggaatacaatgaggctggggagcaagtcgatgccgatggagacgtcctggtcgagggtgaggactatgtctgtgagcagcttactgctgcggttcctcacagaaggcaaggtgcctt

SEQ ID NO: 156805 - DNA, 579 bp, Cannabis sativa
tttgtctcttggtgtggagactcttggaggtgttgtgactgtagtgatccccaaaaacacaaccattccaaccaagaaggagcacatattcactacttgccacgacaaccaatcctctgtgttgatctacgtgtacgaaggtgaaagagctaggacctgtgacaacaacttgcttggagagtgcaagctttctgacattcctccagctcccaaggaagttccaaagatcaaggtaagctttgatattgatgtcaacggtattcttaacgtctctgttaagcacgagtccacaggacaaaagagaagtatcactatcaacaacgacaggggaagattgtccaagaatgaaattgagaagatggttcaagaggctgagaagtacaaggctgaggatgaagagcacaggaagaaggtcgactccaagaatgctttggagaactacacttacaacatgaggaacgcaattaaggacgagaagattgcatccaagcttactgaagccgataaaaatgtgacagtcagtagtcccgtgaggacaaagcacgctggaaacacacgtgttggtctgtagggtcagtc

SEQ ID NO: 156806 - DNA, 618 bp, Cannabis sativa
  modified_base (62)..(62): a, c, t, g, unknown or other
agactcttgcctaggacgtcacatatttgaatctcattcactggttttgtgatgtttagctntgctgttatgctttcccattcgtaggtttgttcctcattcacgttctttgcttgagactcagcatccatattgtatctatttcagttaacaatttaaatgataaagttaataggtaaggaatgattgtcgagaaagatccaaaaaaagggcttactgataaataaccaattgttccttcgacgttaatgtactggagtagagtgttcgattgttattgatatccaagaatttgagatgaagaataacggaaagatagtggtgagtagagtgaaattagattttatgagattgaatgcctgagattatagagtaatatgggttggtgatcacatttaactctgttgggctgatattaatgggcctttgcaaaattagatactctattccactatctccgtactttagagcagtgaaatagtaaaattacatttacttttgaataaattaattggaaaataaggttattgtatgagtttagggtttagcaattttgttgagttgtataggttggtggtaacatttaaaattgttgggcttattgttgggttttatgcc

SEQ ID NO: 156807 - DNA, 756 bp, Cannabis sativa
taatataactattcatgcaagcaagttaagaatatacaaagtgataaaatccttaaagtatatttaagtttgcttaaggcagattataactgcaatagcgagacaaaattcacaactgctcgaaaatcaaaaagtttggtagatcactaactacttaaacaggaagattatgagcaatggaaaaacccaaaagtactgtacatttgataaaaatatagttgtttacattgtgaataaaaacgcaagcaaacacaattgtattaagttcaaataaaaatagtacaaggattttcagataagaaaaaacccaagttgggttacaaacttgtctttacaaaaatgccactacgggcaaactattaagtcatttttctaaacaaaggatgagaggggaagccgatgaactcaagaaagaccgtcttcatatagcctgagaaagaccgtctacacgtagctcggagaaagactgactacacatagcttgagaaagaccagctacatgtagagagccttgatctctacacagaccttatgctcctcatcatcagaagatcccatttcctgaagccgagatctctttcccagcctgaggaaattcctcgataccagaaagaggatgatgcaaagatcttctggcacaggtctgggtcttgggttggttggattctctgatagaaaccacaccaacttccttccaaattcatctgcaatcatgccagccttcctctggaattctttatcaattctattggattg

SEQ ID NO: 156808 - DNA, 879 bp, Cannabis sativa
tctattatgatatagtattaatgattgtttattgttactattattacattgatatagtattaatcagatttttgttaatgtaaggacattatttagtacgataatcttatatattattttaaaattttaaaataaattaaaaaatgattttttattaatgtattttaagttaattatacataaaataaaataattatttgtaaagcagttttatttattaattagtaaatacaaaatatcattgtatttttattaactaaaataaatatttatataaatattatataaaatatttatatatattttttgataaagtgattagaatcactaataaatttgcaagacgtaaattttttttaagatatctgattgtctagccaaaaaatatgcttagccaaatcgaagaccaaaaaacaaacaaaagattgtgaaccatcatttgacagaactatcctcaaaaaatttagacaatacaattataacaacaacatcttatccaagttcaatatcggtccagtccgatatatactccatacatccaatccaagcttactttaccaatgtcctgaaaatgacaaagcacttatccaaggtgcaagtaaattacattgttaattatcatatcagtggaaatcttgtgtactgataaatcgtaagactttattgaataacataatcttgattacttttcactatgtagacaacacagtaatcatgaataccaatgtgataagaatttagatgaatttataaatcaaacaaatgatcatgaaataaacatgtaaaccaaataatacattaaacaagtaatagaataaatctattttttattaataaatgaatattcaagattacattgaaatagaattttagttaggg

SEQ ID NO: 156809 - DNA, 722 bp, Cannabis sativa
  modified_base (472)..(472): a, c, t, g, unknown or other
acgtatcacagtattctaatgttaatatatgcgattttatgttccttgaagtactgtgaaacgcctagccatttgcggcatgcgccaatgttctgattaagtgcattctttggctggcagatttgctcgaaacggtgggggtatcccagtaacatcagggtcatgctcgaaaacgcatgtcgcttaggttattgggatacacccagccgttttttgagatatccttctactcgcacacctgactttccgcgtcttggtggatggttagtttttgcgaggattcaaatcatcctcccaagacgattttatagtttatatgcgggtgagatcacttactttgttttttcgcacattcaccacgctaaaaagatcttctatctttcacatgagcgacttattggatagccagatccttggctcaggaggcaacgcgtttgatggagacgaggaccaacgggaggacagttttatnccgacttcaatctcagaagaggagatcgcaatcatgggaggtgcagaattaggcccgatgtcttccgcagacattgagaggatagtgtaggagctccctgaaccaggaacaattgagattcgagacagcgaatctacggtgtcagcgcgtgattatctcgtcaactccaggcatgccccttacgtcgaggtcgaggagatggacgatgattgggcggccccagctcgagagtcaagcgaggaagaagaag

SEQ ID NO: 156810 - DNA, 540 bp, Cannabis sativa
cccaagttgacacttggggttggccctgcgcccaagttgacattttgtcaacctgggtgacattttgtcaacttgggccatttaaaatggagttttttaagaattttttcgagcatcttctccgtctttagaaaataatgagattcaactatttttggggaccaaatagaatttttgaagggctaaaatagggactcagcgcccaagttgacacttggggctaggccctacgcccaggttgacatattgtcaacgtgggctatttccgatcgagtttaacaaagtgttccaatcatttttcatcaataataataaagatttaagtaaactcggggagaaaaccacaatcccgagtccctagaaacagggcccagcgcccaggttgacctaaggttgggcctagtgcccaggttgataatcaacttgagacgctgccttcaattgctcaaatgccaaaactgatgcgaccattgaatcctgcatggtcaaaaatggggtaaatctttaattccttaagttcagagatcggaagagcggttc

SEQ ID NO: 156811 - DNA, 905 bp, Cannabis sativa
aattatgtcaagttcttaaaagatattttgacgaaaaagaggaggttgggggagtttgaaactgtagctctcaccgaaggatgtagcgccatgttaaaatgcaagattctacaaaagttgaaggatcctggtagttttacaatcccttgttctattgcgggacgggatgttggaagaaccttatgtgatttgggtgcaagcatcaacctcatgcctatgtcgatcttttagaagttgggtattggtgaagcacgtcctaacaactgttacgttgcagtttgctgacaagtccatggcccatcccgaaggaaaaatagaagatgttctagtacaggttgacatgttcattttccagctgatttcatcatcctacactataaagttgatagagatgtgcttattatattgggtcggccattccttgctattgggagaactctaattgatgtgcaaaatggggagctcactatgagggtgaatgaccaaaaactcatctttaatgtgttcaatgctatgagatttatggatgagatagaagaatgctcccacctaagtgtgattgagtctattgtaactaaaagatttcataaggaaacttggagaaatgaaaagttaattagttctcttgatgagcttgaagactttagtgaagatgaagacaaccaagttgcttgggtggagccagtgcaacctgtccctagattcaagaatccctttgaatatttggagttgaaggaaagtaatttcaagcctccaaaaccctctatccaagaaccaccgaagttggagttgaaacccttgccaagtcatctaaagtatccctatttgggggagaatgaaacactgccagttattacagtagcaaacttggaagtcgaagatgaaggtgccttgctagaggtgtt

SEQ ID NO: 156812 - DNA, 647 bp, Cannabis sativa
catttgtaatttcctgacaatttttattcaatcaatgactaaaattataaaactttctgtgaaatgtctttcatgcagatactcactgtcactgtcactgtcactaacattttttctttttgttcattaattactttttcttcaaaggaatagatgatgaaaatctctctctctctctctctctccaaccctgatcatataatcacacaaccatagttcttattctgtagagaatatgaatcatcaacctatcaatcatgaagaagaaactataatcatgtccattgttcactccattaacaccgaaagatctaagcaccatatagaagagattaggtctcaaaaattctctattggtaaaaaagagtcaaatccattaactcaagatctccatcatactgatcatactgttacaagtttatcagttgagttttacaccaaagatgttcactttctcatggagcttatttaggttgatgtttaataaattaaagcaatatttttttgttctgagtttatatgttagaaatagagattaataaattgttggataagtcccatactatctgtcacataaaataagttacaaggaaaaataaataagaccttttacaaaacctcaacagaccattataactcatagagtt

SEQ ID NO: 156813 - DNA, 700 bp, Cannabis sativa
cactgtaccttcaaaccaagctaagaatatatatatatatatatatataaatataaagggataggactataaagatatataagatatttacatagtggagattttgattttgttgatctaatggtaataaaattaaagaaatatgatagtaataatggaacctacctaataatatttttacacttttttttgtcttacattattgtttttttcttcttcttttttctttttagaaatttgttaaaatatacttaaaaatgtagactattcttttaatatagtcatgctttatagttggggtgacaattagtattggtgtgtcatgttcgtgttgtgccaaggtcttaaatttactaaaaagttgctgacacgagcatgacacgtgactcgaaaaatttataaaacagggagacgaacacgactcgaataagttcgtgtcatgttgaacctacaaaatcgcatattgtgttggcgggttgtaagctaaattgttaatgtcatcgtgtcatcttcgtactatgttgaattttaaaatttattttagatgacagacacgaacacgacccgtaacataaaaaattgacaaacaaaaatatatgtagcaaaattttcgtgtcgccgtgtcgaactcgtaaaatatcgagttgtattcatgtcaaacatgtgtatcgtaacttaaattgcttccctactttacgac

SEQ ID NO: 156814 - DNA, 945 bp, Cannabis sativa
  modified_base (180)..(183): a, c, t, g, unknown or other
atacgaaataacttcctcattttccctctcgttctcaactcccttttccctctttcactgagattcaaagaaattcccatactttgtccagattcctgcttctccctcttgaatctctttagtttcagaagtgattgaaaccaaccgcagggaaaatcatcaaaactaaaggttagtttnnnntttatttgcatttttggtttctgcttaaaagggaaaactgcattttctgggtttttgtattttgaggggtttatgctcgtaggaaacattcatagggctgtatttttctgtgtagaactgggtaatcccagaagaaaatagacctgaaatttgcatagccgtgaactttaggaagaatgtttgaatagtcgcacctttcctatttgtttatttcttgaatacacgcgggtattcggatgaacactttgaatactcgcatgcctgcttgccttaggtttcacagagactttatcacttctagtcgttgtttagaacctaggattttatattctctgtatattttgttgtgaggacattggttaagtcttttaaatgctgggcgtgtcgcaatattccaatgctcatacgtgcgatcgtatgttccttgagataatgcaatacgcccagccatttgcgacatacgccagtgttccaatataagcgtattctttggctagtagatttgctcgaaacggtgggtgtttcccagtaacttcagggtcatgctcaaaaacgcatgccccttgggtcactggaaaacctccagccgttttttgaggtacatcgctagcttgatatgcgtgacacattcgcaggttgtgattggttaggttcgtcgaagcggtgggtgtttcccagtcacttcagggtcaggctcgaaaatgcatgtcgcttaggttactgggatacacggagccgtttttttgagatatccttctattc

SEQ ID NO: 156815 - DNA, 523 bp, Cannabis sativa
acgctaagacagtgcgttttcctcatcatgaccccctggtcatagagactcccattgccaatacgattgtagctagaatcctaatcgacaacgggagttctatgaatttattattcaaagaagccttcacagcaataggcctgacggaccaagatctttcaccaagcggttcccagctcatagggtttgatggaacaacacttatcccaatgggaaaagtgaggctcccagtcaccttgtgcccagacacaccccgaagcactttcaaatactacacatttgtggtggaggactgccacacaacttacaatgcaatccttagtcaaccggccctggtggattttggtgcagtcacgtcaattaggcacttgtgtctgaaattccctactcaagaggctggaataggaatcgtaagaaggaaccaaggggaggccagacagtgttacaacgttgctgcccacctactcgcctaatggtccgtgaaattattgagccagaaatagcggaagaagatgagttggat

SEQ ID NO: 156816 - DNA, 634 bp, Cannabis sativa
cttacaacagtatctctgaatgtataattcttagataatatatttaaggtatagtcttagctcaactgttttttgacccatcccctgcctagtgaacatacatcaatatttatagggctaggaggcttggggaggatgagtttcccctctctttacaatgcgtataaatagaaagattgtgggatcaatgctgaatgcaaggatcgtgggattgaggttgaatacactgatagcaggatcgtgtgtatgccatatccacataaattgatccctgagttatagggattatgttgatgactcacgatgcgaaagcttaattcgctaactattggtcgctctgcgcgaattgttgaatatcttgctctgagcatgccatcgaggtatcctgctaggactatacttcctgagcagatgttccaagtggactccacatgtcaccattcacgtgatgccacgtcagagtgccaaaattggcataatagggattatagcaatggataattatagcgcgtctatatctcggaacatatagagcgttctatataactgagagtgcaattcaaagttctatgcgtggatgcaacaacgaattaataagtcagtgaatttacctggtaagttcttggtctgctta

SEQ ID NO: 156817 - DNA, 577 bp, Cannabis sativa
tccaaccaacgcctctgtctcatattcaaatcattatgagtaaagaaatatttgagacttttatggttagtttgaatttcacatctctctccgtagagataatgctgccaaattttcaaagcaaatactaccgcagcaagttttaggtcatgagtcaggtaccgctgctcataatctttcaactaacgagaagcataggcaataacccaatcggcctgcattagcacacacaccagaacatgtctggatgcatcacaatacaccacaaatttctcctaatcagaaggtagggctaaccctggagctgtaattagtctccgcttcaactcttgaaagctagcctcacacttgtctgtccacacaaaatgtttattctttttagtaagctcggttaaaggtgttgaaatcttagagaattcttccacaaaccgacgataataaccagccagacctaagaagcttctaacttctattactgctttcggtcttggctaatccctgatggattctatctttcttggatccaccttgatcccatcctggctaacaatgtgcccaagaaaggacacctgagata

SEQ ID NO: 156818 - DNA, 534 bp, Cannabis sativa
aaaaataatataccacactattaaagtaatatactgaaatatgaatatactgtagtatactatttttcgttcttcatatataaccccacataaaacaagtcagaatagttcaaaaatcctgacaaatttaaagcttaatgatggaaacaaggctattattaacacagagaaaatatagaaaatataacgaaaataactcattcacaatccagtcacaccaaatagaaaatatagtatagcattgaactcttttcctaatatttagaaaataacgtataatgggaataaaagagtacagatatataaaactgaagaaaatgtagcaaatacaaaggtagaagatctacgatggtaactggcaaggggcggtgacgatctgcggtggtaatactcaaggggtggcgatcggactggtagaaacgagatggtctagacttggtgctgagggagaagaaagagacgagtggtctggacacaagaaaatgaaaatagggtagaaagttagggtttattatctaaggttataattgtaat

SEQ ID NO: 156819 - DNA, 793 bp, Cannabis sativa
taaattttaccatctaatccgatctaattaattttagtcatccaatcaatccaacattcattggatgttagattggatcggttctatctgttagatgtattttttatatatattttggtttaatttgggtttattcaatattttagagctagtattttttagaccggatcagatccattcaatattttaggtccagtatgtattggattggattggatccattcacctatgaaattctcattcgttcataaagagattcgttgtcatgctgagtgaagttgttgatgtcagctctacacttggcaatcttcgcaagaggaaagaattttaaaaggaatttcagggccaattcctcccaagtgttgatagaattggatggcaaagataccaaccaactcttagctcgctcccatagtgagaatgggaacaaccttagcttgatggcgtcatcactaactctgttcatcttgaatgtctgacaaagctcttcgaagttggcaatgtgcatgtttgggtcttctgacagtagtcccccaaactagactgaagattagaccatctgtagtctggctggcttgatttaaaaattgttggcgtcaaagccaggtgaccttatacaggatctggcccctgccaagttaggaagcaaatagtccctcagtctacggtcattgttgttgtgaccattagcttggtcttctactgctcttccattattgccattattggcgttgtcagccatgactccttgttcaatctctattgcagttttttccaatttcttccttcttct

SEQ ID NO: 156820 - DNA, 614 bp, Cannabis sativa
aatgtctcaaaagtaaagttacgggattaaagactgcccggacagtcatgaatctctgtagagtactagtgggcataaaagctgtagaagtagaagtacatcaataagaaccatcaagtaagtcattaaggggactgtcatctgttgcttcaaccccaaagttgaggtatgaatcgacgtgaatgcaagctgcttgtgccttcttcctggcttctgcctcctcacgattgtgacaataagatagcacactttccatgttcttacccagataactaaagtcagccttcttgttgttcagctaaaatttaaagaaaacatcggtggagaggttttcaatctgtttcatctccgcagctagcttctcacgctccttgacattaatttcgttttcctcggcaagcttggcatgagcctccttctcgctttcaagctcacccctgagacgctccttctcagcagcaaccctctcaacaaaagtttctaggtcatgaatcttctaggagtgttcttgatggagggcatcaagttcaagttggagtgaggctgctccttgcttgttgtgctcctcttgtagggcgagaaccctagattgaccataggaagtaatagtcgca

SEQ ID NO: 156821 - DNA, 767 bp, Cannabis sativa
atctaggcacccatacacctatttataaggcttaacaaatgagtaagaacgttcattactagggtacatccactgtaccacatacactacgtattgacgctgtacgagtgttggtagggtttgttttgtaccctgagtaccactaagtgttgtaccgcacacaccttgtacctttccgtacttgtgttggcaacaccgtaatgtactcttaaaacattgtacgctataccactgcactctgtacaatttttgtacaagtgctggtagtgtactaatcataacaagcatgcatacatattacacatacaaccataaccccgctcaaactcgatattttatttatctccaacatttatcccactaagaaaaaggttctaaacttacccatgtgattcaaatggtcatccatcccattttccgttgctcccaagcaaaaatcataaaatttgcataattcacatataacacaaacaatacctctagagtttaataagatctccgaaattgaaaaattataactctaatgcctatttctaaaaatgggacccacaacataatatattcatgcataattattaaaatatcaataattaacactaattacctttactaatccatattctaaaatgcagtcattacaattatccccccattcaaaggatttcgtcctcgaaatctaacctgaacaactctggatattgagtcttcatgtcaaactctaattcccaggtggcttccttcaacttggtgtccttccagtgcacttt

SEQ ID NO: 156822 - DNA, 701 bp, Cannabis sativa
ctcagctagtattgattgtaaacgcaagatggtgatcttccaacctgagggtgagaaaccgtttgtatttgtgggatcagttcagggatcccggattccagtaatttcagtattaatagtaagagatttattagaagaaggatgtataggatttatggcagtggtattagataccacacgacctgagatagttcggtcagagaatatcaaggtggttcaagaatttttagatgtttttcctgatgaacttccaggtttaccaccgcagagagaaatagatttcgttattgatttggcaccaggagcagaaccagtttctaaggcatcttacagaatggcttcgacagaacttaaataaagaatttaagattcaacttcaggggatgcttgacctagggttttcctgagctagtgtgtcaccctggggagctcccatattgtttgttaagaagaaagacggatccctacgtatgtgtattgactaccgggaactaaataaactaactattaagaacaaatatcctttacctaggatctatgatcttttcaatcagcttcaaggaaagacggtcttctcaaagattgatttctgatcgggctatcataagtgtgagaatttgagaggaggacattccaaaaactgctattcgcactaggtatgggcactatgaattctcggttatgtcctttggactaaccaa

SEQ ID NO: 156823 - DNA, 616 bp, Cannabis sativa
tcatacaaagaaagatgaacaaaagcaagaggaaaagcccgtacctgctcgagtattagctatcactcaagctgatgttgcgactagtccttctgtggtgacaggtcaacttcttgtcaacaactcctattttacaatattgtttgactctggagctatacatttatatgtggcatcaatactaattaatcaattgggtaggcctgatgatttcattgtaagacggtttggaaccctactgcctagcagagaatcggttatctctaaaaggtggattaggtctatgccggttagggttgaaaatagggaattaagtgttgaactagtagagttggaattagcagagtttgatattatacttggaatggattttttgtctaagtattcaaccagtattgactgtaagtagaaaatggtaacttttcagccggaggacgaagatccatttgtttatgttggatttgttcagggatctcaaatcctgattattttagtttcaaaggctaaagatttattacacagtgggtgtgcaggatttttagcacttataattgactccagcagacctgaaacatttgggcctgatgaagtcagagttgtaaaagaatttcttgat

SEQ ID NO: 156824 - DNA, 533 bp, Cannabis sativa
agcgaggccgcttcgggtcgcctatccctaacggcttgaaattgcttcttgaaatccctagacatatgctcccaggaaattattaaatgacaagtaaacttgttaaactagctactagctgctccaacaagcgaggtggggaataaaatacagcataaattgttcgtcacgttactcgctggaattattgtgttaaagttattcaaatacgagaccggatcttggttctgtcataggacgagacaagtgggtttttgaatccctaaggaaaaggggtagtcataatatctgggtgataccgctcaagctcctcgttagagtcgtatctagatgatttccctaactcccccacttgatatctcctaaacttgtcctccggctcttttattcgtaattggattggatcctcttgctttggacaaagctaatggcaaaggttaggtttttttcgattcaagtgctctcgcagatctggttgggagtaattgctggcagatctcgtcttactcatagactgcgtcctactcatagac

SEQ ID NO: 156825 - DNA, 1023 bp, Cannabis sativa
cctcgctatttgttgttcagattcatccaattgttacgcttagtttgtataatgtatattatacgctaagtgttataacaatcaacatgtctcgtctacatctcatcatacgtagtgaggtaggtgcctcactttgtattattgatgtcgtccttatgatcatgtcttcatacacgaaatagtttcccgtcaatatgtgaattaatagtttgtacatccgtgtctcgcttaagactttacagtcaacgagttacagatatactctatcaactccgaatttaatgagtaattccattttaatatcttctaatataattaccattatattagtcgattcgtactctcctaggttgacacgtgtcctcctctgaagtgctagccgaattttgggtttaagaattgcccctttaaaagttctttttaatgaaaagtgcttttaaaatgattatagagggtatatttgtcaaaatcccttttgaaattatgcatgcctttgatttttgcagttttatggttccaatgcacatttatagaattaatggactgtcttttccacttctcttctattttcatccattagatctttgatattatgatctgatggttgttaaatttagaggataaaatggtaagaatccaactttctaccattttcatcttcttcaaaaaacttaagctttctaaaacttccactccagcttccgaaatccgtgaatgccatccttatttgacattcttcctacgaatttactcggacttgctcttcaactcttggtgttcgaaaaactcattccgccggccgctttgtgtccattcgtagatgtttccagcatcctgttttttgacttcacagagtaagtacctcatccttcctttgatgttattcaggtttatgattgtcttacattttattacttcatttggtttaacaactagggttcatatattttgggtgatttttagggtttagacataggttaggtttatcatattccttaagcctctggtttgataaatttcatc

SEQ ID NO: 156826 - DNA, 579 bp, Cannabis sativa
catgggagcaggagctagaggaatcccttgctctactggagctgcctgaaccggttgcctaattcgtcgcaactcttcttcttgatggagtataatactttgtattttagtaaacatttgctgccattaagcagaaggattaacattgatcgcccaagtagtattctaagagttatgcggaggagctggcaatgctggtagattggttggattatcaccctgctctacagactcaccctgtgatctagttgattttttagggttcattctttcaaatagtcttgaactcaacaatcctagtgagtcaggtactaattccacacttatacacttcacgccaaaaccctaactagcacacacacattttcctttccaaatataacaattattatttacatttaatgatcatgtttttcattaaatatatgtctcctagatgctcaaatgttgcctattaaaagcaataaacatttaattacataagcagataagtatttattgggattttataccctaaataaaaatcattttaatataatcttatttactatcaaaagaagattagaagtcatttatgtt

SEQ ID NO: 156827 - DNA, 572 bp, Cannabis sativa
  modified_base (45)..(45): a, c, t, g, unknown or other
ttttttttctttttcctttccttttctttttttttttcctttttnttttcttcttctttcttcttcgtttttctacagaagtctcagccctttccgaccccccctaacacgaccctccatctccgcccagccccagatcaacaaaactcccttcagcaccaccattacctcaatccaccttcagcaccaccattatctccctccaccttcagccccagattaacaaatcacgcgagttaccaacagcagtcgaaccatctccctccaccttcagcaccaccattacctccgttcatctcgttagcacccaaatcgcaccagcaactccatcaccacattcgacctaacccagctcataaccccaacccaacctcaacgaatcaatagcaaaccctagaattcacaatccaaccactaaaactacaataagattcaaagatcaactctagaaaatggaacctaagacagagcattcgaagaaggaatcgcaatccgatcttggccgacatcggtggtgcatctgggctagtaatctgaagctgcggtgtcagagagccaccgggttcaggcca

SEQ ID NO: 156828 - DNA, 586 bp, Cannabis sativa
cttaggctttgtcggggatgacatttctattaatgccttgattttttcagaatttgcctcaatacccctcgtgttaacaatgaattccaaaatctttcccgaggagactccaaaggaacatttttttgggtttagcttcatgttatacttttttaatattttaaagcattccgcgaggtctgaggtatgatccttactctttattgattacaccaacatatcatcgacataaacctccatgtttcgccttatttggcttgcaaacatttcatttactagtcgttgatacgttgccccagcattcttcaatacgaacgacatgactttataacaatagagtcccatgttgattacgaagcttgtatgtttcttgatttgggacatatatttttatctggttatatccagaatatgcatccataaacaacataagcttggcccagcggttgcatccactaactggtcaatcctgggaagtcgaaaatagtcttttgggcatgccttatttagataggagaagtcaatacaagttctcaaagttccattaggtttcgagacgagcacaggattggctatccacgaggga

SEQ ID NO: 156829 - DNA, 632 bp, Cannabis sativa
atggtcagtattgacccctccatgatgatccatgcactgaacatcgatccaagtattcaacctgttcaataaaagaggcaattgctggacaagaagcacgctcaagcactcaaagatgaggtcaagaggctatgagcccatgacttcactaacctgaaaaaaccaagtctaaaggatagcttttcactccccacaattgaccagcttgtagatgcaacagctcgccacaaaatcttgagtttcatggacgcgtattgagtatatgatcaaataaagatacatccaccagatgaagagcacactagcttcatgatagatctagacctctactggtacaaagtcatgcccttcgggttaaaatatgtaggggccacatatgaaaggctggtgaatatgatgttcaaagatctcatcggccataacatggatatgtttgtggatgacatgcttgtgaagtccaaaaaggctaagcggaacgtggaggaactaaatgaatgcttcaaaaaattttgtagctataagattatgctcatccgcctcaaatgctctttcagtgtaggctcgggaaaattccttggcttgatagtcaaagccaagggaatagaagaaaacccaaacaagatccaagccct

SEQ ID NO: 156830 - DNA, 513 bp, Cannabis sativa
atttttacttttcaatttttttaaattaagaatctaaattttaaaaataaaaaaaaaatcacttttaaaatttttttaaatagtttttttaatcaatattttagaatgtgaccctaacttagaccttggaaatcgaacatggacctacacatggagtcgcctccgttctcgatctcgaacctgacttaaataaaataacaaataaaaatgaaaataaaatttacagaacacattttttttttaaaaaaactaaaaaacaaaagtggttataaaatacatttttgtttaaaattctattactttatttttgtgattaaaaaatttaaaaacaaatatattacaaaacgccaccataataagtaaaaatagtttcgcatagggtcatataggttaaaagctaaaaggaactaatggtgcctaataataagcgctttacattagtaaatatcattttggaccttatattttgtaaaaattatttattggactatctgttttgttaaatgaaaaaat

SEQ ID NO: 156831 - DNA, 538 bp, Cannabis sativa
ttaaatttaatcgatatactaaatcaattatgtattactcataattgtcctaagtctctttctgccaccatctcggtagttggaaatcctcttagcaaacctttgtcttttgaaaggatctcctttagtatttttttctttgcgttatatatataaaattctttacaaatactgttacatttaccatgctaatactcattattgaagtgatttattcttattttgtttttgagataattattttctaaatttctatgatttcaatttaattataacgtagaaaaaacctaacataaaatttacttgcctcgcacgtaactttttgctagtagaatagatatatacctattataaaattagaaattgtgcatatattcttttactttggatttttatgtgaaatatcatttaaagtatattgttgttcctttttttgttgggaaatttacactctatactgatttttcccattttatttcttttttactgtcacacggtaattattacaattttactgtgcatactgtttttttttttt

SEQ ID NO: 156832 - DNA, 633 bp, Cannabis sativa
aataaatatcctttacctaggatcgacgatctttttgatcaacttcttgggaaaactgtcatttcaaatattgatctccgatcaggctatcataagttaagaatctgagaggaggatatcataaagacagctttccgcactcggtatggacattatgaatttctggttatgtcttttggactgaccaatgctcatgtagcttttatggatttgatgaatatggtattcaaggatttctttgatatttgtgttattgtatttatcgatgacatccttgtgtactctcagtcagagcatgaccaacatctccggatggttttgtagggacttcgggaacataagttgtatgccaaattcaagaagtgcgaatttttgctgtcttaggtgtcttttcttggacacattgttagtaaagatgggatcaaagtggatccgtgaaagatagaatctgtcagggattggccaagaccgaaaacaatgacagaagttataagtttcttgggtctagctgggtactatcgtcggttcgttgatgttttctaaaattccaacacccttaaccaaactcaccaaaaagaatcagcattttgtatggatggataagtgtgaatcaagttttcaggagctgaagca

SEQ ID NO: 156833 - DNA, 535 bp, Cannabis sativa
aagtgagaagtctattgatgggaggatgagatgccttatgctgttttccaagctgacatggtccacgaattctctccttggataccttcatgtcaggaattccccttactgctggaagcttcataagtctttgaatgtctctgtagttcaagttccctaacctatagtgccataagtcaggtttgtccaagaaagtcctgttgcacacgatggtattgcatactgcatagcactgtctatagtgctgtttcctgttaagacaacacacccattagatgaaactaagcactgagttttagtaaaacttacagagaggttgtcgtaacacaattgatcgatgctgatgaggttggctttgattcctttaacatacaggacgttcgttaactgagccactccattcacgtttacatcacctttaccagcaatctgccctttgttaccattgccaaatgtcacagatccctctttttcttctttgtagttaactagcaattttttattcccagtcatgtggcgagagcatccactgtca

SEQ ID NO: 156834 - DNA, 693 bp, Cannabis sativa
ttgattaagaagacttagtcgaattatctcaaagtcttactccttaaatccacgtgtcacaattgcgttggtccacgtattttggacaaaattaagggtaacaattttcaatccgcccaatataaagattgggcgggttatatttttgtcgggttttttggtttacagtttttgtcaggttatgtcggtttggtttggacgggttgttcgggtttggtggtttacaaaaatttatgtacaaccctagtattttgggtggttgtagcaaaagttatgcaagtttcagttcaaagaactcaaacttgacttggccttggtaacttgatttttgttgggaattcggttgaggtttcttcatgaaaaatatttcttatggtgtctctaccaaaatttagtaaggttttactcaagattgagtgagatatgaactttttaaaattggataggagaatttttttatcgattttaccaaatagaaacataaatctaatttagtagtactcaataacaatttcctgtagttcgacctcacctgtgtgagtttaatactacaatagattacgtgtgcatgcgtaactgctcataatttgcttaacagtcatgcgcctagtgaggtcccttcctaaggacaagtgtgctagtccacaatgcccgttcttactaggggtgttcgcggtgcgggtggtacagttt

SEQ ID NO: 156835 - DNA, 526 bp, Cannabis sativa
  modified_base (211)..(216): a, c, t, g, unknown or other
aattctggttatctcgtgtctctttcttggggcacatagtagataaagatgggaccatggtagatccgaccaaaattgaagctattcgggattggccgacgccaaaataagctactgaggttagaagctttctgggattagccgggtattatcgtcggttcgttgagggtttttcaaagattgctatacccttaacggagccgacccgaannnnnntgaagtttgtctggactgatcggtgtgagaaaacttttgtagagctaaagcagcgcttgattaccgctccagtactaacccttccttcgggatggcccttatgagcttttatatggaagaaaatgcagatcacctattcactgagatgaagtgggtgaaagaaagttcttgggtcccgaggctgtacagagaacgagcgagggagttgataagattagagcgcgaatgctcgcggctcagagtagacagaagagttatgtgttgggttttgtgccctaaataaaaccccttacaatctgattagttatca

SEQ ID NO: 156836 - DNA, 545 bp, Cannabis sativa
gggaaagatgtctcatatggtcatttgagagtctttgggtgcagagcatttgttcatattcctaaagatgagagatccaagcttgatgataaggcaaacccatgcattttcttagggtacgatcatgaagagtttaggtacagattatggatccagtgaacaagaagattatcagaagtagggatgtggtgtttcttgaagatcaaatgtttgaagacagtgacaaagttgagaagtaaaagttccctgttaatgttcctgtgagtactaactcagttccttcaccaatagtgcacgatgatcatcggggagatgaacacgaaaactatgaagagcatgtcaatgaagaagcaaatgaacaagaagatcgtggtgataatattcattatgatgttcatgatgatggtgagccaactgaacatgatcaagaagcacatccaccaccaccagttgagactccagtaagaagatccacaagagagcgtaaaccaacttcaagatacaatcctcatgagtatgtaatgctcactgatatgggagagcca

SEQ ID NO: 156837 - DNA, 535 bp, Cannabis sativa
cctgatgaattcccggacaaggtctgttcgcctacctcttggcccacgagtggaactcgtgaccggggattggatggctgaccgtttgttgtttgggaggcattcaccgtcgggtcgtccttcgtttctcccagggggatgacgctcagcgtttgttggcctacagtctagtaggttctccgaatcagcatagtagcttgccgactacggtcttcgatctctgcatggtgagcccttaacgcctccatctctttgtccctccattcggtgcacatacgcctctgttcgtcaaacgcgaggtttactgcggcacgcagttcctcctgatcatgatgcagagtattgttgtgacccggcatgagtccgagcgcagcacggagattctgcaattcggttgcgtctccgatggtcgtctgggcatttatgcttggtgggattgtcgtgttgtgaatgccctggctgtgtgtggaactgttattcccagtctcttgcacaacaagcgcagtttcagtaacaggagttgtcccaccattca

SEQ ID NO: 156838 - DNA, 702 bp, Cannabis sativa
tctgcttatccgaatctgatgtcatttcgatcatccatttagtttttcacaataactaagatatgaagttagggaagtcaaatttacaactttacctttctcatttccagctcacccaaaaatgaagagttttgagtctctcatttctacaaaatagcattatctccgagaactggtgaacaactttgccatagtacaaaaactaactaagtggtgtcaaaatatcacttaggcatcttaaagtacatcccttgaacgtttttacacttacccaacgtccaggttgatgtcatatgttaacttgggcgtcgggatgtcaacctggtcgttagatcatgatctgcttcagtaaaatagccataactcactcaatattgattcgattaacatgattcaacttgagtttagaacctaattcaatgatctatcaagtcatgtctcacacttcaatcgtaatctaaagttatcgtcatcaaattttacctcaagagagttacaaaaataagttttgagttacccgcaacgggacccactaggctccaaaaaatggtcatcaccaccaagagctaatttttacctttagaccatcatcaacggtcaaaaacatttaatttatatttttttctcctatttttgtgggcctccttcacctataaaaagagagatcccttagctcatttttcacattcagaaaactaccta

SEQ ID NO: 156839 - DNA, 686 bp, Cannabis sativa
tgcaactaatgcgttactattttccaagaacgatggattgattgttgttggtgggtcgttaatgacattcacacacaatggatatgttgtgaagtcgggttccttcatattttgttgtatgtagaaatgcaggctttgatcatcctttatcctcaatggttggtatcattttttcacttgatatttcagttgcagaacaatgttttcttggttgcattctaggacctcttttcagctcccgttgtcattcttcatacttacaatttattgaaatgtaatgtccactagcttcataattttcataatttattcgatcatcaaattgtctattgcaaaagactaggaatggaatgtcttctttttcctgtgattttgaaattattattagtgtaaggcaataattttgaaaatgttttgattctgttatttctaatgttagtaatgtatccgaacattttttacactaatttttataacaaaacaaaattatatttctgaaatagaatagaaacttacttctatttcttttcttctattcaagtcttgtatttctagttctcaaccatgtttttgtcattttttgttttatttcagttatgaaactatgaaaaaattaaaatgcaactattacgaaacgttttaaatttattacacaaactaatcatttgtccaagtgttttctcttt

SEQ ID NO: 156840 - DNA, 542 bp, Cannabis sativa
aaagtcgaaggcatatctggaggtattcccgcggtaattaaaacattcactgtcacttagagtgccgttcatatctcccaacaagagaatcgggctttgagcgtttagaacacaatctcccacctgaacccagaattgttccttatcaacacaatgaggagggccatacaagccccataaaagccacggaattcctggagggtcagaggtaatctcaacactaattaggtacttagaggaggattgaacattacacattactcctttcatccagcacattcctaggccccccgactgcccagtgggagggaaataatgttgatccataaagtggagtttggaacagattctcataaaccttaccattgacaaacgaacttcagaaagaattaacaagtcgggattatggtgacgcactaaatgcgtaagttgccgaactgtcgcagtgttcccgagcccacgacagttccaagctaggattttcatggcgaccttggagacttttccgggcaagtctccatagccccaaaatgaaaatcctg

SEQ ID NO: 156841 - DNA, 548 bp, Cannabis sativa
actcagacatcttcgaaattataatactagtattaaatataaccacaataattatttttgaaaagaaatattggaaaatgagtaatttatttttgggtaaataccattttgatattgtgttttacaaaagttatcgattgaaccttctattttgttaaaggacaaaatgtaccctgtagtttctaaaatgataaaaatataaacttaagctcaattttcggcaatatttttaatataactcacttgaagacaattcttagcacgaacagatgcagaaaatatataatcagttttatcataacacctatagatcgggttattattaagttttattttaataaaatatcaattctgggtcttatttgtaccatttaaaaaaatacagagtccattttatgatttaataaaacaaatggttcaatcaataacttttgcagaacacatggtctaaaatagtatttactctttattcttttagtaatttatttttttttggtacaaatattaatttggaaaagaaaaagtaacattttttgctagatcataaa

SEQ ID NO: 156842 - DNA, 637 bp, Cannabis sativa
  modified_base (592)..(592): a, c, t, g, unknown or other
taaaatatgtcattttttcctaaaaccccattctattcctctcatttgaacaaccatctctctctttcccccttctctctcttgctctctacaacacgcacatggaggagcacacaatcgacccacaaccacaaacttggtcccttctttccacgaccaccatgaccactaggacccacggacccaatgaccaccgcggacccaacgacttctccatcaaccacggcttcacaattggcaatgttatcaaagaaataaattttatgatcaatgtttgttatgtgtgagtagatgttagatttagggtttaaaatggccaaatttaggttttgggcaaaaaattagtttttttgtcaggctcgatggtggtccgatagtggtatcatgccttcttattgttaaaacgagtaaaggttgaaaacgaaggtccgatggtagcccgatgatatggtttgataggatccgatagtggtccgatgccttcctggcgagcttaatgaatggagcttaacatctctataaatgtagatatagtccgaatagtagtccgatagtcacatgatgctactttttttttatgtacaaaaacatnaaaaaaaaataataaaaaaaatgggtagcatcgagccaccatcgg

SEQ ID NO: 156843 - DNA, 748 bp, Cannabis sativa
ttcctccacatttgactcttgctcctccttgagtaagttaataataaaatgaatgatgcttaaacaaatcggtctttatgaaaaataatattagtttcaaaaattgtacacccctttataattctaagaaaatccaaacacttcaatcattagaatttcatctcaagataattacttttcaaactcaattgtgtgtgtgtgttcaatcaattcatcatattactaacattcaaatcaattcatgcatgacaacaaacaatgcttatctcaaaagaaatgtgtatttcaatgaaaatctactctataagcttaattatcaaatcattctccactaatgtaattacacacaatctaaagatcaataggattttataggcttataatgtaaggctagggtgaaaggtagataaataaggttaatttaggctaaaatcacaccataacatacatatacaatattctctcaaataatttatatttatatttcccaatcactctcctcaataattcaatcttgtatttttttttcataaaacttactattcccccacacttaaattattgtaagtattcatttacttttcattaattttttttattgatttttcttttgaaatacttacaacttacaaatatttattcttggggaataataattttttcttcatcatcacttatacataaccatcaatattttcccctcaacaaaactctcacactttacaaatacataaatcatccatatact

SEQ ID NO: 156844 - DNA, 533 bp, Cannabis sativa
tataggaagttttgcaatgcacctctctaaaaggggactactgatgatcactctatcgttttggcgtttgggaaattttttggacattttgtaaaattttgagaaatttaaaaaaatttaactctgaaaaaaaaaagtttaagtaatttatttcacaagcttataaaataaaaagactacaaattatttgaatctttatttcagttgtgaatttatcaaaattttataggatgtcttaaataactacaacatagacggtcatgaaaaaaaattagattcttccaaatgccaaggttgaatcaatggaccggaagggtagaagttgaggaatacctcttttttgtatttattaataaaaaatgctatcatattatattttattaaaatatacccacttttataagtgagttgttcaatatacttttattctttttttaagtagcatataatttatattaatctaaggagtctaatggagacatcatctataaaagcaggtatatcttaaaaaatataaaatgaaaagtaaaaat

SEQ ID NO: 156845 - DNA, 581 bp, Cannabis sativa
  modified_base (63)..(69): a, c, t, g, unknown or other
  modified_base (512)..(517): a, c, t, g, unknown or other
cactctcagacttgtatagagcatattatatgtttcacgatatccatatgctatctcatttannnnnnnttataatcttaatgtgattaaaagatcctcaacacataatatatattaatttcgtattaatgcataatatgtcacatatcacaatttaatatttattatatttttgttaaataataaatatataacattcacccactaaattaaaatttctaacatctcattgtcacacttcacttaattaatcaaaatatttcatatatcccttactttagttgaataaatcaacacattctatagagactttagtgcataaagtaaagtgtcttttaacttaaactttaagctaattagaatttttaccccctaaactttaacatgtatcaaatcatgccccctgaacttttctggccgttaaaaattctccttaaactatttagattgttagatttagggatttttttaatttcatttaatattactatttcagtgattgtttatgtacnnnnnnatgctccccaaactttgatatctaccaaatcatgcccctcaaactttgatatatactaaatcat

SEQ ID NO: 156846 - DNA, 572 bp, Cannabis sativa
tatacttagtcattttttataaaaaaaaatcctaagtatagggggtatataccataatatactattgattatataaagaaaattcttggaagttcttcaagtttaaatttcaaagtttaaaatttttcaagtcttatgaaattttctacttattacacaggttgtaattaaagtcaaaatattatagatattaaagcgcgagtacccgtgtactgaaaaaatactaaaaacagatatccccgcgaggatataaagttgttcaaaatgaaatgcaaatttgtctaagtacaaagtgcgagtacccctgtaccgcataaacaaaaaaaaaaaccagaaaagaaatagagtttaacacaagctaatattaaaggaaaagtaaagcattgggagcagcaggaacagatccatccgcgactttgctaaccgccttgttctcgacttcctccacctttgcaacctcagtctcctcgagaaggttccccccaccaccttgagttggcgtgggcgacatagcacgaaaagcctcggccatttcagcggcttctgcaccaaggattgaaaagtcaaagtct

SEQ ID NO: 156847 - DNA, 516 bp, Cannabis sativa
aatacttttggaattacacaaagacttccaattcttccagtgaagtttgtgtttaccatcagccactccccactaaaagtttgccatttctttctccacgaaattgcaaaaagaatcaggaagtttgaaaaccgacatggcatagctaggaatagtttggaccaccgccttaagaagaacttccttccctcccttagataaaaatttgccatgccatttagacaaatatgaccagatgcgatctttaagggagttgaaagaagaactcttggaactaccaaaacactgaggcagcccaaggtatttgtcaaggtggtttgtcatgggaatttgcatatagtcttgaataagggtttgatatgtgagacttgtgtttggggagaaaaacagagaggatttctgaaaatttacttgctgggcagagatgttttggtactggtcaagggcttctttaatggcattacacgcttggatgtttgacctacagaacagaatgctgtcatccgcaaataggag

SEQ ID NO: 156848 - DNA, 541 bp, Cannabis sativa
ggggtggtttcaatgttggtggtgtaatggcgtggtcactatggtgggggtggtttcatgttaacctctgtatttgttttaatactacagtattacaaatgggctgagtattcttcagggaattcaaagcaaaagcaagtgtgttaaaaaatcattgaaggtaagcaatattattgttttgtgtgcttccaagacctcttgggggcagaatgttcttcctccatggactcttttacaatcgacggagagagagggaatgagaagaagagaatgattgaattaaggttttttttttaatttttattttcttaaactaattttttaatttttaaagaaaaagaattttttttattttttattttttaaaataattaattttattatattttaaatatttattacgtggaccaataaaattgtgccacgtgtacacagacatttcaacctggcagttaacacccaaaaatggatggaaagggctaagtgctaacagaacttgggtttagggggttttaccgccaaaattttagaattgggggtt

SEQ ID NO: 156849 - DNA, 622 bp, Cannabis sativa
tttgagaaaataaaatatcgaggtcgagcggggttatggtttttgaccattttacccctagtcttaaaaatacttaagttataagtaaaggggcatgttagtctttttgttaaatgagagttaggtggctgcctaaccttgtgacacctagcaattatttattcagccaaaggttaagtgaattaatccttattcatttagaaagaaaaaaggaaaattaaagaaaatgccaaaatcaagagaaaactcttttctccctttctctctctcttcgaaccagccttggaccaaggagattgtcgcttcattttgtgttttcagcaagattttaaagggaatcaagcaaaggtaaaaccctagtacctttatttaagtgttcttgaagctttaagtaagttcgagtttaggtttgttgtgttttgatggctgttagggttaagatgttttatatttattttctaagtgatttgagttagaatgatgatctagcttctggttttgggctttagtgatgatattgctgaagtttgagttttgaagttaaagctttggtgatgtattgtatataccctaattaggtactctggaaggtttggttacgtttggtggagttttgagcaag

SEQ ID NO: 156850 - DNA, 794 bp, Cannabis sativa
agagaacccaagaaattctggtctgccagaaccggtcgattggttggttctggtgcattaaaaccagtcaaccggttgccctataggggaaatttccaggttttcttcaggtttagtttttggcccagggagttgcgtatcatttgttttaggttgtttattggatgcttgacctattttgaagttgttgggagttaggttatgcttggttttgagttagggtcttatttcaaaattttggattaaagtattcattgagtttcaattgtcgtgacataggaccgggatcgcccaatttgttttccactcaggtcagcccgcacgcttgagttctgaactaaggtaagaaaagttgtaagcaccatatgtggctaaatgttagcggttgaatgatatagccttgattattatcaagattctgattggatgtatgttgagcctaggttatgacctatggttaggaacggttattaccgttacgagtaattactcttgaaaccgcgtataggtttcttacttatcgtttgcttcatcgggcaacgatagtgacatattcagctcgtggttaatgagtggtaaataggtactttataaagtaccagagttgtgtttacaatattatgtaaatgtgtatgcaagttaatttgagattgaattgttgaatattgctggtcattattttattcacttctcttgctgagtctttgtgactcacgggtgctttatggtgcaggtaaggggaaagcaaaggttgagtagccatgagtttaaggtcgtatcagcaatgtacatat

SEQ ID NO: 156851 - DNA, 734 bp, Cannabis sativa
catattgaagctttctatccagcttgggtagctaaccccgtactcgtacccaagcccaataaaaaatagtgagtatgtattgattttatcgatctcaacaaggcgtgctccaaagactgttgtccacttccaagaatagatcagcttgtggatgcaatagctgggcacgagatcctaagctttatggatgcctattcaggatacaatataatcaggatgcatccaccagaccaaaaacataaaattttctgaacaaatatgggtttgtactgctacaaagtcatgccatttggtctaaagattgatggagttacctaccaaaggttggtgaatcaaatgtttaaagaccagatcggacgaaacatggaagtatacatggatgacatgctcgtcaaatctgggaaggctgggggcacatatttgacatggaagaatgcttcaaaatcctcagaaaatacaatatgaaactcaatcccttaaagtgctcctttagagtcagctcgggtaggtttcttgattttattgttaatgcttgaggtatcaaagccaatctagagaaaattcaagccctccttggatatgaaatcaccaacaaaaactaaagaagtccaaagcttagctggtcagatagcagcattcagtagatttgtttcaaaatcaacagacaagtgtgttcctttcttcaacatccttcgaggaaacaagaaatttgaatggacagaggaatgcgagaa

SEQ ID NO: 156852 - DNA, 603 bp, Cannabis sativa
gactagtaaacgaaatattcgcaagtcgaatagggcaaaacatggaggtttacgtcgatgatatgttggtgaaatcaataaagagcaaggatcatacctcagacctcacggaatgctttaaaatatttaaaaagtataacatgaagctaaacccaaaaaaatgttcctttggagtctcctcgagaaagttttttcaagatttgcctcaatacccctcgcgttaactatgaatcccaaaaaatttcccgaggagactccaaaggaacatttttttgggtttagcttcatgttttggcggcatccccgacaaagcctaaggaagtataggccctgacaggaagaatggcggcacttaacagatgcatttcaaagtaaactgataaatgtgtgtcgttcttcatcatattgcgaggcaacaaaaagttcgagtggacaaaagagtgcgaagaagcctttcagatcataaaaggcctctcgcgacgcctttagtttcggcgaaaccaataactggagagacattatttctttatttagccatcttggaagatgcaattagtgcaactatagtacgagaagagggcatgcaccagcaacctatttact

SEQ ID NO: 156853 - DNA, 537 bp, Cannabis sativa
tccgtgaaagtacaataacgggacaaaatcatatccctatatatatcagtttctttaaaatataacaacaaaactccaattttttaacatttttaatcgttttaaatatattataatattaatatatacacgtatcctcatacaaaaataatttatatttaaacaattaatataatatatttagagcaataaataatattctttaaatgtaaagcataaataataaattttaaagaaactttaaaatgaaagagttagaacactcacaacagcttctttaaaatagagaagttttaaaaattttaaagaactgtactaaaaatacgctacaacaaatactctaagagcaatcaataaaatatgtgtatatatattattatctttgaaatattaattgctttaaacatactttattaattgctctatatgtattttattaattgttttgagttttgataattatttttgtatataaatataatgaaaatatattaaaatttgaaaaaaaatatggagttccgttaatgtattttaaaa

SEQ ID NO: 156854 - DNA, 580 bp, Cannabis sativa
aagtactctgaggggtgtccttgctcagggtgactggtagtctcacttttcccattgggataagtgtggtcccactgaatcctgtgagctaggatccgctaggtgacaaatccctgtccgtgaggcctatgactgggaaagcttctttgaacaacaaattcacggaactcccattatcgaccaatattcttgccacaattttattagcgataggagtctctatgaccagaggttcatggtgagggaaacgcaccagtttcgcatcctctttcatgaaagtaatgggctggtccataaggtggggcctttgtgccggaagttgagtgacttcccacacttcatcgtgttttatggctccagcatagtgctttaactcttttatggtggttcccccaatatggggcccaccagagatcatggccagcatgccattgggtcttggtgggagcctagggacctgtccttctgagggtacaacggttgttggggctccgggcataccccttggtgccccgtgaggtaacgggcctcctactggactcgggttgagatggggtagccgattcttaatccattcata

SEQ ID NO: 156855 - DNA, 530 bp, Cannabis sativa
  modified_base (245)..(247): a, c, t, g, unknown or other
tgtgttaagttatgcgctcgaattttattgtgtgggtttttaatatttgagttttagtgttttactggagttctaatgtttgagtttgtgtttataaaatctgtttttatttattatttatttttataaattttgagaacttaaaatttgatgttgtatacattgattattaggattgaaagtttgatttttcatacgggaattaaagtttgcgcccttttcgtttcattgattgaaaaatattnnnagaaagtttatgaaatgagaattttgaaagcttactgaaatatcatttataggtagctaagtgtttaaggataaaatatattgaaggatagaaagctaaatttgtccctgtttgatgtagatcatctatagaggatctttgactatttgaattataacaacagatattcagagcgtatctatatcttggtacatatagagcgttctatataattaagagtgtaattccaaatctatagtggcgcaaagagaaattaataagatagagaatttacttggtaaat

SEQ ID NO: 156856 - DNA, 576 bp, Cannabis sativa
  modified_base (106)..(110): a, c, t, g, unknown or other
ggtgggtcccaaatccagacaccgactatgggttcggtccaagccccaggtctagatctagatctcgaactcgggtcctgttctggttccatttcaggtgtcgggnnnnnagctgggtcctaggttcatgtccgggtctggggtcgggtcttgggtcccagtcctagttcttttgcccaggtccctatctcgattctggttccggtcacggatttggtttgggtttaggtcccgatctaggttcgggtttgggtcctagtcccagtttgggtttgtgtctcgatttgggtttctatttgggtttgggttcgggtgtgggtccttgtcatggtcctagtcctagtccggttcgagttccaattgcaatttcgagttctagtttgtgtttgagttcgggtcaaggttcgagtcctaatctgagttttggtttgggtctggatctcggtctaggtttggatcaggctctgagtgtgggttatggtcctgggtcttggtttaggttgaggtccgagtccaaagttttgatctcaatctgagtcctggtttagttttgagtctaagtcctgggtttcgatc

SEQ ID NO: 156857 - DNA, 734 bp, Cannabis sativa
  modified_base (158)..(183): a, c, t, g, unknown or other
  modified_base (346)..(354): a, c, t, g, unknown or other
  modified_base (437)..(451): a, c, t, g, unknown or other
aaaatgataaaataatagaaaaaataggactatagtggtcggccatatgtgggcccaacactagttatatttttaatatttttctcaatcatttagctattattttataaatgccatatttttaaatttcaaatttataaatgccaaaactatttatnnnnnnnnnnnnnnnnnnnnnnnnnnaaaattatcatttatattatttattaattagactccacaaactctcttaattaacaaataaaccctaaaatcctatttcttcacaatcaagccacatcttagtgaaaatttcataaataaggcataatctaatttagaattataattaattaattaaaatcannnnnnnnngtcttacaagcagtttgtcttaaaaagtatggaccatgggcctatataaccgagcttctaataagtagatttagaatttaccnnnnnnnnnnnnnnncttattaattcctccttgcaccaccatagatttggaattgcactctcaattatatagaacgctttatatattccacgatataaatatgttatggattatccgtttgttataatcctaataatcaatgatcctctatagatgatctacactgagtagggacaaattcaccgttacacccttcatcttttatacttaaaacacttagctacctataaatgatatttcaatgaactaatatgatcactaaaatgagcgctcaaccatttatctctattaagccatg

SEQ ID NO: 156858 - DNA, 504 bp, Cannabis sativa
gactaggaccgtgaagaggacccatacccattcctagaaacgaactcagacctagccccaaacccaaaccgagaccggaactcgagcccagacacggtcatgcacccagaccgggaccgagacctgaacccggacgtggacttaaatttgggacacgatcccaaacccaaacttggacctagataggtatccgaatacaaacctggactcaaacccagaccgagatcaaaactcgagacctagatccggacagagaccctgtcccagaaccagacctagacccgcacttgggacccaaacccagacctggacccaaacacagacccacaccgggatttgtacctagactcggacccggacccaaacttagacgaggactcagacctcgacccagactcagacccaaacccgaacccaaacactgaatggaaattaaaactgggactaagaccaaaacacgaacatggacccacactaggacctatgacccagacctggatgggg

SEQ ID NO: 156859 - DNA, 544 bp, Cannabis sativa
tgtaaagggttttatttagggcacaaaacccaacaactgcttcgtacccgttctggcctataaaagctagtccttatccttcatttggttacttcccctactttgccgttttttcgcaagaacactttggaaagaaaaaatttcagacaccatagatttcttgttgcttttctttcaacgccgacccccagctctcaactttcatgtaagttttctggacactttgtgccttttattgtttgtttgcatcttaggatataacttcttggttgagcggtggatttctgggaaggaactttgactgaatctgttgtttgatgcacagaatctactttatttatgtctttgtaattttcctccattcttctttagaatcgacccctctgtcgaaagactgtttaggacacgggaagatttttgttcccacattctgcttttttgcttttcttctactttcgctgcctttgggatttttgcacccgatgtttgctaaggaaaatcctttgagtttttatttttggcaaacatccggagggggcctctt

SEQ ID NO: 156860 - DNA, 744 bp, Cannabis sativa
ctagagttttgcatgtgtttatttatttatttttatttttattttgattttaagtgttaaaaaattaatgtgactgtgtattgtcacatttgtgacagttttttttttttttcttttaattcaatgtgatcatcattttaatacaattgctctcttagtggtttatacccactatctcatttaactattcatcatcttcttcttgtgttttttttaaaaaaaacacacacacacacatccagctactgtcttaggggcaatttttggtggttacttaaattaaatttatgcaatttttttttaaaattataattttctctctacattttttctatttatttgttggtttctcatataaatactttgcttgttcattatctatggctattactctatcaaagtcttcttctccagttgtaaaatatcccacaaaaatgcctcagaaaaacttgtgtcgatccttaatgggtaagaggaattttaaaaaacacccccaagccttacctcactagttctaaacaaacacaaatttcttggtgaaacttcgaagaggaggatgtccaaacgtcctcgtcccgtggttgaaattcagactcagatttcgagttggacgataaatttttacacatgtccaagcttgataagggatttttttagttatttttgtgatgttttaggggttttcttgtaatttattttacttactcctatatttctatgggatgtattactttcatatgtaat

SEQ ID NO: 156861 - DNA, 726 bp, Cannabis sativa
tatactaaaatagatctcatcagaaaacaaaaaaaaattttttctctcatttgcttcatggtatcaaagcatgtaaaaccttctcaaagcattttatttttctcattccttctcttcttaaattagggtttagaggcactatcttagaaaactaattaaaaggagttttctattctcacctccgacccagggagcttgtcccacctccgattggaaaaactcaaaaattcggcgtccatctgagttgcgtgtgggccccacgcacctccctccgccgcgaatctctccacgcgctagcacgtgggcgcgtgtggcagtctccaacggcgcgatgttttccacgtcgtctctctcaggtttcaccatctctggctcttctccgactccagcgatgtttttctggtgttgtctctctctgttcgtcttctctgggattcgatacttgttttgtcttgttgtctttagaacaaaactcattaagagccatctctttagtcgcaagacaatgcaatactcatgcacttcaggttattcaaactcctcataacccttggattgtggattctggtgcttctgaccgaccatatgtcaggtgatagattactattttcttttctaagtaaatactctcatgaaagtactgttcgcatagcagatggttcgtgttcaagaattgatggaattggaactataacaatctcaccaagtcttgtcttaaattctgtc

SEQ ID NO: 156862 - DNA, 520 bp, Cannabis sativa
agtcgacagactcagtaagaaaagcatattaataacataactataacccggagtataattaggcggccatacacccaaccataaccctatccccgtgtccaacatggtaccgagtctagaacgttcatacgacagtactatcgaccataatatcagcctatagtcgatactctagtcatagtctagttgtaccgatgtaatagcgtcaatctcgtacttgagccaaacatacatctatcggtatccagtataactctacgtatacagatacaatctaacagactccataaataagcacgctaaacatgtaaatacatatgcatataattatactaatcttacctcgtttttgaattcaagtgtgccggtcaacctgaacctgagtggaactgcttctcgttctcgactcgacgatttacaggcccctaaatcacattattcgtaaaactgatgagtgacatgcttaactttttggacacttaaaattgaaactaaaagtttccctatcgatggataacat

SEQ ID NO: 156863 - DNA, 513 bp, Cannabis sativa
taataatataaaaataactcagttgaaaaaaccaatcttacaaactaaatatatatcataatattttatttataataaatgataatattattagtatttaaatctatttattaattcaaaatgtcattcaaattaatataatggaaggtagtgattcaatcctaccattttttaaagtatcaacattacccttctcaagtgtagttatattactaagggaataacattccaagactaaaccctcaaaacaaataaggtaatgtttcacattaccattcccttgttagcattaacccattccaaacaccctcttagggttgggctggcattgaggatctccaggaggtttatcgcagacggaaatagaggtatcaacgtcgcacatggattcgtcatggttagagatctcagcggtggtgtcgagagttacgtcgtcaaggaagcgaatctttgtgattgaggctattggggctgtgattctggtgccgtttcagcagctggtgttggctggtt

SEQ ID NO: 156864 - DNA, 700 bp, Cannabis sativa
tggtgaagacggctcgtcaaacggacaccggaggtgaccagaaaatccgttcaaagtttgaaccaccaaactttgacttgcgatcccaagctaacggtagcaaaaagagtagcgccgcttgggagttgagatagccggcaccaagggtttcaagtggttcgaggcatggggttggtcggtggccggaggtgggtcgccggagtccgccggtgatagagctttgtggttttctttttgtgttttgaagagagaaaaaaagagagatagatagaaagagagagagagggacgatagggggtctgatttaaatatatataattatttttttaaagtacatatatatttatatattattatatttatttatttattatatatataccgagtcttcacaattcatatctcaacttattatttttagataaagaatataaagatatatacaattttaattaatttgatagcaaccacaacatctcttcctaattaaaattatgtaaaattcatctcatgttacttttatctttaagtgtgataaattcaattcaaacaagcatctgtaaaatgatctggaatgagaataaattaagaatatttttttgcttctatcactacaagaaatgtcacttttaccaacacagttcactactacactggtagcgcattttgcaaactacgctagcaaaaaggtcaaagtttt

SEQ ID NO: 156865 - DNA, 507 bp, Cannabis sativa
  modified_base (432)..(445): a, c, t, g, unknown or other
cttgggtcctgctctcatttagattcaaatcatgggtcccggtctgtgtccgtgtttgggctcgggttcaagtccgagactgagatcggggtcaggtcttgggttccagtcccagtcctaggtctctattctggttctaattttgagtttgggaccccaatctaggtctgggtcctggatcctgggtccgggtctgcgttcaagttcgtgtcttggttcaggttcgtgtccctagtcccgatccgagttttgatttaggtctgcgtcctggtccgggtgtgggtctgggtccttgttagattccagttcctggactcaaacccagacttggactcggacccaggtctggggtttgggtctaggtctgggtcagggtttgggtccgagcccgggtctgggttggagtctgggtatgggtcctagatccaaacnnnnnnnnnnnnnnaggtccaagccccgggtctagatctagatcacaatcttgggtccaatctagttccatttcag

SEQ ID NO: 156866 - DNA, 757 bp, Cannabis sativa
  modified_base (695)..(706): a, c, t, g, unknown or other
gacttaaatttataccaaataaattgagtaattattctagcttggaccaccactactaatctaactatatgtttaggttgcctaaagtaaacatatacaagtcggagattctaagatcgaggattctaagatcgagaattcatatcatttcatagaaggaaatagaataacatcatcagcagatgatttataaaccattcatccaatgatatactatttaagcaaattctaaatgaagaaggtaagaggaaactaataaaggataatttaaattaaaataagaattcaacgatgtcccatttaggtgagagtgaaagttattcttattttatgaatttttcattgtttcatattataaatactggtctaagttgtcatctttagatgtacaactagatgttgcatttacaaatacttatctgtcgatatctaacactattatgtttgtctaacgggtgacaatcctttgggatttgtcccattaaaaacaacaagctaagttagaccgacaatgaagattcgaaattaatactgcaatattaataatagaagacaatatgattcaaaattcatacacattcagaaattaacatacatttgacaagtaaaaaagacatgtgaaaatacaaaacaaacacatcttaactagtttctaaggttttcaacaaactgatatagtgtcccgtttaggcgannnnnnnnnnnntcattcattgaatagagtagtcgactcatctaaaacagataccattctagc

SEQ ID NO: 156867 - DNA, 644 bp, Cannabis sativa
gtttttgtatttatttagggtccaatctcatcttttggagatctacaaagcaaaagacagtgtctagatccagcattgaagctgaatataggagccttgccaatactactgctgaaatagtttggcttcaatccttacttacagaagtctgtctttctcaattacttgttcccacaatttggtgtgataatcaaaccactgtacagtactaatatctgccaatcatgtgcttcactccagaaccaagcacattgagtttgatttatactttgtgtgtgaaatcactagctttatgtcaagcatactcctgctcaagatcaaattgcagataccctcactaaagctctgtctacttctcgttttgcatacttaagagacaaactgagtttggtctctttgtcccagctcaatttgcgcggaggtgttaagtagacagttagctaactcatgttagttaagaaatttgttatgtgtcgttgtattcttttactgttttcagttgtagttagttaaagttatttcattcaatattcaataacaagtttcttcttactctctctcaatattcaacaatacaccccaaacagtaactcacaatatatataaggttgtaggaatggcaatttgggccattttcgcaggcc

SEQ ID NO: 156868 - DNA, 500 bp, Cannabis sativa
  modified_base (279)..(281): a, c, t, g, unknown or other
  modified_base (468)..(475): a, c, t, g, unknown or other
agtaaaggctgagcatcagagaccctcaggtttacttcaatctttgcctataccagaatggaagtgggacaagattacagtggactttgttactagaatgccattgacacctttgaagcatgacgctctttgggttatttttgatcgtttgactaagtccactcattttattccaatctagaaggattataggcttactaggctagctcgactttatgtagacaatatagttcgactacatggagtgcttgcaagcattgtttctgatagagatcctcnnnttacatcaaggttttggaaggccttataacaagccttagggactgaactttacttgagtactgcccatcatccacagacaggtggacagtcagagaggaccatacagactttggaagacatgctttgctcttgtgttttggattttagagctagttggggagaacactgttaggttttatgccctannnnnnnntccatttcaatgtaatccattttat

SEQ ID NO: 156869 - DNA, 681 bp, Cannabis sativa
aatttattatgcctaaagtaattttcacatctcgttttcatgttttaaagttggaagcattcaaaattcagatgaaaatattattgttgttcgccaaaaggagaccaaaaaaatccaaaaattaaaacttgatcaagctatatgagccaagcaattagaaaatattgtagagttaactggtcattataaactcccctttggggtgagaacataacacacacatgatctaccttcatgaagttaacaataaagaaaaaatacatatcaattaagaatttattacctttaggcaaataaatttcttaaataatatacattaattcaaacaaaaaataataataaatatatatttaaattattacctttgggcaaataattaaaatatacacatttaatattaactcactttatggaatgtgaactaatatatataactactacctttgggcaagtaattacacatatagccaaccaaaataaatattttctataacatataaaatttggtgataaaataatcattaaaagatcaataattttcaaccaaatttccaaagagttatatattaattgcttgtaataatttgataataaaaaaataaagtgtccaccataacacattatttttacatcaaacactcaagttttacaaatttttaaaacaacaaataatggaaagat

SEQ ID NO: 156870 - DNA, 530 bp, Cannabis sativa
aaatttttaactgaatggacatttaattaattttttataaaaatggacatttattaacttaattgttagatttagggtcattttgcatcttggcccagcctaataacttaggtactggctcaagaccacgtccatttaggtagcaccaggatcccttcactttgccaagtttgcaagtcgtagtccactccatccaacacttgccatgattgtgacatctcattgatgtcaatgtagtaatgcagtagcgatttctacactttgctgagttcgtggaagcatttccccactactcatacacgttcattattatgttgggatctgtggaaattgatcctctaaaccaacttattatccaactcacttaaaccaactaacttagctaactttctgttatgttagttagttagttggtgctatccttctttgaggtgggtctataaatatgtctagtcttctcactttccaaaagaggaaaaggagagaataagagagggcattgaagggagttgcttaggatttctaagctg

SEQ ID NO: 156871 - DNA, 645 bp, Cannabis sativa
tatatatattaatttgagaaagaaatttatacattatttaattttatttttcactaatggtatattataactactaaatccgtaaaaaaagagtagatataaaaattttgaaccaactttattttttagtaattggatctagagatgttatatattcttatactatattaatataaggtaagtttgctttaattattgtttcagtaaattttatattcgttttgatatttagacaagaaaatattttagtcaatattttttttatatgaacgtgtacactatagattattcgcgctttgcgcggtatttataataaataataagtttttaaaaaaaaattatgaatttattttattttataattaatattgtatttaattattttccacttgattaaaaaagataaatattttttttttctttccaaacaataagaaagccctataaacattattacatgttttcaaagtaacaattttttttcacttgatattgatttttataccattttcttattttattacatttgtaaagtaacctaacaaattaaataattaaatgtaatagtgtacaattaatatttgaattgtaatacacatataaatatttgaatttaataaacacaaaaatataatttgtgaactg

SEQ ID NO: 156872 - DNA, 563 bp, Cannabis sativa
  modified_base (509)..(510): a, c, t, g, unknown or other
ggtttccaggctaaaaatttaataataatagaatgagaaagaaaatggactagctctggcaacaacattatagttagtattttgagtaaatttatggacccgcatgaaactaagaacttaggtttccaggctaaaaatttaataataatagaatgagaaagaaaatggactagttgtggcaacaatatcatagttagtattttgagtaaatttatgggccatggggtgagatagttggtagcgcactcgagtcaagatgccaacaagaatcaccaacaggagtggcagaaagatattgcatctcaagaacattgatagtgccagttctgaaatgtttcagggttagagaaagacttttcaaaatgatggaaatattgtttgatagtgtgaccaacattactgacgatgttttacccacgcactgaattagacacactacccttgagagcaccattctttggaggtggaggatgatggaacccaaggccggcccaagcattgggcagctnnggccattgcacaaggcccccatttttctaaggcccaatttttatttttatttt

SEQ ID NO: 156873 - DNA, 528 bp, Cannabis sativa
ctaatcttgattttggaaaaaatggggttagtggaattgcttgaatgatgcatgaatatcactttggaaaaatgtggtttgtaaatggcgtaggaatatgctatttcccatgtatgacttgaaggaattgtgcttaaattgatattcttaaaattaattgggcataggaatatgttaattaattaaagaatcaaatcgtagacactttggaaaaaggattatgacaatttaaattcctagttgacatcatcaatttacaacaatactcatttgcaccattatatctacattgcatttttaggccaatttaatagttctagcttatttttattcatagtttgtgtttattaatctttacatattctcaacactttattttatttttgtttaaattaatttgtgagtaactagttttataaatcattttccaattttcaatccttatggagacgatacctcagccaagtaacaatgaggacaaaccgacctggaaactacatgtagatgggtcggctacagatcaactat

SEQ ID NO: 156874 - DNA, 719 bp, Cannabis sativa
acaggtcgctcatctgaaagataaaagatattttcagcgtggtgaatgtgtgaaaaacaagataagtgatctcacccgcatataaactataaaatcgtctttaaaagatggtttgaattctcatgaaaactaaccatcccaccaatacgcgaaaagataggtgtgtgaatagaaagacctctcaaaaaatggctgggtgtatcccagtgacctaagcaacatgcgtcttttagcatggccctgaagtaactgggagacacccaccgtttcgagaagtccaattaatcgcaacctgcgagtgtttcacgcatctctagctagcgatatacctcaaaaaacggatgggagaatctcagtgactcaagggacatgcgttctcaagcataaccctgaagttactgagatactcccaccgtttcgagaatatctaccagccaaagagtacgcttatcagaatattagcacatgtcgcaaatggctgggtgtatctcagtatttcaaggaacacataaccgcgtatatgaacattaaaatactgtgatacacccaccatttgaaagacttaaccaatgttcccgcagcaaaatttacagagtacaaaatcctaaagttctaagtaatagttagaagtgattaagtctctgtgaagcctaagatgaatagacatgcgagtattcgaagtgttcatccaaatacccgcgtgtattcaaaatataaag

SEQ ID NO: 156875 - DNA, 682 bp, Cannabis sativa
acaataaaaatgtaaccattgaaacctcttccatatatatacatacattaatatatatagtgaaatatttatattgtatatatattcttgaggtctgctaatgtagagatgctcttactttgtaaatagtttgtagattaatacattgctgatctatcaaaaaaaaattacttgtgactaaatataatatttagttacaagttgtcactaattttattttagtcacaacaagtattgtgactacaaatacgttgtgatttttgtgactaatatttttagccacaaactttatagtcacaaagtaagaataataatttataattaatcatattttgttacttatactgtaattttacatgatatcaaattttgttacttatactgttgctaggaattttgacaacaccgaatataaaaataaaaatataattatttaatgaaaatgcgcgagtactcaacatagaacggcgagtattcaaaggttctggtacacagacaaacgggaaaactaatatagataatgaacacaagggaattatagtggttcagccaaatcacggtctgtttagtccactgttacaaggattttttctatccctcattcatgttggatcactcttttatatacaaaacaagtgtcttttggttacacagaacttaattgattattaaaccgttttac

SEQ ID NO: 156876 - DNA, 613 bp, Cannabis sativa
caattttgataattttcactaagttgagtgaaatagaaaaggaaagataaataaaaggcaatatactaattctgacatttttctaataaattaataaatatatttaaattatatattatttaataattatttgtgattattaaaatagaactagtatttaattatatgaatgttatacctgatattcggccacacttcagaagttgacacgtgtccaacagaaggaatatgaatcaattctaaataatataatgatatcattaaatatattaaataaatcgttattatttgaagattaaatatatgatattcaaaactcatttactttatagtcaaaagtgagacaagaataataattattgatttgagattaacgagatataagcatgtctcggaatatataaacaagaagggaacattcatccacccgagcataatgaatgtatcaacatgaactacctcgcattatgtatagcgagaagatcacctggcattacaaaagtcacaaagagaacataacgagatggataccttcccaacacttaggattttttcttatcaagatggacaaggaagataactacaatcagagaagatataaccttccacgtca

SEQ ID NO: 156877 - DNA, 708 bp, Cannabis sativa
  modified_base (495)..(499): a, c, t, g, unknown or other
ataataaaagaaataattattaaatctcttatttttttaaaaaataataatttatattttatttaatattaataaacgacatcaacttaaatttttcttatatactaagttcctaatttttttagatttgataaaacataatataaaatactatgaattatttttatcaaatgtagggatattggcggctaaactacctgaactttacagtttgtaacacttaaccacaaaaactgaaattttggcggctaaactacctaaaccctagttctgttttgctctgcacacctccgtccaaaaatcacagttaagtgccacagtagactgtccacgtgtacacacttgtacacgtggcaagtttttagtggtccacgtaatattaattttacaaaataattataaatattaaaaaaaattaatttttttttctttttttgcttttttaaatttaaaaaaattaacttttttttacttttttttttcttcttcttcttnnnnntcttcttctttttcttttttaaaattccctggaagcaatgaagcatcgtttcgtgcaagccgagaaagaaaatgactcgactcaccaaagtcctgtccgttcaatgaaacggctccttcgatccctaaactcacgcacacttgtaatgtgattaggaaaatccaggcggcgctgaggcagagtctacggctgaggagagcggtggtcaa

SEQ ID NO: 156878 - DNA, 919 bp, Cannabis sativa
  modified_base (812)..(814): a, c, t, g, unknown or other
agtgatatttgaaccttgaaaataggtaaaaatctatctttttgcttagttgattatcttattttttaaaatttgattattttattttatttttacttttaacgttagataatttatttttaaaaaattatttacttatttttttatgaaatgaccttatttgaagtttaaaataagattattttaatcaagaaattttaaattttaactagatattttgctaactttcaaaattttgttattttatttaaattaaattataaaattagataaattatatttattttattggatctttaattttatttttaaaataacattaaatttgaaaagttagtattttttgaatagatatttaagtttgttgaaaacataatttttcaagtttataggtttaatttttgaaattaattatttaatttaatttgaaattttcgaaaaataatattttattatgtaatattttcgaaattaattaattatttaattaatttaaataaaataaatcatatatccaactatccaatttgttgcaagtgtatgttttatattgtttattattaaaacaagttttataaaatctattattgtatgatctaaattgccatggttaacttgttgacagatccaatgacatgattttaaccaatagtttaattgtcaataggtcaaataaataatttgtaacaggtaaatattacaatcttctttcatctgtgtataaatctagtaacatgataggatccatcacaatcagtctgcctatctgagcctatatgtttacttagggcttagatgcatatagggagccnnnttaatttttgtaattaaaatggactaggttgctaaataaaattatgaggaaattacactctataccctttttatattgtcatctttcatttttaccttctttttt

SEQ ID NO: 156879 - DNA, 537 bp, Cannabis sativa
caccttgtaccttcccgtacaagtgctggtaacaccacgatgtacttttagacatcatacaccttacgaatgccctctgtactggaaccgtacaagtgttggtagtgtatgaatcacaacatataagcatgcatatacactaaacatatacatacattcgcatatccatatcacacattatatacagttcttaccttgtttctagattcaactgtgctggctgacctgaacgaaaagtcttgtgctagatggatgccttaatcacataatgaaactgggtaaatcacatgatcaaaaaccctaatcccgggaaacccgaacctacaattctaggttctgctatattctctagggattacattaactcaggaaatagagaaacaccaaactatggcactgaaatggatgagaattgagaaaatggagctttcggggacagtgccaaaactggctagccggtttgcaccagttcaccccaaactttccatttcttggtcaatcctccaccaaatgcaaccaaaccttctagaacaccta

SEQ ID NO: 156880 - DNA, 543 bp, Cannabis sativa
aattacaaagcactatatgagtatggtattaaacaccacaatatctaatagcaatgctttaaaagaaaaagactaaaataatcttagttaatatttaacacaaatgatattttgtatataaatatttttataattttcttttctttacaagtgaaatgacataaagtataagaggcaaaatgactactaccaagctaattgattgattagatatagaaattcataatgagttttctaaatatttaaataaaataatttgtgatcacccaattgacatgtgtgaataaaataaattacttaggactcgtttggtacatcgtataaggatcgtattgtattaaataataaataacactatgtttggattaaacaatgtattgtattaattattacgaccaaattttttaatacaatctatgttgtattatttaatgcataataaatggttcgtattagtttgtattataatatttacaaaggatttgggatcaacgccaatctccgacccagacccaaacctggacccaggaccccagacccgga

SEQ ID NO: 156881 - DNA, 542 bp, Cannabis sativa
  modified_base (42)..(49): a, c, t, g, unknown or other
  modified_base (231)..(233): a, c, t, g, unknown or other
ctgaatacacgtgtcctttaaataggagtctggtctcgagtnnnnnnnngagagaaatctcactataacaccgatttgttttgttcatatcgtataatcttagttctcttgtacatccttacaagattataccttctccatagaattaaataattttcagatatttaataattatactcttataattaatatatcattcatcttacaattgtatttcatatattctctaannnattatccattaattacttacttttagggcataaatcctaatagtgtcggcactagattcaagttatagtcatagcgtgccaacttgtaagtttcagattcaagcgcttcaactaggtgtagcattggtagtccaagcattcagggtttcgccttgcacactagttcccacgtgaccaactggcgacgaggtgtctgttgagttttgtgccctaaataaaacctatttcaatataattagatttataaattaataaagatcagaaatcgcttatgttacatggttcacatgatttatttcataattattt

SEQ ID NO: 156882 - DNA, 700 bp, Cannabis sativa
cacacaaagggaaggtattgattaccatgaaatattttcccctgttgtgaaacacacctctattaggctgcttctcagcattgtagcctataatgatttagaacttaaacaactagatgtaaaaacaacctttctacatggagatttggaggaggagatttatatgagacaaccagaagggtatgaggagaaaggaaaggaagaccatgtatgttaattgaagagatctctctatggcctaaagcaatcacctagagaattgtataggaggtttgatgattttgtaaccaaaatagggttcaaaagaagtgcctatgacagctgtgtctatgtgagaaaggcaaaaggtttagtgttcttgctgctatatgttgatgatatgttaatagctagcaaagataaaagtgaaatagacaagatcaagaagctattaagtagagaatttgacatgaaggacttaggggctgcaaagaaaattctggtgatcgagattgatagaaacagagaacaaagattcctaaagctatcccaacatagctacattgaaaagattctaaggaaattcaatttcctggattgcaaaccagttagcactcctattggccttcagtttagactataaatagctcccaatctccttgtactgatgaagatacaagatacatggaaattgtaaagtccttttttggcaagttaggtg

SEQ ID NO: 156883 - DNA, 632 bp, Cannabis sativa
cacaggtccccctgaactgaaattttggttaagtacaggaaaggttcaaaaattcatatctcactaaaaataaccccaaatcataccaacctttccagacctgctccatatatatcccaaagaacataatcaaagcaacaaaacgacaatcaaagctcagaatcaagacttgccattaaagctccaagtttgagttccaaaactaaaaacttggttaaactagtcaacaactactaaaacatgctcaaatcaacatttttaaacatataataacttttgaaaagtatatcaaaccccaacagcaagaacaacaaccaaaaatacaaaaacatgcacgatccacttctaaaaatttaagaaacttaagagagtaaggacaagagtttacctaacacttaagaacacttaaatccatcttaaactaactagaatgaatgacaaatttcagcaagccctagttgcctctaggtaaaattgaaagagagagagagagagttgagagaaaagctttctttttttttttcaatttttttctatttgaagataaatgagtaaatacattttgtttgatttagaaagtatatcagctacaatagttaataaaaatcagatttattaacttaggcaaactc

SEQ ID NO: 156884 - DNA, 611 bp, Cannabis sativa
aagagaaaatgagttcaagaacaacctctaagtctccacatacctataagaaaaaaatgattatgtttccatagtaaaaaatcaattgaaaatttctctcttaaagaaaaatcagtatgagttgatgatgggcattggaacagtcaattttaagctttgatgcaaatttgagatgaacaagttttttttttcacatattgttaaccaaaatctgtacactaaaatcaataattttaattgttcttgttcccgaaagatgggctaattacataaatttgttagcaagcattttcatatattccaaatcaggaaggaaatgtattgtattgtttctaatttatataataaacttttactaaataaaaaaggattgatcttaaacaaatgtgaatctcctcctcaatgaagacttgataataaaaatgtgttttagctctattattttcacaggcaatgataaaagatcacaatcatttacttttaaggttcatttagcacgcagtattacaccgtattgtattatatagtattatattttatacaatatttttatgtaaaattatatgaggtattaatttttatcaatgtctaaatatataatattttagtat

SEQ ID NO: 156885 - DNA, 637 bp, Cannabis sativa
aataataagaagaagaagaagatacacatgttatgtctaatagacaagttatgggtattgatccaatttaattcacactattttgtttggagtaatgatagggaaatttgaatttttatgcataataagaactaaaattggtccactaatttaaaactttaagaaatttgtaaaatgggatacttttttaataaaacccaattttaccctccaattacataacattggcctaaccttcagaagcccagaaatgagctaaaattgtgtaccattgggcacacatcggactggcatcggaccccatcgagctccaccttcaaaagcccaaaaattgagctaaatgtgtgtactgtcggacacacatcggacgggcatcggcccccatcgaaccgacttccaaaaaacccaaaaatgaagtaattttgtgtaccatcggacgagcatcgggccccatcgaacgcgacctaaaaaatctattttcgacagaaaactcatactaatttcaatcctattaactaacagatctcatcttaaatctaaccttaactaagaaattttacagaaaattgcaacatattaatctatttcatcaatttaagcaccaaaaattgaatgaaaaaaaaaagaagagatgcga

SEQ ID NO: 156886 - DNA, 870 bp, Cannabis sativa
tggaggcttgaagcggggacgttacaattcacttaagagcaaatgttcttttattacctgaaaaatctctttcgcattcctttgtccattaaaattgcttatttcctctcaagatgtttatgaatgggacccacttgtctgttgatttggaaacaaatttgctgagtgcggtaatccgactagtcaaactttgaacttccttagtttttgttggcgatttcatatccaggagggcttgaatcttctttggattggcttcaattccttgagcattgacgataaagcctagatacttaccagagctgactctaaaggagcactttaggggattgagtttcatgttgtattttttgaggactttgaagcactcgtccaagtcacctatatgccccccaaccttcttgggtttgatgagcatgtcatccacgtacacttccatatttcgttcgatctggtctttgaacatcttgtttaccaatctttggtatgtagctccgtcattcttgaggccaaatggcatggccttatagtagtacaaacctatatctgttcggaaacttgtatgttcttggtcaggtggatgcatcttgattttattatacaccgaataggcatccatgaagcttaatatttcgcgtcctgctgttgtgtccacaagttgatctattcgtggaagtggaaagcagtctttttggcacgccttgttgagttcagtgaagttaatacatactcgccatttttcttcagcttgggcactagtaagggattggccacccaggccaggtagaaagcttcgattatgaaattatttttgcgcagcttttctaccacttcttttagcgctagggctcgctccttgtccaacaatct

SEQ ID NO: 156887 - DNA, 834 bp, Cannabis sativa
aaatttattgtcaaaattatttagggaaatgtatattttgattgaaaaaggaaaagtaaactgtgtttatatttcacttgtgctctagaattctttttttgcgattaaatcaaacctcttgagtcgtgggtttaagggcagttaaagcacctgaaacaaaaaaagaaaaaaaaaagagataaaattgagatagaactgactcatatatatacactagatgaaagttacgtggggagccacctaaatattagtttcatttaagttctagtgaattttgtttaagaattcggcaataaattgtaaattatttatttaacgatatgttttatgaaaatgaacttgttaagaatgtatataaacctataatatacatattattattcaaatgtatcacacaagaatttgaataatgtatcacacaatctatctgcccaatctaatcaatagaattacatttttctaagacaaggtacatgtatattatgaaaataattattttaagaaaaacagagattgagatttttctaattatctgtttgttttgtcttcatcatgttaaagaaatgcaatacaaaagaaaatcaaacctcttctgagaaacctgaactgaccgatatggttgaaaaataattaactaaaataatgtttttgtcattgcccgcttggacctccttcctgtccaaaagcttcaacatcaaaattaagaacaccactttaaatacatacattaagaacactaccagcctagcatggagcaagacatttcaggtcaacagaaagattcaaacttcttagaaaataaactaataaacaacaaagatgttgaattttact

SEQ ID NO: 156888 - DNA, 615 bp, Cannabis sativa
cttgttgcaatgtgatttacaagattgctaccaagctattgagttctagatcaataacatccttccttcaataatttcacaatctcaaggtggctttgttagagggaggtttattggacataatattttgatttgtcaagatttggtgaggcactatggtagaaaggcaaataaaccgagttgcatgataaagctagatttgcaaaaggcgtatgacacaattgagtggagttttcttgaagaaatgttagttggcttgaattttcctccgaaattcatccacctaatcatgaactgtatcacaactcctagattctctttgatgttcaatggaactcttcatggtttttttgaatctcaaaggggaattaggcaaggcgatccaatttctcctttactttttgttcttggaatggaatacttatcgagactgatgaagaaagtgggggaaaaagagggattccaatttcatgacagatgtgctagtctgggactgaatcatcttgcatttgccgatgatgtgttattattctgtcatggggattttatgagtatcttatacatgttgcaggcactcaaaaccttctcactcacatctggattatatcctaatgc

SEQ ID NO: 156889 - DNA, 887 bp, Cannabis sativa
  modified_base (184)..(187): a, c, t, g, unknown or other
  modified_base (277)..(278): a, c, t, g, unknown or other
  modified_base (630)..(644): a, c, t, g, unknown or other
cttgagacgctagacttcgtcccccttatagatggttattcgttgaagcatttaacaccgtaaagatctcaaaagataagtattttgtaagtttttgtctctattagaccctcccatacgatgactacatagagataaatttacaaagtatgaaacaatagtagaagctcataaaataagaatnnnnttgactctcgcctactgggacaacattggattcttattttgatcgtataaaagttgctagaatagtgtccattttagatgagctgactannctattcaatgaatgatatctttaactctcgcctactgggacactgtatcagtttgttggaaactttagaaattatttaagatgtgcttgttttgtattttcatatgtctttcttacttgctaaatgtatgataatttctgaatgtgtataaatttatattgaatcatgttgttttctgtcagaaattgttgttgtataaattttaagtcttcattattggtctaacttaatttgctgttttgacgagaaaaatcccaaaagattgtcatccgttagacaaacataatagtgttagatctcgatagataagtatttgtaaatgtaaaactagttgtacatccaaagatgacannnnnnnnnnnnnnntacaatatgaaacaatgaagaaaaataaaataagaataactttgactctcacctagcgagacttcgttagattcttattttaatcgaaattatcttttattttttcctcttagcttttttattaagaattttcttaaatagtatatcattggatagagagtttataaattatatgcttatgatgtcattctattttcttctatgaaattgaaggcgcagatgactatattcctgacattctat

SEQ ID NO: 156890 - DNA, 730 bp, Cannabis sativa
ataatatatattttatgatgagaatatttatgtatgtgatacatatataatatatattatgtggagatgatatatattatgatgagtatatgttatatatatatgcgagatatataacttgtatagttgtgatgtatattaatattatgtgtatattatgtatgagatgatagtaacataacataatatgctaattagcataaaatttgggagataattttatgcatgagagttatgtatattattagtatataataatatgtgtaactaatcatatttagtgtatatgataataataataatgatgatgatgatgatataaagatgtgtttatcattttttgagaataaagagttggaattattttttcattagtgattttatctcattttatgagatgagaaaatgaactatgagagttactcttttttgggtttatatggccaaagagtaaatagatcaaagtggatctaaacatttaaaatgagtcataattggaagagcaatcttagactcaaatcaaagtgaatcatggtggattcaaaaattgtgaacagataacaaaattggagaagtaattttgaatcttaaataattaaagtggtgaacaaaattgatgtgaattttgataactttggtgtaatatttgtgttaatctcaatgaagagataactttaaaattatgggaacaaataatcacattactttttaattggtgatgtgagtttga

SEQ ID NO: 156891 - DNA, 683 bp, Cannabis sativa
  modified_base (620)..(620): a, c, t, g, unknown or other
tcaaacctttttgacgaagaagggatcaaacaacaataatttttgatttataacctatctaacaggaaaggaaactcaaaacttataactcgcgtataaaactgaatactaacggttctcacaagctaggaacgtacaaaacgaggcatcacgataccttgataaaagtacttaaacctagaaaatggatagataatataactattcatatgagcaaattaaaaatatacaaagtgataaaatccgtaaagtatatttaagtttgcttaagggagattataactgcaattggttaaagaccgcttagctttaatttggaaattagcagataattagggtttaattatgaaaatcatttattggtattgaatttatttatgatgatttatttgaattaggaattcatttttatgttacatatagaaattccataattttgcatattttggtgcccggcaacattggaacgcggtgtatggctattagaatcacatcttagttactttagtttaatgggacgacagtttagacagtgggaatgtcagaaatagtcgggattttagaatatttccaaaatagacctaagtgcaattttatgacttttagtgtgggaggggcanaatggtcattttgccccatttgtcttttgtcttttgtgagttgggatttaagtttattaatca

SEQ ID NO: 156892 - DNA, 695 bp, Cannabis sativa
aataatttttaaagaataatattaggtgtaccaatataaatgtacaacgtgtacaagagtgtacacatatgtagtctatgctggcagttaattttaaaaaatagatgacaccttaaatttactaatagtttagtcgtttcgagggttttattttagcaccaaaatttaagcttggaagattaagtacgaatagactattaattaaaaatactaaaaaaaatgcctctttcaacttactcctctctttctttcttatttatttattttttataaaaagataatttattttatattaaagaagaatgactattaagttgggcacaaaaaatattatatttgactgaagagccatagaatttaatttttttaaaaaataaaataagttttatttaattatctttgttggtagccttaggatagtaataaattaataattattgaatcaatttaatagctttgaataaatactttgaatgaatgcaagagtccttcaaaaataataataataaaaaaaagattgcaggaccagtcacgatgcgtaactgcatccggaccttatatatatatatatatatatatatatatatatatttgctaaagaacgtgctattatatatggctaaggttgtttttctgttattacataagagtcgctttttaatatgaatttataagaatgtttttttttttttttt

SEQ ID NO: 156893 - DNA, 752 bp, Cannabis sativa
actttgttatgaaatcccatatttcatgtaattttcacttatttataaactgaaacgtgctgcccaatttttgtatgagaattttagggataaatattattttgtaagattgttttacaaaatagactttatattttttagtacggtaaaatagtattttgagttcaatttttaataatttattttttaatataactaacattaagataatttctaacatgaatagatatagaaaatgtaactagttttgtcgtagcatttctagatcatattattattaagtttattttgacaaaaaatcagttcaggatcctacttgtataattttagaaaatacagagtctattttgtcattaacaaaacaatggtccaattggtaatttttacaaaacacagggttcaaaataatatttacccaaaatttaattactattttaataatttttaattatataaaaatatatttttaattttgttcttttagtttatatttttttaaaaatacacttattagttattaaataaaaataaattatattttaaattttaagacacaaaaattaagtggacatcaatgtttgacacatagcaagaaagataacatctcggagttatgtaatcccgaatcataacaagtcgacctaggagaagttcctagccctacgcctaggttgacttcgggaactccggaatggaagtttggacttgaataacttgaatccaactcactatattttagtattttgtaccat

SEQ ID NO: 156894 - DNA, 712 bp, Cannabis sativa
cccttctcgttacaatgtgtataagcagaaagatcgtgtgataattgctgaatacaccgattgtgggattatgggataaatgcggaatacatagattgtggaatcgtggatacgccatttctctataattctgacccctaagttatagggatgtcgttgatgactcacaatgcgaaagctgaatttgccaagtgttgatcattttgtgtggatcgctgattatcctgcgcggattgctgacgaggcatcctgctcggattgggtttctccgaacagatactcacagttgcttccacgtgtcaccatcatgtgatgccacgtcatagtgcgaaaatcgggataacagtatccttagtagaaagttcttactcatttgttgtgccttgtaaataggagtatgggcgcctagatacaagtcggtattatgtgatatgttatatgcttttcttgctgagtatgtcgactcacagttctgcttccatgtgtaggaaaaggaaaggcgaaaactgagcaggagtgaacctaagctgggatgaaattgtacatgtcaaagcagcgcaacctcgagtgttcggtctcgggacatctgggaatactattttgtagtcgctgtgcgaccggttatgtgttttggtatattgtgtataaaagcttttaaacgggatccctatacttataaataggtttgtaaattataaagtttattaattaa

SEQ ID NO: 156895 - DNA, 809 bp, Cannabis sativa
tgtctatgtcggatgagttccaattattaacaacaaattagttaaactcatgtgataagctattaagaacaaaatgaactctttggtctctagataaaacaattcccaccatagttgctttttggaatttcatgttcatcatgagcaagagtgaagtgatactctgaccaggagtcatcttcacactttggagttcattcctaaaggcatatactcgatgaggattggggtgtgggttgtatattttgacactacaaatatcaataaacagaaataaattattggttccattaaattcatgcacaagttaagaaaataacaattaaagagaatatgtttgcaaaaatacaaaaaaattaaacatattaattattttctaaggtttccaacataataaaatacagtgtcctggtcagtgagtctcagagataacttcagttgaatagagtagtcagctcatctaaaatagacaccattctagcaaccttttattcgaccaaaataagaatccaacgttgtcctggtaggcgagagtcaaggttattctcattttacgagcttccactattgtttcatactctgtaatttaatttctaagtagtcaccgtaggggagagtctaatagaaacaaaaacttacaaaaaaacttatcatacgagatcttacggtggtaagtgatttcaacaaataaatatccataagggggacgaagtctagtgtttcgaggttatattgaaaataattaaccactttaagaccaacaatggagattgaatatctctttcatgaaagctcattatttaaaataa

SEQ ID NO: 156896 - DNA, 644 bp, Cannabis sativa
cttggagagagtggtgtagatgtactctgagaccgcctggccatactgcttttttccattctctttctcagtttccaagtcgcgagacatctcttcgatcttcatatgagcattcttggccttgagctcgacttgctccttggccttgcaaagttcctcgagctccttgtccttagaagacgcatcttgcttcagcttcttattgtcttcttgaagctgagtaatatgtttcttcgcgagttcaacctccttggacccggtagcaaaagccttcgagaacatggccataaactgtgaagctagttccgcggagcgaggcagcagctccttagtaggaatcttgtcaatcttcgactggaactcatcgctgacaaatctctcctgaaggtacagcacatggcgagctcgaactgctgggtcgatcacgactttcttccctttctcttgaatacccttagcaggcctcttagaagaatctgtgacaggagtaaccaccacgtcacttttcctcttctgagaagtgataggggaagtttctgctgtcccaagcttcagcttgcggttaagagtaggagcggacttcaagaaagtcatttctgcagttacagcaaaaaataaggattaatactaataaggatgaaatt

SEQ ID NO: 156897 - DNA, 1073 bp, Cannabis sativa
  modified_base (702)..(707): a, c, t, g, unknown or other
cagttgtattttcttctcttggaatttgtctgagaccgtagcttttgaattgtgcgagcaaatcgtgtattttgttcaggtatgctatcatctttcctccccgagcctcgtattctacggatacatgatttaccaccagctgtgaatcactgcagattttaatgtgttcagccttcatctctcgggctagctttagcccagcgattagagcttcatactcggcttctttgttagatgccttgaatccgaacttgactgcagcgttgaggtgttgccccccaggcgtgacaagggcaatccctacaccaaatagttgatccatagccgatccatccacatgtagtttctaggtcggtttttcttcattgttacttggctgaggtgctggtaccggctcggggttgctttctagtatgctttcttttttgcctatgcattctaccacaaagtctgctagagcttggcctttaattactattcggggttggaaagtgatttcgtactgacccaactctaccgccaacttgagtaaccatccagaagcatctggcttttgcagtatttgtcgtagtggttggtcggtatgtacccgaacaggatgagcttggaaacaaggcctcaactttcttgttgcttgaatgaggcagtaggcaagtttttctatcaacgaatatcagctctcggcctcaatgagtcttttannnnnntaatagactgggtgttgtacgctgtcctcttctctgatcagcacgacactcacagcatgttccgtgacaactaggtacattcacagttcctcaccgtccaaaggttttgaaagtacgggaggttttgcaagttgtgcctttagctcttggaaagctttttcacactcttctgtccactcgaattacttgtttcctcgcaggatgttgaagaatgggacacacttgtctgttgattttgaaacgaatctgctgagcgcgccgatcctactagttaagctttgcacttctttggtttttgttggcgagttcatatccaggagggcttgaatcttttctggattagcttcaatttctcgggcattgacg

SEQ ID NO: 156898 - DNA, 503 bp, Cannabis sativa
tatttttgaaaaaaattctgccccacagtttaaaagtaaaaaaattaaaattttcattatgtggtgtaattatccctaaaaaaaaatataagtatcaatgtaatattaattggatttcattgactttttctttcatttaaattattgacttaggggcccaaaatagtattgcaaaatttatattgatgagatatttttatctttccatcttttatgccttccaatttcaaatgaggccagattgggtggactttaaagaaaaatgttaataattggtccttttattaaaaatatatagggaaattatagtaaatggccagaaattataaaattatattagtatatgtctttaatttaaaaaattatagtaaatgaccctaaattataggattatgttagtaaatatcctcatttcgaaatcattaatttttatttttattttttaccattagaagcaaattatttaaaggttatagtagatctatattagttttgttaaaatc

SEQ ID NO: 156899 - DNA, 501 bp, Cannabis sativa
  modified_base (427)..(430): a, c, t, g, unknown or other
attgtgtttttttagggcctctcttgtatgagatttttcatcccttttttgatcttgtttgccactatttataattgcatagtggtcagtaaattacacacttgacggtaatatgtttacaacaatcaaacaatcattcctagaatcatgggatttgattacatatcatgcagtgtaaatgcggtttatgatttgaaaaatcgtatagtcggtgatttttcccacttttactaggtcaaaacaatcatgtattaaacatgtctttaattgttgtatctagatatgtctcaatagaaacttggttagtgatcccaatagcgagctaaggccattcttccttccgaggtcgacgatgtatgtctgatgtcgatcgcggttcttatcatcaaagatgtaaagaccacttagctttaatttagaaattagnnnntaattagggtttaattatgaaaatcatttattggtattgaattaatcatttgtgatgatttatttgaattc

SEQ ID NO: 156900 - DNA, 511 bp, Cannabis sativa
cctgagaaactcaaactcaaaaatccaaaactcgttaaaatccacttgatgtgcacccttatttagtacctattttttatttctttttcacgacgaacttacctaatataatgtgtactttttgggtataagttactattcactctaataaaggtaatacatgttgttaggaatttatttatataaaagtcatatatatatatatataaatgggtattaagttatcgtataaatgaattaaatttatgttgcttattttgtaataaaatttataacttaagaacattattgttatgattttaatatgtggataccacaagtataatttctaatttacttaggagctaaattagaaatagtcaataaatattcgtaactgtttagacaattattaatgtaataggtgatattccacaatttgcagtactttcatgtaacatcctaactagcataggcgtattacatgatttttaaacgtactgtgcagcttgttgctaatcaacgaggttta

SEQ ID NO: 156901 - DNA, 557 bp, Cannabis sativa
  modified_base (531)..(532): a, c, t, g, unknown or other
aggcgcacattcccctttcagggtttgtggctcggttcttgtgggcgggaatgtaacagtccaattcgccaaggtagccatcctggtcgagattcggcaagcgtgcctcagtaaacttggacaaaggcctcacccaccaagcacccaaagtacctttccttctatgagaaccgcagcagtaagttcatcacttgcataatcgacaccctcgacctggacgtcgccatcagcatcaactaactctctggtctcatggtatcccccatagtttggaggtgcaacctcctcttcttgctctgcctcggatggactgctaggacgaacatagtcctactcctcaatctcctggacctcagcgtccccttcatgatcctcctgctcctagacggatggatcttgttcggtgctgtgtaaggtggggtgccgggcgacttgagggtcagatgcgtcgactctatgcattgtcttttttgtgcgagcctgttgcgttttgtgccctcaataaaaccctttacaatctgattagttatnnatataagaaatttgaagtgatttat

SEQ ID NO: 156902 - DNA, 881 bp, Cannabis sativa
ttgaccaaatggtggacgccacctccagattcaagctattgtccttcatgggcgcctatgctggctacaccagatcaagatgcacattgcagattaagaatgcactagcttcaggaccgataagggggtatactgcaacctggtcatgcctttcgtactaaaaaatgctggtgcaacataccaaagaatggttaatcggatgtttaaaaggccttctgggacggaacatggaggtgtacgtggacgacatgttggtcaaatcaaaggcatgtgcaagccttgcagacgacctcgaggaatgctttgaagtggttcagagatatggaatgaaacttaacccgaagaagtgcactttcgaggttaaatcaagaaagtttctgggatttattgtcagccagcgagggttagaagcaaacccaaaaaaaattcaagccctcctgaacatgctttctcccaagaagcacaaagacgtacaaagcctaactgaaaaggttgctgccctgagcttgtttatttctcgatccacagacaagtgcattcccttcttcaacattctgaagaaatgccaaaagtttgaatggaccgaagaatgcgaggaagcattcaaaaaattaaaagatcacatggccaagcctccaatcctgtcaaaacccaaacttggagaggacttgttactatacttagccgtctccgagaatgcggtcagcgcagccctagttcgggaagaggaaagaactcagcaccccgtgtactatgtcagcaagcacatgataggggcggagacacaatatctagtgattgaaaaagtagttttttgcctcctgatggcttcaagaaagttaagaccctactttcaagctcaccccatcaaagtattaaca

SEQ ID NO: 156903 - DNA, 525 bp, Cannabis sativa
  modified_base (491)..(491): a, c, t, g, unknown or other
aaccagaatttcaatcccaaaactttaaaattaattcggatgcttactttaaaaaaataatgtaaagatgcaaattaacttcaataattgaaaaacatcatatcaattatactctttctaacttttcacaagccaatgatcaatatgcttgcatgacttacctctctctactaatgtcaataattcttgttcagaatcaaaaggactttcaaggttgtaatgtattggcttaggtaataggtagatgagaagttatttaggccatattataccataagcacactataaaccatcaagcacccacaataaattaaatatcgcaaattgtgcccaaaaattttaatgattgagaattttacaactcttagttccaacatcactttatttattcaacattttttcctttcctcttttttcctatttttttaatcgtcatttttttcagaacataaataacattagtgatgttgaaaaatacttttacaattcanacattgtcccaatcacccactttaaataataatt

SEQ ID NO: 156904 - DNA, 623 bp, Cannabis sativa
  modified_base (65)..(65): a, c, t, g, unknown or other
  modified_base (237)..(240): a, c, t, g, unknown or other
tccttcagtcgtttggattcttcacagtcttacacactattattgaggactaacttgctatgggngggcatgcactcaatcactaaagcttaaaatttaatggtgaagaagactctaggatttcgaattaaaagaagagaaaagaagaagaagtctcaaactctctagttgtctgacaagaagaaatccaggtcaagagtcattagttggaatatgagaccattcttttctttttannnnaattcacttagggttaggattgaaatatttggaataaaaaatgataaaataagggcaaaaagaggagttagtggccgaacctatgtgggtccatcactagttagatttttgccatttttttcaaccatttatctatttttcacaaataccactttttgcaatttcaatcttataaatgccaaaactatttatttaattattaaattaattatcaaataaagttgtctttaataatatttatgaattagactccacaaagtcttttaattaaccaataaatcctaaaatcttatctcttcacaattaagccataacttagtgaaaattcataaactagatatagtctaattttagaattataattcattaattaaaattaatta

SEQ ID NO: 156905 - DNA, 545 bp, Cannabis sativa
cccttgctaaggccaagttcgaggaagaggctaagcaaagggaagcccaagcggagccgatgattagagaggaggtcctttggagggacaggctggaagccaagcaccaggaagcactgagggcggagggtgaggctgttgccaaggccaggcgtgagcttcgggaggctagggaggccttagacgaaatggctgccaaggtgaagtctttagagaaattgcaccaggcggacttggagtcaagggcaaactttgccgtggagctgaaggagcttaaggactttaaagaccaagccttgaagaaggctaagaaagatgagcttctttctcccgtctcctgcaaccgatgcattaagcgcttcgacgatggcgtttatatggcctggtcaacaaatcgccagagtatcaagctcgacttctacccaaaacccacgaagatgattgccaaattcttggagaagaagaagaagcttgatgccatgctggaggcgcgcattggtccttgccttcctcctcgaattgactaggccgttctgaatacaacc

SEQ ID NO: 156906 - DNA, 558 bp, Cannabis sativa
ttaattgtaatctttacgtggcaatatctaataatttgttattttttttatttaaaaaataaaaatcacctaataatttctcataaactaagaattcggttatttagccaaattttacataaaatagatatatatatgtatatatttatagtatatggcctctctttaatgaaaattaatttacatttttcattaagggtagaaaattgtaattgtgggtgttgacttattcaacgtcacacacatatatataaattatgtttaagaaaattttacataataaatcaaaaaaaatttacaaacatatattaacatgaaaaaaaaaattatttttattctttcaacttttttatttataaaaatatcttttcgaaaaataataaataatttttttttgctgttttagtttatttatagttgttatgaattgattttctggtcgtttttagttgttttatagtttatttatggttaatttatagttattgtgtggttggttttttgttgttttttgttattgtttttttattttttattgagcaaagtgtatttttgtaa

SEQ ID NO: 156907 - DNA, 794 bp, Cannabis sativa
gtaaagagttttatttagggcattaaacccaacattaacttggcctttttgagccccattttctttagagtctccttataaatgatatttacccaactcccattgtctattaacactctcttgatcctcttattggcgagttgaatggttatgaccagcggatcaacgtgaggatatctcacgttcttctcgtcttcctcggtgaacgtaatggggggttccccggttttcaccttcttggaaggttctggggcaaagaccgactactcattctttatctcattcacatatctctactgagcgttattgctttcccctgcaatatgcggccctctcgaaataaccaggatgtcttctccttccacaagaaaaggttgtaacccctcgttatttgggttattagactgatggggctggttgtatccctggctctgtcttttcacatactgcttaaaatggcctcgagcgatgagactctctatctcatctttcaattagcgacattcgttggtcgtatgcccaatatctttatgaaatttacaatatttgttaggatctcttttgctcctcgaattcatcataggctcgggtttaccgaaggctaccttctactcatgtgcgaggtaaatattttcccgagtttcattaagcttggtataaatagtatacactggcacatatttgtcatgcttcttttgtttctttccatccttcgacgactccctaattccatcctttcttttcggagtagaagcccccgagttatcaattctcgtggaagcagtccctgttga

SEQ ID NO: 156908 - DNA, 537 bp, Cannabis sativa
  modified_base (482)..(485): a, c, t, g, unknown or other
caggaattgcccttgtcatgcctcgggggcaacacctgcacgctgcagtcaagtttggattcaaagcatctaacaacgaagccgagtacgaaggtctaatccctgggctaagactagcctaggtgatgaagggtgaacacatcgaaatctatagtgattcacagctggtggtaaatcatgtatccgaagaatatgaagctcggggagaaaagatgatagaaaatctgagcaaaatacatgatctgcttgcacaattcaaaagctgtggtctcaaaaaattatgagagaagaaaatacaactgcagacacgttagctcgattggcaagcagcaatgtaagtgacaaggcaaacctggttcctatctagttcctcgaagagcctagcatcactgacacgaaagaaattgaaatgattgatacatccacaaactggatgacaccattaacgacctacctcgagtctaggaaactcccagataacnnnnatgaagctcggaaaatgagaaggaaagttgcacggtatatcatagtagaagg

SEQ ID NO: 156909 - DNA, 993 bp, Cannabis sativa
  modified_base (292)..(296): a, c, t, g, unknown or other
aaaacgagaaaaactagggttcccgaaaatcccccaaccggcagaccggttctgcaaccacaattccggttctgggaatcttggaacaccatccggaatcccgcttgcacaaccggaattccagttcctcgcaggaaacacacaaaattccataactcactcaaatcaaatccaattcataccaaaccttccaaacctgctatttagaccctaaagaacatttctaaagcatcaaaaccatccagaaatcatagatatgaaaaatgccgtgtgagctccaagctttgagttnnnnnctcaaacttggctaaagctcacctacaagcatcaaaacttgatttaaactacataatcatgcatataaaaactacagaaaacgaactcaagcacaaacaatctctacagcaactaaaatcatcaatttactttgaaaaccatagcttttgaatcaaaaattccataatagattaaatctaactaacaaccataaaaacttgcttgaatcatcattttaaaacataactaaacatcaaaaaataaaattaaaacctagcaacaactacagccataacttctcaagcatgcaaaactcaacttttcttaaaaaccaagaaaactaaaataaagttacaaggatcataccaagcacttgagaacacaaaaatcttgctaaaatcaacttgaaattccaaggagaacaccacctccttgctgctcaaagagtggccgaaagagagagagacttgagaggaaatttgggttttgtttttcttttctaatctttccaatttgaaataaaagatatcatgcataactaaactttatattcagctaacaaatagcaactaaaatcacataatttcacaacataaggtccacaaaaggacaaaatagcaatggggcaaattgacaaatttgcccctccatactaaaataacataaaagggcactaaagggaattttgggaagttctaaattctcgaccaatcccaa

SEQ ID NO: 156910 - DNA, 636 bp, Cannabis sativa
aaaaaaaaatcactatatttttttctttatatattcttaaaaaataaattttgattttaaggtgcatcttcatcccaaatcacatttccatctccccattttccatttttcccaattttatttgtgggatagaaatgtgacaggtaatttaaattaattaaatgcaccttaaatcttttatctccacattaaaaaaaaaatgccattaaagctttgtaaaaaaatagcttcttttttccaattgcatatcatagaacaaattgatgattgaagctcttgctctcttacacctacaccataaaactattgatttcaaattgtattaatgttatttttttttgagccaaaaaattaaaattttattaaatcaaatcagctaccaagatagcttccaaatcagcagggacaaaacccccatggaaaacacagccaggaatagaaccagaagaacgagctaaaaagttagccgcctggttcctagaccgtttaacaaaactaattgaaataggaaataaaagagaggattgcataagagcaacacaatccgaaattaaaagctccaccggagacaataaccacttcttctgttgcacggcttgcaccagcagcagcgagtccgactccacaaccacacca

SEQ ID NO: 156911 - DNA, 596 bp, Cannabis sativa
gataaggataagcttattatcaatgttataaatagtagtatttccaattctgaactttgtcttagcttttgttgtaatatttttatctaatttgatgagaaaaattctcctttcatcaaaaaaaaaccaataattgaagaaacaacataaaattcaacccaaaaaaacacagggtcaagccaagcccgtacccgcttggatagaattcatctcttatataatataagccacaatttcaagaaaccaaaaaaagaatatcagttgagaagacaacaaaaataccactggaaaacaacactaccaaaacacatcagtggaaaaatggcaacatttagttctcgtactaactttaaagtaacaattggttggagataacaaaatgaaatagaagggaaagaaaataatttttattcaatttttttatttaattacattttaaagtattgaaatattattcctataaaataattttttcataattttagtgaaataattattccattttaaaataaaaaaaaataaccattgcaatataaaatgatgagaaaatttattaattttttttaacaatttttttatatactttaaatttgatt

SEQ ID NO: 156912 - DNA, 665 bp, Cannabis sativa
  modified_base (40)..(46): a, c, t, g, unknown or other
tatggtctaattaataaataagttaaatgaaaattttatnnnnnnnttaattataattattaaatagatttgacatttataggataagaattgaaaatatggcattagtgaaagaacagataaatgactgaataaaatgacaaaagtataactagtggagtccactatgtatggccagccacttaagttatttttagccattagtttatcttttttattccatataatttaaatcctaaaccctagatgaaatactataaaaagaataagatgactctcattctcataacctgataacctagttttcattccttgtcaaacaactagaaattgagagcctccttctttgtattttgaaatcttaaccctcttcttcttcattgaatttcaagccactagtgaaagagtacatgcccactcatatcaagtcaagtactcaattatagtgcggaatattgtgaagaattctaacacttgaaggagatccaggttcagatcttgttattactctgcgacagaaaggagcaatagttagagatctaaacagaaggagccataacattctattgccaccaatataaggttttctagaactttatatgtgtttatttcattgttttaaaaaattcatgtttagggtgttagattatagaatataatccaac

SEQ ID NO: 156913 - DNA, 502 bp, Cannabis sativa
gacagacttattgcagaggctgtctaccttataatacatgtatatattaattatataattaatggcaatcaattcaaggtaataactgtgtcacatttaattaattatttaattttataataatcatcacatggtccaaatctaaattatgaggttttttttatcaaactcattatttgggtggtggagttgaatattaattcttagagtaatttacggcgaaactggcaaaattctttgaagtttatttttttttacaaatttaaagttttagttagatattaccgttaaatacatactggattattacgtactgtatcgacttcgaggttttactgttacatatacacaagtttatacagtagtcatccagtagatatttaacgataatatttaacggtaatatttaacaaaaaaaataagaaggttaagtgtataaaaattaaaacataatgagattttgccaaaaaaaaaaagaataattaagtgtataaaaattaaa

SEQ ID NO: 156914 - DNA, 606 bp, Cannabis sativa
  modified_base (409)..(421): a, c, t, g, unknown or other
cttccaggtgacctgaaactagactcagcgcctaggttgacacttggcactagacccagttttgtcaacctgggctatttttagtcattttcttgaaaaagtgttttgaccttttttttctgtcattagaaataacgaagatgcatgtgatctcgaggagcaaatgagattttcagggagccagaacagggccccaacacccagtttaacatggcactgggccctgcacccaggttgacatgcaacctagtttgcatatttttgcttttgctctggacattcttcttaaaatagtcaaaaatggggtaggagacctcgttcgcaatctcgaatgtcgtagaagtatcaaaataagtcttaggaaggcacctgtgaaacacccaatgcccagatctctaacccttgtatnnnnnnnnnnnnngagtatcaccaagatctgagcttgattctccttcttgttgtttggattcttcacaatcttacatactatgcttgaggactcacttgtgatgtgtgggcatgcactcaatcactaatggctgaattttggtttgtgaagaatagctatggtgttttcgaaatagagaaagaagaaggaagaggtct

SEQ ID NO: 156915 - DNA, 640 bp, Cannabis sativa
  modified_base (312)..(316): a, c, t, g, unknown or other
ttcatatccaggagggcttggattttttccagttaggcttcaattcctcgagcgttgacgatgaagcctagaaactttcccgagctgactccgaagaagcattttaggggattcagtttcatgttgtattttttgaggactttgaaacattcatccaggtcatctatgtgccccccagcctttttgaatttgacgagcatatcatccacgtacacttgcatatttctaccgatctgatctttaaacattttgttgaccagtctttggtatgtagctccgaagtttttaagaccaaatggcatgactttgtannnnnagagacccatatctgtccggaaacttgtatgttcttggtctgacggatgcatcttgatttgattgtagcccgagtaagcatcaatcaagcttaatatttcgtgcccggctattgcatcgacgagctgatcgattcttagaaatgggaaacagtcttccgggcatgctttgttgaggtctgtaaagtcaatacagacttgccatttcttgtttggcttaaacacgagtacggggttcgcaacccaagccgggtagaaggcttcaatgatgaagttgttgttgcgcaacttttcaacttcgcctttcagggctactgctcgttctt

SEQ ID NO: 156916 - DNA, 519 bp, Cannabis sativa
  modified_base (47)..(47): a, c, t, g, unknown or other
  modified_base (386)..(388): a, c, t, g, unknown or other
aaccgagacttggactcgaacctgaacctagaccaggacccaaaccnacacaataaccgagacctggacccagaatcaggatagggacttgcgaaacagaactaggaacgagacgttcttcccgatctagacccgaacttgagacccccagcaccagaaatgtaaccagattcggatccgagatttgtatccggatcttgaccaagggcttggacaaaacccgtagtcagtgtttggatttgggacccagcccagcacccaaaccctgacaatcacccgaacccacacacagaccttaacccagtcccaaacgcaaaagtggacccgaacccgtaccctgtgacaaaaaattggaaccaaaaccggaagttgatcgggactggaannnggacttggacttggaatcataattgaaattggacatatattaaaaaccgtaaccggaccaggacccggactccaaatcagacctagacccgaattaggagctggacccgaatcccaacccaaacctagact

SEQ ID NO: 156917 - DNA, 612 bp, Cannabis sativa
ctaagatcgaactacaagatgaaccttttcaagatatgagagttttttgttaaaaattacaatcacagcacaacacattactatgagaaccaaaataaagacctaaaatcaaaattccttatcagttttctcaaataacatgttaactaagtcaagaatgtaatcaaaatcaatagtttcttatctttgtctatttgacttcagattttattaattttcttcatcagcattaggaacatgaagaataagatgaagaatgatgatcagaggagaagcaaagaaatctgaggagaatcaaagaaatttgaggagaattaaagaaatcgcaaaggagaatcaaagaatcgctagggctgttcatataaatcgaaaagtcgcagtttaaattcggaccacgataatttgaaccactatagaccgtaatcagggaaaccgtttttggcggtttggttaatctagaccatttacgacataatggttcgattgcggttcgtaataaatagttgacggttaaaccggatcggaccgtttataataaataattgatttgtatatattttatatatgactatatgtataattttgaaattttttgtgtgtcaaattttttat

SEQ ID NO: 156918 - DNA, 657 bp, Cannabis sativa
tgcgctcgaacatggaatgaaatggttaaacgaagtatagacttatgtctaaaggtaatttaggaagtataagtcaaagagccttgactaaggaatcacaaacaatgagtctctagtagaaaatcagatacaagtgaaggtataggaggtatagtaatgatggacagagtaaggtctgttcgacatggtttgccaattatatttattgtattcttaccccactagttaatatattatgaaattgtatggttaacctattgttaaaggtcaaaaataacccatggtagggtttaactcgttttaaaaagttactagtatgcttacgatatttttgcacatatatgatatagtcttagttaaaggtgaataatcagtattggattatgagttgggttcaaagatttggaggtcttggcagtataatttagaaagcatgaattttcgcaagataaacaggcctgcaatgcacaaatatggttggagcaatcgacgatatcgtaagtatggaaaattgggtcgccctgggagactattatgaaggaagaaacactcaaaaaaaataataaataacgacacatgtctatcgtcgatacaggaataagcttgaccactacaacaacagattgtcaatttggatgaataaaaaaatggaaaact

SEQ ID NO: 156919 - DNA, 546 bp, Cannabis sativa
  modified_base (213)..(214): a, c, t, g, unknown or other
atagagtggcttgtgccacattacaattccaagaagaagctctggtatggtggggcatggtgtccctaactcatgatgttactgcaatgacctgggaaaagttcaaggaactgttcaatgcaaagtattacaacaaggcagtcagaagcgcaaaagaaaagaattcactcagctgactcagaaggaaaacatgagtgttactgaatacacaanncagtttgaccgcttggcaagattggcctcgggaatcgtgcgaaccaattttagcaagaaagagaaatgcctggacgggttgaatgcaaagataagacatgatttaatgatcactaccgatgacaacaccacctatgctcaaatggtgggtaaggcacttcaagttgaggggcagtggagtgtaccttaaagtctcgagggactccagttgttagtggggctcctacacctcctacattaggctttagtaagggaggtaatggctcaaccactaatcagaataagaaaggcacctactgcatccagtggctcaggtcagaataagaggttccg

SEQ ID NO: 156920 - DNA, 764 bp, Cannabis sativa
  modified_base (61)..(65): a, c, t, g, unknown or other
aatagcctaatcctcgttacttgtattgacttaagaacaaggagaaaggttccttttcttnnnnntcttacaacagtatctttgaatatttattgttaaataatatctttagggtatagtcttgactatactgtttcaaccttttgcccagtgaacatgcatcactatttgtagggctatgaacttggagaggaagtctttcccctctcgttacaatggatataagcagaaagattgcacgatccatacagtatacattgatcatgggatatatgcggaatacattgattgtgggataaatgtagaatacactgatcgtgggatcgtgagtatgccatatctttgtaatttgatccccaagttatagggattttgttgatgactcacaatgcaaaagctgaattcgctaagtgttggttgccctgcgcggattgctgattgctttgctctggtcatgccagcgaggcatccctctcggactgtaccctccgagcagatactccaagtggattccatgtgtcaccattatgcgatgccacgtcagagtgcaaaaattgggacaacattttccccccaactttgtacgggacttctgaagttgcgtgtagactttatccgagttgcttctgtctttagatggggacacgtgtcaagcgcaactgtttgagactcaatgtgaggctgactgggcatcccttcggttttcggctaataaatactctgacaattaatatttcgagatctaattttctctcaccacggct

SEQ ID NO: 156921 - DNA, 561 bp, Cannabis sativa
  modified_base (169)..(169): a, c, t, g, unknown or other
tttatatactattttttttggtggtttttgtttttttttttatatatatatatatatatattattttttggtaaataattatttttatatttattagtagcaccttaaagtatttaatgtcatattaatgtggtacccactaattagttaataattttttttatttttnattttttatttaattttttttatgaataatctttgtattatttttttaaaataactttttatattaatattgttatgtggcactttaaggtttaaagtgctcaatactatactgattcacatatacaataattggttagcaatttctaaatcatgttaaattaaaatttgtgagaactgatattgaaatgcatcaacaacaatgttatcttttgtaatgcttggtaccttaatgtatccttaatattttcgttattaatatgtacatatctttttcgattaggatttaattttttgttatttgatgaatccatatttatcttataaatatgattaatttatttattaatattcttaaattgattctttaaattattgattagtgtcatttta

SEQ ID NO: 156922 - DNA, 719 bp, Cannabis sativa
tgtcctttatatatacattaaattgaatgattgttttttctactttaatttaattagatttgttattttaatttttttattattgaaaaaaatatatattaaaaaaaaatacatataatttaaaaaatagaaaaaaaatatattagaatatgtcataaaaaaaaaatatattatatttataagaatgtattatcaagtgtaatttatgtataaataaagaaagtgtatgaattcaagtttgtatagatagtagcattaaaaagtgcatcaaaagtagacttaaatttgtaaatgaaaaaaattatttaacataggggtgttcgcggtgcgggtggtataatttttagctattttttcaaaccaacccgcacatgtagttttttcaatttcccaaaccgcacccgcacgttgaaactaaaaaaccgcagaaatcgcaccgcaaaaaatggtgcggtgcggtttttacagtttctgcggtttggactatcaccaataattaaactatcataaatacaataaagtttgagcaacacttgtcaaaaataccataaagcttgaaaataaatatgaaaaaaaaatttaagtttcaataatacaataattagcggactttggatttttcttttttttgagataaagtgggctttgggttggacattcacatattagacctgaataaatataaaaattagtatttttataatgtgcggtgcggtttg

SEQ ID NO: 156923 - DNA, 1585 bp, Cannabis sativa
agggaagacaatcttctctaagatcgatctttggttagggtatcatcagttgagaattcgagaggaagacattccgaaggctgcatttcgtatgaggtatggcattatgagtttctagtaatgtcgtttggattaactaatgctccatcgacctttatggatcttatgaatagagtgttcaatgattttcttgataactttgttatagtatttatcaatgacatccttgtatactctcagtcagaagcagaacatgagcaacatcttcgaatggtcttacaactacttagagaaagcaaactttatgctgagtttaagaagtgtgagttctggttctcccaagtatcctttctaggtcatattgtcggtgaaaatggtattatggtcgatccaagaaagattgaattagtttgtgctatatccaaaattcggtaagcacatcagaaaaggacacatgtcgagctgggaagaacaaagaactcaaacacgcaatcgtaagtacacttggcatggaacaactcgttagaagcacaatttgtagagtatgtttataacttggttggctgaacagtcttatgcgagacagaaatgtacgaactgttaatttatgtatcgatgagaaatcatgtgactgcaagtgtgcatgacgaggcattaacctcgtcgcgtggaagaggtacgataacgataaaaacacttagcgtatatgacatgatatacaaactaagtataaatagtttgggggtcaaggtgatagatagcgaggcgtctatctcgctgtaagatggcacgcacgcgagaaagataatctcgacactagaaactatagttatcagaattaaaaaaatatcaacctcgagaagttatatgatgaacaccagctcgccatcaaagttaactaggttccattcccagcgaggcatccccataagataaggtttaccttatatcttaaatatgcattcatctcggtccaataaaagtgggatactcacagctgtgtgaattctaaataaaaaccacattttacttagcgtgatttgtaatcaaatccatgatttgaggaaataattgttgtaaagattacagtcaacttttgtaatttactgcccactatgtaattataaattgtggcagacaagatcaaaaggggacgaaaaaactcatacaggagaggccctgaaaaacaatcaaaaatctgaataagattgactcgtgggctatgcagtattttaactgtaaaaccacgtaaaaacccctgtgttcatgcttttattttttacagcttttattttcttttctgtgtgaaatcatcactatgaggctcaaatttagttaacgaaaatctgcgttaacagttagagattggccgagaccgaagacagtttctaaggttagaagctttattgattttacatgccattgacagaattgacttagaagaaccaacaacttgtgtggtctgataagtaagaagtcagttttcaagaactgaagaagcgactagtcatagcaccggtgttagccttaccatcagataaagaaaagtttatggtatacagtgatgcatccagacagggtttag

SEQ ID NO: 156924 - DNA, 696 bp, Cannabis sativa
gggtttgggtccaagtctaggtcccgtgttttgatcctggtatgggtctgggtcagtattcgattttgggtcttggttcttgtccatgtcaaagtccgaatcccagtctaagtaaggggcttggtcagggtctgggatcgagtcatcagtttgggtttggtttcgggtttgagtctcagtccttgtttgtgtccgggatcgggtccaggactgggtttgaactcaaatttcaaggcttggttatgatctagttcagggtgttggtccaggtcgagttcctggtcacaatctcggtcgtgttccagggtcctggtcacgttctggttcaagtttcggttttgtgtcccatgtttgggtctgggtcaaggtcctggtcctactttaggtccttgtttgagttccagatcaagacaccgactacgggtcttgaccaagccccgattcctgaatcccgggacaagatctagatcacaatgatgggtcccaatctagttttggttcatgtcccaattcccggtttggttctcggtctaggttcgggaccgagactagggtgcagttctaggtcttcatccttattctgggtccccagtcctgttccatgtttgtatctgagttcagggcttcgttcgggtcttgagtccaggttcgggtttggattcaagtttgggacccaatcccagggtgggtctgtgt

SEQ ID NO: 156925 - DNA, 591 bp, Cannabis sativa
aattaatttatagttgatgaggttgattttttgttattttataactttttgctgagtaaagcgtgtttttataatttgaaactttaacgaaagtacttttataattaaaaattttaaattgtaaaattataaataaaatataaaaaaaaataaaaaattcccctcatgtaaaatattttttttttattatttttttaaagaatgtaccacttcaataatatactttacaatatagagattattttataaatatacaaaaataataaaaaaaattacaaaaatatggttgtacgatattttaaatattttcataatttttatgattttatttacagaaaatacggtcttttaatatatttttttattatacttttattaatttattatttgtatgttattatttgttgttgttttattgttgctttttgttattacttctatgtaatttttttattgtttttatagaatactgtaaaaacgtaagaaaaaaatactttaaacgtaaaaatataaaaaaatttataaaaattaatgtattatgtaattatctcataccatatacaatagaaaagttgataatattatggtgac

SEQ ID NO: 156926 - DNA, 532 bp, Cannabis sativa
ctgtccaggatcggataagtacctgcttaccatgctcatagcatacccaatgtcaggtcttgagcaaaccatggcatacattaagctacctaccacatttgcatatggtatgctgtccatttcagatctctctttctcagttttaggagattggtcttttgagagtctgaaatggtgagctaagggagtagtcactggttttgcactctgcattccaaacttgtttaacaccttttcaagataccccttttgtgagagaaatatggtgtgaggtctctttcttttaatgtcaatccctagaatctttttggcagagcctagatccttcatttcaaactcattgttgagtttttctttgagtttgtctatttcaggtctacttttgccaatcaaaagcatgtcatcaacatataatagaagatatatatgctgattaaagtagacacaggggtcatacttgctttgacaaaacccaatgtttttcatgaactcatcaaaccttaggttccattgcctaggtgcttgttttaaa

SEQ ID NO: 156927 - DNA, 582 bp, Cannabis sativa
cttagagaagattgtcttcccctgaagctgatcgaacaagtcgtcgatcctaggtaaaggatacttattcttgatagtaaacttattcaattctcggtagtcaatgcatatgccaagcaatcggtctttctttctaatgaacaacaccggagctcccgagggtgacacactgggtcgagaaaaccctaactcaagcatcccctgaagttgaatcttcaattctttaagttttgcaggagccattctataaggtgctttagaaactggctccgctccaagagctaagtcaattacaaagtctatttctcactgtggtggtaaaccctgaagttcctcggaaaacacatctaaaaactcttaaaccactttgatgtcttcaggttggattaatttaggtcgagtggtatccaacaccaccactaaaaaccctaggcacccaccttgtaacgaatctttggcttttaataccgagatcacttgaattcgagatctctgaactgatcccacaaatacaacgattcctcgccctaaggttggaagatcaccatcttctgcttacaatcaatactagcagaatacttg

SEQ ID NO: 156928 - DNA, 614 bp, Cannabis sativa
aaatttcggtagaattaggataaaattatttgattttaatttctcttaaacttgattgttaagattttatcggaagtgactttatcggaaatcaagtacatgatttttgatataaggtacattttctttaacctacttttataagaatattttttatatatatatttatataacccttaaatacttagagtaattttaaaataataatgatgtaatacataagatagatattgttgagtgctaaggatagatatagtaagctaaaaaaaagaaatacaacaaagggtctattaggatttgaacttttgaccaaaaagataaattgataaatctttacaaatataccaaaacacaatttttgtataaattagctattatggttctatttacatattagaagagatataaaaggaaattagtattgtatatttcattgtagtagaattaacaaatacatcataaatattgattctaatacttaatataagaattctataaatttattttaagtaaaatagcaaaataaaacacaaaaaattgggtgaaaggggtgcatatcatgattttagtatacaaaagtgcattttttggacaaaatagttggccaaaccgcc

SEQ ID NO: 156929 - DNA, 616 bp, Cannabis sativa
  modified_base (473)..(475): a, c, t, g, unknown or other
gtcggtataaatttcacatctttccccataaaggtaattctgccaaatcttcaaagcgaatactactgcagccaattctaggtcatgagttgggtatcgcttctcataatcttttaactgacgagtggcataagtgataactcgatcggcttgcatcacaataaacaagaaatttttccttgtcagaaggcaaagctaacacaggagctgtaatcaacctctgtttcagttcctgaaaactagcttcacatttgtctgaccatacaaacctctgattctttttggtgagctcagttaagggtgttgaaattttagagaacccttcgacaaactaacgataataaccagctagacccaagaaacttctaatttctgtcactgttttcggtctaggccaatccctgacagattctatctttcttggatcaaccttgatcccatccttgctaacaatgtgccctaagaaggacacnnnagatagccaaaattcacatttcttaaattttgcataaagcttgtgttcccgaacccgttgcagaaccattcgaagatggacctcatgctcctctactgattgacagtacacaaggatgtcgtcgataaacacaattacaca

SEQ ID NO: 156930 - DNA, 919 bp, Cannabis sativa
tattttaatggacttccttgcctataaaaggagagctacactagctcttttttcacattcaaaaaagtttccataaagagcatctctctctagttttttttctatagaaatctgagctcttgccttaaccgattctcttgtaattgtcgtgagaaataaaactagaagtagatgtagctctattactattacgatacgggaagtgaattactataatttatattgtctctcttattaattacttaactaattatattttatttcgtcaatgtagcgagcgggtgttagcagttttctatgtcaacaactatgttttaattttacactttatcattttgttttcaatttcattaagaagataaaaatttttagtggtatttattttacattaaattgatcaactaccaacttacgtgtattaccacatcatattttaatttaaagtaaaatgaagtaaattgtaagaaaaagactgcattactataaatgttatattttatgaaatattttaatcagcagtatatttttaggagcatcatttggtgttgtaatctcataagtttatacaacaaaaataataattattctaattttattatatatatatatggggttaattatatattaggaaatatacttatttagtattttgtgttttgatgaaaaatatatttattactctgcgtttttaataatacttaattggtacatcatatttttaaattgtacactatttagtaccctaaagttaaatttaattaatacaattttatcaatttaaccaaatagttctcagttatatacaaataactaaatttaaattttgaattcataaaattttagacagtttgactgtcttgataaaattttatcaaaaaaatttaaatttaaggtactaaatatgtatgattttgaaata

SEQ ID NO: 156931 - DNA, 529 bp, Cannabis sativa
aaaaaattactaattagcctttgataaatgttgtgtaagtcagttagttattatttagatattaaaccaaggaatatgttatttagttaactaaatataataaaaaaaaaactaaaaagatgtttttatttcactttcttaatgacaaaaaagtatctatttttttacgatcaaaatgaacatcttaaataatagttgcgatggtattttttttaatgaaaataactataattgaatgggaaatttacaaaaatactgtcgcgatatcttttacaaatataatgtcctagattttttttttttattttttttatactgtgtataccctaaaacacatatgaagctttcatcttcaatacttaccaaatcaccaaagtaacaccagaatagcaaaaaaacaataactatttttccagtcagaacgtagatatttaagttctaatcctggaacaataacataagggaaatttgattttctatacttacatatacctaatattttatccctaaactaatacatatcaccatt

SEQ ID NO: 156932 - DNA, 547 bp, Cannabis sativa
atagcatcgccagtgattgcctctcgtactgcagagaaaatttaaacatgtcatccgaaaccacttgccctggcttaggctgctactacactcctgttcccacgcatctgaagcacttttcactagaaactaccagcgtgggtaaccattaccgatattcataactttaatccttacgagtatagattcttggtggagtagaagagtttcaacatctcccaaattactcgatattaggccccacatgtaaacagggccggccttaagcataggcgggctaggcccacgcctagggcccactcatttttagggcccaactaaaaaaaattaccccttaaaaaatatacatattttttttataatttttaaaaatatcatttatttttatagtaagggcctaaaaatcccataacactcttcttttgatatttttttatatataatttagggtccaaaaatttaattcgtcttaggcccatataggggtttggtagaaagctctgagcctaaaaacatcacattgaacaactacatgacgttctcaaac

SEQ ID NO: 156933 - DNA, 607 bp, Cannabis sativa
gaggacaatattggtggcattgattcctctatgcatattaccattctcaaagaagtcaagtaccgcatcacagaaatcagatccaacagactcccagtagtgcttataaaataaaactgacatcccatcgggacccggggctttatgattgttcattgcaaacagagttctcttaatctcgtcagtgctgggggagctgacaagttgatccaactcctcctgagagaggctctcctggatcagacgagcacagttgtactcctggccagtagcagtctccgtaaaaataccctgaaaaaactcagtgaactcccttccgatggcctcgcgtccagaaatccagacgttgtctctattcaaaatactctcaatagcatttcgccggcctttaatagcagccgaaaggaaaaagaattttgagcacttatccccatctttgagccacgagatcctggccctttgcttccagtagattgctttcctttcccttgattcgttgagttcccgacgaacttgacattcctgcttccaatttctagatcccgccggaagactctgaagagagttgagcttatcttcgagttccttaatggtcacatcaagttta

SEQ ID NO: 156934 - DNA, 593 bp, Cannabis sativa
  modified_base (447)..(448): a, c, t, g, unknown or other
attttaaagaaagaaaaagaaaatccatcatcaaaacctaaacaataagattataagaaaatatggaaacagttggtgggcaatcttgcaacatacaaggaaaaggtaaccgattcatccataagttaagagttaagactaacaagtggaagattgatttaggaccgtttacgataatttttgaaaaaactaaaagttactttttaaaaaaaaaacaaaaacgtatttggtaacttaatttttacaaaaaaaaaaaaaaacataaattattttactctaaaaatgtatttaattatttaatatattacaaaaaaataaaatattttttaatggaaaaaacatttaaaattcttattttttgtttttaaaaaatattctgtatttttattattaaaaaatcacattaaccaaaactacaatttttttacaagtgataaaaatataatnnaaaaatattataaattattttttatcaaatacatgtaaatttatactattagaaaaaataattaaaaaatatatagaatataaaaattttatataacataatttttttttttaaatatttatgataataatgaattagattataa

SEQ ID NO: 156935 - DNA, 560 bp, Cannabis sativa
tgaatttattgcttaaatttctttgtcgacaacatggcgatagtatgacgatatgttgtcgacacaatgtgatgcagttactttctgtttgatatatcgacctcatgtcgatatgatgtcgacataatgtcaataatattaatgtgatttatgtgattgctgtgtgataatattgtgtgatgatatgttgtgttgatattattggaatatcaacagcatatcggatgtcgatatgttgtcgaccaaattatgttgttgcttactgtttgataatgtcgacagaatatcgacatgatgtcgatgttatgtcgaccattttataattttttgacagtaatattgatttgttatttattttttcagaaggctcccagactcataattccagcatccgaacattttactggccgcgtgacttatagaggcaccagaacttttgcaaaaatcaagtttcagagttcaatttaaataacacggcgaaggaaagtcgtttcagaaacttttggaatgtcgtacccctgacattctccttggtgttatttcaccaactgatgttgcac

SEQ ID NO: 156936 - DNA, 588 bp, Cannabis sativa
taattaggagtaatgaacatactaaggatttagaaattgaacctagaagaagtaagagagcaaggttagctaaagactttggttctgatttttgtgcttatagcttagaataggatcttgctaacctccaagaagctttgtcttctttagatggagatctttggcaagaggccgtagatgatgaaatggactctcttgtgaccaacaaaactttgcgcgttgtaaacttaccccctggctataagactataggttgtaagtggattctaaaaaagaaattgaaacccgatggaactattgacaaatacaaggctcgtttagtagcgaagggttttagacagagagagaatgtagatttctttgacaccttttctccagtcactaggataacatccattagagttttaattttactagttgccatacacaacttagttgtggaccaaatggatgtgaagactgcattctttaatggtgacttagaagaggaaatttacatggatcaacctgaagggttcgtgatccctagccagaaacataaggtttgcaagttggataaatctttgtacggtctaaagcaggcaccta

SEQ ID NO: 156937 - DNA, 2136 bp, Cannabis sativa
aaaaaaaaaaaaaaaaaaaaaaaagaaaagaaaagaacacctgaagttgtttatagctcaatcttcacttataatttccctttttcctttttttataactttaattttattgtgccactcccatttggttacaagttacatttcaaagtagagcactgcgatatctatgcttacagtatttatgctttcctttgttatcatgcttgtcagtttcctatatgaaaatcgtggtgtccagaaagacatggacatgggaaatttgttcgattcgctttctacgaatggtttttcagcaaagcggaaaagatcagttatgccagataaaagagaactgtcatattctcgacattttgcacgtttccgccaaattccagcactagaagaggaagtttcagattagcaggagtggtaattgtataatattcccacaatttttctgttatatatatttatttgaattgtttgcatattagttaggatgttagaggaattctaagatttttttagaaggttctagaaatcatggtcaaaatggccatgtaaggagaaagcaggggtgatgactcgaaggttcctgtcaccacctcctaatcaatccctacaatttctcccactgcatgttccaacaatccctcaaatgaaatcatgtaccagaaacttctgtgatttttgacttgggatgcctgccgataacttgatcatcatgcccagactacagagccaaggaactttgatgctgtaaacttggccttatcagatcttgacatttattggattttttactaccaagcttccacaaatattttccttcaaatcttcccttaaacatggtcgttcacactggtattattcccggtaaaaacaatgatactctctaccaagcactctatactaaaaattccctggaggtgggcagcagcccagtgaaagttttcgtattcgtgtccaattttatctttccacttattaggaatcatgaaatgctaactgagaaacttcatgttactagtaattatgtggctgttgagtctgtttgattgcttagctatacccttttgtttactagtatcaagaaatcgagggagactttatagaggttttggctgctgggccaatttgtacatttgcaggagataaattgatttccacctttttttctttcatgagcagaaaccttttgacaaagtaaaagaggttgagatgtgccatcattcattagaggaagtgttgaccaagccctaacataatgaaaggcaagtgatttaaaatttccatgcataagttttgatgtagtcaagttagaaaatggtaagttttttaatttttgttctctttctcccccagaatgttaatatgtactaatttcactgttgtggtatcggatggcaaccttaagatctttcactgaggatactaattggctgaggttgcagctgcactaaattacgctagaaaacacacatgaaagtagtcttttatttgtatataaactaagctttattgatttaatgttggaagcgtgtttgtattttttcccaagccttgtttgttagagcttaagtttttcgtaatgaaagttttgttgtttattttaagctgataccaatgttacctttattcttggaagctagagtacattttgttaaaagatgaggttcttatttaatcttttaaacatatcattgtagcctcaatctccgccaaaacaaaagaaggatgggtatatgtttattttacatgattatacatttaataatgtataattagtatttttttttcatgaactttcggtagtacttgattttgtctcctaaaatatacattttgttaaaaattcttaaaatataacagttatataattatgttctttctgctatgtttcgtttcttttacagtcaaagcgtagcatttttatttgggttgagatgcaaaatggtcttaaatttggtaactaagttagtaaatgtccactttttaaaaaaattaagaaaacggccaaatctaagaaattagctaataaaaattataaaaatggatgtatcacatattttttttaaaaaaatatatataataacaaaattaagttacataagttttttagtattgcatattattatattgtaacaaaaataaata

SEQ ID NO: 156938 - DNA, 790 bp, Cannabis sativa
  modified_base (199)..(199): a, c, t, g, unknown or other
aaattcttaataattgttttggaattaacaattattcataaacatagaattgagattctaagtgtttatgtagtattaactccttgtagagttgaatattctatagaattagtgtcaataacaaaacacatacacatacaaacattaaaacatataaacataattggtactggtatacacaagataaagtaaatgaagntcaattcataaatgcaattcattctcaaaatagaaaactttattataaaattctccaaaataaaaggaattgtctgcaacaatatgaaaaataggaaataaaaatcccaaactaataattgaaatccaaattgtttagaaactaaaacaattaattcaaaaataaaagaagaattcgagcttcatcttcatcttggactatccccacccatttgtccaaccatccgattcaactcggtagtatagcatccgagttcaagcagctggagctaaaataagaagaaaaacaaacaaacatggttagtaggtccagaattaataatccaagtggataataattctctaaaacacatgagtttaaagaaataccttgtttctttgctagaaatttagggcattggggtttccagtggcccttttcattgcaatagaagcattttccttttggttcatcaccagtaatagcagcctttttctttttaactgttttcaccgcttaaacatgcttcttgctattattccacttcttcttgttcttgggtttggaagtaaaggcaaagcttgcctcagccttagccgccccattagcatt

SEQ ID NO: 156939 - DNA, 633 bp, Cannabis sativa
  modified_base (499)..(515): a, c, t, g, unknown or other
aataaataataggcttgtaaaaaacaattttgaataattaaataaatgatcaaacaatacaaaccaaaaacaagtaacagataatttggaaagtaggctaagatatctctatttttaaaatgtaaaaattaaaattttaaaaaaatatcttaactagaatttaaatttaggttgttagagaatatttgaaaaaattcaaaagaaaactaacaaactcctaaattttaacttaaattcaaatatctaaccaatttttaaaatttcaagtttattcaaaatttaaattatttaaatttctaataagataatataatatagtatcttgaatttttttttaaaaaagatattcctattattatattcttagtcttataaattaataaattaaatattacaaaataaactatttaaaaaataagatattttatggatggaatatttccaattttataaaaaaaaaaaaaagtttgaaagattttatggttagaaaccctaaaannnnnnnnnnnnnnnnnactaaccaatttttcaaatttcatcttatttttggcaaaattaattttaataaaaaaatatctaataagataaaatgttaaaactaacatatttctaatcttataattttaattaata

SEQ ID NO: 156940 - DNA, 504 bp, Cannabis sativa
aaacgaccacctcgattagtagatctcacacccatgccaaccgtttgtcaaaacggtacatgatgtccccggaaaggggcggagctacaaaagtgtcacaggaaaaagtatcaaaccgggcaaaatggtttagtgtaggttgttaacctcgacgagatgagtttagtggtgaagacgtctcgtcaaacggacaccgaaggtgaccgaaaaattcgttcagagtttgaacccctaaactttgacttgcgatcttgagctaacggcggcgaaagaagcggtgccgtttgggggtgaggtcgctggcaccactgggttcgagtggtccggcgcgtggggctggtcagtggctggaggtgggtcgccggagtgtggtggtgatggtagtttgtgggttttctttttttatatgttttgaagagagatagatagagagagagggggacgacgatgggtttagctttattatttctttttatatatatacatatatatattattatttat

SEQ ID NO: 156941 - DNA, 907 bp, Cannabis sativa
aagtctctattataattttttaaaggttaagccatttaattataatatttacaataaaactctattattttataaaaaataaacttctaccccttctaaaatattttttgaataattaattactaagtctaagaatagagcgatataataagatatgagaattcatggtttatacatcatatctaaagacccatttcatctgcatattttcaagttacatgttttagagacaacttgaaaataaccaacaacttcatatatgtatattttatcagtaacaaatattcgagatcaataactagtaatgatgtactaactttgttgacaatacataatcaaaatcaattattaaccataatcaataacttcgatagttaagtttatcaagaacacacatgttcaagattcataactaataaaaattaataactgacatattttcaataatacatattcaagatcaataaccaataacaattattaactttcaaacttttttaataacacgtattcaagatcaacaaccaataacaattagtaactttcaaaccttttaataataaatattcaagatcaataaccaataatgatcaataatttgcaaacttttgcaatttttttttatgattctactccgaccaattgatacatatacaatatatttataactgcaaagaaggaagaatagcgacttcgtctctctgagaaaatagagagtggaataaattacagatgtgtcgagtgcgacaaaaaagattatctttaattttataaatgttattagatttttttttttgaaaaaaaaaactaaatcacttgaatcaatcatggattgatagacttatttggcacttaaagtattgataaagaattacattttattagaggtcattcttactatttattt

SEQ ID NO: 156942 - DNA, 814 bp, Cannabis sativa
tctaactccaaggtggcttcctccaccttgctgtttctccagagaactttgacaaaagctatggtcttattctgaaataccttatcctttttgtctaagatctgaactgctgttcttcataggacaagtccggttgcagctcatgattttcataacttagtacatgggcatggtttgaaacatatttttgtagcatggaaatatggaatacgttgttaactgctgaaagagcttgaggtaaagctaaacgatacgccacttgtccaaccctctcaagaatcttgaaaggtcttgtaaatctagggcataatttgcctcctttctcgaaacgtttcacccccttcattggagacacccgtaggaacacatgatcccctacttgaaactctacatttttgtgttttggatctgcataactcttttgcctactctgagaggcaagcattctagctttaatcttcttgattgcttcattactctactgtactgattccagacctaagtattttttgtcccctgtttcatcctagtgggagatctacattttcttccctataacaattcatagggagcaatccctattgtactttgataatttttattatacgagaattctatcaaccgtaagtacttactccaggagcccccaaaatccataacataggctcataacatatcttccagtatctgaattgttctttcagactgtccatcaatctgggcatggaaagttgtactgacttttagtttggtacccatagcccgctgtaaactttgccagaatttagaagtaaactttggatctctatccaaa

SEQ ID NO: 156943 - DNA, 533 bp, Cannabis sativa
  modified_base (175)..(185): a, c, t, g, unknown or other
gaagcttaagtagttagaattctaagagaaaagagagatggaaaaatttagagaaaaattcacagttaactgccaccatggactgtttatgtgtacactcttgtacatgcagtatgtttatatcggtacaccaaatatttttatttcaaagtttattttaaaattaaataaaatnnnnnnnnnnnaaaataaaatatttaaaaaaatattataaatttttaaataattttttttataacttttaaataataatattaggtgtaccaatataaatgtgttacgtgtacaagagtgtacaaataagtagtctatactggcagttaactgtaaaaaatagatgacaccttaaatttactaatagttcagtcatttggagggttttattttaccaccaaaatttaagcttggaagattaagtacaaatagattaataattgaaaatactgaaaaatatgcctctttcaacttactcctctctttctttcttattttttattttttttatgaaaagataactaattcatcttaaagaa

SEQ ID NO: 156944 - DNA, 643 bp, Cannabis sativa
ttttggattaatggatatttcctattttattcccaaaaataccatataaaatagggttttacactggatattgaaatttccaacttttttattttttacagtaggaggaaatttgtttcaaaattactgtgtaagttttatactatgtactgtgttaagttttcactgttgttccacgattgttttttagctattccactgttgttttaattattttgttttgttgttttatggttattttataaaaagagaatatttttataaaaattccatgtaacactaaaattataaacttttgccaaacatttaatattttgtaaaaaccccttataaattttattacactttctttagaaggcccataaagtaatactaatcccgaacaatattcggctagcccaactcattatgttagggttctttatatttttaatccaagagagaccaacctcaatagaaagacagtaacgggaagcgacagtggtgattgaacgttgtactgtgaaaattacatgaaatatgaaattttttaaaaaagttacaacattatggcatttataggtttgtcactcttctatgacattttttcacatttaagattttttatggtatttgatatgccatatttttgtaaacctattat

SEQ ID NO: 156945 - DNA, 547 bp, Cannabis sativa
cttcaagtcatacaaggtaaataacatattcctatgtcatttacaaactacattttttcaattggtattcatgcaccattcaagtaattccactaaccctatttttttccaaaatcaagattagcttgcaacttactaatggtgatcaagcaaaagtaaattattacacaataaatactcttgaatgaacaaaatcaattcactaaatatagcaataaaataccatatcacaactcaagtcaacaaaataaatctagcaaaagaaaaattaactcataataaattatgcaaaaattacaaagtttaaaagaaaagaaagatagaaataaaatcccattttagagttgtcacaaaactctaagtttcttctccaaatttctcttcttcttctcttaatttttgccaatctcaaattaaaaatgctaaactaaaaccctaaataatactcaaataaatttttttttttttctttctttttcgtcattttcttctctgtagcgtctctggagcagcaccaaaacccaaccgcccttctcttttgttttcc

SEQ ID NO: 156946 - DNA, 582 bp, Cannabis sativa
tctttcacatatcttttctgggcgttattgctttcccctgtgatatgtggccctcctgaaataaccaggatgtcctctccttcaacaggaataggttgtgacccctcgttatttgggttattgggtagactgggctggttgtatccctggccatgtcttttgacatactgcttaaaatggcctctagaaataagactttctatctcatctttcaattggaaacatgcgtcagtcgtatgtccaatatccttatggaatttataatatttgttaggatctcttttgctcctcaaatgcctcataggctcgggttcgccaaaggaaactttctgctcatgtgcaaggtaaatattctaccgagtttcattaagctcggtgtaaatagtgtacactggcacgtatttgtcatgcttcttttgtttctttctctccttcgacggttccttaattctgacctttctcttcactttagaagcccctgagttatcgattctcgtggaaacaatacctgttgaaacattgttgggtttgcttctagagcttgttttcaacaagtttattttctttcgggcttcttccttc

SEQ ID NO: 156947 - DNA, 770 bp, Cannabis sativa
  modified_base (716)..(727): a, c, t, g, unknown or other
ttggtcaaagttcatagagtaaaagtattaatttttaacggaaaaaaaaatgaacctaacaaaaatggcatgattatgtaatccttatattttaaaggaaaatttttgagtgcgtttggtaataattttttaattagatttttgtttttaaaattaaaaaggtgaaaatattttccaaaatcatgttctataaaattatttttactttttaattttttaattaagaatctaaatgctaaaaacaaaaacaaaaaaaaaacttttaaaaattttttaagcagtttttttaatcaatattttggactccaactccaacttagactttgaaaatcgaacctggacctggccccagacttggacccgcccccaatcccgatctcaaacccagcctcggacccgacttaaataaaatcaacaaataaacataaaaataaaatttacataatatacttttattttttatttttaaaattgaaaaggaaaagtagttatagaacatatttttgtgattaaaagattaaaaacaaaagtgttagcaaacgccaccttaataagtcgtatattttaaaggataaaatcaaataatgtcgaaagatctatgaacgaaaatactaattactactaattaacttttgaatcaaaagtggaggagctccaaatctgacaattatttgggatccaaatgtaaattttaattagggtaaataccattttgnnnnnnnnnnnntgtaaaagttactgattggaccctgtgttttgttaaatgacaa

SEQ ID NO: 156948 - DNA, 552 bp, Cannabis sativa
actttttggggtgatttgtgttggacacatgccaaaataagcagcgatgtctctgaagtaagggtagagcggaaacactgcccctgctctatattaagctccgaccatgccatccaaccgagggcaagtcgatgtgccatctgatctctaatgggtatctcacagtgaacacccctcactagcccgctagcaagtatcctgctaaaagtatcagcagagaggacagatgcgggagagatccatctgtctccctgtgatctagcatccagaatctgaggcttagaagactaaatcaagacataatctaagcctaacaccgaagggtgaccgagcctgttcaaaggcttcccatcgtcatcataactacccaaagggcagttgtagaggactatacaagttttgtatctcctcttcctgactggcccaacctcctcaacctcaaactcagtattaggactctcagtcccctgatcaacctcaagcacctctgcctggtcaaccactggatctacatcaacacggggctgagtagcctcctctaccactctgact

SEQ ID NO: 156949 - DNA, 611 bp, Cannabis sativa
  modified_base (26)..(27): a, c, t, g, unknown or other
  modified_base (428)..(429): a, c, t, g, unknown or other
  modified_base (543)..(569): a, c, t, g, unknown or other
aattaattaacaaattaattttcaannttaatctaattttcaaaatatctacatttaaaataaatgtattttgaaatttatgtgggaaaaattattatcaaaataaaatatatttgaaaaattactctaatttaagttgatttgaaatttaaaaaatttccaacttgaatataattttctatttaattaaagttattaaaatagaaacaaataattaagtatcttgaataaaattaacttaattaataattctattttaatatcaaagaaatatattctaatttaagttggtctaaaattaattttctacttaaatatattttttaaatttaattaattaaatttcttgaaaaagaaataaataattaagtatcttgaataaaaccaacttaattatttaagttccaagaaaaatattctaatttaanntggtctaaaattaattaacaaattatttgtcaacataattatatttttctacttaattaaatattagaaaatataaattagtttctggaattcactatctagaatcttttcttnnnnnnnnnnnnnnnnnnnnnnnnnnnttttaaaataatccaatgaaaataatttcatttatttcaaaa

SEQ ID NO: 156950 - DNA, 842 bp, Cannabis sativa
tgtgcttatgcaagatggaaaggtgatagcctatgattctcagcagttagaggagtacgaacagaggtaccttactcaatatctagaacttggaatagtggtatttgcgctaaagatttggcggcattacctgtatggcgagaaatgtgagatatacactgatcataaaagtttgatatacttcttcacccagagagacctaaacatgagacagagacggtggctagggttggtgaaggattatgattatgatatcctttatcaccctggtaaggctaatgtagttgttgatgccttgagtagaaaggggcagagtcaaagaaattctatgaaacaaatctcccagcagctagcaaatgagatgactcgagctaatatcgagttggttatagggcaattagctaatattaccatgcaatccactcttctagagcgaatcagagaagcacagttgcaagatccagagttagcgaaatcctgagatagggtttcggctaggaagactggagactttacagtggatgaaacaggaatattgcgattcatgaatcgtgtttgtgtgcctgtggatgatggtattgaaagagagattatgaatgagtctcatatgactcattactcagttcatccagggtcaacgaagatgtatcaagacctcaaggccatgttctggtggccaggcatgaagaatgatattgctgagtatgttactaagtgtcttacctatcagcaagtaaaggctaaacatcagaggtctgtagggttgctacaaccattaaacatttcagagtggaaatgggaagatattgctatggacttcgtggtaggttttcctagaacca

SEQ ID NO: 156951 - DNA, 695 bp, Cannabis sativa
cataaatatgaatctatagcttctatctggggaatagtaagcaaaggatgatttccttcgaagggagggcgctcatcaggagaatgaactcattcaacttaagcgtggggttaagttgaagggaggtgcgggggcaaaacagtttgctcatgagcctctagatcctgaagatgaggctgaggaagagcaggtgactccgctcaaaaggaggaagaaacctcctgctgagcaccggcctgttgaacacgcaattcaaatcagaaagcccattcttcctgctctgccatccactcctgtactaggaaaggggaaagccgtcctggcggagataagaaacttgttaggtgacgatgagccttcaagtcttgcccgggcaaatgcttcgcaaaatactccgtcttgtttttaatcttcttgattatcatgctttcatacttctaatgcttttctcttaaccatgttgcttttatttcgtgctgacatgtcttagaagatgctcgaagctctgaaaaagagagtgggaggaagctcaagctcatctccttcagctaagaaatctaggggcggtgagacaacgccatccagagagaaagcaccggttgaagctgttatcgatctatccgaggagctaacctataataccctagaattaagaaatggattagcaaaaccgtaattagataattatgaataat

SEQ ID NO: 156952 - DNA, 558 bp, Cannabis sativa
ggtttgtatttgagacactaaattcttatcatcttaaaaagcataacatggttatttgtcctttttatgaatcttaaaaaaaatgcatgcattagaataactttatttttgtgtaaaatattttagtctcttgttttttttttattttgaaaaaaaaataatatttaaaaaaaaagtgtcatgtgacttgacttttgggctaagaaaaattggtcatttgtctttcttttggtaagtatcaacatgtgctttatttggtaaattttagatgagtttcctcttaaaatttcatttcttattctttatattttgtttaattgttgatcatgattgtctttcatatcttattttttggaaaaatttggtttctttttgtctttggctcttattgataaacaaaaagggggagtaattgggtttttaattgtatactcaactgtccagggggagttgaggttttgtgtttgtgtttgaggtttgtgtttgtgttcgtctttggtcaaagttagctttttattttggtttaatgttgtgcttctcaaggggagtttttatgtt

SEQ ID NO: 156953 - DNA, 562 bp, Cannabis sativa
gttccatttcgtgtgtcgagtcacgagttggttcttatattgaagtctgggtttggggtcgggtcttgggtccctgtcctagttccgttgcccaagttcgtatctcaattcttagtctaagtcccggtttgggtccctttctaggtttaggcatgggtcctagtcgaggttcaggtttgtgtctcagtctgggtttttatttgggtttgggttcgggtctgtgtcttagtcctggtcctggtcctagtcctagtctagtttcagttccaattgcgtttcagagttcgagtttgggttcgagttcgggtcggggttcgagtcctagttcgagtttgtgtttgggtccagatctcggtctaggtccgaatcaggcactgggtgtgggttggggtcctaggtctgggtcaaggttctggtccgagtcctaggttttgatatcaatctgagtctgaagttagttctgggtcaaagtcctgggttctgatcctggtctgggttcgagtttgggtcctggttcaggtctatgtttgggtctgattctgggtctgtgtttgagttttgg

SEQ ID NO: 156954 - DNA, 697 bp, Cannabis sativa
taaagacaagtgcttgatcgagctaattgcccctagtccgacagcgttgggtgacccaacaatatgttgtaagccaagggcaggtcgacaaccaagaagtcttgcataatagtagcagttaaatgtgcctcacctatagttaatgcgagttcaattgtgccaaggctggcgatgctatctccggtgaatccacagagattcaccatacaaggccttaacttggcctttttgagccccattttctttaaagtctccttataaatgatatttaccgagctcccattatcgattaacactctcttgatcctcttattggcgagttggatggttatgaccagcgaattgacgtgagggtatctcacgttcttctcgtcttcctctgtgaatgtaatggggatcctcagttttcaccttcttggaaggttctggggcaaagaccaactgctcgttctttatttctttcacatatctcttctgagcattgttgctttcccctgcaatacgtgaccctcttgaaataactaggatgccctctccttccacaggaagtggtcgcaacccctggttgtttgggttattaggctgaccgggcttgttattagtcacacttgcctcttcacgctctgttctttcctcccaagagcgatttgtcatatttccctcatcagggtacgcacgagtcctcgctctatgggtt

SEQ ID NO: 156955 - DNA, 506 bp, Cannabis sativa
aagtaggagatttctaagatcgatgatttatattatttagggatagaatgtcaggaatatagtcatctgcgccattcaatttcataaaataaaataagatgacatcataagcagatgatttataatccttatgtccacgatatactatctaagaaaattctaaatgaaaaagctaagaggaaactaataaaggataatttcgaataaaataaaaatcaaacgatgtttcatttaggcgagagtcaaagttattcttattttatgaatctcttcattgtttcatattgtaaatactaatctaagttatcatctttagatgaacaactagatgctgcatttacaaatacttatctgtcaagatctaacactgttatgtttgtctaacgaatgtaatcctttgggatttgtcccattaacaacaacaagctaagttagaccaataatgaagattcgaaatcatactacaatattaataacagaaaacaacatggtttaatataaattca

SEQ ID NO: 156956 - DNA, 733 bp, Cannabis sativa
ataagtagtaattcattgtttaattttttttatgcattttagattttattttgtaatgagtctgtatattgattttttatgttagtcgtttttcttatgattatttagcattttgtatgtttggtatggtagttgtttttaatagatgtttaatagttgtattgtagttgtgttacaatgtgtttaatcatcagcttttattttggctttttttttttcaagggatgggaatacaagtacgttgaaaattcgatcactataaatcgaaggtcgcatgtatttgtacttacaatatcattgagaaccttcatgtatggaccatgtattatatgtgttggggtattgttaaggacaattttaaccaacttttattagagtgatgaacaaagacttgtagtttgaggttattttgtgaagaatcaactgtaggaacattgcaaatcaacatcaactcagcctttgtttagatttgaacaaactaactatattagaattgcttttatgagagctctgtgttgggttgtctatatgaaataccctcaaataatactaaaatagtgtcggctaattaatgtataagtattcctacatcagttctctgagcatcaataaaaataaaaggcaattgtacgacaactaaggtaccgtttggcaacacttatgttttttaattttttaatgacaaaataaaagtaaaatttttatttttaaaaaatttatttttgaaaaacaa

SEQ ID NO: 156957 - DNA, 1120 bp, Cannabis sativa
tatgagatttttcagatgtacagaatgatcgaattgctacccttatattttaagatcaacaattgcacaatataattgttatcccaaattttgggttgtatgatatgcattcaaaattgtaacatgtagcaagacagatcatcataaaattatgcatcgtcgatacattaagattgtacagagaagtatttcccttaagggcaagttgtcgtctggtcggtggggagacaataacttgatagagaaacttgttgggtgcttatattgaagaatcaatatatacttgatcagtatgtatatatattgacaaagtaaattattttaaatttttatgatagtatattaattaaacttattattatggcaaactcttatacactttatttttaaaaattttataatttttgtatacaataaaatataacaattgcacaatataattgttatcccaaattttggcttacatgacgtgcgaaccaaattgtaactattatttgcatttttggtattggatacgtggactccaagttagcactgcagacctatcagtgggaccctcagcaaaggagaagtgggccaatcccacctggatatgtccttccatgaacatatcttggttctacagtcgtaaagccttccgccttcagtaatttgtacccgaaagacatgtctggtaccacgagatcggagagataaagacgtgcgttcccaaaaggcccttccgatttccctttatattccaacacacaaataaggaaactacaattgttagatcacaatagagtatcgtatcaagattaaagagaaaacttcctataacaaatattagcaactaggagcagggtcggccctaggcataggcaggctaggcccgtgcctagggcccactcattttgggggcccaaaataaaaaaaaaaattattaggcgtttattaaagtaaaattaagtgtattataaacaacaaatagtcatagcttagttggttgaggtgtatgacatattatacaatgtcattgtaattaaaacaatttaaaagctcaataaaatgcattcattaattaaaaaatattttgacaactaaattgccaaaaaaggacctaaaaatctccccctttggc

SEQ ID NO: 156958 - DNA, 783 bp, Cannabis sativa
cggggggggagcaactggagccagtacttctgtcgcaccccctggtgttccctgtggcacagctccagtcgcctggcccgggttgagatgaggcaaccgattttttatccactcatagagatgtcccaatcggattaggttttcgatctcgtccttgagatttttgcactcattggtgctgtgcccaatgtcgttctggtactcgcatctcttgttggggtccctccgggaactatccttgtacagagggggtggtctccggtagtgtgtattctgcctagtagcaaagtacacacgttcttgggagtccgtcaactccgtatactgggtatattggggagtgtacccccttttttgtcgcttttcctccgtccgggtactacccttggaggaccttttacttcttgaaccttgggaagggccggccaagcgtgcagtcggagcggagtgcgagggggcttgtccatttatccctgagggattcctaaaatgggacgacgcgggggccaaggcctagccctggccatatccgggagtagcagtgaattgtatgtcgctcattggtggagttactgttgggacaatacccgacggctgggctccgggcacgtaccctgctatcccggtgggattatatcctccataggccactatttgggcctcttcaagattgatatatttttggactctcttctggaattcttgaaggcttgcagctccttcctattgtagttcgttccagaatgaagttcctgtacggatgcctgcctggagaagggcaag

SEQ ID NO: 156959 - DNA, 598 bp, Cannabis sativa
aattcgatgtaccttgtcgctgttgggacccccattgtctttcacaaatttgtaagcggacttacattgtttactaccccaaaaatcaacggggagcactattcagtcaacatatccaaagttccactcgacgtgagtcaagtacaacaactgtgacaaacaaacaatgtattagtaatacattcaactaataaatcagaatattatattatcgagttaataaacacattcacataaatgaaagataacaaaatcaatgtacctggagcaatatggtgcaaccagacacattcttcgtatgcttatttcagaatctgaaaattgagttcatcagatacctgaacccgacagttgcccagttcttgtggcagatgtccctggtaatcctaagggagtgtaggtaccccgaagtgatatcgcagcccgtttttggcgctaggactgtccctatcaccaccaaagaaaatttaattagaaataggctgtctacctcaacacactctaataaagatttctccaagcctgtcaacgacacggtgtagtcgacaacgttcaatatctcctccagatatcgagtgtcactatcaccctcggtgac

SEQ ID NO: 156960 - DNA, 600 bp, Cannabis sativa
aaaaaatggctatggctaaactcctctattttttttataaggagtcatttactcaaaaaaccaaaccagaaacaaaaaaataaagtcaagctcccccagaaaacgaagcaacctcaaactcgaatagaaaaactcatacttagttcttctagttataaaaaaataatttaatatcatttaaaaataattaattatttaaaaatttattatacaagaagaaaattctaatttgtgtaaaaagaagtctaatttttgtaaaaaataaataaagtttcatggtaaatagtataatttattatagtaggaatttatataagaaattatttataattattaattgctaaaagatgtcttgataaatattcaattaattaatttaagaaaataattaattataattaatcgattttagaaaaaagttttatttattggtaacctgctaatataggtaaaagaaaactgtaaccggttactaggggtgtgcataaattcatataatccaataagaaccgaccgatccaattacaaccgactgccaaacattggatatccaattgtgttcggatcggattagatgttatttttaaatatccaattaga

SEQ ID NO: 156961 - DNA, 541 bp, Cannabis sativa
aggaaaaactctcttccttaagtttgaaattgtccgaggccaaaaaggcgacagcacaggcacaaaaggctttggccgacaagaaagggtccctgactaaggagattaaagttttgacgagccaagtcaagaaggaatttcttagtgggagttatcagccggccttcaagctgtacttcgagtttagagagggaaaatatgctacctgggacctggacgagtttttcaagaagtattctgagttcaagaaggacgaggaccttgtggaatcttctacggagtcggatgaagctggtgatgatgaggatgccgacggggcctgaggagctgggagggaattttatcctgtttttattttatatttttatatcttttattttcacgcgtggaacgaatttaaagaaccgttttttaatggttttgtaaggatttcgtgtttaattgatatttttaatttatttcccttactatagttattcatacgtgtatggcttttcttgaggcgtctcgacacttaggggtgcatatttactggcattta

SEQ ID NO: 156962 - DNA, 648 bp, Cannabis sativa
ctaagtcatcaacatagcaattctagtattttaaatgaagtgtaaaatacttactagagattaagtaatcaatagagataccattaaaacatttatgaggattaggaatttatgaggatcgttgaactgcatattattcttaacttttccacccctatcagatcaaaagatctttctattaaacaaattcttaataattgttttagaatcaacaattattcataaacatagaaatgaaattctaagtgtttatgtagcattaactccttgaagagttgaagatactatggaatttgtgtcaataataaaaacacatacacaagcattaaaacaaataaatatagctggtattggcatacacaagatgaagctcaattcataaatgcaattcatttttcaaaactaggagactttattatgaaattctccaaaataaaggaattgtctgcaacaatatgaaaaatagagaataaaacctcaaactaataattgaaatctaaattgttctgaaactaaaacaattaattcaaaaaaaaaatcgagcttctttttcatcttggactatctccacccttctgtccaaccatccaattcaactcgctaagatagcatccgagttcaagcagctggagctgtaataagaagaaa

SEQ ID NO: 156963 - DNA, 923 bp, Cannabis sativa
  modified_base (758)..(777): a, c, t, g, unknown or other
agagagagagagagagagattagttgagagaaagcaagagagaaagagagggaaagagagagacttacggaggtgggagaggagacctacgccggtgagcgaaatcacgagaccttcagagctgcggacgagagcaaaatcgcatccctgttcgaaatgaaagtctgtaccgtcagatttgggggtaagtgaacaataggaggatttgcgtcgctttctcacactcgcaatctttaccgtcggtttaaaaacgccacacaaagtattcgtgaggcttttaaaacgacgctaaatgtgtgtatttttttttattattattttttggcttttaccgttcggttgggtaattagtgagggatatggaactaacgcaatttatttattttttgtgtcattttacaaacggcgaatatattgaatatagtactattcacatcggtcaacgcgatgaacaatcgcgttgacccacgtgaatagtgaattttatagtagtgattattagtaactttaaggcatttcataaactagtgaacctgaaaaaaaaaataagattttaaaactaacagagttagtactagaattgaaaaaaccaaattagaacaaaatttaatttttactaatattaactaacaatccccggcaacagtgttaaaaacttgttgtgatattttgcacacgcaagtgcacgtatcgtgacaagtagtaaactcaccaagagtgaggtcaatcccataaggattgtagttaagtacgttaannnnnnnnnnnnnnnnnnnnttggttaaataaaaattaagaaagtattaaaactaggaaacagtgcaaaaataagcaattaaactaataaggaaattaactgttaataaaaattagggcttcgattttaattgtttctattaattatgacctaatatgattatctc

SEQ ID NO: 156964 - DNA, 526 bp, Cannabis sativa
taaattgagtgaagtgaattaatacatgtatatatctacatgtgaaaaatttgatgtatatatttgagtgagggcttaagcctacatgtaggctaaagtccctccgtccctgatggtagcatacttttataaactaatattgaactacttttacctttataactaaatggggtatcgggtgaaccatacttttataaactaatattggactacttttacctttataactaaatggggtatcgggtttcacagttggacttaattttacaaactacatatatgggtgcacttttaatggatattactcatgaatgggtaaaattaaaaaaatttgagtttttatgcttaatttctctatctaattataaaaagctattatttttatattatatgggttgagattgttttataggtaaaaaaaaaataaaaaataaagttttttagtaagaaaaataagaaaagaataatttgagtttgagttaaatatttttgtatcaacatattttttatatagtataaaaagaga

SEQ ID NO: 156965 - DNA, 1249 bp, Cannabis sativa
tagggaatcagaaatcgtttttttttatcataacttttcacttgggcgtctgttttggactaattatataccgtttcgaagcttgggacgagctatacaatatggtgtaagttttagagccaaaatataagttttattttattgtatttataccgcatgatttggtagaaaaccctagattgtcttatgtgaatagtaagcaatgtttaaagataaaaactctttagtttagcgttgttgtgacatagggctgagttcatcgaggaggtttctccatttgggtttgtcgacgtggatgaatctggattaaaagtaagaaaagtctattgttctgcatagcatgttaattgcaaaacaattaatattgtcgagaattgattaatattggaattaagatacagttattattaaagattgcctcattaggcaatgacaatgtgatgataccatgaatgtgatatacgagctcacctggttaggtaatgtgatatactcgtcggtgataccttattaggtacgagctggattgatctgattgggtcattacccacagggcgaggtggagcaaaatacgcagtggtggcagttgacttcttcaaaaaatggacagaggctgaacctctggtttccataacttgcaaaaaaaattctcgactttgttattaagaacatcatttgtaggtttggaattccaattaaaatagtatctgataacggaactcagtttgatggtgaattgttcaccgacttctatgaaaagaataaaattattaaaagcttctcatcagtatcgagacctcaagcaaacggacaagtaaaaattgttaataaaatcttaaaagatacgattaagaagaaattagatgctgctaaaggaagatggatagacaagctaccacaggcgctttgggcccatagaactacagaaaaaacagcaatgggacaccctctattttcattggtgttcagctcgaaagcaatgttaccagtagaagttaacattgcgacccacggacgtgaattttataatcaagaggaaaaccaagaacttttgaatatgtcattggatctacttgaagaaaactgtaatgagtcgcaaataaccaatgtagcttatcaacatcgaatcacaaatattttaacaaaataattcaaaaaagactttttaaagttagagatttggtgttaagatgtaacgccctagataattaggcacgctacccaaaatgcttatgaaaccctaatcccc

SEQ ID NO: 156966 - DNA, 1200 bp, Cannabis sativa
  modified_base (820)..(826): a, c, t, g, unknown or other
aattgaccactttatcaatcttccagaagcatctggttttgataaaacttgtctcaaaggctgatcggttaacacttttatggggtgcgcctagaagtatgacagcagtttacgagacgcgtagactaagcacaaagcgagtttttctagagggggatatctggaaactgcctctagtaatcttttacttacatagtaaataggttgttggtgcttaccctcttctcgcactatggctgcactaatcacatcttccaagatggccataaagagaaacagtgtctctctagttattggttttgccaaaactagaggcgtcgctaggtgcctttttatgttctgaaaggcctcttcgcacttttttgtccactcaaactttttgttgtctcgcaatatattgaagaacagcacgcacttatcaattgacttcgaaataaatctgttaagtgcagccattcttcctgtcagggcttgtacttccttaggctttgtcggtaatggcatatctattaatgccttgatttttttgggattggcttcaataccccttgcattaactatgaatcccaaaaattttcctgaggaaacttcaaaggaacattttttcgagtttagcatcatgttatactcctttaatatcttgaagcattccgcgaggtctgtggtatgatccctactttttattgattttaccaacatatcgtcgacgtaaacttccatgttctgcccgatttggtttgcaaacatttcgtttaccaatcgctgatatgtttccccagcattcttcagtccaaacgacatgactttataacaatagagnnnnnnnttggttacgaagcttgtatgttcctgatctgggacatacatttttatctggttctatccagaatatgcgtccataaatgacataagcgcgtgcccagcagttgcatccactaactggtctggttgatccatcctggtagtgagtggaaaggcacgccttattcagatcagagaaatcaatacaagttctccaagttatgttaggcttcgggcgaaaacacgattagctatccacgacggataaaaaacctcacgtatgaagtcgttgaccaacaacttatccatttcctattttagtgccccttgtctctcggaatctaaaggtctccttttctgcctcttcgctgggtagcttggatcaacatttaaatgatg

SEQ ID NO: 156967 - DNA, 674 bp, Cannabis sativa
gactctattgttataaagtcatgcggtttggattgaagaacgttggggcaaagtatcagcgattggtaaacgaaatgttcgcaaaccaaatagggcggaatatggaagtttacttcgattgtatgttggtaaaatcaataatgagtagggatcatacctcagacctcgcggaatgctttaagatattaaagaagtataacatgaagctaaacccaaaaaaatgttcctttagagtttcctcaagaaaattttggagattcatagttaacgcgatgggtattgaagcaaatcccaaaaaaatcaaggcattaatacacatgccatcaccgacaaagcctaaggaagtacaagccctaacaggaagaagggttgcacttaacaaattcatttgaaagtcaactgataagtgtgtgttgctcttcaatatattgcgaggaaacaaaaagttcgagtggacaaaagagttcaaagaggcctttcagaacataaaaaggcatctagcgacgcctccagttttggcaaaactaataactggaaaaatgatgtttctctatttagccctctcggaagatgcgattagtgcagttatagtgcgagaaaagggcaagcaacagaaacctatttactatgtaagtaaaaggttactaggggtagaatccagatatccacctcta

SEQ ID NO: 156968 - DNA, 926 bp, Cannabis sativa
tttttgcacatattttgtaattaattaaaataatgtatacaaaattgtaaaatgccattttctctttgttttttctgccattgatatcccaccatggttagaacttgagcaactgcttccaagaattctggccataatcctctgccaaataattcctctacaattccagctgctccaccaacagacataccgatcattcctccggcttccaccatgactggagacaatctcacccagactcatcttcacagacctgctcatgaagacagttcaagtcggtactatcttagctccggtgattatctaggattaatcttggttaatcctcctttgtctgatcacaatttccaagcctggcatcgcaattttgagctgtctgttggagcaagaaacaaaaccgtgtttctcaaaggaacattgcctcaacctccgatcgaagatcctctccatcagcattggtttcgatgcaaccaaatggtgatgtcctggattctgcatttagtcacaccagaaatcaaaagcagtattatgtttcttgaaacttctgctgaaatgtggactgaactcaagatcgatttgatcaaggtaatggccctagaattttcaaattacgagaaagattgatcactcttcgacagggagatgactctgatagttcttactttacaaagcttcaatgtatgtgggataaaattcaagaattaaggccatagatcccatgtacctgtgctgcttccgctgacaattcggccttcatgaatcaagaacaggttcttcaattccttactggtttaaatgaatcttttttccctgttcgtgctcaaatcatgttaattgatccgtttccctccttgtctaaagtcttctccatggttattcatgaagaaagacaaaggaaacttaagaatccccaaattccccttatt

SEQ ID NO: 156969 - DNA, 723 bp, Cannabis sativa
  modified_base (81)..(82): a, c, t, g, unknown or other
aggaaaaaggatatatttagagggccagctaggcctgtagtatttcttcttgatgccctcaataataataataataataannataataataataataatagtctaaaacggtttgaacatagtagtgagcgaattgacttgcccttgttttagtatgtactagtggcgatccagtgaaatgagattcaattaatgataaatttatagaaaaatttacaccttactgtaaaacaaaatatatagtataatccttacaaaaaaaagtatataatataaaagaagcatacctatatgtatatactagtaaaatatataaaaaaaaatggtttaaccatataaaaatattgttggtagaaagaatttagacaataccaaatatgtgagtatttaaataaaagttgaaatacttactaacagttatgtgagtattcacctagaatagcgagtactcaaaatatagactactaaatagataaaaacaaaaataaaaataaagagaaaacattatagtagttcagtcagaatttagtctgcttagtctatttttagtaatgatttcagcttagtttatttaattcggatcacccttaatataaaaatcaagtgtcctttagaattacataactgatatgtaacgtccccgtttcgagtctccattggctccttacacccacgatataatggcttttatacacgagtatgccactctggctgcttcctgga

SEQ ID NO: 156970 - DNA, 663 bp, Cannabis sativa
tgggaaggaccatattaagtggtcgaagttctcgactccgtagcatacaaattaggtaagtatgacgaagaaatgcaactcattctagtaccacggtactagaatggagaacatttatgaaaatactacaaacaaagtacaaggtcgggtgacaactttaagtactaaatgaacatttgcttttaagtgaatggccttctgggcggactacgcccaaagttttcgataaaagaaacaaagtactcaggtcaggtgacaactttaaagtacagtttcttatgtctgaaatttgttttatttcatgttaagctacaagatcagattagatcaaatagctctgatgtaagttattacggtaacaaatacaattttcgatcaataaatgaataaagatagtatttcaaaatttaattgagtcgaaaaaattagcatgttataatttaccataaaatgcgtacaaaaagtttggtcaaacccaaagcaccgaacagataagcaatatatttgtaaaagacaagtgaccaagagtcatacgtctgctcggtcacttgtggggcatctatatctgcacaaagcatttggtaaaaataaaacaatcacaatagcacgacaattaggaaaccttacattgggtgtagtggaatataatgactgcttccgttc

SEQ ID NO: 156971 - DNA, 537 bp, Cannabis sativa
  modified_base (231)..(232): a, c, t, g, unknown or other
tcgtcccttaggtcatgtcccttaggtcatggaggtcatgggttgtttcatgggttgttcccatgttcccaacctatcgaacacagaagaacctggctgccttagcgattggtttcgcttggttggcaagtggaacgactccattattttgcgtggatccgttgagcatgactcctcctgatgaattcccgaactaggtctatccgcctacctcttggcccacgagtgganntcgtgaccggggattggacggctgaccgttggttgtctgggaagcattcaccgttgggtcatcctcggtttctcctaggggaatgatgctcgacgtttgctggcctacagtctgataggctctttgtattagcatagtggcttgccgactacgatcttcgatttctgcatggtgagcccttaatgcctcaatctctttgtccctccactcggcacgtaattcctccttatcctgatgcagggtattgttgtgaccttgcatgagtctgaccgcagcgcggaggttttgcaattcggttgcgtctc

SEQ ID NO: 156972 - DNA, 571 bp, Cannabis sativa
ttctaccccgttaatctcagaagtggcccacttgctgaagtaatagaaaccattgtgaaggcctacgctttttatatcatagaagtagctaaactcctctaccacgggagccctatgcacatactccatatacatcgcataaaaagcaagggttgcgcgataactgttgggggttagctggaaaggagacacatcataacgtttgaggatggctgcaataaagggatgaaaagggatcgataccccacatcgaagaatgggtattgagattaccacatcctctgtgggaataatcgctggattggtaaaaggaagatgcgccctctgagttggcttaggtcgcaaagaagcaagtcgcaacaagtttagtcttgtaaaggtagtgaggtccgatttcgtaaccctcgaaaccaagtcctcgcacgagaagggctcgttcagctgagtgtcgtccaccgaatcagttccgctcccttttgcctcttcttcttcctcgcctgactcacgagctggggccgcccaatcgtcatccatctccttgacctcaatgtcaggggcatgcctagagtgg

SEQ ID NO: 156973 - DNA, 641 bp, Cannabis sativa
  modified_base (493)..(493): a, c, t, g, unknown or other
aaggacaatataaaaaagtatagagtgtaatttcctctagataaatagtattcattttctaatggaagtatttgtgagatggaaaatttaagtggcaaaatataaaaatattatatcattagaaataaatgaatactattcttaaaatttgtatttatgttatacaatgacattgatattatatttttttaataatttaataaagaaaaaaaattatatgtataataatgtgtgagatcataattgtagtatttttaaaaactgtcatattattagagtgtttttaaaagtaagggtactaaaaataatgtgaaagaaaaataaaataaaatattatatctttagatgtgaagatattttacacctttaaagaatattattattggagatgctcttaattaagtgacacttaaaggtagaataggtggtgtgccgctattggtatattttaatataacactacaaaaaaatttatttttagtcacaataaaanttgtgactaaaagtaaaaaaattatgactaattataaaatataatttctataaagtctatggctaaaagtattagtcacaaaaattacaattttttgtgactaaatgtatttttagtcacaatactttttgtgactaaaattaaatta

SEQ ID NO: 156974 - DNA, 638 bp, Cannabis sativa
accagtagtcggtgtctagatctgggactcagactaggagcagaaccaagacgaagaaccaaaccctaacacaaacctagacgtgggacccaaaattagaacttgaacaagaattgtcgaactaggaccctaaaacaaggcaaggaccgtgtccaggacccgggcccagacctagcctcagacccaaattgacactggaactcgagcctggagacggtcgtgtacccataccaaaattgagaccccgacctggttcttaatttaggactcgatcccaaacacagacttggacttagatagggatccgggtacgaacctggagtcggaccaatacccagactgggatcaaaatgctagacctagatctggacccacatcaagacctggacacaaactcggacacagaatcagaccagaactcaaacaacgacacctagaatcagacgcaaagctagacccggacacagatcaaaaccaaggacttgagactcggacccaacctagacccaggacgcgaacccacacccggagcctgatctggacttagattgaaattcggacccgaagccaagctcagacaaggactcgaactccgactcgaactaaaacacaaactcgaactcagaatcgcaaatgga

SEQ ID NO: 156975 - DNA, 654 bp, Cannabis sativa
  modified_base (431)..(437): a, c, t, g, unknown or other
aaaataattagtcagacaaataaataggttgaaacatataaaataatcagcaatatcttttattatgttatttgttaaattattttttaattattttgcttacataactaaacaaagtaatgaaattggttaaaaagtgtaattgttttttagttatagcttttcgaaggatatatttatttttttattttttaattaataaaaataaaaataaaaataaaaataaagtggttaggaaaaagaaatgtattccttataaaaatgaggagaactttttttggaaaacttacaaaaaaatactgaaatttaagttaaattttacaaaaatattgtcacatagaatttttttcaaatatactatgtttttataaaacaacagtagaacacaaaacagaacaactaaaacaatagtggaacaactaaaaaacaannnnnnnacaacagtgaaaacttaacacattacacagtataaaacttacatattatttttgaaaaaaattccgccccacagcataaaagtaaaaaagttaaaaatttcagtatctagtgtaactatccttttttttctctaatttaagtgggtcccattagcttcttccattacaatattgggataattacataagacataattttttataaaaaaaattatat

SEQ ID NO: 156976 - DNA, 692 bp, Cannabis sativa
cacccccaagggagatgacctctagagatggtaagcaaagttacaatataggaacaggtgttccattgattcctcagcctcctcacacaaagggcaagtcacatcttcaatttggattctcttggccaggattccacggagcggcaaagcattcgaaaggataccccaccataagattttatgtctttccagaattttggaattccatagtctactccatagtgttggagccaccacacaggcggaggctctttccaaagcttgaatcaaataagccgacttcgtggtgaatttcccgtttccttctttggtccaaatccacctgtctttcccttgaccagaaggcctgccccctttcaggatatcattgattgtttggaagtcaaacagggactcgagcttagggatatctcaatccccatcactcgtaagccaccttagtcaccctctcaggacaagaagtaatgggtttcgggtagtactctttcccatgaacaacccacaggtcattccaaacgtttgtttcttccccattcgatataaccttacaagcccctttcctgagaatatctatcgatttaaccacatttttctagaaccaagagtctgaatcttttaggttgcttcaaacaacaatttgcttttcagatacttggctctcaaaaccctacaacagagagattgatcctcag

SEQ ID NO: 156977 - DNA, 618 bp, Cannabis sativa
tcacttccaataacaaacaagaacagagataggggatcgccttgtcttaaacctcgggagggcctgaattgcttaaggggaccaccatttagcaaaaccgaataagaaactgaagagatacatttcatgatgaggctcctgaaatgatccccgaaaccgaaggccttaaggacaacatctacaaagctccattctaggcgatcataggccttggacatgtcaattttgagacccacaaaaccctttctaccttactttttcttaaacgaatcaagaatctcatgagcaataataccgttttccgcaatccaacgacccgggaggaaggccgattgataaggagaaaggattaatggcagcaccgtgcggagacgattggccaggagcttcgctatcaccttataagcaaagttgcatagcgaaattggccggtaatcatcaaatttgcaggcatcttgtttcttggggataaggacaataaacgtccggttcaaggctttaacaaattcaccagcgcggaagaactcaaccacaatttcaatcacatcctgaccaacaatattccaatgggcgcgatagaaacgccccggcattccatccggccccggagccttaagc

SEQ ID NO: 156978 - DNA, 785 bp, Cannabis sativa
gagtcaactcacaaatagtaaatcgttttgagatttcacagcatatcacaatgtttgtgttttcctgtaacattttaaatgtcttggaaatttaaaggagttgtaatactaggtatgacgtctacttgttctgattaactaatatatatcttatcgcgtttcataaaatgtaaagtcttgcatagatatagagatgacaattatgcatacagggtgaaatgcatttgtggattgattcccaagttgtaagagttactacgaactaacacaaacaaaacctaatatgtttgaatatttttaaactcaagctaacataatttgggcgaatatgatgtaatcttaagtgttaatttaaataaaaaaaaataaaaataaatatatatatctactgaaatgttccacttagatagatctttctgttattaaataaatttaaatataaatgtgtttcctatttaaaagttatttgaattttattcaaattattgttaatttttttttaagaagctagatatttttagttatgcttataaatatcatcatgaattaaggaagcagttttaattttaaatgcttttatacgcattctttatatctaggactctgaagcttcttggtaattcttctctcgctctctctttctccctgtgcaagttggtaatccacacttggccaccattcttcatcagcaaagctcttatttgaagaccaaagcttggtatatatccttgtctgtctataccaacattttaaattattattttctattttattactgtgtacta

SEQ ID NO: 156979 - DNA, 543 bp, Cannabis sativa
  modified_base (251)..(256): a, c, t, g, unknown or other
acagggaactgacctgccactacagaaaagctcgctgcgtcatcagcttgaacattagcatacaccggagtagaaataaatatcgcttcctgctcttgcttttctttctccacccgtgggcaatttttcttaaaatgcccaaccataccacattgaaaacatacttttcagttacattcttcgggatggtgtttcatgcaacgtgggcactcagggtaagaataaacctggcgtcctcctttgccttgaannnnnnggaaccgcttgttctgtcttaaacccaccattgatgacgtaggtttcctcttccgctcaatcatggagctcctaccacttccatcataacttgggatcaggcaggtgatatcctgaccctctgccataatctcttgaggtctcggaataattttctcagggctttcagtccaaaaagcattcttcatatttgaatctctttgaaagactgaagattcattgatccaaatcttttcatgcaatgattccacttaattaccagccattccatgttccgctggtaatacc

SEQ ID NO: 156980 - DNA, 528 bp, Cannabis sativa
caagtcaattacctctcttttgtagaaagtttgaccgtagaagatgaaggctcaagctcaaacccttcagaagattttatagacatctttcaaccaacaccttaagaattagaagacggatgagaatcaactgtggatgatttaatagagatcaatcttgggaccgaggatgatccaaagcctgtgtttgtcagtgctttattaactgaagaagagttaccacagtacaaacaagtcctttgtgagaacaaagatgtacttgcttgggggtatcgagacatgccaaggttcaatccaaaagttgttgtgcacaggttggaagtatcaaaagacgctacccctgttaaacaatctcaaagaaggattcgaccagaattacttcctaaagtcgaggccgaaattgacaagttaagagactgttgaattattcgggaggttaagtatcctatttggcttgcaaacatcgtcattgtgatgaagaaaaatgggcaactccgcatatgcgtggattaccgagatcttaatcgg

SEQ ID NO: 156981 - DNA, 671 bp, Cannabis sativa
  modified_base (52)..(73): a, c, t, g, unknown or other
gaaccatgcaacattaaatgttttttctgatatatattaataagtaaatctnnnnnnnnnnnnnnnnnnnnnntttagggcataagacccaacactgtggtaaaagtgacattgtagtgtatagaccttctaatcacatctaaaactcttcttggatgtaataaaactcaaagaaataatctagagcagcccagaaactctcaaactcaacaaaaccaaaatctcaccttctcaccactctatttcattggacccacaacctctctctctcagtatctcaccaccgtttctaaacccctaaacgaccatataaacatcttaaatatactcctaacctaatataacccaagatcaacaacttaatttttttttaagaaaataatatatatatacctagagtatatcctatacgtgactaatattaataataataatatataataaactaaacaatttgctataatatatttacccatataattattaatatataataataatattgataaataattaaatattaaattatctccaataatttaattatttatctagcattatacataccctcaaaataaaataataaaaaaataaaaaaataataaattttattgtcactaaaaaaaattccatacaccgctaaacttataaatattcgaaatgataaatta

SEQ ID NO: 156982 - DNA, 647 bp, Cannabis sativa
agaagtcaatacaagttcttcaacttccgttaggttttgggacgagaacaagattgggtatccacaaggggtaaaacacctcgcgtttaaagtcattaaccaacaacttatccacttcctatttgagtgccccttgtctctcagaatctaagggtctccttttctgcctctttggtgggtagtttggatcgatatttaaatgatggcagataatgttagggtcaatccttatcatatctccatggctctaggcaaactgatcctagttcgcccttaagaaacttattagttgttatttcaactgctcgtccaaattcttcccaatgtaaacacactttgtgggattttctgggtcaagaacaactttttccaaattcttcaattggtttcaataagtttctttcatcatgaatctaaggatcaagatcttcatccttcttttcgctttcctctaccaagactgccattaactggtgatcgacttttctgtgttgtagctctatgcgatagcaatccggagctagcatctgattgcctcgcattactcccacaccctctggtgtttgaaactttagggataaatgcttgattaaactaacaacccctaatctgatcaatgctggatgacccagtaatatattgtaagc

SEQ ID NO: 156983 - DNA, 635 bp, Cannabis sativa
  modified_base (36)..(47): a, c, t, g, unknown or other
aaactcaagcttggttaaatctaactaacatgcatnnnnnnnnnnnnaattcaccataaacaaccatattataaccccagaaaacaaactcaagcaccattgacaatcacagcaactatttcacaattttactttgaaaaaccaaagcttttggaccaaaactctaaactaatttaaaaccaaccaaacatgcatcaaaacagtttcattccactcaatccaacatgcttaaacctctgaaaacaaaccataaacacagcagcaacaatagaccaaaactaagcatgcaacctaaccattttcttcaaaaactcaagaaaataacaagacaagttcaaggatcttaccaacactttaactacaattaagttgattgaaaattagcttgaattcccaagaaaatggccagcttcttgttgctcaaagagggtcgaatgagagagagagctagagaggaacaaggttttgtttttcttttctaatttccaatttgaaaataagggataaaatgaataattccaactcttaattcagccaacaaatattaattaaaataatgcattttcaccacataaagtccactaaaggacaaaatatcattggcgcaaaatgatcattttgcccctccacactaa

SEQ ID NO: 156984 - DNA, 677 bp, Cannabis sativa
ttctcatcacaaactggcataattatgccttcatatgtgctcctccaatattcagtggtgtaatatggtgagcatagtgcgcaaatgctaatacttcgttgctgagctacaacacatgcatgaggacaagaaaacttcatgatttggaacaagccgcaagtgaagtttgttcctgcaagtccactacgacattgatctcaactggacctccagggtggacattaaacgtgtaaggttcacatgtgtcaacgttcaaataccgagatttctcaaactacaatatcaagtcctcctcaatttctagtgctagggtcttcgtccacttgttagctttttcttttcacgtagcaaaccactgttggactttaaacctcaagaattcaacagaagcagtgattggaaagccttttgagtcattagttgtgttgttgaagctttcatcctagttacttatcattacattgtaacgttcccttggaaagtacaaccgaccctatttttgaaattcaatttccttaagatataatgcagccgcaacattcattgtcagaatcttctcaaattctctatgaaactgtgtttttgaatacgtgtaggcacaagtgtaaatatgattcgtgaatacgtcagtcttgaacttgtggttgacattcatagtaatgtggtggtagcatgca

SEQ ID NO: 156985 - DNA, 745 bp, Cannabis sativa
  modified_base (593)..(596): a, c, t, g, unknown or other
tctctttgagtttctctcactaatttgtagttttagaattcatttaatttgtagtctaagaggtcctatttatagtgcttgaagatagatgaattctcttagaattagaattctatttatagtattaggaaataaaagataactcatcttttgaaaaaaaaaaagataaaaaaaatcgcaactctacttgaaaaagctatctttattttacctatctttttttcaaaaatttcgtgctgcaatgactgatagtattttggccataactctctcgatattacttgaaattggacgattcaagatgttctagaaagctaagaacgagatctaaaacttttatgttgagctccaattccagttctatctctaaggttgtccaaatttgtaattaagttccgcctcatacaatcgagctcgcaagcttccactattttccaccaaaatatgctaaaatctcttcgaaagactctaaatgcatgaatagtctttaaaatagcctaacaaattaaaatcacactaatcaatatttaaagaatcaatttaagaatattaacgcaaattaatcatatttataagataaatatggactcatnnnnttcccccacacttgactcttgctcgtcctcgagtaagttatgataaaatgaatgatgcataaaggaattggtctttatgaaaaataattttagtttcaaaaattgtacatccctttataattccaagaaaatccaaactcttcaatcat

SEQ ID NO: 156986 - DNA, 567 bp, Cannabis sativa
  modified_base (54)..(58): a, c, t, g, unknown or other
cactatctgtataggtgcggatcggatacgatcacttgcccgcaagggatatgnnnnngataccatgttgagaatcatggggttccatgtcagaactaattgacaatgagtggagtagcccatgttcttatacactatatggttcaattctctaccatttaagcacttaagtacaatttttagcacgacttatattttttctacatctaatttttacattcaatattgatgcatattaaattttagttatgtataatttttagtgggaattagatcactttcaaattaaataaaggctaattatgatttttgccccctgaacttttaagatcgttaaaaaggcctcctgaactattgaaattgttggatttaaggacttttgtcaaaagtatgtgtaatttaagagtgtgacataatttgtgacagttagtaatctcgtgacccgtaaaaaaaatatcgggtaagttgtgtaatcccacattacttggcaaaggtcaagtgatgattatgagattgcataggtatgggactacacagttgaagatagcttaaatggattgattggta

SEQ ID NO: 156987 - DNA, 561 bp, Cannabis sativa
  modified_base (118)..(125): a, c, t, g, unknown or other
  modified_base (237)..(238): a, c, t, g, unknown or other
  modified_base (347)..(349): a, c, t, g, unknown or other
tggtgatactctgcgacagaaagggtacaagggttagagatctatgtttatatgtgtttatttattatcgttgtagaagttgtatatagttttgtaattattttaccaggatctagannnnnnnncaagtatgttattaacatcctaaacatgaacttctaaaattattaggaataaacacatataaagtttcaggaaccttacagtggttgaagcggaatataatgtctccttccnntcagatctctaacccttgtatcatttctgtagcagagtatcaccaagatttgagtctgaatctccttctcttgaaactggattcttcatagccttacacactatgattnnntacaactttatgtgtgtgggcactgactctaatcactctagggtttgaattgaagagaggaatagagagatagggtttcggttttgtataggagaggaggctcaaaattttaaccgaaggaatgagatgcattatcttttccctttagccatcactagatatttattgaaaacaacttagggttaggttaaattaattagcattaaaataat

SEQ ID NO: 156988 - DNA, 620 bp, Cannabis sativa
caggactttgagttagcaaggctgagatacaattaattacatcacttaaaatagaattattacaaaaaccattgttaattttatccaccactactttacaatccgagaaaaggatagaaactggcagtttagtagcttgtaaccattgaaccgcagtcaaaatggctttagcctcagcaacatccggaggaaggactccctgcaatggtagcataaatccagctttaatgatcccacactcatccgtgactatggaagctaaactggtcttttgagtagccacatcaatagctgcatcagtatggatctgccaggttcctacaatcgggataggaactagatcttgagcctctgaagccacattcccctgttggagattcttgacacgagctaactgaaattcatcccaaaaattacaagcagattgaaaaatatcttgaggccaagccttttatgttgatgaaacactttgtttctatagttccaaatagcccaaacaaaacaaaaaaaatatagcaatctgatgagaatcaaaagtttcaaaagcagcaacaaaaaaagtatctatagaactagacagattattagtataaaaaccaatgaagattgaatttttccag

SEQ ID NO: 156989 - DNA, 654 bp, Cannabis sativa
  modified_base (579)..(595): a, c, t, g, unknown or other
ttaacccctctactgatttaggaaatgttttgtaaaacacttgctttcccattttcaagtagggttgtcttggtctccaccctttatgaagccaacaaacttaagctaatcgggtatccctgacttttatttctgtggatatatgatttaggaaaaatggttagacacagtgcaggtttcaggcatcattcattgcttgggaattgggctgaaatcttactagcgtttatgcatatttttcatctaaaccttatccataaaactctaaagcaatgaaggctttttccaaacctgggaggttggtttcacctgctatgaactttagataatatcttctgaacaagacaaggctaaagtgtatagggtttagattttaaatatatttcgaatatattcgaacaacctaaatttgaattctagtgaagatattttaaaaatattttattttaaaataaaaatatcttaacctacgttccaaatatatgttaaatattttgaatgtttgtttaattatgtattcaaaccttttttgaaacaaacttattatttatttaatttaaattgctatgattaacttgnnnnnnnnnnnnnnnnnctaattttaatcatagtccaattgccaatagataatataaattatttgtaacaggtaaa

SEQ ID NO: 156990 - DNA, 541 bp, Cannabis sativa
  modified_base (376)..(379): a, c, t, g, unknown or other
gttacaaacggatcggcccaagaccaagtaagcaaggtgcctgtctcattgtgggaagacctcatataacttcatcccgttagcgtcagcgaggcccacaaccctgtcaagtcaagaagctaacattcaaatgagcttcgaagaactctttgtaaataacaaccgcgatcgacacaagacatacatcgtcgacctcggaaggaaaaatggccccagctcgctattaagatcactggaaccaagcttttgtcgagacaactccagaaacaataattaaagacgtgtttaagacacgatcattttgacccagtaaaagcagaaaaatcactgctatatgatttttaaatcataaaccacatttacactacgtgatatnnnntcaaatcccatgattttagggatgattattgtaaacatattacagtgaactttgtaattaagtctccaatatgtaattataaatagtgacagacaagatcaaaaaagggacgaaaataaatcatacaagagaggccctgaaaaataatcagaaatctgaata

SEQ ID NO: 156991 - DNA, 680 bp, Cannabis sativa
attaatgggtaagtgtttttttttgtaaaaaacatttgttaaataattgtaaaagtatagcatatttcgataaatctatggggttgttcgtagaatttttgcaaaaatcgcgagatctcttttttcagagtattatgtgttttgtatttttctcgactgaatatcgataagttctcgaagcagatgttccaaggtcagggaaaaagtttctcgaaggtttttcaataggtttttgataagttctcaaacccaatctttatcgatatgatatcgacgatatatcgacagttttattgagtgtctcaattgcctcaatgtcatgacgttatatcgataggatatcgacactttgtcatgatattattattcgaaagatacgtggaggaatacttacgatgataccatcaatcttgctagtgacgaggatgattgggttctcccgaaaaatataaagaacatgaaagttggggtaactgtggagaaaaaaccaacaggtcatccaaggaaaagcaaggctgaaagaagataagagaatcatttcccgtctggtgataaaaaagtcacgatacctcgaaactacagcctctgtggcggttcaggccacaacagagcaacatgcaaagcccgcatttgaggcgtagtctacttattagttttaataacatgttctgtatttgtta

SEQ ID NO: 156992 - DNA, 517 bp, Cannabis sativa
ttatactccttgtggttgtcatagccttaatttgattttgtgtgacatggttgaatcgtgtagtaaagctagagatttttttgaagttattctatacattttttgccaattctactaagatatggcaaattttgaaagataatgtgaaaggattgactccgaaatcattgtcatccactcgttgggagagtcatgtagaaagtgttaaagatataagatctcaaatgtcagattttagagaagctttacttgaagtgtcggaaaaagatgaacttgattctaaaataagaagtgaagcaaaatccttagcaataaatgaacttggtgattttgagtttttaatagcaattattatttggtttaaaatctcatctgcaattaatttggttagtaagcttttacaatcaaaggatatgcttattgatattgctatggaaaaaataaagggataatttcttttttcgtgggatatagagaaacagatttttataacgccttggataatgctaaggaaatt

SEQ ID NO: 156993 - DNA, 635 bp, Cannabis sativa
tatgcctagggccggccctgtttactaatttagtttgtaaatttaaggtcattttagatcttagtccaaatatatttgtatataacatacccacaatctatgaatatcaataacactttattatatgcaaaactcactcttaatccttcaactttaagaaatttctaaagaaagatatactgagaaaacttcaaaaactatggtggcttgtgagtaaggtgaggaaagaagtaaaaatactaagagaaaactatgaatatgatagctgcaacatcgtgagagatcaacaatggtgagaaaaaagagtcataataacataagggcccgtttggtacgcaaaattagattggattagacaagctaatttattaaatccagtatttgggcatgttataagtctcgataactaattcagctaatttcatctatttgggattatttatcccatccaccagggtgggataaataatcacatgcaggtgatattttttaatcattttttattttattaatatattttaaatatttaaataaaaaaattattttatttataaatttttttatctaaaatttactcattaaaattagtgaaaatgtataattttaaattcttatacatacgtttttaaaattta

SEQ ID NO: 156994 - DNA, 536 bp, Cannabis sativa
ctaaacttttttgttgtttgattactttttaattgtttgtgcttcattgtaaagtaatgtatttagtttatgttcaatttttttgatttcgtttgaatttcattgttttgggtatgtttatggttttttgcgaaatttgcgacgtatcgcgactatgttcacgacataacgcgacatcgtctacaatagatgaggattttatgataaccgtcgttgtcacgacgtgttcgcgatacattagcgatatagtcccgatatattgtatttagtactaggttacatgattttatcgacgtgtatgtgtgtttggcgatatgtttgcgattatatgcgatatgattagtgatatataacagtcgtacataggattgttgtttttatcctccttattgtgtttagcgacaaattagcgatatattagcgacatatttatcgatatgatcagaagtaacttaagattacgtttcacgatgtatagcgacatactgcgatatctttcacgacatacttcaaacaaatttgttgacaattttaca

SEQ ID NO: 156995 - DNA, 693 bp, Cannabis sativa
  modified_base (658)..(661): a, c, t, g, unknown or other
gggttcggctgctactgcagcaagaagaaagggagaagaagaagacttggctgccattgaagtgctgctactacaacaagaagaagaggagaaagaggagtgatgtgcgactgctagggttagagaagagaaagaaaaggagctactaggtttttctgctggaaagagagcttttatactgccataaaggcagggttttgagggggaaaggtcaagtttgaccttggttttttttgcactttgtggtgttggtgtaggggcattttgggcatgctttatttcattcaatatctaattaccttatttaaaaaaaaatggtaagatatttttaggcattacatttaacattttaattggatctacctaatttatacattatgttttttccttcttttttaacttttcattgcctatttttttttttcactttcctctttctctctttttttttctgttaatttcaaaaataatttctgatcacactattatttgtttgactctataaaaaaatactgttgtgatgtactcttaatgtaaatattttaatatgagagaatcatatgttttttcactattaaaaaaattatgaaatttggatgttcctgctgaaatctaaaaatgaagctgttgaccgagtttttcggcaactaataaaatnnnntaaagttatagagctgtaagaaaattagagaa

SEQ ID NO: 156996 - DNA, 520 bp, Cannabis sativa
tctggggtcaggtcccgaatctcgggtccgagtttggttctttgttcctaggtccagccccagttcttgggtctgggtctaggtcagggtcccggtcttggtttaggtcacaggtcacaggtcccagtctgggtccaagtctcgttatgggttcaggttgagtttgggtttaggtttgggtccacttacagtcccaggtctgggttctcgtcccagtcctggttcaattctgattctgggtccaagattgggtcaaaatccgggttcgggtatgggtctggcacctggattcaaacactgattatgggtcatgttgaagcctcaagttcagattcggatctcggtcttggatctcagtcttgttctagttcgggtcccaggtaccgggccgagtcctaagtttttgtttgggtccgagtttggggttttgtcctggtagtgaggtcctgggttccaagtctaaggttgggtcctgtgtctcgagtctagggtcaaattttgggtctcagaccccggttct

SEQ ID NO: 156997 - DNA, 772 bp, Cannabis sativa
ttgaatgataaagaaaattaaaaaagaaattaaaactttaaaattaattaaacaatttaacaaaatttatcattatttattaaaaaaccatttagatataaaaaattaactaattaggatttttactccctgaactttgaaatgtagtaaattatgttccctgaactttgaagaccgttaaaaattctccctaaactattgaaattgtttgatttaaggactttgtctaattttagtaagaaaagtctaacatagatgaaagttcatagggcataatttggcaaatgtcaaagttcgaggagcatgatttggtagatattaaattccagagagcatgatttagtacaaaattgaatgaaattggacaacaaaagtccttaaatctaacaatctttagttcagagagaatttttaacagtcaaaaaatttgaggggcatgatttgatatatgtcaaagttcaatgagaaaaaatcttaattagcctaaaaaattatattaaaaattcattttttgtaaaaactaattttgcaagaagaggattgactctattttttatctgaaaatctaaatttttttaagtataatatttcttagtttaatttctaatttttttttaaataattttatttttatagaatttctaattatgtttttcttattttttaagataggagtttgtaaatgtacaaaagtttgattttctcttcacaaaatctttgtgtaatttgatttttaagatatatgtttataaataaaataaattttgaaatt

SEQ ID NO: 156998 - DNA, 591 bp, Cannabis sativa
ggctatgtccaacaccaagagggcagaggtggacttggccaagaaggacgctgatgacgccagggtagaacttggagctgttcgtatggagctggatgaagccaacaataagctttttaccgcccagaggaagttagctgagctgactaaggatcttgaggcttctggccgacttgaagagaccatcgagaccttatctgctgaagtgaacagccttcaagatgaaaggacttctcttcaagtggttcttcgtcgggtggaggaggagaagaactctaaggaggaggagcttacgaccgaggtggcgaggttgaagagaaagttaatgatctagagacaggcggtcttgagctcttctgtgacttttggaaggctaatcctcaggcaaacttcgactacttgggtgatgctaaggacatgtaccacgagttctgtgcttcccaagtggcttatggtgcgaccgaggcgactgcttctatctccggccaaaatgttgatgtaccaagagcctaggactccagctgtttaaacacttctcctttttatcttttttatttttatatatcatattcggccataaggccttttcta

SEQ ID NO: 156999 - DNA, 1033 bp, Cannabis sativa
aatacaacgtaaattgttcatcacattactcactcacattattatgttaaagttattcaaatgcgagaccaaatcagtggttccgtcatatgacgtgacatgcaggtttttgaatcttaaaagaaaaggggtattcattatatctagatgatatggctcaagctccccgtctgagtcgtagttttctcacttgatatctcctgaacttgtcctccagctcgtttatctgcaattggatgggatcctcttgctttggaccaagctgttggcgaaggtcaggtttctttcgattcaagtgcttttgcaaatccggttgggagtaatttctagcagacctcatcttactcattgatcgtgtcctactcatagactttgtctttgagtgactcgcagatttactggttcccatattttctcgatcattagctcgttgagtactttctcctctttgagttgatcgactgtgggttcttgaccatctcgaggtcacacttgcttcttcacgctatgttctttccccctgagagcggtttgtcgtatttcccccattagggtctgtacgagtcctcgctctatgggtttgggaagaatgcttgtgatttttagcaggtgacctatgttctcccagttgagtcccaagatcctcctcattatcattagagatttctcgttcatcagttttcggttatctcccatctggctgttcattctaattttcaagggtacctcattttccctgggttgttcttcccgggcattttcctgtctcctggtttgtgagccatgagaactgcctcgtggtcttctcactccaggttgaggttgattttgagcattcgtcccctatgcccccctagtcgaggatgttcttcccaggctctaactcagcatttcgacgatgtgcctcttccagatggcgtcttaggcggtgattttccgtttcataagtaccttctcccatagactgggcacctccacgattgagctcttcattcctcgtcccggggttctggccactcccacgctgagttct

SEQ ID NO: 157000 - DNA, 674 bp, Cannabis sativa
  modified_base (403)..(406): a, c, t, g, unknown or other
  modified_base (549)..(562): a, c, t, g, unknown or other
aaaataaatattattcatttaaaatattgatatttaggtttaaatgataaaaataatattttattttaattttagggtttgaaaattgggaaaaataaaaattgagaaaaaaatcccacaaaattcgggttgggtgaggtggttgcccaggaggctgcacacaccccaggacgcacggggaagtgagggacagcagggtgcttgggcagcattcttcgatgcctgcagggtgggacgggcgaacgtgcaaggtgctgggcttagtgaccgaggcttcagacaattcctgtctgaaggacgcgcgcggatggggctccttgtcctagtgcctggtgcactcgatgcacctactcgacaccccattcaacctgaaacttctaaaattcataactttctcaatttnnnncggaatcgagttccgtaaaaacaaaaattgcttaatttttcacaaggaatccaaataatatattttcaaaaagaaaaaaaatatatatttattttatggaaaaatttcgtacaacacatacattcatcaaataagcacataannnnnnnnnnnnnnatccaaatcaacacaaacatcattttaatcaatatttcataaaagtaaatcattaccatggctatgaggccagttgttgagaatattttatcaagatctagatttactaaca

SEQ ID NO: 157001 - DNA, 641 bp, Cannabis sativa
accatcactcatctctccaccagccattcttccacctccgttcaaccacgtcggacccagcagctgaccacgaagccaacccaaccttcgaaccaccaacccaaccaacacccgcaccattccagcgataatcaccaccattcattcacaccaccatcttcatcactacaccttcctcacgattcagcaacattcagttcaccatcttcaacccgcaccagcatcagaatccaaatcaccataacctccatttcatctgaacccgtaaccacctccattcgacaatcaccaactcgacccactaccagcaaacctcactcaaagcacacgacccgagtaaccttcatgcatcagactcaccaccacattcagcaaccgaacaccacattgaacacgaacgaactccctggtttgtcaagattgatgtttttaatttttaatttgtatttgaacaatttcttggctgccgagtgattatttgtggatgtttgttttggataaaattgaatttagatttgctgaaatagttcaattggtggtgtagtgctttgatttggaagtgatattttgaaatggtgtagttaaaaattgggtttagtgcagcttggaaagtgtgataattttggaagagtaatggttgt

SEQ ID NO: 157002 - DNA, 577 bp, Cannabis sativa
  modified_base (46)..(51): a, c, t, g, unknown or other
tgtattaattattacgaccaaattttttaatacaatgtatgttgtnnnnnntaatacataacaaatggtccgtattagtttgtattataatatttacaaagaatttcgggtcaacactaatctctgactagaatccggacttggaacccgaactcgggacccgaacctggacccggacacagaccagacccgggctctagacctacaccccgaactcaaagtcggactcggacccgagactcgggacccagacccaggacttgggactcgtgacccgaatccggacccaagacctagagctggaccgggaccgagaccgggacccaaaccccgacctgaggcccggacccagacccgaactcgaaccccgacccaaacctgaacccgaacctggacccggaccccgacccgaactcggacccggaccccgacccggactccgaccctgaacctaacccgaatccggacctaggacccacgtagtcggtgttagggtcgagtgtattgaaaatatattataactttacacgatcaattaatacaagtcaataccaaacattgtattgtattaaataat

SEQ ID NO: 157003 - DNA, 666 bp, Cannabis sativa
acccgtccacatgtagcttccaaagtgctctctcctttactcgtacattcaaccaaaaaaccgctaaggcctaacctttaatcgctgttcgaggctgaaagataatctcatactagcccaactccactgcccatttgagcaaccgtccagaggtgtctgatttttgcaatacttggcgttatggttggtcagtgtatacccgaacaggatgggcttgaaagtagggccttagttttctcgttgctaggattaggcaataagtgagcttctctatcaatgggtaccgacccactgcttcgatgagtcttttgctgatgtaataaaccgggtgttggatattgttctcttctctgatcagtacgacacttacagcatgttctgtgacagcgaggtatattcctaattcttcttcgtccagaggttttaagagcacatgaggttttgtgagctgtgtttttagctcttgaaaggctttttcgcattcctccgtccattcaaattgcttatttcctcacaggatgttgaagaatgggacacacttgtctattgactttgaaacaaatttgctaagtgcggatatctgaccagtcaaactttgaacttcctcggtttttgttggcgatttcatatccaggagggcttgaattttctctggattggcttcaa

SEQ ID NO: 157004 - DNA, 535 bp, Cannabis sativa
  modified_base (486)..(494): a, c, t, g, unknown or other
aataagctcaacttgaaatttagaaaccgattataatactaaaacaacacatgaaacacaaaacatgttaaaaaaactaacaaaagaaaccggttaaaagatagtataaaaattaaataacataatataaacatttgaaaactgatttcttaaagaaaaaaataagttataaataatataaaaactaaattacatcaattaaacatttataaacacatttctttaagaaaaaaaaagttataaatagtataataactaaattacatacaataaacatttaaaaacaaatttctgtaataaaaataaccagttaaaatacaaaaacaataaacagaaccagttaagaaactcaccttcttcttcttagcatgagatttctttacctcttgtttcttagatgtatcaactagaacttcgctgccagttcgagaatcagcaccaacaaacgtaatattaccaggctcaatgtaacaccctaactaacannnnnnnnntacgtgatttttaaacatgctgtgtaaagcccgcttagtta

SEQ ID NO: 157005 - DNA, 551 bp, Cannabis sativa
  modified_base (40)..(85): a, c, t, g, unknown or other
taaactttatatgtgtttattattgttttagaagttcatnnnnnnnnnnnnnnnnnnnnnnnnnnnnnnnnnnnnnnnnnnnnnngtaaaataaattccaacattgtctcccctagaacttaaggagttgaagaggcagctaacggagatgttggaggtaggattcatcaagccatcaaaggcaccatttggtgcccccatgttgttctagaagaagaaggacgagaccttaagactatgcatagactaccgcgccctcaacaaagtgtctgtgcgcaaccaataccccattcccttgatcgctgatttgtttgacctgctaagtggggcgaaatacttcacgaagttggacttaagatcaggctactaccaggttcaaatcgctgaagaggatgaaccaaagacaacttgtgttactcggtatggggcatttgagtttgcatcatgtcgtttgggttgacaaatgtgcagccacattctgtacactcatgaatgaagtcttccatgaagacttagataagttcgtggtggtgtacctggatgatatcgtg

SEQ ID NO: 157006 - DNA, 534 bp, Cannabis sativa
ctaaaatataatatatcaactaattatcaaaagaaaacataccaataatagtatatgcacttgtcatgattatgtactcaatcccaacaattagaacctaataatattaatatcaaaagatcagaatcaaccatcaaaagaaagtatatgagcaattgaaaaaactaaaagcaaagaatgaagaaaagaaacatatgaaatgaataccaaaaaaaaaaaggaaataaagaaagaggaggaaacttggaaaagaaagccattgaaatcgttggtattgcttagattacaaaaaaagtcagcaacctttgatgtcagatagaagaaagctaacgttcacgtccaagggcaaattataggcaaatttgatattattgatcacttcccatcgttatgtttagaggcatattattgtggtatctttctgtactcaataaaaggctaaaggccggaggatatatgattttccaccaataaatgtaccactttaactcttgtacaatgtaagtatactactgtctgcaccaatatatacat

SEQ ID NO: 157007 - DNA, 508 bp, Cannabis sativa
  modified_base (468)..(470): a, c, t, g, unknown or other
ttctttaatatgtctttatttttgttacatttcattattcgaattggtttttaattgttattatattgtgagaattggtttcttttggttgtagttgttgtagtcagaaccaattttgttatttatggttgttatttttttttttggaactgattctgtttattagtttggctatttttaagtagttgtatattatatttttgttttattataaccgattttgttcctattttttataaacgattttgttcttattttttataactgatttcgtattattgttatacataagaatgcataattattttaagtttgtttataaggatgtgcttaattttttatttcatttgttaatttaaccggttttgttttattgatattttcggaacatttcaatatattcgtatttatatattaaaattttaaaatctgatttcaattcaattttcagatgatatatatatattnnnatcgtaggttaattaatcattatgatcatatataattt

SEQ ID NO: 157008 - DNA, 723 bp, Cannabis sativa
acaaagacaaaccatctaaggaaggccctcttcttcgccctgggacaaggaacaaaggaccctcgtcttcgccccaaacgccttcggtctccgtcccgttcgatgctccattgttggcttcttcgtcccgaacgccctcggtctccgtcccaatcgtctcacatggctccctcgcctccctctctacctatctctgatttgtgcaggtggatgggctccgacgtcttctgcgacgatctccgcttcctatctccgtttattgtagattgaagcttaatgtcgacactcttctctatttctcctctctattggctctttattttttatgcagattgatgacgatggtggttgttcgaggttggcgattgttgatatttagagtgcatggctgtatatgattattagctggctcatcaccgtggatggccatgaatttttgagttttgataatttttgttatacttttcttggtttgtagtcatttgatgagtagtatgtattttctgggtttatagtactctttatcattatattgtatgcatttattattattattattttatgatttgtagtctttattattattctatatgtattttgtggtttgcagtaaaaatatgtatattttaaattaatattattatttttggtttaattataataattgtataatttataaattttatttagttaattaaaattattattgttataattaatata

SEQ ID NO: 157009 - DNA, 584 bp, Cannabis sativa
ccataacataattggtcacttaattttgtatcacactttataatagcatatacattatacatatgtgcccacaataggatttttaatccaacaataatcccactaacactatttttttttaagtttacttttcctcctatttaaaaaaaaaaaattacagcccctcactttaaattctgagtctgccattattaataataagttaacttattgttaaaaaacaattataaatattaaaaaataataataataacaaaccattaataataataataataataataagtaatttaatttgtacagaaaactaatatacataacactaaaaaagaatgatgtgcctatcatttaataaaaatgttcataatcttccttttaggaaaaattatgaaattaattattaaatataaatttctaacacactttttcaaaaaaaaaaaaaaaatcttacactcaaatttatactttcttatacaattaatatccaaacaaattataaaaattgtttatatatacagttttcagttattataaaaggcttcaaataatgaaatcatgtagaaaatgtatattttactatatta

SEQ ID NO: 157010 - DNA, 659 bp, Cannabis sativa
ttattggataaatttatagtggatttaggagtattttgatacatcctttatctatttcggtatctaagagaattttttaatttaattttcttcatgatcgtatacgttgtaactatttaagttcaactgtaaatttttagaaaattttaaataattttactaaaaataagaattgaatatttccttgcacttctatttttcttatatgtatagtaaatagctatttaagttttattttcaatactgtaaattatttaaaaaaaattaaatatatagtcttaaataactacaacacatgcgattataaaaaatagattaagaaaccctcttgaatgttaaaacaagtaaaagatctactcgaaggactattcaaaaatatttactacaaaaatttatgatactattaaccagatttttttaaatatatttatttgataaaaaaatttcgacaagcaaatttagtaccgtatatttttaataatattcatacatatttagtaccacaaaattaaatttctcagtttagagtactaaatcaacaatttcaaatttagtgcctctgtcggttgctggttgctttgagaggttgcggctgggattgggctgagagagacgaagagagaggaagatagagggtttcaaatgagaggggtagttta

SEQ ID NO: 157011 - DNA, 638 bp, Cannabis sativa
agtacacatgcattgagaagaagaaaattagtatcaaaaaaaaaaaaagaaagcaaaagtaaagaatatgcgtcagtgtaataagaaataaaacatatgcatttttatagatatatacgtattacaataaaattaattgaagaaacggtatatgtgcaaattaattgaataacaatattgtagcaattaatttcaaattttagttgttagatgtaattttttctaataaaaagctatttgttcaaatatataaataataaatgaagactatttttgtaatttaactattaatggccgaatgagaactattcttctttttatagtaattatagactagcgtcaataatttttaggctttacatattaaattactattttaacattttattttatttttcaattaatttttttttttgttgaatataaattacattatattttgatatttctttttgttttcaattaattcttattgataattatatattagccaataatcatccaacaaatcaatatataaataagagatattggcagctaaataacctgaactttacggtttgtaacacttaaccacaaaaatcgaatttttggcagctaaactacctaaatcctggttccgttttgctctgcacacc

SEQ ID NO: 157012 - DNA, 594 bp, Cannabis sativa
  modified_base (26)..(32): a, c, t, g, unknown or other
attagcaaagattgcactataattgnnnnnnnactgtagcgtgccttagcattagggcgttacacccctgttccatggaacttctctaatttgaatctcgccattgatgacattcaagtttcttcaagattgcaccgaaaagaatcttgattctacgttctctctgatttgtggaaaattacgattaaatgtgcaaaatcaaattaatgaaactctaaacaatcaaatgattgataatgacaagattattaaactgagaataataatcaacagtagaacaggggcaaatagagtattaaaaccaaaaaaatactaattgctgaaaataaagaaatcaacatcaagatatagactggttcaagttcgatagatcaatgtgatctatggctctactccagttctggaacaccaccgtaatccttctttattgacagtcgacacgagattctttgttgagtcctcacaaagtgtatcaactctcacaaaaaccacacccaatctctctcttttctctgcacttctctctctacctctcaatctttttctctctcaaactctcaatctcatctgaacagaattctccaactcatgtat

SEQ ID NO: 157013 - DNA, 743 bp, Cannabis sativa
cgtttctgtagaagtagtgaacagtttctccacgcaggaccctaagaaacggtggaccgtttggggatctggttcactaattagagtgttttttaggttcctcagtttttgtgttttcttgatatatagggtatttccactctatttagcgatagggaaacttctggttttaagtttaagtccttagtattgagttagcaagtcgctaacctgttttgcattaggacctcagaatcattgagcaatatttccactcggattggttggcagacctgataacagaagtaaggtaagattagtataaatgatgcacatatgtatacatgcatgttttatgaatttttaagctagtcctatcgacactagtatgttagaggtactaagtgcatatggtatagtgactcaagttagtcgtgccaacactagtacattagaggtactgagtacatgtggtatagtgactcaagttattcctaccaacactagtacgttaggggcccgtttggtacgcaggagtggattggattagacaggctaatttttctaatccagtgtttaggcatggtagataactaatctagctaacctcatctggttgagattatttatcccatccatcagggtgggataaataatcacatgcaagagagattttttttttatcgtttttttaattttgattttattaataaattttaaatttaataagaatttaaagaaaataattatcacacatttattta

SEQ ID NO: 157014 - DNA, 689 bp, Cannabis sativa
attatatttgattaaaagtgatttttgaggaaaagggattaattttctgggttttcctctttctcacccgaaccctctccctctcttactatctcaaattttgcaacttggaattgggaaaaagcttgagattttgagcttgaaacttggattattgcttgtgttggctttagatttggaagtgaggtagtttctatgatcctaatcttgtttttagatttgttttaattaaattcttgctaaaattgtagagtaaaaagcatgtgtttgagtttggattttcttcttgcatgtgtgatgaaaaaaatgctaaccttatgggattaagcttctatttattgtttgaattgttgttgagcttgggctgagattttatggtattcttaggttgtaatttcatgtgtaaagtaatgttttaatggctggaaactgtttgaatagttgaagagaaagctcatgttcttgagcttgagatttgcttagtttaggcatgatttttgttgtgattctcaatctgaaattgtggtgtttttatgaggttttggatacctaaagcatgatatttaagcaccttataattgctagttatcccaattgttaatttgtatgcttggttgagaaattggtgtgaaagattgagtttagaagctgaaaattcgaagaaggggctgctggtttctgggttctgc

SEQ ID NO: 157015 - DNA, 559 bp, Cannabis sativa
aaaatcttaaaaaaattcgaaaataactacatattgtcaatacattttcattatttatttatatataaattaacaagcccctcgattgaaaaaaaaagatactttttgaagatattttttcttatatttaaatcttgtaaatatatatatatatatattttttttcttatatttctttttgtgttttatttttgaacgtcttttttgttttatttttttttttttattgtttttttgaaagatacaagacaataaatagggtaaaaccaagttacaaagatttagtgaggatttaaaacacaattgtttcaaagttactcttcatcaattcctaatgcttgttgagcaaggctgtgagctgaaacatttaagcttctagggatgaaacagattgttacaccaagaaagtgtgataaagagaggagctcctatgcttgttgagaatctttgagatgagcacttgacagtctgaagcaacattttcaattagaaatttgactgcctggcactagattaaagctcttaaaagggcctctgcttctgcataaatgggaggtag

SEQ ID NO: 157016 - DNA, 534 bp, Cannabis sativa
catgaatgaaagttcaaaggtcatgatttaatacatatcaaagcttgaggggcatgatttggtagatatcaaagtctgggaggatggttttatacataaacattcactgaaaaaataaaattaaatgaaattagacaaaaatctttagatttaacaatccaatatgaataatagttatgatttaaattattattagtattagtcttttttttaaaaaatacatatataattttttttaaaaaaaaatagtaagtaataaattggatatgtgaaatgggaaggtattgtcaaatcaaaagcatggtatatattattggagaatttgataaacaaattaaagatccttatgataaggtattataatatatattatataactagctagagagggatcatgcatgacttgcaattgtcttatgtatttgacatgtcgggaataaatgatgggaaattggccctacaaaaatcattcaatatcttttccaaaaataactaataataataattaaatttatttaataattttatataatt

SEQ ID NO: 157017 - DNA, 539 bp, Cannabis sativa
acacctacagcagagaagaagctagtcaacaactttgtggactcattgacagaaaatgtaaaatctctttaaactttaagttgcattacagtttcataatagttgtttttcaatttcctgtatagattgacaattgattaaattgacctaatttgtaggtaaagccaataaacgagagcatgttcgaagtggtagaactaacaagatcatgggcaatcaatctaaaggagaaaacatgcagttgcaaccgattccaaattgatgaattaccgtgtgctcatgcgcttgctgtgataaaagagatgaacttgaatgtatacaactactgttcaagttattacacgacaagaacatggcttgaaacatacaacggctcaacatattcggtacacaatcacagaacatgggatgtaccacagaacataaaagatatccttgttctgccaccaaaccaaaaaataagatctggacgaccaaggaaaataagatttatagctgaatgggatacaaaaaaatagaacaggtgcagcaaatgtggt

SEQ ID NO: 157018 - DNA, 703 bp, Cannabis sativa
aaattagagttaaatgatgctaggattagggaacatttagtgagagcctatcaggaagataatgctagttgccacaggcatttcttgcaagaaatcatcgaaggcaaacgccgtttcttgcaagatgcagcttggccagaacctcctagtgtgtcctttattcctttggctaagcctttttttttacccaaagtcatgattgcttttgaaccaggtgacttggactttgaaataatgtctcccaagccacgtacatcaaagactccccaggatcctagcgtcacctttgaagctgagttaatagaatcgaaggtgcgatctatctcaggctacacaggtgatatattgaggacctgtggaatcaaacttgggcgagcatgccaagttaggtcagtgcaagagggtgagtttagttgttaccccgctgcgcgtcttttaggcgataccctaggagccagtggtgagaccaaataccagtggctcaactggcatgggcgcctggagcattgaacatatcagtgtgggggccatactccctcttcgtgactacttcaaggattacataaaccaccttggggttgccccattccagctgactcctatatcttacagagttctcgctagtttgaaggtcttgtataaaattctaaagtgggagtgccctacaccagtagaaatcgagtatctctactcggttaaggct

SEQ ID NO: 157019 - DNA, 621 bp, Cannabis sativa
  modified_base (87)..(87): a, c, t, g, unknown or other
  modified_base (356)..(356): a, c, t, g, unknown or other
aatgtcagttttatctatccccagaaggacgtaggtagagctgagtagctcagcatggacctaactatttccaaaagcgtgcgattncttctttctgcaactccattttgatgtggagtgctaggggcagtcaattaggattcaattccaagttcacttaaatgatctttgaactgcatatccatatattctctatcactatcagttcacaagatctttaaagttttaccctattggttttgagccaatgctaaaaattcttgaaacttctcaaacgttttagattttttatgcataaggtaaatatgaccatatctagagtaatcgtcgatgaaagtgacaaagtactcatgacnacctctagctttgacattcagtggtccagaaagatctgaatgcactatgcctagtggttccttggcacgctctccctttgcagagaaagaatattttgtcattttttcatctaggcaagattcacaaactagtaattcacataaggtgacatttttcaaggaccacctctggttaacctgtgaagtctatcatagcctatatgaccaagacgtaagtgccatagatatgtttcatctttattatcgatcttttactttttgtggt

SEQ ID NO: 157020 - DNA, 654 bp, Cannabis sativa
ttagatcatccttgagattatgagctattcctagtctattaaatacaaatgcaccagattatctcagtgactagttggtttggctgagcacttggccagaatcgctagtccgggaggagttattaggtataaacccttcaaaaaatttccagataaggtgttgccgcctaccgcttggcccacaggtggaacctatgaccggggatttgacggctgaccattcagagtttgggaagtgttcccagcaggatcttcatctgaaccgcccaatgggatgctagacacgggttactaattagtaacttagtaggctcttcgcatcagtacgatagcctgtctttttcggtcgtcgatggctgtttgttgagccctcaacgtttccatttctttatctcttcattcatcaaacaaacacctttgctcttcgaacgcaaggttcactatagcacagagctcttcctgttcatgatgtagagtattagaatggccttgcatgagtccaagagcattacggagattctcggtgtcgtctttaacggttgttcgcacatttgttgctggcggaaccctaatactaggaatacctagattggctgctgaactggtatttcaagtttcttgcacaccggctgtgattccagccaaaggagacgt

SEQ ID NO: 157021 - DNA, 525 bp, Cannabis sativa
  modified_base (280)..(302): a, c, t, g, unknown or other
  modified_base (349)..(355): a, c, t, g, unknown or other
agaagaaaagagagagagaggggtcggctatagaaggatagtgaggtgctcaattttctgaaggaaatctcttgaaaaactgaaaaactcttattatttggtgagccatcactatctatttataggtacccactaggtttaggatagtaattatttggcattaaaataatgaaaatattaattggaaaaaaactatccaagtggccggccatggtgttaatgggcctcacttggaattttgtaattttaacaattttaatttctattttctcaaaaacgnnnnnnnnnnnnnnnnnnnnnnntaaatgccaaaactaattatttataactaaaataaattattaaatannnnnnncatttaacataattattaattaaacatatagagtctcttaattaataagtagatcctagaatctctttttttcacaattttgcctgtgtttagtgaaaattcataaactagacatagtctaattctagaattataattgattaataataatcaattatctgagtcttaca

SEQ ID NO: 157022 - DNA, 537 bp, Cannabis sativa
tacacgaatatgaaaaaaattagcataaaaaatttttatggatgccgaaacaaaatacatcccttttaaagaggtgcaatgtggaatcaccctaaattatatacaaattatgacaatcacatatgtgacaagtgatttttaacatgtgggactcatcttaaataaatatgattggttgaaattattgaatgtgaattgcatgtggatatagttaattttataagattggtattataatatgattttacgaagaggagacacaagcgcctgtagctcagtggatagagcgtctgtttcctaagcagaaggtcataggttcgacccctatctggcgcgtttttctttttttatttatttatttattttttttttcctttaacctatctctagtagctggaaaaatataggaaaaaaagtactcgaaaagtaggaatgaagatcctctcttaaagttaaactaaccgaactttgacatgtattaaatcatgcttctaaatttttttggccgttaaaaatttcctctgaactattgagatt

SEQ ID NO: 157023 - DNA, 509 bp, Cannabis sativa
tttgtcttttcccttctctaactcagctagagaattttccatcctcttatgcggctccgccatagcgaagaactcgaccaacaatttaggtcttcgagcttgcagttccttccagaaatcggttcttgccaggacatttgttatcaatatacatactagcgaagactcgggagccttctttacttttgtcacctcagcattacaatgtttaaaatattcttgtaaagactcaccaggttcttgtttgatattagccagagtggtatagggtggcctataggtcatcatgccttgaaaatgcgtgaggaacaggtcgacaaaggtcacccatgttgcgatagatgcctcaagcaattggctgaaccaatcgtgggcattttcttccaacgttgctgtaagaatgcgacactttgcaagttggggtacctgatccacttccataatagtattaaatttttctaaaaagtctatgggattagtggtacctttatattttagggattcggata

SEQ ID NO: 157024 - DNA, 732 bp, Cannabis sativa
  modified_base (438)..(438): a, c, t, g, unknown or other
tgacaccacgcaaaaacatccgtgacagcccttagtgtctttattattttttctttttcctccggctctagactttttcctagccggaggaccttggtggggtcaaggtcacataccgacacttcctcgacatcttccatgggttctacaattttttcggattccacacggggatccaactcgtcttcttctgccattcctggctcaattacttcatggaccattaaaacgggtaagtgggcaacaacgttgtaacactgcctggcttccccctggttccctcttacggttcctatcccagcctcctgagtagggaatttcagacacaagtgcctaatcgatgtgattgcaccgaaatccaccagggccggccggccgaggattgcattgtaagccagttgggcagtccaccaccacaaatgtgcaatacttgaaagngctttggggtgtgtctgggcacaaggtgactgggagcctcacttttcccattagaataagtgttgttccattaaaccctgtgagctgggaaccgcttggtgaaagatcccggtccgtgaggcctattaccgtgaaggcttctttgactaataaattcacagaactcccgttgtcaattaagattatagccacaatcttgttggcaacgggggtctctatgaccagggggtcatgatgagggaagcgcactgtcttagcgtcctcttctgtgaacgtaatgggctgatccattag

SEQ ID NO: 157025 - DNA, 600 bp, Cannabis sativa
  modified_base (57)..(58): a, c, t, g, unknown or other
  modified_base (343)..(356): a, c, t, g, unknown or other
  modified_base (460)..(464): a, c, t, g, unknown or other
  modified_base (558)..(560): a, c, t, g, unknown or other
aactatttaataactaaaaatttaatgtctctttccactaagatctctaacccttgnntcctttctgtcgtagagtatcaccaagatctcagcctgaacgtccttctctggaatctggattcttcacaatcttccacactatcattgaggtaccacttgatgtgtgtgggtactcactctatcactcaagggttcggtttcagtagtgaagaagaggacgagagggtggtggctaggttaaggaggaaggcactcagttttctctgaaggaataagatgcatcatcttttttcctgaagccatcactacgtatttatagtcaaccacctaggtttaggttagnnnnnnnnnnnnnnaaaataatgaaaaaaaataaatgacaaaatatgaacatagtggccgaccatgataggataatgggccccactttgcaattttaccattttgtcatttttccatnnnnntttctcaaaaacaccaattttcaaatttaaccaatagatgccaattccaactatttaataactaaaaatttaatgtctccttccactcatatcnnnaacccttgtatcctttttgtcacagagtatcaccaagatc

SEQ ID NO: 157026 - DNA, 525 bp, Cannabis sativa
agggctgctaaaccagcagccagcacccttttcctgaacctagtacatttagccttcctcaccttcttcatgagactttgaagggatgtctcccttgtattccagccgaaccaacacaagacctgtgtaagagaagcagtagcaaaaacacagcaaaagaatagatggtctgttgtctcaacagctgcattgcatagtatgcaattatcagtttcaatcactccatgtttgtatagcctatctttggtcttgagcctattcatcatagctaaccatagcacaaaactatatttcggtgtattcaatctagaccacacttcattacaccaagataccttttcgaactcttgagcaaaccatgcttgaccctccccgatttgatattcatgtgccgagaagtcactttgttgagcataatttctgattttgtctttaagctcaaccattttcctccaataccaacttgcattcaaaggtactttgtaatcccaccacgattcctgtttgatatacacactatgaatc

SEQ ID NO: 157027 - DNA, 854 bp, Cannabis sativa
tctgggagagtctacatcgagctatgggtactcagttaaagttcagcacggcatttcatcctcagacggatgggcaatccgagaggactctatagatattagaagacatgctacgggcatgtgtgcttgactttgagaaatcatgggtaaagtaccttcccctgatcgagttctcttataataacagctatcacgcaacaatcgggatggccccttatgagcttttatatggaagaaagtgtagatcgcccattcactgggatgaagtgggtgaaagaaagttcttgggtcccgaggctgttcagagaacaagtgaggtggttgacaagattagagcacgaatgctcgcggctcagagtagacagaaaagttatgctgatccaaagcatcgggatattgattttcaaattggggacaaggtgtttcttcgaatatcaccgatgaaaggcattaaacgctttggtaagaaagggaagcttagctcgaggttcattggaccttttgagatcctcgagaggatagggcaagtggcggacaggttggctatgcccccaacgctggcagctttacatgatgtgttccatgtttcaatgcttcaaaaatatgtctcagactggtcccatactctgagttatgaggcattggaacttcagctagatttgtcatatgaggaacaaccagtgcaaatacttgatagaagagaaatagtcttgagaagcaagacggttgcactggtgaatgtattgtggagaagctgtaaagtggaagaggcaacctgggaactcgagatggatatgcagcagaaatatccggagttgttcaggtaaatttcgggatgaaatttctataaggag

SEQ ID NO: 157028 - DNA, 606 bp, Cannabis sativa
  modified_base (442)..(446): a, c, t, g, unknown or other
gatgaactatcatatattgtttttcttttagaaaaagatgtggaggaatataatctctagatcaatttgcgtcgaaactattttatgttttaatttttatgcacttaactctcttatttttttttttttaatggcaaaaaccgcacgaacgattgttatattatctagtctattattaaaggtaaaaaaaaaataactatcatagttacattcaattttgaaaccattaaatagtcactcaggggacataattaacctataaaaatatataaaaaaaaaaaccatctagtaagttaacaatctatttatatatccatataaagaagaagtatgaggcggtaatatgtcattctaaaattactctaaaactatttttctcttctctccttaattctctcaattttaatattttattaatgcataaatctacaaattgatattnnnnnattattttaataatttttctataaaaaaaacataaatctacaaattgatattttattattattttaattttctataaaaaaaaaactatatatttatgttgaccgaggttttcggcaaccaataaaataataagagattaaagagctgtaagaaattaag

SEQ ID NO: 157029 - DNA, 1165 bp, Cannabis sativa
ctttttgtcaatgttttacctgtttataatgacggttttatgttttgtctcatttttttgtatttcttttatgtattttttgttgatgttgtttttgtgttgttctttagttatttttcggttttgtttctactattaaacagtttatagcattattagttttttagtaacttatagccttgttatgaacatttatttaactgtttgttttcagttgtttttaggttgtttaatttaatttcttagttgacaattactattttaaattcattttctgcatattgttgttaatatattgctttgacgttattcatcttttaggatgagcatattggagttgttttttaaatgttgttttttagttttttcctggttgcttatttttttttttttttgccttttagttgttgcttgcaatgtatttgtttagttgttcaaatttggtgcttatgttttttattttgtttttccctctttcaggtccatgctaagagctcagagaagtttgaagactttgacttgcccaaaacaaatccttctaagatgtctttttttgtgtttttttaacagtacatttctgtttttcccttttctattgtttcatgtcgtttgtcagtgatgataatcatttctgtgttgtcgacttcttcttcttcttcctggttgttttcaagttgctgtaccatttctgcagccacaagctttgcgtagtcggtgaagtcaaaatattcatctactgctgtagttttttctctgttgttttctggttgatgtatggttgattctgatgtcacggtccctgtttctagaaaaaatgtatcatcttgaactgatccaattgtgtacgcagatagttgttgcttggaagttgttgcggggttgtttccaggttgctgcaaatctatctgtgctgagttgttgtcatatgatgccatcatcatattgttgcataccattgtttggttaggtgttgctgtgttgctgattttgttaacacacaatgggtaccttgtgaaatcaacctctttgcttaatagctttatgtagaacagtagacttttgtcatccttgatctgtagtggttggcctccttctttcagttgatatttcagtcgtatttgtgttgttccagggttgcattggagttcttccatcattattctca

SEQ ID NO: 157030 - DNA, 513 bp, Cannabis sativa
gccacagggaggcggaaacaagccatgctgtaagtagggatggcttggatgaccgatttaagaagggtctccttgccccctttagagaagactttatttcgccaattgtggagatggccccagactttatcatgaagatagtggaacagttgtttcttcgttcggccaatgtgttgaggaagacccaggtatttctcaaaagaaaggcgcacaggaatcctcaaaaaatcagaaatcaaggtttggtctcgcaactccacattaggagaaaaatacaaggaagatttttggaagttaactttttgcccagtggccctttcataaacttcgagtacctctttgatggcgttgcaagagttgatagaagcctgacagaaaaggaaactgtcatccgcaaaaagcaggtgagaaatggccggggccctcctggcgactttaatgccagggagggagttatctctttctttctggcgcaggagagaggagaagccttctgcacagaggagaaagaga

SEQ ID NO: 157031 - DNA, 522 bp, Cannabis sativa
  modified_base (298)..(298): a, c, t, g, unknown or other
aaatttatgtcgcttacaaactcaaactagtacaaatatatcattaaaatttagttaccctatacttaccctatattttataaaattttgctatttccactttacttatatcattttgagaggtctattatacaatactatattatttaaaaaataaacaaaatgttaataattttataatatagtataaattaaactaatttataatcttaaaatttttattatttattattttatattaaataaaatgacaatttatatttggaattatttcacaaatacacaaaaacaacaaaanaaattacaaaaatacggttttacgaaattttaaatatttttacgattttttttttattttatttatagaaaatacggtctttttatgttgttatcttgttaatttgttgttgattttttgttatatatatgttatcttctgttattatttttatgttatttaaatgttacttttatgtagttttcttgttgttttcaagttatttttatagaaaactgtaaaaa

SEQ ID NO: 157032 - DNA, 1361 bp, Cannabis sativa
ttgagtaccgtcgagcttgattttatcgttgagattgttgatgtagatggtcacgttgtgaggagcatcagttcctatgttgtttctgccatttttcttcttcttcttgctccgtggctaaaattctagtttcgagaactatctgagatttagagactcgactccctctgcaatcaaagggggccttagcttactacaaggaagggtccaaggtttatgccaaattttgtcaaattaaaccgcttgaggtcgtggagacaccgaatgactgtggaggcaactttggatgatggtgatggtggtctgtggaggcggattgggtgaagaggaaagagaggaagaagaggggcggaaggaagaagaagatgaaatagggtttgggtttggttagggtttcttatttttcttttatacccaaagttaaatttatttaccaaaatatttaaattaaatctgattattttattttctcaaaaaaaatctgattattttattaattatacctaatttaattttacccccaattaattattttagaaaaattctttaaaatatatatacttttcagaaaaaatttatttacaccccaaaaacaaaactttaaaaggcatctcattttaacaatttttattttatataaaatatttatatttttatactatgttttttaacttttttcttccaatttatattcttaaaaaatatacttaacaaacaaaaataaattatattttaaatattaagacaaaaaaattaaaatattttttctctttcacaataattttttttaataaatttcataataattttttaaatacaactaatttataaaactatcttctaattgaaaatatataaaatccaaacttctcaattttataaatttattaagtaatttttttattttttaaatctaaaattttttcttgtattttatttaattaaatacatatttattttattaagtaaaaaagagtacaattttttttaaatctgaaactctttttttattaaatacaaattttttctattaagcaaaaaaaaaacatttatatactaaaacaaatatggaatactaagtattcccaacagttataaactgttggcatttattgttccttttttaaaaatccatttagttttgcccacggttctccactgttggcatttatttttcccaacggtttctttgtttcggttctaagccgttgaagaaaaatctcctcttatttttccaacagttaattttcataattgacccccttattaaccgttgggaaaaaccaactttgtagtagtggacgtctttcagtgagacttatagtcttgacgagtcggaagctgttcacattcgaatgatg

SEQ ID NO: 157033 - DNA, 522 bp, Cannabis sativa
  modified_base (463)..(491): a, c, t, g, unknown or other
tttggggttttgaaaaaaaaagtatagtttttttatggtttaagtttttggtataataataaatttttttaattatttaagcatataaaatcaaaattcccattgttaattgagttgagttgctgcataggttgcgattaggacatttactgtaaagcattgtatatttgtagtttataccaattttaccgtacaaatcgaaaaaaaaatactttaaaatgtataaatgaacaacgtctcatatttttttgatatttgtagattatatatattgctttgaaaaaagatgagacacaaatttacgtagtttagcaaattgtatttgcctacgtctacggtagcaaggagtcagtattgcatttttattactgtgaaagattacaaagatcaagagcaattagtatctatttttgtacaagatgatcaattttgggcacgtgtgattgttggaaattattttacnnnnnnnnnnnnnnnnnnnnnnnnnnnnnttattaacatcctaaataagaactttctaaa

SEQ ID NO: 157034 - DNA, 1139 bp, Cannabis sativa
  modified_base (808)..(810): a, c, t, g, unknown or other
  modified_base (940)..(944): a, c, t, g, unknown or other
  modified_base (1078)..(1091): a, c, t, g, unknown or other
tcttattctgacttgagccaccggttgcagtggatgctttccttttctggtccatggccgaaccactacctcccctgctatagcctggtgcaggagggtaaggagccctgccaaccactagagtcctagctgacttagtcatgcaccccattgcgccctcagctcgcagtgctttttccaccatctcagcataggtaaatttgtcatctgtagtaatcactaggtcatgccgaatcttcgcattaagtcgatccaaatacttttcctttttactgaaatcggttggcacaattcccgacaccaacctcgctaaccgatcaaactgcgttgtatactcagtaacgctcatgttctctttctgggttaggtgagtaaattcttttctcttggcacttctaacggcctcattatagtacttcgcattgaaaagttcctagaacttatcccaggtcatttgtggtgacatcgtgtatcatagacaccatgtcctaccatatcaatgcgtcctcttgaaactgaaatgtggcatacaccactctgtcattccccgtgacccccatgaaattcagtatcttggtgatcatagttagccactactcggctttcatgacgtccggacctcccagaaaaaccagaggtgcctgcttgtggaacctttcatacagaggttccattctattcaccgctaacacaggttcggctcggacaacaggggcaggtgccactagaacttctagaacaggcattgcaggagcaccctgctgtctcaatcgctggatctcattatcttgttcctcaattctggctnnnatttctgcaaacctattttcccacttttgggtttcttgagtagcttgggcagcctgtggcaggttagcatcaccccgaccacgagccctgcccctgggacctttacctcggccccgagcatttgggggannnnnagctccctgaccttcatttgacccgactgaattgccctaactccaggtatttcgtctggcgtccatctagtctatacagcctgcgtaaccaaaagttggcatatcagatcatgatcaacgagagcttactaatnnnnnnnnnnnnnnaaattaaaaacatgcgcctattctactatcaggcaactaacatgcttc

SEQ ID NO: 157035 - DNA, 506 bp, Cannabis sativa
aatggaaactataatttgtgaaataaaaacaactagcatttaacctcatatatgttaaatagaaaaaaaaaatatatcataaaaaaatgaaaacaactaacattgaaatttgaaataatttaacatcgaaaaatagaaacaatataacctcaaaatggaaacaatagtttctgaaatggaaacaattaacatttaatctcaaaatgaaaactatagtttgtgaaatagaaacagctagcatttaatctcaaaaaatagaaaccatttaacttcagaatgaaaagtatattttttgaaatgaaaacaactaacatttaatctcgaaaaatgaaaataatttaatcacgaaatagaaattatagtttgtcaaatggaaacaacctacattgaaaatggaaacaatttaacttcaaaaatgtaaataatttaatcttgaaaaatggaaaccatttaaccttgaaatagaaacaactagcatttagcatcatctatgtgaaatggaaaca

SEQ ID NO: 157036 - DNA, 528 bp, Cannabis sativa
cacaaacctttaaagccaatctttcttagacagaatattctcaattttaccacttttactattacacaatttttctcaacactaaatttttttgttaagttaaagaaataaaattaatctaaaaaaaaaaggaaaaaaaatagataaacaaagtgtataaatttttttaaatcaattttttttaaaaaaaaaaaaatctatcttatatgtttataattactaaaaatatatatatacattaaaaaaaaaaaggaaaaaagaaaattactacagttttttttttagtaaagaaacaaaaggaaaaaaaaaagacacactatgtatactaaacacaatacgtaaacggaaaaacaaaaaaaaaaaacagataaactactaatagggataaaaaaaaattatatagttttttttatataaacaaaataaagagacaaaaaaaaatacgtacaaaaaaaaataataataaataaataaactactatactaacctcttgtagcgcagaaacctccccggcaacggcgccaaaa

SEQ ID NO: 157037 - DNA, 903 bp, Cannabis sativa
ttttttatttttacacttaaaaacagttttttttttttttttgtttttttgcatttttatgaaatattacatagaaactcctattgcaactagcgctgccaaattacaacaaaaaactgtataaaaatcactattgcaactaccattgcaacaactttaaaaatccaaaccgtaaatttaaaaaaagttaaaaaatagtatatgaagcaattctcctattttttttttttaaagtagtatgcggtatacatttaaattaaaatatattttatttacattctcttcttgtaaaaacttttattaggcatttaatactaagtttttttttttctttttcgaaatcgttttctctcttctgtaagtattcaatatcatttcattggccttttcattccactgaaacagtagcctccaccgaaaaggaagtattaggtttaaaacaatatatatacaccatatttgtatagtttactcataattttcttacactatattcataatttttttaatattaaaaaataactctttctctttttattattcaaaaataaaaaattaaaaaaaaaattagttacattggtaattatttgagctcaaattttatgtcagcacaatctactttttaaatgaatcgtattaacatatgggaagtatatatttcattactgttgtcagattaataattagaatcaaaagtaacattttagtttctttactagaaaattaaatttttaaatatcaattaatttctaaaataacttataagaaactaaatttttaaacatgacttcttctttggtgcatagaatgtgttggtgttacttatttaaagtaaatttatttagatactaaaaaatttttaaatatgaaatattataatatttagggcattttacaaaaata

SEQ ID NO: 157038 - DNA, 697 bp, Cannabis sativa
cttttcttgcttcctctttttgaacaaacacttgagctctttcattgaactcgctgatgtttttcacttggcgaccctgcaggtcatcccatagctcgcccccaatagtggcaagatcaatcgtgatccctgtctgaagaggagtaagctgggtactatcgtccaagtttctaaccctcgcagcagctgtgctaaaacgacttaaataggctttaagtgtctcgcccggctgctgcttgcaactatttcttgaagtccttagacaactattcctaagaggtaattgaatgatgggtaaatttattgaaccagctactcgctgccccaactagccaggtagggaataaaatatagcgtacattattcgtcacaattttggctctcatgatggtattaaaattattcaagtgcgagaccagatttgtagtcccattgtatgacgagacgtgagggtttttaaatccttgggggaattaagtattcattatgtctagatggaaaggctcgagttccttatccgagtcgtatccaaactgttttccatattccccatcttgatacctactgaatttgtctccaactcattaattcaaaattggataggatcatcttgcttttgattgagttcttgctgaaggtcaggttttttctagttcaagtgattacgaagattcgactgttgttggccattgttact

SEQ ID NO: 157039 - DNA, 719 bp, Cannabis sativa
  modified_base (127)..(127): a, c, t, g, unknown or other
ttggtcacccacagtgcttaggaccgagcgtaccacattagtgtctttttgagatagccagtataatttctatacatggaatccattcctcatagattgcattgcacataggtttgatagttggtanccagaattccacgttcaaattagttgtactaactcatattatgggatagccgaccagtacgggaccatactggataggtcaggtcatacagattcgagctggtatttagaaccaattaattcctacgacatatttaggatcacaggatgtagagattttagtgaatattatagtcctccttcttcgtcttcttatgattatggtaaatcccttaagcgggaaataatttcccaattttccctttttcttgtttttaaacaaatatttacacattgttttgtctttcagaattggatcttgaagaccttctttattcctcaagaaagaatggaaagaagaggttaactgccttggagacttcctctgatgtctacgtggagcccctcaaaatgcctaggaagacaactgcaaacaggaagcgagcctcccagaccatcaacctcgatgcccctaagaaccaggttaagactcaccatccggccttcacgcaatttttattattgaaaagtatagcttaaaataaatgattaattaaaaatacattattttaaatactaagctttaatcaaagagatattcgatctccattgtt

SEQ ID NO: 157040 - DNA, 576 bp, Cannabis sativa
  modified_base (432)..(442): a, c, t, g, unknown or other
aaaaataaatattattaatttttttaaaaaagagatatttaagtttaaatatattaaaaaaataatattttattttaattttggagtttgaaaattgaaaaaaaatcaaatttcggaaattgggtgcggcaggcagctagcctgcaaattgggccttacacgtgcggaagtgagggtgacgccgagatttctcaccaattgtaggctctgggcacggcatttgcagcctcctgatgtgcgtgtcccctgtctgaagcgagcatgcatcccgtgtcttcagacacgatgcgcccaggcatgcgcgcgtataagcttcttggccgaagctttgggtgcgtgcgatgagcaccatgggcacccgattttcaaacatgcataactttttcaattttttaagaatcgagttccgtaaaaaccaaaattgcttaattnnnnnnnnnnnatccaaataaaatatttttagaaagaaaaaaaaatatttttcatggaaaaaatacgtaaaacacaaacattcatcaaataagcacataaaccaaaatgaaaccatccaaatcaacacaaatcatcgttttaatt

SEQ ID NO: 157041 - DNA, 601 bp, Cannabis sativa
  modified_base (427)..(433): a, c, t, g, unknown or other
ttctatttaatcaaaatttgatccatgtattaaaactttgtcccaataaatatacgtggaaagtaaaaatgaaagataattaacaagaataaaaaatatacctttggataaaaaattgtataaataaaatgtacaattattattaacgcaaaactagaaaaataaatatatatataaataaactaacataataaatcacgcaaaaacaaaaaataaactaagaaataccgtgcaaagggtgattctccatatattttttaatacatatatttatttattagtaattgtttacggttatatacttttttttagttaattaatgatctctaattaaataacataaaatgaaataattaaaaaaatgagagaatagataaaactaatcctctcattcctcattttataactttattattattattattannnnnnntattattattattatatatctataaaggagaagtataagacgttgacgtatcgctctaaaatagtttaaaacttgtttatctattttctcattttttctaattatttaaaacttatttatctattttctcattttttaattatatttttttattttcaaattttttaa

SEQ ID NO: 157042 - DNA, 516 bp, Cannabis sativa
  modified_base (486)..(486): a, c, t, g, unknown or other
ctctacacaaattaaaattaattagaatataaactaatttttatggccaccaagtctttcagcatgaacaaaacagtaatgtagcttagaagtccataaataaccgattgatattattatttatttggaataattatatattttcaaattaattaaaatcatgtcaaacttaattttaagttttatatatatatattattaataaaatagaaagattgttgataaatatttcaataacaacctttttctacttccaccattgaaaatctctaaccgaaaatatttcaaaaacttaactatattattgtatatttatatttataaataaataataaggttaaactaagaatttctcataaaccaagaatttggttatatagccatattttatatagaataaatatatgctaccaggttaaacaatataaatataggaaatgtctatagtagggatacttttctagcccttgattattgatctaatgntaataaagttaaggaaacatgatagtaata

SEQ ID NO: 157043 - DNA, 540 bp, Cannabis sativa
aaaaaataagggaaggcacctagcatatatcctgtccctatggattttgtctttttgggttaattaattcaattaggtaaatatctaatttgaaaagtgattatatatttgttaagcaaaatttttacatttagaatattaaaaataaatacaaaatacaattttacctatgccaaatatatagcataagagtttattaatttaagttttactcatccaagattataaaaataatctcttaattacaatccttttgtttaaagaaataccctttgattccaattacgatgatattaaatgatttgaaataatttatgaaaatttggggtaaatttagaattgtagctgaactcagtcaatttaattaaccgagctacttacataccttctttgtgaaggattaagccacttgtagttcaaaatatgatatttttaaatttgaacataagaattccggtagatgaccactttcaggaattctttgctatttgaaaatctagaaaaattcttaggtgaatgaccttttatagaattttgaga

SEQ ID NO: 157044 - DNA, 543 bp, Cannabis sativa
aagtggtgttgcaactggtttgcacttgaccgtgccaaacttgttcaatactttctgtaggtaggcagcttgagaaagtattatcatgccaggcttaggtttctttatgtttatcccaagaattctctttgctttgtccagatctttcatctcaaactcattattgagtttccttttcaacttgtcaatctctgaccttgctttgctaaagatcagtatgccatcaacatagagtagcaagtgggtttaattattgaaatatacacatgagtcatacttgcttttagtatatccaatattctgcatgtaggtgtcaaacctcaagtttcattgcgtaggtgcctgcttgaggccataaatagactttttgagtaggcatacctcttctgggttcccattgccaaagccctcaggctgttgcatataaatttcctcttctaatttcccatgtaagaaagttatcattacatccatctgttcaatctctaggtccatgcttgctgcctttgccatcatggctctaattgaagcttgtttaaccac

SEQ ID NO: 157045 - DNA, 794 bp, Cannabis sativa
gtaatctacgtctacttttagttttattgattagatccgacacactagagtttgtggataaaaatatagcaaaatatttttaggtaaaatcttaatcgagattcatgaatataagactcatgggagacttgatattcataaatctgatctaaattagtgattgtaaagttcttgggatcaataaaccaataaagtgtaaggaaaaatgtgtatcaattatgttttaaggtctggtgtcgactgagtatggtggactcaatggagatgatagaggaataagtgtgatgttctcggctaccgtcaagtgagtctcaagagaaaggtttcagagaaaaactccaagagagtctaaaagaagatccaaaaaggtccctacttcagcctcttcattttccttatataggctatagggtttgttagtgatcccccacatgtctaggtatctcactaacaaatctcgtataccactctttttaatgaataaaatattacaggaaaatataaatctataaaaatatccttgtttctaggaaaaaatcccataaacattggaaaagttattatttttggttgaggatgcaccaatttgaaatggagtgatgggatgtcacctcttgcctaaaaatgcatgatattggtgatgagtactgaaaacatgtgatttggagtgtcaatgcttgcatacaatgccacatgggctatgctagtgggctccaacaaccctcacttaaccacattactcaattctcgagtaaaatgtaccagtctgtcttgtgaccaaattttggacccga

SEQ ID NO: 157046 - DNA, 683 bp, Cannabis sativa
aagtagaactagtagattttaagtatggaaagacgcaaaaaaataagaaaacaaatagttgttttcaaagaaagtctatctttttttgtcttccatattggaaacgtttactgtttcgacattttttggataccatgcatattgaaaaaaatgtgtgtgagagtattatcggtaccctacttgataatcctagcaaaactaaggatagttcaaatagtcgtttagatctcgttgaaatggctatccgataatctctgacacttgaaaagaaatgtgaatgattatatttgccttctgcttgtttcactttgtccaaaaggaaaaaaaaaatggtttgcgaatcattttcaaagatgaaagtacttgatggatactcgtctaacatcaaaaacttggtaaagaagaatgaattaaaactaatgggtatgaaatcacatgattgtcatgcgttaatgcaacatctgcttccaatcgccattagatcaattttcccaaaaaatgttcgagagtgtttgacacatgttttcatttttttgataagttatgcaggaaggaattataaatggataaattagatgtatcacatgaacatgcattcaaaacattgtgcaacctcgaaaagttttttccgccatctttttttgacatcatgatacatttaatagttcatcgagtgagagaag

SEQ ID NO: 157047 - DNA, 732 bp, Cannabis sativa
atccacaacaatcgaggcatataagaacacatcatcaacacgaacccctctattgttgagatcccaaataaacttgacccagtcccacatctcaatataatgtggtcaatgattattcatctactttattatgctattatgctgaacaaattatatatatatatattttatataaaatgtgtctatataacagaatttttaatttatgaaaaattattggatgacttttttttttaacacttttaaaatatttcaaatcaaaccttcctattctcacgaaaactattcagtttgttaatcgctattaagtaataacttatttatttttttataaaaagaaataaattctcaatcaatttgaaaaccttatcaagcgaataaatctcatttgaaagactaaataatcaatttaacgattgacgttagcaagctaataaaataaaattaaatatataattaatattaaatagtttacgatttgtaaactaatatataaatataaataataataaatatatattaactcccttcttgaactatcaattatcattgattgtcgaatgcaccaagtctctctctctcctgtctctttgaaaacccatccccgtaagccatcctcgccactttcattccgtacaatgacgagaaaccaaaaccccgtagccattgatggcccctcagtctccaagtataacttgccatttgggctgccagagtaatttggccatatgg

SEQ ID NO: 157048 - DNA, 599 bp, Cannabis sativa
aaaaataaaataatgtacattataaaaatgaatagaaactatatttataccttaaaggatgttgagattcaatgttttctcaacaaataatggtggccggatgttaaacccgcaattttctattgggttcggatgacacttaaagagaataaaaactgaaaactttttaggtgtatgggattaagtatcgaaaatggaagattttttttttaaaaaaaagggctcaaatggttgagaaatggaggagaaagggggtggcagaggtggtggttggcgagggtttggggttctctgatttctgggttcgctgggttctgctgggttgtgaggaagaagacgatgctatatagatagggttatttttggcgaccctatggcgttagttcttatgtaagaactgacggcatatggtacacatgtcaaataagcgtgtactctatgtcatcggttcctatataagaaccgacgccatagggttacttcataaaacccaatatcttttaatttccaaccgactccaaatggtataatgcaattctatacctacagtttttataaaaaaaccgcctctaaaagtcaattttcaataagcgggtatt

SEQ ID NO: 157049 - DNA, 590 bp, Cannabis sativa
tattggtaacatatcccaaatacacttaagttaactctttctcttttggagacaaaattcaaagatatgaaagaaaaaaaaaaagatcataactcaaataaacatatttttatgtatagatataaccaaatatattttaaaatatatatatttttaatatatatacaactatatattttgagtactgcaagagtatatattgaaataaaagacgacacaagaagagtatcgatacaaaagtaatggaattttttgaagaggtatgatttcaatatatacatatttatttatttatttattacatactaaaataattaataattgaagactaatattaatttttataatttattttttagaaaaagactaaatatattgaaagtgtttctaatgaattaataactaagtgttagatactacaaatttatgttgatcaaaagaagatgaagactcaaaaatacaagaatttcaatatatactatatttaagaagcaaaacaataggaagttgctaattcttcatcttaaattataaattacatataactaatattttaaaaattagaataacaatcttatgtaaaattttaa

SEQ ID NO: 157050 - DNA, 831 bp, Cannabis sativa
tgaataacacgacaaaaagaaagacctgtggccatcttactatactaataataatactaatactaacacttttttttctatctttttcttttgtatttttggccttggaaaaggtcaagctgcatattttaataagagaattttatgacaagcaaaatctattggatactcatggacaattcaagtataaaaaaaaagtgatttaaacaaagtgaaagctcacaaatcctcatttcctttagacactaattcattccaatttaatgtttgatgtcaaaagttagcaagtttaatctaacacacaatttaataaaaaaaataaaaaacttgctaatgttattgtgttcctgtagttttctgaatgtgttttcaatttcaaaatgttcaataaaccaatgttactattgctttattagaacttttttcttattcttatgaatgtattatacacacaacaggtcattctataaatgcaataaggtcattctagtcacattgtcaattcatcttaattagtccctattattgttctagattgtttttactatcaaattttgaattcaacaattgacagagccaacaaagatcaaagtacatatatatacatacatatattatataacaatatatttgctacaccaaaggtaaactttgaagaataatgtctgcatttaaacacaaaatcacaaattattatataaattcatttcaagagagagcacatagatcaaagttaaaaatcacagatgtatttcataaaattaaaccaattaatatttcttctttttgtccccttatctttgaaatcaggtgcttcaagcttagaaagaa

SEQ ID NO: 157051 - DNA, 705 bp, Cannabis sativa
tcttatgttatcatacacatgtttccaaattgagattaacttactatatgagtatgaatatattaaaattagcttattatttattattaataacaatgtgcatatcatatgtttatatacacacggtatacttatcaagtcgttcaaataataattcatcattagttaccaaattttaaaatgaaaaattcactgaaacttaaataaaactaatatttacgtgactcgacactaccatattcaatttattaacgaaaaaatggacaactcaattatacgcggactcaacgagaatgaaaaaaaattacactattgtctctgttggagagcaaaaaggaagattaaaatctacccatgagtatcattattttttttatctataatttttagacagaggttatcttcaattatcaacaatttaaagattgatttttaattttttttatcttacacacaacaattaagttgtgtttccttaagtatttgaacattaatttttagtttatttttagattaacttaagaacatatttaaattcttaaacactaatatattgcatcaggtattttttttaaaattgttaaaactataaattatattatctagatatacataataataatctcacctaataactaataatattttttctttaatttttgacttttaaataaagtaaaaaatacttagcataaattttagtat

SEQ ID NO: 157052 - DNA, 641 bp, Cannabis sativa
aatggggtatggagcctgaaagggaatcaacaaattacacgggaatgttacatccatgccctaactaaggtcaaaaaggaagaatcctccagtcagagtttggataaggggaagagcattgtcaagtagggccgggggaagaactagaagaaattgaaattgacccaagtgttcccactacgaaactcaaaattgggaaatgtttgttgcttgaagtaaaattagctctaataaaatttctaagagcaaacctagacatttttgcctggtcacatgaggacatggtcagaatcgatccatctataatttcacatgccctaaacattgatccaaacatccagcccgttcaacaaaaaagaagactactagacaaagaacgggctaaagcactaaaaagggaggtagaaaagctgtgcaacaataatttcataatcgaggccttctacctagcctgggtagccaaccccgtattggtacccaagccgaacaaaaaatggcgagtatgtattaacttcaccgacctcaacaaggcatgccccaaagactattttccacttccatgaatagatcaacttatggatgcaacaaccacacacgagatattgagcttcatggacgcctattcgaggtataatcaaatc

SEQ ID NO: 157053 - DNA, 633 bp, Cannabis sativa
aaattcaaccctgaatttcagttttagtcgcacaaaactaatccttctatcaatttttagattcataaagtgtagatctttaacaaatagatttggagctccaatcaatccaaattaggtataatccaaaaaaaaaaaaagaaaaaaaatacttcaatactatatttaatgtttatcctgttgcattaacgttgattttcaaatttcccatagtgaatatattaatatcaaatcacgaaaagtatagaaaattcgaatgcatctacacccacatacatcaaaatatgattatggtttttaagttgcgttatagttgcattatcatttcataatgacgtttatcaaatttgtaggtcttttgtagcaccctactagataaggcgtgttaacgtgatttttaacttaactgtgcagctcgttgctaatcaacgagtttattgaaaatagtgatttattaaaactttacttatttaattattaacactaaaataatatacttataataaacttagatcccgttttaccaaatatttacaattgtttcataatacaagttaccaaagtttgtcgcctagcgactatacaaaataagccttgctgtcccaaacattgtacgctccaagcctaaccgcc

SEQ ID NO: 157054 - DNA, 566 bp, Cannabis sativa
tttttgctaaataatataaaaaaaaatacactttaatttgttttggcatccagaatatttttttagtttatttttctttcatagtttaagacatcctgtaaaattttaagagattaaaaaattgaacacgccaaaaagtaagtttaaacagtctatttcatacttgtataaaataaaagaatcacgcatgtaacagattatttgaaccatgttatcgacatattaaatttcttaaaattttataaaatttcataaataattacaatgtttcctactaagaaaaaaattagaattaaaaaatttctcaaatgcaaaaagaaatagggttttttcatttttatactttaaaatagtttttttgtatttttatgaaattctacatagaaagctctattacaactagccctacaacctaaaaattgcaacaaaaaatcgtatggaaaccagtgacggacccgggatttttactttgtgggggcttatttatcgtaaaaaaatatttatagctacattataatcactcttactaaatttatctaatttagtgggggcttttctactatttt

SEQ ID NO: 157055 - DNA, 579 bp, Cannabis sativa
gaacaagagcagaataaggatgaggatgagaaagaatgagaggtggctcattaggcatatgttccacaacaatatactcatgaggatgagggtcgaccaaaaacttatgcttaggagtttgtttccctaaatgagccacctctcgtgtacaattttgatgaacaaagggtagctaatcagttagtatatctctgctcagaaaatatcaacaacatagtggcccgagcttatttgtacgaacatgagggtccaatcaaagttcacaacaaacactatgatgattcgcatgcccgggttctgatttcaaaaatgatgcaagaggatgctgaaattgttaggttttgtgacctaaataaatcccattttaatatgatcacatttactaattaataaaagatcacaaaccgttttatgttgcatggcaaaccgttttatgttgcatggtttacatgttgcatggtttacatgatttatttcatgattatgtttaatgtatagattctattaattctagaacatatataaatataaatatatatttgttcatgattatatgttcaaaagtttaattctcatgat

SEQ ID NO: 157056 - DNA, 628 bp, Cannabis sativa
tgagaaccaagaacataaagcacacatgaatagacaaaatgcccccaaagcttaaccaagttgggtatcttgtacctcttaatttataatgaacaaagtacaaaacaagttgcaaaacatttaatatcaaaattaacaaaacaatacttaactactaactgtcgtaaccaatttcaataactactcggataattgattcacacaaacaatcaaaactgccatagtttttatcaatagtgtatctcattaactcatgaatcttatgtctaaaccatcaattttttcaaaacaaatttataataataggaaaattcaaactaaaacttgtaattaaagtacaacaatcactcactacccaacagataacaaacatataacacatcacatttaaagtaacattctgaactaaaaaatttaagaccatagtttctttacctaactcaacacatgacagccatcaccattccattgttttcctttctttcaataatttttttgagtcaatatagggaagccaatggtattaaactgtaaaccaaaacacttgggtaaaaaaatacacaccaaaatgaccaaacacatgaatcgactgatgcttttcacacaaattaccaaataaaattgattt

SEQ ID NO: 157057 - DNA, 807 bp, Cannabis sativa
taatattgatgtttagttttatttaatcttttattgcattattgcttgatgtataatgtcatttctaggttctacataaaattaaatcatttcttttatttgtaaaaacttgtatactcgaaatttaatgaactttaatgttacattatttgtgtcaactttgtaaatcaaaggtacaaactagccaaacaaacatatgaatgattcttgaagcctttctctcttttaatattgattacacctttatttgctttcttttaatatttattaccaaaataaaaatcctcaaaatcatctggttacttatttgttactttttattaactttttgtctttatttttctactaacgcttttttccataattatctccctgtagtagaccgtccgatctatactacaaccaccgctagcgaaagtcacatttgggcgttaaataaattttagcgctgttgtcagggaggtaatttttcaaatacaaccaagagtttagtaactttcttggtaccttttatcttcttatgaatatttttcttatattgtgtaaatatttgtgaaataaaaaattatcaagaaattcaaagtatgctctaaggttacggttttgttcgatcttctttatcagaaatgatttcttgattaagaaaaaaaaaaccacacacatatatataatttttttatttgcttttcttaagaaaattatttaatttctaaaatagttattgttgacctcaaaaagtgatcaactgacagtggggtcatacagatctgatgcttgccacgtgttacacaaacaacaatgaaacac

SEQ ID NO: 157058 - DNA, 506 bp, Cannabis sativa
aaaaacgaatttatgacaaatttgaatgacagaaaagtccttcacacttgatgattactaactattactactacattagcaaatgagcagtggtacttaagctgagaagcaaggtctgaacgttaccatattatggaggtattcatctcatcaacgcgatccgattgagaataaatccaaagctaggcattctccacactcatgagaagcaccataaattttggcgattgctttcctcttcttcagcgccttcttctgtcgcctcaccctctggtgaccaccattggatttgggatcccttgccacagctttctgccgcttttttccgttggagcaattcgtgtgatgttgattcgaatctgaaaaaggatgatgaggatgaggatgaggagaaggaggagaagcgggagaggaggtgacgatgccgtggccgagggagctcatggtctgaacagaggcggtggaacactcttcccagttgagatcgttgaggtcggtgataacat

SEQ ID NO: 157059 - DNA, 605 bp, Cannabis sativa
  modified_base (129)..(132): a, c, t, g, unknown or other
  modified_base (486)..(492): a, c, t, g, unknown or other
aatgccaaatatttcaaacctaaacctatatggattcctataaatagatagtgatggactcaaattagaagcttactaattcacttgccttaagtaaaattttgagccttctcttctctcactatttcnnnnccttcgtctctctttctctcttcaatatttcgaaccctatagtgatacagtgcatgcccacacataacaagttggtactcaatcatagtgtttaagactgtgaagaatccaattcaagtgaattagaatcgggctcagatcttggtgatactctgctaaaaaaaggatacaagggttagagatctgagcggaaggagtcaattaattccgctgcaaccaatgtaagacttcttaaaatttatatgtgtttaaattctattatttagaaattcatatttaagatgttaaacaacatacatggtagtaaatctagatcctagtaaatctagatcctcagagccatggtaatgattnnnnnnnatgaaatatggatttaaaacgatttttttttttatttggatggtttcatgatggtttatgtgcaaatttgatgattgtatggaaatcaaaatttatattgtaaaatatttttt

SEQ ID NO: 157060 - DNA, 513 bp, Cannabis sativa
agcaatctagtattaacattaatattcaatacttgcttaagattaagtaatcattagagataccataaaacttttcatgatacgattaggactttttgcctaagtcattcaaatagaccatgcaagaattatactatcttattctcaaaattctgataagttatttcgatccatatgaatggttagatttactttcttagttgaattctaaagttcctatcaccagtgtcatccaaatgaagaagggtttagaattttaaaattctcccactcaaataaggtactgtgatacaatttcaaagaacttttattggtatcaatttctattacaactaaatattaattagaacataaattaagatcaagaatatattctgataattagctaattcattatattacatcgatgtttaattaaaatatgtgcgccatagggtactgtggtgtattgagtatagtttatagtttaaaatgaactacatatttcaatagtatagtccacccctaagtata

SEQ ID NO: 157061 - DNA, 690 bp, Cannabis sativa
tgagatctttaacataaagatgctcttcattgtaattgattgtacaaagtgttgtggattaataataaacttgttgatatatcgaaaaaaaatatatgcatgctatttgtgatttgtatgctaccaacactagtatagtagcggtacgtagtgcatgtagtacagtggtcgtaccttaattaaaaaacattcttactcatctaataagccttgaggataggtgtatgggtgcctagctagaaacaagtcgggatatatgttgtgttatatgcttttcttactgagtctgttgactcacagatattactttcgtgtgtaggtaaaggaaaggccaaggctgaacaacattgagttctaagcttagggaatgattgtacatgtcgagacagtgtgacctagattattcggtctcgagacaacttgcgcttcattttgtagtcgttgtgcgacatgtctataaaagctcttttgaatatgaaggtaaagtttaaacaacgggatcccggtattatgtgtatatgtttataaaagtgtaaaaactaaatcaaagttttaatttatcacgaattttgagaaaaccctttgatttgcaaaggtgtgcactgcatttagaaagtcagtgtagcgtgcctaagtattaggcaattcaattttggtatcagagctgccaggttgtctaccgaagatcgt

SEQ ID NO: 157062 - DNA, 964 bp, Cannabis sativa
ataatagcaattttatcaaattaaagcatttcgattattttttctagttatgtaaataaaataatatgattttggttttctttccagacagtttaataaacaatataataaaatattgtttccgattattttctattttaaacagattcatttcttccattaattattctgattccagctacagtttaataaacgcaccataataaattactttcagtttctgtattgtggcaaagacaacatatctcacatatatgatgtttacaaagtcttttatcatgcggagcataaagatcagtctcttataagttattttatggcatttaaaaaacatatgaagagcttaatgtgttattaccatttagtactgatgtgaaggttcaacaacaccaacgaaagcagatagttattatgagtatctaagtttgattctccaaaatcacaagttctctcttattccgatgtctcatcttcacaagatgtgtttactcgtgttcttcgcaccaaaactacctattcatctcctcttaatagtgcattggtgagtcgtaacaattttgcatcaggaaacaattctactccaagtggatacaaaagaagtacttcacaagaacctgataatcgaacaccgaattccgggagcatcatgtgcaactattgtaagaaaccagatcacactaagtttgagtgtaggaaattacagttcaaaaatcaaccaaaacattctactaatattgcaagcactagtgatgcatctaacagctcggtccttatttctgctgatgaatttgccaagttctcgaggtatcaagaatcacttaagtcttcatctccttctatgatttcaataactaattcaagtaactctaatgcatgtcttcttttccacatcctcaaaatgggtcattaattctagtgccacaaatcatatagcaagtaattccagtctctttttcacttttca

SEQ ID NO: 157063 - DNA, 714 bp, Cannabis sativa
ttccatatttttcttcttttttctttattcatttttttttttcgagaagaattagcaaatttatttatttcttttttttctttattttttatgatgagtaagacactttcacattacataactttcctcaatcttctacttttaaaataatacccactcataacacttatttcccccaaacttaattaaaagcatatgacatagtgaggtacatcgagaataaaagtaattaaaaggaaacacattaagctcaattcagtggttaaaattttgaaacaagctaaggctcaacttgggtacactaaggacaaaatttttacaggtaagcttgaaagactcaatcggtctaaagaaaattgcctaaatcattttccaagcaacaatcatcaaggatttcgcttcaagagagtaagtcacgcaagttctattctatgtcaagcaaacattccacaaacccaagtagaacaaaagtgatactatccaaaacttaataatttacatctataaaagaaaattttcacaaggcatccaattcaatccaaagagtttatgaattaagcacacggtttaaatttcaatccattgcacacataacaatagcagttcaatcaatatctcggctcaattatcaacacatgaaaaattaaagaaagaaaactaaactaattaacccactaaaaacaaagacaataaaaacataaaaacttttaaatc

SEQ ID NO: 157064 - DNA, 583 bp, Cannabis sativa
tttaaaaactttcgtagctagagattcctcacaagacaacagccgccacccttgtttcgcaagtaacgagacattaaagtcccgaatatcacgaaaccccatgcctccatgaaccttatgtgccttgagcttgtcccaacttaaccaatgaatgcctttggaactagtagacttccaccaaaatctactaatggcactctcaatttgatgacaaatgcccacaggaagaaggaacaaattcatagtgtaggctggcaatgcttgaactaccgctttaataagaacctccttccctgctctagaaagaaacttattatcccaagtttgaattcttttctgaaccttctccaccacaaagctaaaagccgccgttttattccttcctattgaactaggaagccccaaatacttgctattttcttcagcctctctaatacccaaacggttgcatattgtctctttcatgtgagatgttgtattagtactgaaaaagactgaagacttctgaaaattaactctctgtcccgaagcattggcaaacgtttggagcaattgctgtacattagcaacctctctttcagta

SEQ ID NO: 157065 - DNA, 512 bp, Cannabis sativa
ttgtatgtatatttttatatttatcacatttattggttcaaaaaattgacctaagtttataaaaatattaaagagagtacttgtttaattagagagagatgagtatattttaacttttcaaatgacaaaattgtctttttaacacattttatttgatttcatcaaggaaaaaattgtcattataattatcactattacgacacttttataatagtaagatatatacgtccaatcaaacttattaaatcaatacatatatgtaattgtatctcaaaaaaattgcaacaacagtataattcaaaaaaaaaaaaatatatcagaaccctaattttcaaaatctccaaatttcataaataaaatcatcaaatcttcaattaatttagtaataggtaactctggcaccacttgttagtatttataaaacacttaatatatatatatatatatatcacagatctaatcatattcctagaagtgctttaaaatataaaatcctaaatcataaatctata

SEQ ID NO: 157066 - DNA, 579 bp, Cannabis sativa
gaaaaggcttgttcatgtcagcggtagaaccagaacattcatcggtagtagtcatagcagaaagaatgtcttaaaattgttgaagtaactgctagcaaaataaaagaggaacgatgttaccgaatgaaaaaattctgggttgagtcgcggactaagtccctctctttaagacgtttgcggcactgcccaggagtgtgcaagcagtcagaattttccggtcgtccccaggataaaatagcctagtcgtcgcactgtatcagaaccccactccactgcagagcaccgtcgaatacacccaaataattttgataccgtagatggaatttttagtatttatgaaaactgtttttttttataagaaaagatgttttcttcccatcagttcaatcgcattatataggcgaatggattgaataatcgtaacgggaagaataaagttttctgaatcgtggggtgagttggtttgaacgtgtcacaccacaccacaccacaccacctaacccgacctggcccagcccgactcgtatggcgcgcgcgcgcgtgtgtggtgggtcaagtgtgtgtgtcctcacccattcg

SEQ ID NO: 157067 - DNA, 589 bp, Cannabis sativa
  modified_base (170)..(170): a, c, t, g, unknown or other
ctgaaaaataatcagaaatctataatcagaaatctgaataagattgactcgtggactatgcaaaattttaactgcaaaaccacgtaaaaaatcctgcgttcatatttttatttctataacttttatttttttgtgtgaaatcaatattgtgaggctcaaatttagttaangaaaatctgcgttaacaataactaatttatttatttttaaataattttactattttaaaattttaaatttatgtctttattttttcattttaattttcaaaatatattatttattaatatcaactcaataaatataaaaagaagttgatatatatatttaaaataatataactaatatttaaaacggtttactatatcgtctaggggtgttcgcggagtgggtggtgcagtttttgactattttttaaaaccaacccgcacatgcggtttttttaattttctaaactgtacccgcactgcgaaactaaaaaaccacaaatatcgcactgcaaaaaatggtgcggtgtagtgcggtttatgcggtttctacggtttggaatatcactaaataattaaactatcacaaatacaacaaagct

SEQ ID NO: 157068 - DNA, 599 bp, Cannabis sativa
aaaataatttccaacacttttaggttccatttattttaccgttaaaaattagtatttttatcccctaaactttgattaatacaaaattttaccccttatataaaatcacttttaaaaattataataatctatttttttaaagcaattataatattctattaattctaaaaatataataaaaattattaaaaaaatataacaaaaatattaaattaattaaaaatattaattttacttaaaaaaaacttaaattattcttagaataatatttttcaactttattttatttataaacacatattttaaaaaataaaactaaaattattgaaaatctaataaataatttaaataaactaagattttttgaagaagaaatcaaacttatttatatttataaactcatatcttaacaaataaaggaaaataattaaaaattcaatataaatataaaattattttttaaaaaaagttataaattaaactaaaaaaaatattatgtatacttaaaataatttacattttttgagaaaaataaaatatactcaagtttgttcccgtaaaatttagttttttacaaaaatttaaaaaaatatattttt

SEQ ID NO: 157069 - DNA, 503 bp, Cannabis sativa
aatagttcagggggcattttcaatgaccttaaaacttcagggggcgtgatttagtacatgtcaaatttcgagggaaaaatttcctaattagccatattactaatattatattattatattattcttatatatataaatgaaacttatcaatttttatacatatatatgttatatgttttaaaaacataacataagaataaatgaacgaaaccctcatcttcctatatctatctttattttcaacccaaaacttagcgatctaagctctagtagtagcgggatagaaaatccttagagagaaaaagcttaaggtatagtttaattatgttttaagctaaaaacgattggttttatatagtggctttgtgatttaaagtggttatggagatttcaattttgtagaattattctttggtagctatgggactagtttcgatgtttacttgttgaacttgagatgattttgagttagaaatcgtgtttagaaatttttaaagcttagt

SEQ ID NO: 157070 - DNA, 796 bp, Cannabis sativa
  modified_base (139)..(142): a, c, t, g, unknown or other
  modified_base (709)..(713): a, c, t, g, unknown or other
attttattttaaattataatacatctatgaaattatatttactttaaaatatttctattatgatatagtattaatgattatttattgttattattgttgcattgatattttcttgttttttaattttttttctagtgtnnnnctatttagttataacctcccaattagaatataatttacttggtcccaaatgtattcttggatagaggttctactgtaacaatacatcaagtttgaccctattttgagggttagacctagcaaagctcataaacataaatggttcgtgcctatcgtgagcctatattgacacactcaaatttagttatgtgagttttggttaataataagtaaattacaatatatgcattattagataccttacctaattaaaaaaatttaaaaatttaaaaaataaatatatatataatcacattcaaatgacgcaccaatgtagcaatagctaaattaaaaaatttaaagatcaaaatctcaaactctattttaaaaattaataaaaaaaaaatacattacctaactaaaaaaattaaacatacatgtattacacttaacatcaccctattgaacctaattaaaaagaaaactaatggacgtaacatcaacctactatatatacactagtagtagaggcacgtgcgttgcacgcagggacgaacccattcacaatagcccccactaacaaaaatannnnnttttaaaaaattaaatgtaaatttttcaatttaataattataaatcaaaatagtagaatagcccccataaaattagataaatt

SEQ ID NO: 157071 - DNA, 515 bp, Cannabis sativa
atatagttaatattgttatataatgaaaagattgattggttcagtattgataatgtgatatatgagcctacctaattaggtgatgcaattactcctggcgacgtgtagatacggcgtcagtgatatgaaaaattgccaggtaatggcataaaataaaactgttgtagggttttctcttggcgacgtgtagatacgggcgtcaatgacatatgataagtaccgggcataggtatgagttcgtctgattaggcgactactccttcctggcaacgtgtagatatgacatcagtgatatgaaaattgccaggttatggcataaaatgaaaccgttgtagggtttcctcctggcgacgtgtaaatacgggcatcaatgacatatgataagtactgggtgtaggtacgaattcgtctgattaggtgattactcctagcgacgtgtagatacggcgtcaatgatatgaaaattgccaggttatggcataaaataaaatcgttgtagggtttcctcctggcga

SEQ ID NO: 157072 - DNA, 679 bp, Cannabis sativa
aaataatagcactcttcctatatctttatctcttttacatgattaataaaagtggtattttttttagacattttgtaatttattcggagtcgatttatgaatgatttgcatattttaacttgatgtcttgttacttttttatggatttatagttgtctttttgttattttataattattttatattattgtttaggtgttttatagttatttttgtatgtttatttttgtacagttgttgtttagtttatgtatattttttatggtgtatattcttagtttattccacataatttttttgttgtatgtatgtgcatttgttttgttatttttatattattttttagttgttttaaagtgatttttagaatatttttttgttcaacagttatttttttattcatgtgtattttttatggtgcatattttagtttctttttgacaatttttttgttgttgtatgtgtgttattttgtagtttagattcttatatttagtttattttatttaaacattttattataatacaataataagattttttatttttttaattaacacaatgtacagtaatagatattgacatgataattatatattacctattatattatatattctattttgaactcataaaaatgcccattttaggggaattaccccaaatactatttttttaa

SEQ ID NO: 157073 - DNA, 991 bp, Cannabis sativa
gaagagaactctgaacatgatgttattgtagagcatcgaaccaaaggactccagagaatcacagatttccatccaagtttcatgtctatgacatacccattaatacacccttagaagatggatatagactttggattccttttagaaatgccaatgagagtgattctaagaaaaaaatgctgacaatgagacaatattattccttcaggctacaacaaagattaaatgagggtcacactcttcttcgagctggtcgactactgcaacaatatatagtagattgttatatggaaattgaggaagaaagatttagatggatacgaaattaccaagaaaaactcaggacagacctttactctggtttaatggatgctgctcatcaggtgattcaaattgctcaaaagtgggaaaaactattattttgccttcgtcacacactaggggaccccgatatagagtacaaaattaatgctatggccatttgtaaatgggctggatatcctgatttatttcttactttcacttgcaacccaaagtggccagaaataaatgacatgattaatttaattggtcaaaaagacgatgagaatagggttgatatcatatgcagagtttttgaaataaagttgaaccaactaatgcacaatctgaaaaaagaacaaccatttagaaaaataatcgcatgtaagttcttatattattaaattcacaacaaaattaaattattttaaaatgatattttatgaaaatatttctcaatttttccaacaattttaaatgtaaattttaacattttctcaatgttattgtaggtatatacacaattgagttccaaaaaagaggattgcctcatgcacgcatactacttttcttgcattcatcattgaaaaatccttcagcagaacatatagacaaaataataagtacagaaatcccagactcaaatattgatcctgatggttataatgccgttaacaaatttatgattcat

SEQ ID NO: 157074 - DNA, 589 bp, Cannabis sativa
cgggaaataactagcttgtaagacccggctacataaagaatcaggatagcgaatacaccgccatatttgcttagcaagaagtgcttgattgtgcagttccaaatcctgaaaccccaaaccacctttctccttaggcctacacagataatcccacttacaccaatgggttttcttattatgctgagacgacccccaccaaaactgagaagccatacgatgtagactcttaatagtatctttggacaacctaaagcacgtcatcgtataagccgggatggcttgcaaaatagccttaatcaacacttcttgtcagccacagagaacatggacaccttccaccctctgatcttattccaaacccgattcttgatcaccgcaaaaagctatttttttgttctacccactaacaaagcaacttaaattcatataaaagcccacataaaaattattaaagaaactgtaaattaaataaaaaattaaaaaaatagtatgtaaaataattcccgtataataaataatcaaattaaataattaaaaatatttgataatatggtgactaacactgattgaaataaataactataaaata

SEQ ID NO: 157075 - DNA, 1196 bp, Cannabis sativa
tgcatggttatggcagttgaggttgtaaaacacgattataatgggtaggtgagaaatatatccacaaagtcagtgcaatatcgaatgttaaataataaaaattcataattcaagcatattgtttgacatattatcagtaggtttcattccacttatatattgatcgaaaaaagaaaataaataatataagcacactaaatatgaccagaagactaatataaaatatttacaattaaaattttcgtatatagaatatttataatattctaagtattttaaatttaaattaaaaaaaatttatataaaacatctatataatttttattttaaatatatataataatattataaaattaataacgaatattacgttaagtaattctattaaattaaaaaaggaaatcaaaaaatactattaaactaaaaattatgttacataaccacattttatatagaatatatatatatatatattattttacaaaaaaaaaaaaagttctacatgatattatttttcaaaagaatttttgcataattatggcagttgaggatgtaaaaatacgattataacggtaggtgagaaatgtaatccacaaggtcattgcaataaagaatgttaaataataaaaattcatattagtaagtcaagcatattgtttgacatatattattagtaagtttcactccatttatatattgatcgaaaaaagaaaataaataatataagcacagtaaatatgactagaaaactaatataaaacatttacaatcaaaatcttcttatatagaatatttacaatattctaagtattttaaatttgaattaaaattttcttatataaaatatctatataatttatatttttaaatatatataataatattataaaattaataaaataatattctgttaagtaatagatattctattaaagttaatgaaggaaatcaaaaaatattgttaatctaaaaattctgttacatacccacattttatatagaatagatatatatatatattttacagaaaaaaaaaaaaaagctttgaatgattttttttttccaaaataactttttgcgtgatttctggtagttgaggttgtaaaagaaatattataatgattaggtgagaaatgtaatctacaaagttaatgcaatattctaagtattttaaatatttacaatattgtaagtat

SEQ ID NO: 157076 - DNA, 503 bp, Cannabis sativa
atgtacgatgtaaattctcttttgctagcgcagtttgtgaaatgcgctgttaaaagtaatgcgctggtaaaagtgacatttcttgtagtgaatggtgcactattttactaaattggtgtgaaattttcacaccttattatttcaatgaccactactacaaaaatagtttttctcgacatttttaaacagccgtttaaagtattcccgtcggtttctataaccatcgcctatacgaccgtcgtaaaacgggcaaaataggcgacggtttaaaaccgtcgctaatgtggacttctcgacggtttaaaatcgttgcctatagtatagggcacaatttaaaatcgatgcctataccctattataggcgacaattttaaaccgtcgggaatgtaaataaaaaacgagaaaaaatacagatttttctgccattaatgacagaaaaatctgtattttctcccatttttttcctgcattagctttacaactttacctaaattaaaataaaa

SEQ ID NO: 157077 - DNA, 642 bp, Cannabis sativa
tgctgttattgttgtcatggttgcttgtatggtttccattagatagtaggagttggagaatggtgttcaagtatagtaattcaaatcacttcaacttagtagtaaaacaatgcaagagagaaaattaagccaaatgaggactgttataaagaaaaatcaagtttgatgaagactaaaaatttgacatttaatttaattgagatgagaaaaacaatataacatattttgtctttctcgacaaaagtaggtaagtgcagataataaagaaaaaagattgacaaattaccttaaatttgaaaagtctttcggttcatcttgatctccaaagccctaattaataattttgagtagacaaaaaatatcagaggaaagtggaatagaaagttagcctaaatcacgaaagaaaaacgtttacccatcttcatctagtaaagtaatataataatataaattgattttaaatatgattatttttacaatttactaacaagtacatatataattgtggtatatatatatatgtatccattaatttatatggaataattaaaatattttgtagttaaaactactattttaaagaatcgcaaaaatttgtaatagagataatagctaattgacagtgttattaagaaatacaca

SEQ ID NO: 157078 - DNA, 543 bp, Cannabis sativa
  modified_base (352)..(353): a, c, t, g, unknown or other
gacactatatcagtttgttggagaatttaagatgtgtttgttttgtatattcacatatctttattacttgctaaatatattatattttctgaatgtgtatgaatttatattgaatcatgttgtttcctgttattaatgttgtagtataattttgaatcttcattgttggtctaacttagtttgttgtttttaatgggacaaatcccaaaggattatcatccgttagacaaacataacattgttagatcttgacagataagtatttgtattgcaacatctagttgtgcatccaaagatgaaaacttagactagtatttacaatatgatacaatgaagaattttataaaataannataactttgactctcgcctaaactggacatcgttggattcttattttaatcaaaattatcctttatttttttcccttagctttttcattatgaaacttcttaaacagaatgtcattggacagaaggattataaatcatatacttatgatgtcattctattttcttctatgaaattgaatggcacagatga

SEQ ID NO: 157079 - DNA, 920 bp, Cannabis sativa
acgagaggttttgcgagttgtgcttttagctcttggaaagctttttcacattcctctgtccactcgagctgtttgtttcctcgcaggatgttaaagaatttgacacacttgtctgttgattttgaaacaaatctgctaagtgtggcgatcagaccagtcaaacattgcacttccttggttttaattggcgacttcatatctaggaaggcttgaatcttctatggattggcttcaattcctcgggcattgacaatgtagcccagaaactttcccgagctgactccaaaggagcactttaagggatttagtttcatgttgtactttctgaggaccttgaagcattcgtccaggtcatctatgtgcaccccagccttcctggatttgacgagcatttcatccacatacacttccatatttcacctgatctggtcttcaaacattttgtttaccaatctttggtatgttgctccagcgttttttagaccaaacggtattactttgtagcaatatagacccatatatgttcggaaacttgtatgttcttggtctggtggatgcattttgatctgattgtaccccgaataagcatccatgaagcttaatatttcatgccctggtttgcatccacgagctgatcgattcttggaagtggaaaacagtctttggggcaagatttgttgaggtctgtgaaatcaatacacactcgcaatttcttgttcggcttgggcaccaatacaggatttgcgacccaagctgggtagaaagcttcaattaggaaattgtttttgcgtagcttttctacttttcttttagggctagtgctcggtctttgtccaatagccttcgcttttgttgaactggccgaaaattgggatcaatattcaagacgtgcaaagtgatagaaggatcaatttcgacca

SEQ ID NO: 157080 - DNA, 935 bp, Cannabis sativa
  modified_base (28)..(35): a, c, t, g, unknown or other
  modified_base (62)..(69): a, c, t, g, unknown or other
  modified_base (97)..(104): a, c, t, g, unknown or other
  modified_base (313)..(319): a, c, t, g, unknown or other
aaagtttttattaataatattattattnnnnnnnnattattattatatattattatattatnnnnnnnntattattatatattattatattattatnnnnnnnntattattataatattatttatatatcatactattttagaagtgtcgtaatcaggtgacaatgttatttgacatatatatcctttacattgttaatgtatataatgtaaatgacatatataccctttacattgttaatgtatgtttttattatattaaatagtaagtttttcaatgtgaaaaagtccaatagtcaaaattaacagcatannnnnnnacgtgtttgtatttcccatttccactttttttattaagtatattattatattaaagtgtatttattaccttttaaaactctatttaattctctctcttaatattttcatcttctctgcaactttcctttgaaaagtctactaattcaatgcaatcactattgccaagcttactatttccaataagttgactattcaacgcaattacctcccattaattttaataaactgattgttcttccaaaccaaaaaacctttcataaactttatctcttcctcttcttctctctctctttctttgcaactattatgtaccagcatgatgtgagttgggaaatgacgaacacgacaaacaggatcacccattagatcaatgacaagagaaggcttaccacggcggccaccaccactgagttcataacggtggtcaagctcctccaccgccaccttatctttctctgaatcatattctcaacatgcacacctccaccaggtatgtttattaatttcaaaatctcttatttttttacccttctttctctccatctatacataaaaatgtaaaatccttaattttttttatttgtatttctcaattttttttttttaaatccctaa

SEQ ID NO: 157081 - DNA, 555 bp, Cannabis sativa
  modified_base (516)..(523): a, c, t, g, unknown or other
aaaaaaaaaaaaaaaattctacaaatataattaaaacatacaatgcacaacaatattcttaagataaaatataagtttgaaaaccaatttcgaacctagaactataatataaaaagaaacttaaaatcaaaatttataataacatcataaaacagagcaaccccattacaaaatcctttagacttgtgaaactagtttcaaaactcttaaaacttgttaaaccagtttcaaacatgtgaatagatgtgaaccttgtaatactagttttgaatctgtgaaccctgtaaatcaattaatgaataagtgtacaagactgaagatttcatgttttcattacaaacgaaagattctagaaatattattttttgtgtcaaattcaatgatgttattgcttcagtttagaaaatggttattaaaaaatagttttaccatgtattttttattattaaataaattaatcatttcatcaaaagtagcagaaaaaatacaaatttctgttggatattattttaccannnnnnnngatctactcacaagtatgttgatgaacaccct

SEQ ID NO: 157082 - DNA, 509 bp, Cannabis sativa
  modified_base (309)..(309): a, c, t, g, unknown or other
aagtgaccctcatattttaatttttgtattcataaaataatttaaatatgagattaaagtttgttatttcataaaatattactactatagctccttagagcacttacaacagattttttaaaatacaaaagttttaaaaaatttaaagaattgtattataaatacgttagagtgatgttttaaactcttttttcattttaaaatttatttaaaatactatttattgttctaaatatattttattaattttttattttaataattattttttttataaggatatacctatatattaatattatatatttnaaatgaataaaatatattaatttttttaaaataatgatgtattttaaagaaactgatgatgtatggtttaatgtaaaaatatgctataaaataaaaaatagaattttgatgatttaatttaaaaatagagtagagaaactattgagagtacttttaaaatattttatagaaaaattatatattaaattatataaaaatta

SEQ ID NO: 157083 - DNA, 518 bp, Cannabis sativa
  modified_base (476)..(477): a, c, t, g, unknown or other
tgtgatatatgatttggagtattgataggtattgattttagggttataatggataatgtatgtgtttatgtgtgcaccatgagtttagttaaatttagggtttgatttatatttagatttgcgatttgaggaaatcgcagtttggggaaggcgatggcccgatagagtttgatggggtctgatgcatgtgctgcaaaagtcctatttttgggttcgacgggtccgatgggaccctgattggggtccgatgcatgtgctggaaaaaaatttgggtccgacgggtccgatggggaccacgattggggcctgatgcatgtactgggtaaatttttttttgggtctgacgggtctgatggggaccccgattggggtctgatgggtattaagaaagagagaataggagaggggataggggataatgtaaattgaggtattttaggaatattgtaaaatgtgtcacatcccacaaatattanntgttatgtgtttaggagaaaaatattaaatatatgtaagta

SEQ ID NO: 157084 - DNA, 552 bp, Cannabis sativa
tatagtttatttttcgtaaatattttttaccaaataaaaaaaaaaactgttgtttatttcttttcttttggctctaggtactgtaatgaaattccgaaagttaacttgtcatttgaatttcaaaatatttttgtttagcctatctatgggtcaataattatttgcattgttcgtcctaaaaatctttatccatttgagcgtcaattaatatatctttccaactccaagagtgacaacccttcatcttttcaaatatttcaatacccgtgaggatttggagttaagactttttactttaaagatttttcaatattttctgtgttatgaattgaagcaaagaatatgatttgaagcacgcacacaaaaaaatctggaattatatctactataaatttttatatagtattttctagagtatccactaatactttattttatttcgattagatagagtttcttttgatctgttcatcttggtaatattttgttatccgcttgaattgctagggactagcaataagctagttgggggttgtgttaaatgccaaaata

SEQ ID NO: 157085 - DNA, 590 bp, Cannabis sativa
ggatcattacatggcttttttgagcccaagccaagtttgaggcagggagatccaatgtcgccgcttttatttattttgggaatggaatatctttctcgaatcatgaggaagattgtgaaaaagtaagaatttatatttcatgaaagatgtgggggtcttgagttgaatcacttaagtttcgctgatgatgttctattattttgcaatggagacttcaagagcatatattacatgttgcagggattgaagctcttctctcacacatcaggtttgtttcctaacccttctaaattgactatttattgtagcaacatgactgacgcagttgtacaaagaatcctggatgcatcaggtttccaaaagcaagacatgtaattcaagtatttgggcgtgcctatctgtccaaagagaatctcctcagcagattgcaaacttttggtggagaagatgatggctcggatcaaaacttggagctcaagaaatcttttctttgttgggcgtgtagtactcatcaacttagttctcatggccatacactcttattgttgccaactgatgctgctgccaaagaaaattgtaagtgaaattga

SEQ ID NO: 157086 - DNA, 564 bp, Cannabis sativa
ttaaaaacaaaaattttattttcattgtgtgattaaaaaattagaaaacaaaagtgttaccaaacggaacctaaaagtataaaaataaaaattttcttgtggtagtataatgtaatattttaccaatttttggtattttatgtaaatatcccttaaatattttttttaaaaaaactaaatgtaaatatttaaattaaaaaatgtgtattaatgcctatttgtaataaaaagatatatttattgtgtgctaaatttgatacaattctatatctttagctaaatttaacacaacttttagtatatcaagattcaacacacaggtagcgtttagttggaaggaatataaaacataagaatgagagtgagattagaaatagaaatagaaatagaattaaacttaaaatacataaaaaaaaattgataaaaaaaatattaattttttttttcatcttgcattgaaattgttattctttcaatttcaaaatggaatagtcattccactaaaatgatagaaaagttattctattgaaatgacattctaatacttaaaatacaatcaaacat

SEQ ID NO: 157087 - DNA, 790 bp, Cannabis sativa
tcctggacctcggcatccccttcacgatccacctccacttggatggctggatcttgttcggcgctgggcaaagtagcgtgccgagccacttgagcatcagatgcgtcagccagacacattgttttctttgtacgagccatcattcaatggctgggtacaagatctgaagaaggtgggctagaacgaagatgagggtggtcctcgttcagaagttgaagcaggtcttggtcgatccgatgttcgctctccaaaaactcacctgtgttaatctacaaaagacaacacacaagatgagtgtttggtcagaatatcgaacgataaacaaagaaaatatgccgaccaggagtactcaatagattaaagaacaagaatgttcaaagaaaagtcagaactcaagaagtttgaaattttcttgagttagggcaaaaatttcatgaagcttagaataagcaagatggaagaccggcgtaatgcagttcagaaagaaagcattatgaactataaatcgcatgaaatcatggcaaagaagaatcacagagtttctaaacctagggttttctacgaatgtcctacagcaaagcaaaaggtgcatttgaaatgtaaacatgcaaaaataagcataaagggaatcgaaaacttactcaagagtcagatatctgggtttgagaacgtcaatccaacgagtagcttcgatggaggcacttcagcagacttgaagccaaaaacctctcttttcgctctgagctcacttagcaaagaaaggtggtgaaaataagtttatgtgccaatg

SEQ ID NO: 157088 - DNA, 538 bp, Cannabis sativa
tgcggtaaatctcacatttgaataacagagacgcatgtttgccgaatggagggacaaagagatggaaacgttaagggctcagcaagcagtcattgacggccgtagttggcaagccactgtgctgatacgaaagggatatcaaactgcttggcagtagcccacgaatgtcatccacttgggcgaaacagacgaagatccagcgatgaatacctctcagactatagatggtcagccgtcaaatccccggtcacaggttccgcttgtgggccaaatggtaggcgggcagaccttgtctagtaattcatcgagagaagtcatacccaataactccaaccaagttattggtgacagtcagcaaattggccaaactaaccagtcactgagacaactaagcgtttctatatttgataggttggggacgactcatgatctcagaaacgatctgaacaggagaggagtagacgatcagcttgatacgccgatcgtgcagcccaggactcgcgctcaaattcccgctcagaaagatgctaatctgact

SEQ ID NO: 157089 - DNA, 572 bp, Cannabis sativa
tgattagcaacgagctgcacggtatgtttaaaaatcacgtaatacgcctaaggtagttagggtgttataaattgcttcctcaggcccactttggctccctttgcctcggagattactagcgagtttgtctcctatctgactcagttcccgcctaagagatatgccgcttgtgcctccctaaactccatctaccaggttcaagacatcagctctgccatggcttcggtaggtacttgtgatttattccttcccttgatattttgtctaaggcatccgatctcactcttgtctcctttcccagattactgcggagaccagccgcctttccaagaccttaattaaccagggcttcatcatgtccgaatttgggggcatagacgaggccgtgaggatcctgcgggacttgactaccgaaaggcgggcgatccaggaggaggctgaatgaagggaggccctcgctgaggtgaagctcaaggaggaagctaaacagagggaagcccaagcggaggcgaagctccgagaggaggccaagcggagggaggctgagatggaggcgaggcaccgggaggcgc

SEQ ID NO: 157090 - DNA, 545 bp, Cannabis sativa
aactattggctctggtacaaatgtcaacattctttatcatccgtggctccctaatttgaagaatccgtatgtatctgtgcatcaccctaggctagtgaataaatatgttgactccctctttataacggattctagagtatgggatactgatgttgttagggacatgttttgtgcctcggatgcagctgcaatcctaggaattcctctcagtcataatgctactagtgattcctggtcctggatgtatgagaacactgaagaattctctgtgaagagtgcctacggtctccttcagcggcagaaacaaactcagctcactaatgctgtagcttctgggataaactttgggggttgtgtatacctcccaaagtcaaaaatttcttgtggcgagctgcaacaaacaaccttcccacttgtgtgaatctggtttctaggcatgaggaagtgcctactgcttgtcccgtgtccaaagctcagcccgaaaccacatcccatgctttgattttctgcaacattgctcttgcctgctggaggaaggttggagt

SEQ ID NO: 157091 - DNA, 535 bp, Cannabis sativa
tataaatatgtacaaagtgctaaaggctttttaacttgttagatcaagcatcaacttgattgttttaagtattaaatatgagcaaaaacactgtgcatttgacttaatagtgtcacttgctttcacagtttcactctttaaataccaataagtttaataaattatcacgtaattaaaatacgtatatacatatatgtgtatatggtttttggatgtgtctcattcattctgtattaatgtataattcattctgtattaatgtatagtactgttaaaataatttagaaataacatggcattgatgagtccaaaatgcaatagaactggctttggatcgtgactatatcatattttggtactagacagttaattacaagcaaagtcaaaataaaatgaaaatctcaaataatatatatcttacctaatatataaaatgtctatctaacagtttttgttgtgcacttaacagaatataccaaaaaaattagcagaatataccaaaaaaaagttaactttaacagacatctattcaaat

SEQ ID NO: 157092 - DNA, 670 bp, Cannabis sativa
  modified_base (574)..(584): a, c, t, g, unknown or other
tcgggataaaacttaggtatttatgccacaaattactctttaattaatgagctaactcaataagattagcccactaatgggattttttttaggaattacactaatgagattgattacaatacttaataatacattgcaaacgttggacccaattgagatggtaggtgaagttgatgtaacttgtcgtctattgatatgacaagtacagatacaagttgctaatttttgtgggaaaaaagaatgccagagaaaaaagtaggtgtttgtataacaacatttataccttctttgtaaagattatagccttaggctaaaggttcaatttacttgatgtacgcacggggcaagtatttagtacccctttgacgtaaggaatctgcacatgtggaaccttctggtcagtctctctactggatcttttaaaatatatcactaaaattttaattaattttttttttattttatttcaaatttttatattacattactcataacttttttattttttttctacatcatttaaatataatattttgaactttttttattaattaaaagggtaaataccattttnnnnnnnnnnntttgcaaaagttacaaattggatcctgtgttttgttaaatgacaaaatggaccctgtattttttaaaatagtaaaaataggaccct

SEQ ID NO: 157093 - DNA, 876 bp, Cannabis sativa
  modified_base (342)..(343): a, c, t, g, unknown or other
aagttcttggacatagtatcacagtaccttatctgagtgggagaattttaaaattccaagcccatctttatttggatgacacttgtgatagctactatgttatgctcgtgataggaactttagaattcaactgagaaagtaaatttaaccattcatatggatagaaacaacttatcagaattctgagaataagataggagaattttgcaaagtctattcgaatggcttaggcgaaaatccctagtcctcgtgaaatgttttatggtatctctaataattacttaatcttaagcaagtattttacattaatgttaatgctagaatgctatgttgatgacttannctagaaggaacttatagttttagactaagacaatatgtcacaacaagatgtccctaagaaccaatagtaagaggctaagtgtacacttgtgcacgaacttaaccagactgctactgctgagtgggagccatctaagatgtaatcaaacaatgaacattaggagacaatcaaggaagaatttttgaaagtgacctatatgttagatgataggggtgtatattagaatccttatatctacaccaactcataacctattcaagatggtggttactctagtggtggaggaattattctaaaaggatgtaaaaatccatttataataatttaagctccattagtgaagctatataacttagttattttgtaaaacactgaaagttattcaacggaagaaagttcttaactatgttatctctattctatatggataaaattatagatttgtcttctgtatattcagatgcatttaataaatagtaaagaattcagtatccctagatgagtaatgcatatagaaaatgatgttgcataat

SEQ ID NO: 157094 - DNA, 543 bp, Cannabis sativa
  modified_base (489)..(498): a, c, t, g, unknown or other
acattgcctggcctctccttggttccctcttacggttcctattccagcctcctgagtagggaatttcagacacaagtgcctaattaacgtgactgcacaaaaatccaccagggccggtcgatcgaagattgcattgtaagctgttgggcagtccaccaccacaaatgtgcagtatttgaaagtgctttggggtgtgtctgggcacaaggtgactgggagccccactttttccattgggataagtgttgttccattgaaccccgtgagctgggaaccgcttggtgaaagatcccggtccgtgaggcctattgctgtgaaggcttctttgaataacaaattcacagaactcccgttgtcgattaggattctagccacgatcttattgtcaatgggagtctctatgaccagggggtcatgatgaggaaaacgcactgtcttagcgttgttttctgtgaatgtaatgggctgatccatcagccggggcctttnnnnnnnnnnttgagtaacctcccaaacctcactgtgcttcacggcccctgcgta

SEQ ID NO: 157095 - DNA, 679 bp, Cannabis sativa
  modified_base (245)..(246): a, c, t, g, unknown or other
  modified_base (294)..(294): a, c, t, g, unknown or other
tgataaaataatttccaacaacaaagacaaggaaacactgaagaaagtttacagctactacacaatcaaaaacaacttccaatacagtttttgaaaacatatttaattgggttatagtaagaatttttttaatcaaaaactctggaatggtactattccgatcagatgtacttggattttgaatcctataaaaaacataagaaaacactactaaaacaacaaaaaaaaaataaagaacataaaannaagcataagaaaactctggaatggtagtattccaatcgggtgtacttngattcccaatcctataaaaaaaaacataagaaaacactagtaaaacaaaactaaaacaaaacaaaacaaaaaagaaaagagaaatggaaaatataatcaacctaaaaaaaaccctaaaacaacacaagatcaatagaaaaaaaaaccttatcaaatttgggagactttacaaaatagattccaaagtctcgaagttaagtttaaggttgtttatgttgatgaaaaatataaaacaaaaacaaatatatgtgtaagaaaaatgtcacatgtaagacatcatgtaatataaatatattacactcacgatgatataattatatatcatgatttgatttgccacctttgtcgtttctcaactcccactttcgaaaaatagcttcaagat

SEQ ID NO: 157096 - DNA, 652 bp, Cannabis sativa
gccgaaatacaattttgggataatgtattggcattttattgatgtgttaataatctgaaattatttgaaataatgtgtggctaatgacatgcttgtccttggaatgtatgtatgtatatatgttatttggccctaggggcatttgggtcattttggatgtatgtgctatttgtaattaaagcaatttctagtaaatgaaatgagaatttctggttttccttcagccctaaaccgaacccctccctctcactatactcctcttcctttcacttgataattggtgtgaaagtggtttgattcaagcttgaattttagaggtgattgagtaggatctttacttgaagcttgaggtagtttttacatcttttaattttaagttttattgctgaaatttaagttggtaaagcatgttttttgatgttggagttcttgtatgcatgtatgtggaagattagcttaatcttaatgccttgtgcttagtgttgttaatcatttttggttattgttttagattaagtttaaagagaattttggggattttattggtatttctaatttgttatgcaactctgattttagtgttgtgcttgagtttgtgttttgggatttgaagattcaaggtgtgagcttgaattttgttgattttgctcaa

SEQ ID NO: 157097 - DNA, 636 bp, Cannabis sativa
cgctcttccgatctaaaatttgaattttgtttcaatgaaaaattatttttgaatcaaaaaatatgacaaaaacaagtttggtgcacaggggtatggattgcataccactgtgcgtggggaagaggggatctaaccgaggcacaaggcttcgtggagcctgtttggtcgagggaactcgacgtgacacggcttcagagagcccgtgtccgagtttcctcggtcagggtgtctgaaactgcgtgatgatgtcgagtgtctcccttggtgcacgcgcgtgtgtgtgcatcaacttcacatattttcatccaaattcaaaaaatcaaaactaattcataaaaaattcaaattgagttctgtaaaagactaaattcattaattttttgtgtactttctagtcaaaatattttcataacgaaataaaaaatatttttacaacacacattacgatttccatacaatcatcaaataagcacataactatcatgaaaccatccaaatcaacacaaacattgttttaaatccatatttcatgaaagtaaatcatcactatggctttcaggccagtttctataatatattttatagggatctagatttactaccatgtatgatatttaatgtaaagaccgcttagtt

SEQ ID NO: 157098 - DNA, 724 bp, Cannabis sativa
gctcaaaatatatggaacgcaagagcaattagatagtcgtaaaaaaaattattttaaatatttgctactaaattggtatagttttgactttattttatgaagtgattattatttatttatatattaattgatgaaatttattttaaaatattataatattaatttactgtgtaattactaactatcatgccaaacatgatattaggaattcacatgtaattaccatttgacatccaaacacaccttgtagtttaaaatacaatgtaattactatgcagtgtaattactaccctagtaattacactgcatagtaattacacagttgttttcaaacagaccctaaagttttcctccaaagaaaagctacattgataaaaaaatgcaagacaattcagtgaattgtgtgaattataattccactgacaagttatttgtgtaaagaagatatggaagttgattaacatcccacaatttatatatataattagttttcattcagtttcgctttatattaatgtatattcatatatatacagaactttttggttttcaagttcctagttaacaatgtttggaaaattctgattattaatcatgatgcttaggaatatatactacgtttgatgttttcaaattgctattatatatgaaaatattatttttattatttttacacttgtaaatatatatatatactaggtgattgttacgtgccaagccacgt

SEQ ID NO: 157099 - DNA, 566 bp, Cannabis sativa
aatcacaagtacttaccgcagccatggcgttgctgatgtcttgaacctggtagacggagttcaaggatgcacaagcagcgtaccgttttggcaggaattgagttaggtgggagacatacacgctagtcatctccgaggcaaaaggagccaaggtgggccccaggaagcggttgaaccagtccgtcagcggatccatattcaggtcccacagattccagaagtcctccacgttgaggacgttttgctgctcctctcgcaagaccctcttcaaggcctccacttcagcatgcccctgggtgtactcgccaagggcgtagttgtgcttggctattcgaagattctgcctttcctcgtctctaggaatcgaagtcaacactatgccgagaggcactgtgtattccatcgcctcggagggaatcctggagacatggcttggggccggagtgtccaccctccgggggcgtttagaaggctcctcttctaccatcttgcccctgcgcttgcgcacaggagcaacctcttactcttcttcaccttcttcagcttcctcaagaagtgcctcctcc

SEQ ID NO: 157100 - DNA, 533 bp, Cannabis sativa
atcagtaatcaatttaaaatattccttactattaaggttgtcttttttttaaaaaaaaaaggaaaattcgttcaaggttgatcaaagggcaaaagccctacaagtccaccagaaaaattgcaatctcactaagatatgacaactgttggctaatcacactgattcgaaaggagtaaaaagctcatggctcatgtaggagcatttagagggataaattgccccaaaaaaaagtataaggctaacaccacaaaggataaaaagtgaacaacaatcgaagatctaacaaagctaaataaataaaccaaggaaaaatataaaagaaaaacagcttcaatggtcacctcctgaacccaaaggaagaaacacaaaagcccaaaacaagtcaatcaaaagcagaggagcaccaccatctttcaacaataaaagtcaactcttagtctccagttgttaggggtgtgcagaaagtcatccgatccaattccaaccgaccgatcaaattccatctgatccaatagaatcggatatccaatcat

SEQ ID NO: 157101 - DNA, 1204 bp, Cannabis sativa
  modified_base (61)..(79): a, c, t, g, unknown or other
aggtggaggtgtccagcaatccttcacaggcggcgaaggactaggcaagagagaagtatgnnnnnnnnnnnnnnnnnnnccaatttggtcaatacattttacaatatcaggagtaccattattgtgtatcacctcattacgcattctccatatattgtccacaacaatagaagcataaagaaagacatcttcaactcggatgcccctcttattgaggctccaaatgaatttcacccaatcccaaactcgaataccggaactacacacaggaaagattccccacggtgatgaacgccacaggtgcacatagctacacatcacaagtgtaagagaaaaatagatgttccatagtttcctcactcaaaccacataacggactatcctcaatctgaactcttcttttaatcactgctcgaactgggagagcttgagagagaatgcaccaccaaaggaccttatgacgctccactattttactattccaaagtttgttccacagtgctggggcgacattacaaggaggtgctctctccaaagcttgagacagataagccgatttacaggagaaccgcccattactctccaaagtccatatccaactgtcttttccaactccaggggggggccatcttttagaatagctgaaacagtctcatgatcgaaaagactatttaacttatgcaaatcccatccacccctaggagacaagagatcagccacacagttattgtccattgctacacttccgtttggtttcggaacgaaacctttcaagtgagggatccaagggtccctccagatgctagtgtctcttccatcagccaccctcttgccaagcccctttttgaaggattgcattgcttttatgacattcttccaaaaccaggaatcagaatctttgtacttgcactcaggaaaatcctttcccctaaggtatttagcctccaagatcttacaacataacgactgactcccaatcaataaattcaacccccacttagccaaaaaggcaaggttcattttctttgttttccaaaaacccagacctcccatagacttaggaaggcaaagcttatcccatgctttaagataaagaccatggttcccttcctcaaaaccccacaagaagtcacgaatcataccatcaatcctattcacaaggcagttagaaaatttggttgtctgcatggcatagatgggcaaa

SEQ ID NO: 157102 - DNA, 531 bp, Cannabis sativa
agtcagaaaataaaaatttatcggcataccacccatcaccaggaaaggagtctcagtcgaaccaacaccaattcaagaggatgtgggagtggagtaggacttgaagagtcagtagttgattcatgtgtgaaggacaattagttattaatttttttagttgtttagctatttagtttgtttgttgtttttttttacttttcacatttcaattttattagtaagaaggaaaggaatttaacgcttttcttaaaaatttagaaattatgttattaagaattcataagactttttttgatgaaaaaaaaaatgtattagttttgtttgacaacattaagtttagatatgtgcatggaatcttctcttcctagaatttaactcttttgtctttatcaatcttttcaatgtttaggcttagattgtgagggatcacaattgcaactaaaaggtcaattagaatcaatgtgaaaggaaagaccaatagaggtgggggctaaggatgtatgttccgctgacccacatatggttgatttt

SEQ ID NO: 157103 - DNA, 603 bp, Cannabis sativa
cttttcttgattagttggcagggctaagactggggctataattaactactgctttaattcttagaagctttcctgacacttatctgaccacacaaatctttgattctttctagtcaactcggtcaacgacattgcaatctaagagaatccttccgcaaaacattgatagtaacccgctaagctgagaaaactttgtacctcagtaactattttcggccttggccaattttttactgactcaaccttctctggatccaccataatctcgtcttttctgacaatgagtccgagaaaagacacatgtgatagccagaattcacactttttgaattttacataaagtttatgatccctgagtcattgcaaagccatgcgaagatgttgctcatgttctgtttttgtctacaaatatacaaggatgtcatcgataaacacaattacaaagttatcgaagaaatccttgaatactcgattcataagatccatgaaagctgttggggcatttgttaatccaaatgacataactaggaactcataatgatcgtacctggttcggaacgctatctttggaatatcttcctctcgaattctcaattgatggta

SEQ ID NO: 157104 - DNA, 635 bp, Cannabis sativa
aaggtggcccagtcgacaccaagggtgttgtagtggttactggagacgagacagttgtaggatgcatattcggttgggctagactggtgacaggggcaaatacagacggttccccctgcacatgtgcgttacttccggacgcatcaaaggatgctccaaacgaatctctatgaaactcaggcagagaaatgtcaatagatggaggcacataatccccagaataacggtgcaaaagagtagacttgatagtgcgaaccattttatacatggaggcctcaaatgcaagctggcgcttttgatccttcttatatcgtttgagaaaagatgtaaactcagaaaacatttgaacctgccaactggaatccgaaagccctttgaacataggagacttgcctttactgaccttggacacagaaggagtggttgatgaaggctgcctatcgaccacagagagaaagctcttactgagtacaggattttgaacttgatagtcatgcgttgtaagaggcgggtaagcagccataagtactcgttgaacaaggcttggaaagggtagcttgttacgagtgccagtagtttctgaagcttcaaggatccgttcaaatatgagagatggcagatcaatggacacatga

SEQ ID NO: 157105 - DNA, 684 bp, Cannabis sativa
gcattccaagaaagtttcaaggaaccttgaatggctgctttaccaaacttatggcgactgatgatcttacccaacagaacttggttagcctcttggggttcgtcaacttctcctggattgagcgcgaacgttaagtcatcttgtgagatttggactgaatcctcaaataaatcgcaaacctttgtcggatccattccaaagactgctaccaactggactcagaatggaagagaaagttctctataataccagcacggaagagaataactctctattacttcaatgaagtgaactcctaaagagcataattcctctaacattaattacgtattagtaacatgcaattgtttgtaacaaaattgattgtatgctaattgctattttggattttttgtttcatgaattattgccattacttaaattatattttctgaatttttttacttgttaaaacttttccaaacctatttacaactctcaaatcaataaaaaatatattaaaaaaatatattaataataactaaaaattaatagtttttttaatgtcacatgatcccatagaagttacaaattgggaaaattttatttatatcttaaaattttttaaaactccatttttttatttttttattttttttttcttccaattcatattaaaaaaatatttattaaataaaaataaat

SEQ ID NO: 157106 - DNA, 569 bp, Cannabis sativa
  modified_base (191)..(193): a, c, t, g, unknown or other
tcccgtacagacttggggggcaaatgttatcccaatttttacactctgacgtggcatcacatgaatggtgacacatggaatccacttggagcatccgttcgggaagcataatccgagcatgatatctctctagcatgcccagagcaaagttttcagcaatccgcggagagcaaccaacacttagcgaattnnnctttcgcatcatgagtcatcaactaaatccctataactgagggatcagactacatggatatgacatatttcacgatcaatgtattcaacatcaatcccacgatctttgtattcagcattaatcccacgaactttctgtttatacacaatgtaacgagaggggaaactcttcctctccaagcttactagccctataaacaatgatacatgttcactgggcaaggggtcgcaaatagtttagctgagatgataccataaatatattatttaagaaagatatattcaaagatactgttgtaagagttattagaaaaggaatctttctccttgttcttaagtcaatacaagtaacaagcattaggctattaccgaactgc

SEQ ID NO: 157107 - DNA, 589 bp, Cannabis sativa
agaattcagaatctccaaaaatacccttttgtacccctttaatgccattttagtgtgatacggcaaaatggtcatttttgcccatttgtaatttgtcttttatggattttttttaaatatgttagtaatctgatttttttaatttggtttggttgaagtaaataaggaaaaatcaattttataattcattttattcaaaaaaaattgaaaaaggaagcaaagtctcatttcttcctctcaaactctctttctctctctcgaaaatcctagggctgctagggtttgtttttgttcaccaaattcagcaagttatcatcaatcttagagtaattcaagttgaggtaatctttgttcaagcttctctttgttttcttgaagtttaagaaaaaaaatgaattattgcatgtttgatgaatttgtggttgtggctcttgttattgtttattgttgttttctaaagtttgaatatgtttaattgagtatattagaacaggttttgattcatgttagttgattttaagcaagtatggagttttgaactcaaactttggtttttatgagtgatatgttgttttagcttgttgtagct

SEQ ID NO: 157108 - DNA, 502 bp, Cannabis sativa
atgggaaaagtgaggctcccagtcaccctgtgcccagacacacctcaaagctctttcaaatactgcacgtttgtggtggtggattgcccaacagcttacaacgcaatcctcggtcaaccggccctggtggattttggtgcagtcacgtcaattaggcacttgtgcctgaaattccctactcacgagctggaataggaaccgtaagagggaactagggagagaccaggaagtgttacaacgttgctgcccacctacccatcctaatggttcgtgaaattattgagccagaaatggcagaagaagatgagttggatccccgtgtgggattcaaaaaaattgtagaacccatggagggcgtcgaggaagtgtcaatgtgcgacctcgaccccacaaaggtcctacggataggaaaaagtctagagccggaggagaaagaaaaaataataaagactttaagggacgctacagatatttttgcgtggtgtcaagaagacatgaccgg

SEQ ID NO: 157109 - DNA, 641 bp, Cannabis sativa
gcaccaaagtttacagcatatatgccgtatggctatagtgcacggcatatatgtcgtggcactgtagctacggtatttttttttttaaaagaattaattattattatttaatttatattattgatattaatattattatttatatttataagattaaaaatgttattttcacaatagacttccttaaaataaatcaatcgatgcacttctatttattatatgtgggataattttttagcttaatttttgtatggtcgtctacattatagctatttaagaattcttacaaagttttggaaaattcgaaaaaatttaacatgccgaaaataaggttcaaactgtctattgcacgtgaaactcttttattttatatgtgcgtgaaatagactgtttaaaccctattttcggcgtgttaaaattttttgaatttctcaaaattttacaggatgtcctaaataattgcaacgtagaccaccatgaaacaaattagactaaaaaattatcttatatgctgaaataaataaggatgcattggtggacccctaatgcattgtagaattttagtttatttttttatagtcatgtacattatagttatttaagatatcctgtaaaatttcaaaaaaaatttaacacgccga

SEQ ID NO: 157110 - DNA, 546 bp, Cannabis sativa
aacttaatctaaaattaatactaaaaataacgtaacagattttgaacttgacagtgagttcattcaactagctaaagtttcgaaggtcagtcgtttatttttgtattttttaggggtttttttttttttgttttttgtttttgtgatttgtatgttgttgtgttttgattagttcatttgtaatataataacgttctattttatttttatattttgtatgtacgttttgttgttttgtgttgatttatacgttctataacagttgtattcttctccttttttttctttatgtttttctgtaggggaaggggaaatcccatattgtgaatattccttctaaatttggggttgaagagccttctggtgatgttgttgttgaggtttgtggacttttttttttaattttttttgttttgcgggttgtttttgtgttgttttgaaatgtatatgcatgtttttaatccaggactggacatgtaaatataggtgatcccaatattatcattctaaagtaataacttttagttattattcagtcattaacga

SEQ ID NO: 157111 - DNA, 526 bp, Cannabis sativa
aagttagcaataaacatgttaacacttctaggttgtttttcatgtttgattcattaatggggattagtaggtccaacttaagttgtgagtttgggaacaagaccaaaataaggttgagaaaggaaaaggctgctcttggtgctatattgtttttgtttgcctttctttatgcattttggcatatgggcattcactttcctatgccttctcctcataaaggtttcccctttttctttctcttcaagtatatatgtatatatacttctatctgaattcatattcattcattcacatttcattctcaggtttcttcaccattcctcaattgcaatcatagctcaaaatgtaagaaactttttccaatgtttttgcctaattaatcattaaatgacatcaaatttatacattaagtttctactattttcaattgcatccagttcgttagaagtgtaagtgtaacgtctccgcttcaagcctctattgggcccttacacccacggacaaatgactcttatacacgagtacg

SEQ ID NO: 157112 - DNA, 695 bp, Cannabis sativa
  modified_base (319)..(319): a, c, t, g, unknown or other
  modified_base (649)..(658): a, c, t, g, unknown or other
tcatcatataaagagcaatcctaacaatatctctactctatcttttaaaatactattaaaactctattttttctattttatcttacatatttatatattacatcatacatcaattactttatattttttatctatatcatttaaatattatatttttacatcatacatcaaagtacggatatctacacttgtgcggattagattgaattggaaaatttaaaacttgtactgtacttgtgttgtgcggatgattgaatttgaatattgattgacatgtaaaagtaaccgattcaatctaatctacacatatttataaaanaaaaaaaaattaaaaattatctatacaaataacattttaatgtaaggaaaatattaatttcaaagtctaatacatataatacaattatattttaaaacttaataaatcaattgtatattctattcttatattttttttttctacacacaattcaaaataagattaaatatttccttatacatacaattttttttcttcctttgaatttgtttttactattttatttattttaatatgttgttggagacataaaataattataatttattttattttgttgctactacttatgtgaaaaaaaatattatttttcataaatattaaataatnnnnnnnnnnaaagtaaccaatctaaaataaccgatccaatccgcac

SEQ ID NO: 157113 - DNA, 1082 bp, Cannabis sativa
  modified_base (323)..(325): a, c, t, g, unknown or other
  modified_base (596)..(610): a, c, t, g, unknown or other
  modified_base (738)..(738): a, c, t, g, unknown or other
  modified_base (895)..(898): a, c, t, g, unknown or other
actgattttctaattaaaatatatatatatatatatatattagtcaatttattttaatcaaatcattatcaatgaaaattacttgatttaagttgaactaaaattcattgagaaattaatttttaactttaatttaattttcaaaattaaaaaaattcaaaataccgacatttaaattaaatgagaaatgattcttaaaataaaaataaaatatatattgaaaattattctaatttaagttgatctgaaattgaaaaaaatttcgacttaaatatcattttatatttaattaaatgtattaaaatataaataattaagtatcnnnattaaaatcaacttaattattaattttaatttaatatctaagaaaatattctaattaagttggtccaaaattaattgacaaattaattttcaacttaaatatattttctactttaattaaatttcatgaaatagaaataaataattaagtatgttgaatagaatcaacttaattattaattctatttttaagttctaagataaaatagtctaatttaagtttgtctaaaattaattaacaaattaatttcaacttaaatatatttttctannnnnnnnnnnnnnngaaaatataaattagttactagaactcactatctagaatcttttctttaaactaagtgtgttttttctaaattaatttttaaaataatccaatgaaaaaaaaattaatttatttcaaaattaattatnttgctaattcaattttaattaggttaaactagtataattagcctaatataattatttaattaaggcaaatgggcttcacaattggggttttcatgtgagggagggtcgggttcagtatatcgtacccactactaatggctccctaactctcacacannnnccaaaggagaggaatttaacctttcattaaataactgttattcattgaataagtccaatactaattgggcttaaataaattttcaaaagtgatattttattctagcaacctagtacatttatttatctagaaataaatgtgctttctatatgcatctaagcccaaaagtaaacatataggctca

SEQ ID NO: 157114 - DNA, 515 bp, Cannabis sativa
acattttgttgcatttgttatgttatttctttttctaaccaacttacatccttttttttgtcttcaaaattactgtcaatgattcttttattgtggttggtttaacttctaatttgaaaccagtatttgttaggagtgtttgcggtgcgagtagtgcgatttttgaccatttttttcaaatcaacccacacatgcagtttttctaatttctcaaattgcatctgcaccgcaaaactaaaaagtcgcaaaaaccacaccacaaaaaatggtacggtgcagcttttgctgcttggattatcactaataattaaactattacaaatacaacgaagcttgaataacacttgtcaaaaatatcataaaacttaaaaataaatatgaaaataaattttaagtttcaataatacaataattagtgggtttagatcaaacattcacatattgaatctaaataaatataaaaattaaccgcactataaagaattttaaaccgcatttttttttttttttttttt

SEQ ID NO: 157115 - DNA, 536 bp, Cannabis sativa
gtaattatatttgcaccccaaataattataagtacaccccctgtttaagttgaccccatttaataaatttaaatattattttttttttgagaaaaacactccatctatttacaattatatgctttgaatcaaaagtacaccccactccacctacctttaggatttttattccctttttctttcattaattttttttttctcaatcttcatctctcttactattaaacatagtatcaattttgttatataaactgttatcattggaatataaagaatataaagcctacgagtcttcaattatgttcaacaaaaaaatcttttgaaaaaaatacaaattaattacagagttatagtaatataaaattaaaagaatcaattttttttaagaaagtttacggtaacataaaccacatcaaggagagataaatctccattaacataagaggaagttattggggaactcattcccaaaatcgaaactcttatacaactaaattaatatcatacatatcgttctcttttcaaaaaaaaaaaaa

SEQ ID NO: 157116 - DNA, 549 bp, Cannabis sativa
tatcactaagaaaacaacaaaataataaaatatataaaacactggaaccaaaatcacaacaaaaaatattaaacaaaatagagacaacatttcaaaatcagggcaaaatcgaaaagaaactgaaacaaaaccttaggaatttgatccgcatgcttcttccccttcttaatttctggaattgaactctttcctctttattttttttttctttaaaggactgtaatcctattttttgcactatgacgtggcagttagctggatgacacgtgtctcacactttcttacctgggcgaaaggttacactcttagtagccctcaaggattggtagaaaggtccatgttatccatacatagcaggatgtttgggtaaagtcatcaaggaaaatttgcccaagcttgatcgtgtgatcaactcgcatgcaccagccaggaaatgtgagctggcaatttcgaagagggatgtcgtttttccaagtgtgcatgtcacaaagataatccctacattcgtgggattaatttagagaataaaggcaataagcctagatttcc

SEQ ID NO: 157117 - DNA, 500 bp, Cannabis sativa
  modified_base (28)..(33): a, c, t, g, unknown or other
ggccaggataacttcttcttgttcgtgnnnnnntgttcgggcatacctctcccgagccttgcccgtatctccaaaaatatgcgggcctccaatgatgacttgtagatgtccatctcccgatggaggtagtaattcttggttattgtcgtttctctgaccctgatcggtcttgacatacttctgcaagtgtgggttgtttttccttatcaagaattcaatttcccgcttcaagttattgcattcattagtgtcatggtcgtagtctccgtgacatcgacaaaattttgtcatctccctcttgctgacatctttcttaatgggctcaggcttcttatatggggccagtgactgagttgtcatttaaacactttctacgtcttcagtcaagatagtgaatgcactgcactttgcttgattctcccgggaagcttgtttagatttgccggtgaactttcccttcttcacattcccttgcctatggttgttgttggaacgtttac

SEQ ID NO: 157118 - DNA, 581 bp, Cannabis sativa
tagagagtccatccgccaagctagcctaattgatgaaccacacactactgattgcgatgtatttgctcagtagagacataaattccttgatgattaatgtcgcaagctgttttctcattgttcctgaaatcacaaaaaaaaaatccaaaatgaaaaaaaaaaactagttaaaaaacaaatatcagcaaccattaaaaacaaaaataacaacataacaataaaaaaacatacttcttcttcatcaactgagcacttttgatccacttaacgtatcccccacaatctttagggcaggtgttcttcccaatctctttaacaagaggaaacaactccttagggtcaaaagctaattcgctagatgcctccttatccttcttattccgaattttcggttcagaagaaccaaactcgttgacaaaaggagatctacaatgcaatccaggttttggttgtctcttgacagcaacactggattgcaaaggcattacatctagaacctcaacctcatcttccacagcaggggatgcagactaaggaattgataccaaatcccattgctcattctttgcactaagtgggga

SEQ ID NO: 157119 - DNA, 774 bp, Cannabis sativa
catcttctggcataggtggcatggtgcgcttttcttaacgcctagaggttccctctccatgtggttatggagttacaaaagttccttcactttggggttgattaactttcccccttgggacttcagcatcctcctcaaaattggtcctcctggtactcaacactattgttgtgagaaaagtaaattaatgattttcccaaagggaaaacaatcaaattttcactacatcactctcaatgaaagcaccaaactgtattgagagtgctctctaatcctatcaatgaaagcaccaaattattgatgcggtttttcatcaactgatctaagaagatcgtaaaataaagaaaaatgcgatgaattaatttgactaaataaaactgtaataaataaaatgaacaacaacgatttatagtagttcactcccatgtcacaatggtaatgaggctacgtctactttttattgattaaatctaacataccagagttatgttctcaagagtgtgtggataaaaatacaacgaaggatttctaggtgaaatcttaatcgagacctatgaatagaagactcatgggagactcaattatcataaatctaatcaaagttgaaggttgtaaggttcttgggaacaataatccaataaagtagaaaaaaagatgtatttcaatggtgtttgaggtctaagtgtcgaaaaattatggtggactcaaggattatatgaagcaagggatatggtactcaaggattatatgaagcaagggatatggtgttcttgg

SEQ ID NO: 157120 - DNA, 717 bp, Cannabis sativa
aggtgggctagaacagagacgaggatggtcctcgtgcaagggttgaagcaagtcctggtcgattcgatgttcgctctcccaaaacagagttgggttcatctacaaaagacaacacacaagatgagtgtttggtcagaatatcaaaccataaaacaagcaaatatgctgaccaagagtactcaacagattaaagaataagaatgttcaaagaaaagtcaaaactcaggaagtttgaaattttctcgagttagggcaaaaaatttcatgaagcttagaataagaaagatgaaagacaggcattatgtagttcagaaagaaagcattatggactgtaaaatcgcatgaacccatgataaagaagaatcccaaagtttctaaacctagggtttcctacatattttctatagaaaaatcaaagacgcattccaaaagtaatcatgcaaaaataaacataaaggagatcgagaccttactcaagaattagatgtctagattcaattaacgtcaaaccaacgagcagtttcgatgaaggcacttcagcaaacttgaagccaaaaacctctctttttgctctgaactcacttagcaaagaaggatggtgaaaatgattttgtgtacaaatccttgttggtatttataggcaagtaacgaaaaggggtaatcatttcaaaagaacctcagacgcctcggttcccccttaaaagcaaatatgggaaa

SEQ ID NO: 157121 - DNA, 638 bp, Cannabis sativa
taatatataaagatatgtgtgtgtgtttggactttggagacttgggccatgtgaagcatgttatgggccttaggccatgttggtgatgttgatgattaaaagatgatgagattgcattgtttttataggcttttgaaattggatttttgtattttcttttatcacttttcttgaaaaataacataaaattaaagtaaattaaatatttttaataaaaaataaatttaccattaaagttatgaaatatttaatttttattaattttatatgcataattaaaggcttaaatgtataaatttgagccttaatcacaaccctcaactagcttattgctagtctctagcaattcaagcaaaaaataataataatgtcaacatgatattttcaggtcaagaaattaaaaatggaacaaatatttaagcaaaatattagtaataagccaataagaattacacaaaattaccttgaatacatctagagttgtgagtgtgtgcaccaaacttaaaccttcttactgcaaaccatagcatataaatgctttcgaaaaaatataccaagtagaagtctcaactccattagcctcacaggtttttgaaaatatttattcatggctaaggatttcactcatggagttggaa

SEQ ID NO: 157122 - DNA, 616 bp, Cannabis sativa
ttgagtttgaggctttagggtttcctaatgtgcattttaaacctcatttatttatttactttaacaaaaaaacaaattttatttatttacttaaataaaaaaattaaagaaattaataaatttaaaagtattttttttattaacatatagtgacgtgcgaggcatgattggatacacatgtcctaactcgtttagcgcgtcactatatcataatattaaatttatttaaaaataattaaatataagactatgatatagtgacacactacgtaagtcgggacacacttttgcagtccctcatggcatgactctataggtcaatatatttttcaaaaaaaatcataaagtaatgagtattactctttagtgactcttcatatttttagtgacacacattataagagactaacaccgaatgtttagagtctcattatgcgtgtcactaaaaatcactcctagctctttagtgacacacacttttacgtggatctctaaagagtgtcactaaaagaccaaattgtagtagtgaatactgccacacgacaatactttcttttttagtgtccaggcccattttttttctttcatactatccaggcccaatatgtttactttt

SEQ ID NO: 157123 - DNA, 593 bp, Cannabis sativa
  modified_base (363)..(364): a, c, t, g, unknown or other
aacaaaatcaactacaacaagcacaacaatagatttatcatttctccataaaaaacctatgttttgggttaaaattcaaaacttgaacaaaaacaactagcatgcatcaaaacctatcctatttcactcaattaaacatttttaagttataaaaaacaacaacaacaactaacatcagctattactatcaaaatcattaagcatgcaaatattttctttcttaaaattcaagaacacaacaagaaaagtttgaagaaccataccttagcttgagatcactaccaacaagttgaaataacaagaattacagagaaaaattccagccctagcagccccaagcaaaaccgaaagagagagagaganngagagagagagagctcttgagagagaaactttcttattttttcaatatttccaatttttgaataaatgatgaaaatgcataatctattctttatttcagcctaaataaccttgcgtaaatcacattatcaccaaatttaagtccacaaaaggacaaaggcttatggggcaaaatgacaattttgcccctcccacactaaaagggttaaaagcacttaagggtattttgg

SEQ ID NO: 157124 - DNA, 555 bp, Cannabis sativa
atcaaaagaaaataaaatcaacaagcatgtaaggtaactttgttttgttaaatttagattgttcaattaaactttactacattagtgatacaaatcgacgacacatgtaaagaggaaacaaaattgatttttttttaaaaaaaaaaagaattaaataaaggacgcgtttggtaacactttttaattaatttttttgtttttttaattagaaaagtgaaaatatttttaaaaaatatgttctataaaattatttttatttttcaattttttaactgagaatcaaaattttaaaaattttgaaaaaaaaaaatcacttttaaaatatttttaaaaatagtgattactttagtattcagttaaattaaactaaaaataatatttttttcataattaaaaatttatttataaaattatatgttttgttacaaaataaaaattttgaataggtcattatattcaaatataagatctgaaatggaatacctcctacaaaatagagctattttacaaaataaagtatgaaaataaaaattttaaaaacataaaatataaatt

SEQ ID NO: 157125 - DNA, 534 bp, Cannabis sativa
  modified_base (140)..(141): a, c, t, g, unknown or other
attccattcatgccttaagttcccgataaagaatggggtggggtgcctaagaggaaaccagtaggctactttggaatgttataaccttgccataaccaaggctaaaaatgaagtatcctctagccagagttcggacaagnnaaaaaacattactaagtagggaacctcccaaggcaggaatgaagatgtggatcctcaatttggggacccaagcaacaatgttaaaacagttgaagaacttgaagagattgaaatcgacccgaatattcagattagaaagcttaagattggaaaaggtttgtcgctcgaagtaaaatcagcaatgataaaatttttgagagcaaacctagaaatttttgcctggtcacatgaggatatggtcagaattgatcgttctataatttcacatgtcctaaatattgatcgaaacttctgactagttcaacaaaagcgaagactattggacaaggagcgagccctagctctgaaagaagaagtagagaagctacgcaacaacattttcataattgaagc

SEQ ID NO: 157126 - DNA, 573 bp, Cannabis sativa
ttgagtttgaaaaagtgttttaggctgattgggtgtggaaaggagtactatgtcaaagcgtaaatttattggctggcttactgcgttcaagaaattacaaactagagatagacgtaaatgctttcgcaattctgcatatagcagacgttttttttttttgtgataataatgaagaaactgttgagcacctttggttcaattgttgttcgagtgaattttgttttagggattgttgaaggattggttggggtggtaaattcggcctgctaatctcatttctcagcgttggttgtcaagaaataaaaatttcaaatttcggaagaatgtattctttgcggttcttcttgctgttgtgtacataatatgaacggctagaaatattgcttttaggagcacaaagtcacaagaagagaggtaattgtcaaaaatgtaaagactattgtacataataggataagctattaggtacattcccatataaggtgtagatattgattggttttgggctttaaagcctttgtaatttatttatttgttgttttggtatatttagagctttgtgatagttttttc

SEQ ID NO: 157127 - DNA, 551 bp, Cannabis sativa
gcagagtgggatattgatatcacaccacaccttgaatgtgaaaaaacccttagtcacaatcttggttaaatcagccttttgaacttcaatggtgtctccagcaaaccccgccaatcaatttaagtttccctgagttattgagctagtgggtaaattaagtattcgcccacttagaggaaatttggtaaggactttatcccaattaataggcatttcagtcatcctttccacaattagaagcccattattcagaaaccaagggttcttggtcaatattttgtccaaatcttgggaagatttgaaagaaaagaccaagaaacttgcttctttaatggtgtgtttgatctccacaccccaattcctgtccgcaatgccccaaactcttccaaggatcgttctcaacagagaacgactgattggtcgattggaacaaaacctccccatcgcacataatgaagctacctcagtccctccagccatgttaatttcccagccatcttcgtctagaacagttaggttggtagttttagcaagtaggtcttccatggtag

SEQ ID NO: 157128 - DNA, 592 bp, Cannabis sativa
agtttacttgtatctttgttattttttatgatagaaaaaatgcccaaaatactttttcagaaaaataattagaaacaattagaaacagcccaggttgacattttgtcaacctgggtgcgcggcccagcatcaagtgtcaacctgtgcactaaatccagtttcaggccaccagttgggtctattttattctcggaaacactttcattttaatcttttacaaaagcaaagaatatgcctagaagacttctcagaaaaactcctcaaaaattgtccacgttaataaaatgtcaacttaggggctaggctagcaccaagtatcaaattggtcattgggatctcattctggcctccaggtgggtctatttcttttccttaaaaagcacacttttttccttatttttgatgaagacgaataaaattctcgggatagatcttcagttttatgtcaacctaggcgatgggtgcttgggacacatgatgctccgggtgctcaaagaaaaaagtgctctgaatttgattctaatgcctcaaatatgttcatgacatgtctaatttatgtcgtggtacaaattttgatccattttcactaaga

SEQ ID NO: 157129 - DNA, 542 bp, Cannabis sativa
tttgtgtgtgggttgaaattgtatctctatctgagatatttttcttcttacaaccaaaatatattttttactattttttttactaattcattctctctttatttttattatttatttatttatttttatttggaagatttgtaggacttagtagtgatctctatatttttttaatggttgtgattaattaaaaatggactgcatattgattttttattattttgtaaataattttactgtattgactcaaattagttagactataaaatgttataattttattttatggatttttctctaatgcataactatatatactaatagcatgcaagtattaagttagataataataatatcatattggaaagtgttactcaaaatacttagattatattttatatttattttttggtgtaactattataaatatttaaattaattttgtagcttaagttatgatggaagagagtagtggttcaatcgatgtaaagaagaatagtgattcaatcgttgtgaagaagagaaaatgtcaatgcggggct

SEQ ID NO: 157130 - DNA, 569 bp, Cannabis sativa
  modified_base (153)..(154): a, c, t, g, unknown or other
tgagtcccagatctagacagcgactactggactgttctaagctccgttactcgaatcctgagtcaagatctggatcaatgtcacgggtctcggtcttgttttggttcaggtacctggtcccatttctcagtttgggttcgggatcgagactgnngtgcggttctaggtctcgaccctagttctgtgtccctagtccggtttcatgtttgggtcttagctaaggttcgggttcaggtcctgagtctaggtctgattcggagtgcgggtccttgtccggttacggtttttgatctaggtccaatttcagttatgattccaagtcgaagtcctagttccactccaggtcatcttcttattttgttttcaattttgggtcacatggtacatgttcgggtcagctttttggtttgggactgggtcccaatcacgtccaggtgtgggttcgggtccttgtcagggttcggttccagggctgggtcccaaatccacacactcttagggttttgtccgagccctgggtccatatccagatcccgatctcgggtcccagtctggttccatttctggtg

SEQ ID NO: 157131 - DNA, 549 bp, Cannabis sativa
ctatagcattctgggcagtttgggtaatgacgtggaaaaagtctaaaaaatgactttcacttatccacatcagcgaatttgtccaagtcacttaaaatgcaccacctgactgctttggaagaaaggagactaaacctagtgggccaaagtggaaaaagattgggcttctattttagggtgtgaattttgtaccctaaaaatccaacaacaaaaagagaaaaaaaaataaataaagggaagtacaccatcatcttgaccataacgtgcagctgccattttttttttctgaagaagagctttaattgcagaaagtacaaagagaagaacagtgaagggggacccaagtgtaaaagaagagaaggacacaagcttttttttgtttgcatttctcttccctttccttttatattttgttcttttctttcttatctttgaatatcaaaaaatttttacgttgtaaaaagggcagcagccatggatgagaaattttgaatttggattgtaatttttgtgttgaacatgagctaattttcttaaggcttgagtagc

SEQ ID NO: 157132 - DNA, 551 bp, Cannabis sativa
  modified_base (404)..(415): a, c, t, g, unknown or other
  modified_base (483)..(492): a, c, t, g, unknown or other
attaagcaacccactcacaaaaataaatatattttaataaaatataatataaaaatatttttaataaataaatagatatatttcttaacttatcccatatctgaaatttcaagttagacatagagataattacataaggcaccattttttgtaaacaaattatatttttaggtttaaagaattttttttttatatttttacgattttcataaaaataacacaaaaacaacaagaacactaataacatctaaataccatcaaaacaacaataaaaaataacatacagataacaaaaaattaacaataaactaacaaaagtacaaaataaaaagactgtattttctgtaaataaaataaaaaaatataaaaatatttaaaattccgtaaaaccgtatttttataannnnnnnnnnnntttttgtgtatttgtaaaataatggcttagaaataacaaatataaagaggtaagttgaaaaataccannnnnnnnnntcaattaatcaaatttacctctatttttatatttagttgaaacatacctctttttatat

SEQ ID NO: 157133 - DNA, 720 bp, Cannabis sativa
gattttaatgaaattgtgagccaaagagagaaaaagggaggcctccctaaaccgaattatctcattcacaatttcaggaaggctttggatagttgtcatttgcgggaagtgggttatgaaggaagtgattatacttggtgcaatggtaggaaaaatgaccttatttttgaaaggcttgaccgagtgtgtgggaattcagattggtttgacatcttccctttaatgaaagttcgtcatttggatcgcattaattcggatcattgccctctcctccttatggattacgatcccaatctaaagataactaatgcgactagatggcgaactcagtttcattttgagagtgcttgggctgaagatgaagagtgttcgaacattgtgaattcggtgtggcaacaagacaagcagatttctaatactagggagctaaagattcggctgagtaattgtggggtggcacttcaacaatggaataagacaaagaagcaagagatgacaaggcacttaaaggaatatgaagataaaattgcactgctgtcccgaagtactaacgcaatggattggcaacaaatgcaagagttggaaaggaaacaaaacgtttggcttgacaaggaggagaaattttggaagcaacgaagtagagcgttatggctaaaagaagggggcgagaacacaaagtttttccataggaaggcgagtaataggaaagcaaagaatacc

SEQ ID NO: 157134 - DNA, 706 bp, Cannabis sativa
gcgtgggtgatcggagcacggtggtcccgtcgttccagtggtcgccgcacaaaagagaagagagagaatgtgggtgtcgagtgaagaagaaagagagaaaattaggattttatcatttttaatttataccctcaaactaaatttatttttaaatttaattattttcagattttttattttattttttttaaagaaaaaaaatatttttttatttatatatttttttttaattttatttttttatttttttaaataattttttatgtgaaccaataaaattgtgccatgtgtacactgtgtctagtccaacatgacacttaacacctaaaatggaaggaagtgttaaattgctaacagaacacgagcattgggggttttaccgctcaaatttgggtttttgggttaagtgaaaccaaaataaaaattttgggggattttgccaccatttaccctttttaaaaacatattctataaaattattttcacttttcaattttttaattgaaaattaaaattttgaaaattttaaaaacaaaaaaaaaagtcactttcaatatttttttaaacagattttttaatcaatgttttggattctgactttcctcagactcagacccaaactcggccctggccttggtgttgaacctagcacccgacctggacccacgcccggccctgaacccagacccgactgaaacaaaatcaa

SEQ ID NO: 157135 - DNA, 561 bp, Cannabis sativa
gatggattgggattgagaaattatagaaaagatgaaaagattgaagattggcaatgaaaaattgaatttttgagagaaaaggggtagggttcggctgagaggaatttgaaattagaatttttggtgtagggttgaatgagggggaaaaattgggatttatagacaaaatcgcgagcaagtcgcgagttggcccaaggctagtcgcgactagcttacattcgaatttaagctgtctctggaaaatagggaagtcgcgactggggtcgcgacttgaaaaataggtcgcgactagggttgaccctagttgcgacttctggaaccaagaattttcacaggtttctgttaaaacccaggtcgcgaccagggtcgcgactaccaaaaagggtcgcgacctaggaaccaccaggtcgcaaccactaggctctagtccgaaaaaaaaagctttttttttcacgtttttcacgattcaacttaaaaagaataatgtctggtactaatctaaaaattaaaaatactaaaaatactaaagcatagacttaaaacataatcaaaaagtctgaa

SEQ ID NO: 157136 - DNA, 791 bp, Cannabis sativa
taaccaaaaagtgttgcataattgtggtggacaaaggtgcttcgcccaaggtcaatgcaagctcaattattccttgactggcaacactatcaccactaaatccgaaagatttaccatgtaaggtattaatttagctttttcgagcctcatcttcttcagtgtttccatgtaaaggaagtttactgaactcccattgtctaccagcaccctttatatcctcttattagggatatgaacggtgatcaccaatggatcgacgtgagggtacctcatgttcttttcatcttcctccaaaattataataggaggctctttagtttttattttctgagaaggttctggagcaaatgcagactgctcgttcttcacttccttcacgtacctcttttgggtgttattgctctctcctgcaatatgtggccatcctaaggttaccaggatatccctctccttccacaagaggaggtcgtaatccctggttgcttgggttgttgggcggattgggctggttatgtccattgccatgcctcttcacatattgcttgaagtggcctcgcacgatgagactctctatctcatctttcaactaacaacactcatctgctgtgtgcccaatgtctttgtggtacttatagtaattggttggatctcttttatgccttgcgtgctcatgggctcaggtttactgaatgcaaccttatgctcatgcccaaggtagatattctcccaagtttaattaagctctgtataaatggtgtaaactggcacgtacttgtcgtgcttcttttgtt

SEQ ID NO: 157137 - DNA, 540 bp, Cannabis sativa
  modified_base (491)..(502): a, c, t, g, unknown or other
gaatacaaacaagtaacacgcaataactcaaactgattatagttaaaaaataaagagaaaatcagcttctaaaacactgaaacataaattaaaaacaaaactagttccacaacaaaatacctcataacccataaaatcttataaagccagttatatttttttaagaagaaaaaaagtggggctcaatcctaaaaaatattgaggcataaatataaacagaactgatttaataacaaaataaataaatacaaataataacatacaataactcaaatataatataaaaaaaccgtttatatttatcaactagttaaaaatttaagacaaataaaattaattctgtaaagcaactaagataaaaacctacacacaaaaactagttaaataaaaaaactcaaacaaaaattttcattcaccatgctccaacctacaaaataattacacacatataaatgatcacattaacaaaataatgttgggttttgtgcccnnnnnnnnnnnnatttcaatataatcagatatacttattaataaagatca

SEQ ID NO: 157138 - DNA, 538 bp, Cannabis sativa
atttggttgagggaaactatttggacgattgatcatggctttcaagtagttctgcaatttgtaacacttgggacgaatgtggcctctcctattacagaaatcacatgtaggaatgaaattgtaattctatagtagattgtcagcattagtcctccttccttcaaacttgagtttaatgggtccagttggaacctatctcttctcagatgagtcagattcgttaatggttgttgaggtggcaggtaactcatcttccttctttgatgaatcgacattggagggcagagaatgctcaacagatagatcattcccttgtttataaagcatcttatatcctaaggaagttcgatcaccatagggcttctgaagctgtagggtttgattgatagcagcagtgcctgggggaatgaattgtaaagctttcttggttcgaattagatcaactgtgagtttatagatctcattctccttttcatcaagaagtctgttgagatttttgacagtgtcttctaactttcctttttcagtctccacttgc

SEQ ID NO: 157139 - DNA, 685 bp, Cannabis sativa
cttagagaagaaaggcagtgacaaatcgaagaaggccgaatagttcggaagggtacgtatatatggaagacgatactaaagttagaatagagttttttttttttgggaatgttagactacagttaaatacaaaatatttttggagttgcaagatgttgcttacttgccctctattcggaggaacttgttttcagtatctattttggatagactaggttatagtcttcttttggaactagaaatatgattttgtatcgtgactctatattggttggtaatggaagtttatgtggaaacttatataagcttgatttatatgatgttgtttctattacttctccctcttgcctttcccttcttctcttaatgttgttgttggttccaaacgtgtaagattagaattgatatcttccatgctttggcataaatgtttgggccatatttctagagatagaatggagagattggtgaaagatggtatacttcaatatctcgatttctctgaattcactgcccgtgttattgtataaaaggaaaataactgctaaggttagaaaagggtaagactaataagtgcacagatgtattggaagttattcacaatgacatttgtgggtcctttgttccacctgctatgggcggctataaatacttcattaccttcattgatgacttttcccgatat

SEQ ID NO: 157140 - DNA, 561 bp, Cannabis sativa
aatattggtcattctcttattttaggagcattttatggtatcattgctatttttctatggcatgaccctaatctttttatagttcccgttgtgatcttcgtggtttcggttagatacttttaaatttgtcaaggactttaactctagtccttatctagtaataactgtgtcctatataggtatatattcatgtccggccagagggtggggcagccagggcctaggccccacaattttagaggtcccgaaaaattaaaattaatattatatatataaaaataaaaatataatatatgtgtatatataaattttgattttataattttcataaaagggctgccagcacaattggttagagagggattatatcttggttggtgggtgatgaatttgattcttgacttcctcaatttatagatttttttttttactttttaaaatagtacattatttaaaatagaataaatattatttataaatatttttggtaaggagcaaagattatatttttttttttttgacaaaagaaagattatattttgtccaattttagtgaaaaag

SEQ ID NO: 157141 - DNA, 594 bp, Cannabis sativa
atgtaatgtcctactatactttaaataatgtgggattattacaaaaaaaaaaaaaaataatcttctagatatgttttgtattaatatagttgttttaaaaattttcaagtattttaataagaatatgataattttataaagtaaggcaaaacatatcatagagtgacattcatcatttatatattatgatttttgataatatgtattaatgttacacgactgcatatatataatgtcattattttattatttgattaaagataaaagaaaatacatgataaaaagtacatatagttctacccatatatgtagatataagtatttactatacgtacgtaaacataaaagccatttataatgcatgcatgcatacaaataacatgcattattattattcattacaattgacattattaatatatatatatatatggagagatattcatatttttaaatgcatgctccaataacaccagcgggtccaacacaatgacaaccaggttggcaaggactccaaggagcacaacctctacccaagcattgattgttttgtgacaacctttccttcaatagtacttcgaaaagggtatcacg

SEQ ID NO: 157142 - DNA, 634 bp, Cannabis sativa
cttttgagatatgcctttcatggatctaaaaaatgaagtcaggacattagttttatacaaattaaactggaattccggtttctagttttgtagtagtttttccacacttttttttttatataaattcgaaacagcccctgctttgattgattctggtcgtcttctcaggtgaagtccccagaattaatggtagttctctttctggttgaatttttgtttcggttgtattgggttgttgcgtagttgcacggtggttgcacgatagttgcctaggaagcagggatcctggattgaaggtgtgtgtaagttgtatttgtgtaatttttttttatataggttgtatatttatttatttggccagctggaaatatttttcgtaatattgttacttttttggttaaaactgaaaaaagcccgtagttttataaaaattaatttaaatttaaagtaatgtcgattctttatttttaattttttatgagttatttgagttgtctgtttatatatatatatatatttcgtacaatatatttattttttgttatatgatatatattattattcttagatgatattatatatatatttttttatgtagaatgtggtaaatattttattagcataatatatacat

SEQ ID NO: 157143 - DNA, 1081 bp, Cannabis sativa
  modified_base (1040)..(1041): a, c, t, g, unknown or other
ttcctagccaagtccacctctgccctcatggtgttggacatggcagcatttttggaggcagcagatttagctcgggaataggtgtaagccaaagcctacacagagaaaaaactctaaagtctgaaccaagtaaagaaggattaaaggaaactgtcaacaaagacttaccttagtgaattccctcaagactcctcccatcaacagctccagggaagactcgttgtcagcaccggccagctgctcacttacctcaggaaccaaccggttcatgtaatgggcgagcatctctttgcctttcttggcctctgaaagcactgacaaaggtggagtaggagcccgcatatgctcagatcccctcttggccaactcggatcccccctttgattgctcaggcctgtttgagtttcctcctcgagaatctttggacttagcaacttttggagtagaaggatccgcaatagctagctcatcggaaaggtcaataacctccccagccggtgcctttccctaggaaggggtcgcctcaccgcccctagatttctaggcaggaggagatgagcttgagtttcctccaactctcttctttagagcatcgagcatcttctgagacatgtctgcgcgaaacaaaaacaacatggttagaggaaaaagggcatcagaagcataaagcatgatagtcaaaaactttaaaaataagacagaatatcctgcaaaacgattgttcgagcaagactcgagagtccatcatcacctgacaagtcccttatctccgccatgatagctctcccttacctagtacgggagaagatggccgagcaggtaaattgggctccctaattcgaatggcatgttcaacgggcctgggctgggcgggaagtttcttcccccttttgagaaagtcacctgctcttcctcagcctcatcttcaagattcaagggctcatgatgttgggatttatgccctaaataaaactctatttcaatgtagtctctatgatttaaatatcaatatagagacagaagtattttcatcacttatnnaatgtgtcatttggttcatgttatcatttatatgtttatt

SEQ ID NO: 157144 - DNA, 706 bp, Cannabis sativa
gtatctcagtatttcaaggaacatataatcgcatatatgaacattagaataccgtgacacacccaccatttgaaagacttaaccaatgttccgacaacaaaatatacagagtgcaaaatcctaaagctttaagcaacgactagaagtgataaagtctctgtgaaacctaggatgaatggacgtacgagcattcgaagtgttcattcgaatacccgcgtgtattcaaaagataaggttgcgattattcaaacattcttcctaaagtccacagttatacaaatttcaggtcattttctctaagattacccagttccatacaaaaaaacatggtcctatatacatttcctacaaacatgcattcctaaaaaccctcaaaacccagaaaaaagtattttttctccaaaacagaaaacgaaaaagtaataaaacttgaaactaacctttagttttggtaagttgttcctgcgattgctctcgataactcctgaggttgagaaaattctagagagagaggcagaaatctgggcaaggtgtgaaaatctctttgaagtctctgaaaatgagggaaaatggagaattttgattcgaatcaaagagtttaaatacccatatccctcatgaattgggatcacgacacgtggcaaccagatcgcctaaggtcacccaatctaacggccaataatagccacgcctacacgaaaaccga

SEQ ID NO: 157145 - DNA, 765 bp, Cannabis sativa
  modified_base (325)..(327): a, c, t, g, unknown or other
  modified_base (583)..(587): a, c, t, g, unknown or other
ggaaaaattcttgagtcaaatgtggctgcaacaggcagtaaggggccctcttcaatccaaaaagagggggaaatgaagaaaaaaccagcaatttaagctgctgaaattccctcagtagttacagcatcaagtcagcattctgctgcagaaaagtctttgcaaaagccacctccaccatttcctcaacggttcaagaagcaacaagacgatagtcaattacggagatttcttgatgttctaaagcagctccacatcaatataccattagtggaggttttggagcaaatgccaacctatgtgaagtttttgaaggacattttgacannnaaaaggaggcttggcgagtttgaaactgttgctttgacagagggctgtagtgctatgttgaagagcaaaattccacctaaattgaaggatccggacagctttacaattccaatttctattgggggtcgagatgttggaagagctttttgtgatttgggagctagtattaatctcatgcccatgtctattttcaagaagttgggaattggagaagcatgaccaaccaccgtaactttacaattagcggatcgttccnnnnntcatccggaagggaaaattgaagatgtgttggtgcaagtagataagttcatttttccggtcgatttcattattcttaactatgagggagatagggaaattccaattattttagggaggccattttcttgctacgggaaggactttgatagatgttgaaaaaggagagcttaccatgag

SEQ ID NO: 157146 - DNA, 533 bp, Cannabis sativa
  modified_base (81)..(83): a, c, t, g, unknown or other
  modified_base (471)..(477): a, c, t, g, unknown or other
taccttatcctcttttgataattcggaatattggtcattctcttattttaggagcattttatggtatcattgctatttttnnntggcatgaccctaatctttttatagtttacgttgtgacctttgtggtttcggttgcactagatacttttaaatttgtcaaggactttaactctagtccttagctagtaataactgtgtcctatataggtatatattcatggccggccagagggtggggcagccggggcctaggccccaggccccacaattttagaggcccaaaaaaattaaaattaatattatatatataaaaataaaaatataatatatgtgtatatataaattttggttttataattttcataaaagggctgctagcacaattggtgagagagggattatatgttggttggtgggtgatggattcaattcttgacttcctcaatttatagaaagtttttttttttnnnnnnntacattatttaaaaaagaataaatattatttataaatatttttggtaaggagcaaa

SEQ ID NO: 157147 - DNA, 729 bp, Cannabis sativa
tagtccatcaaccaacatgacattcttcagtctaggaagcccttcaaaattaagagttcctattcctatgacttttccaacaagagcattaccgaaagtaacttcttcataatgccatagtctaatgttgtcaagataatttttttcacatgttatgtgtctagagcaaccactgtcaaagtaccatatgttagaagcaatagttttaaaacatgaagaacctaccaaacatttattcttgacaacccatttttgtttttgaaaaacatgtttatttccaaagtaattagatttaaacatgtttttcatggtgacacatttaggtcgaatatgaccttttatcccacaaaaatggcaaataggaatgaatcgtcttatattccctttgaaattgtcaaacttactatgctaattgttttttgtaacagcagagtgttttacagaaataacagaaccctgcaaggtagagataatacctctagaaccaaaaatatcagatttaataatttggtattggatttatattgagttgaaacatagcctaaaccagcatgacttgtttgactagaattttcaatcttttcaaaaacattggaacttggatttagcatttttcaaatttttttttaagattttcaagttccttagttaaagagataattttagactcttttaaaatcaatttagattcacaatatttatttctttctttaagatctttgatattgt

SEQ ID NO: 157148 - DNA, 1019 bp, Cannabis sativa
aaaatatcacttgcttacattttaaaatttaacaataaatagtaatttataatttccaattttatttatttaatttaaagattataaattttttaaaattaaaaatattttttgttactattttttacattttataatatatattaatttataattttttattatatttatttaatttaaagattgtaatttttttcacatttaaaatattttatgcttacctcttacattttataatatatattaatttatagttttcaattttatttatttaaatttaagatgacaaattttttaaaatttaaaatatcatttgcttacattttagattttataatatatattatttaataaatttctatttaatttatttaaattaaagattacaaattttttaaaaaatttataatatcactctgtcacattttaaattatatattacacattatatagtaatttaattttttttatttaacttataaattacattttcaaaaaaatgaaaattactatataatatgtaatatgtaaaccattaattaattttacattatttagctatctaccaaaattttggcagcataacagcttaaaaatcgtaaacccaaaattttaaaaacctataaataacacaaacaaactttccacaactacatatgaaaaaaaaaatgatccaccgatcagactgcagtaaattatatcacagaacctacttcactaacatgcatagacatactaacctataacaaaactattaaatttacaacactaatatgaagaaaaaagaaataaatctaaagcagtgcaaaagtaacaacaacaagtagctagcagtgcttcaggccggtaaaacagggacctaatttcataaaaataaagcttaattaaaatatgaacatacatatacacacataaatatatataatgacataaaaacacaatttagggatacacatatatatacatacacttatacttaaacatacatatatacacatacacatacacatacacataca

SEQ ID NO: 157149 - DNA, 665 bp, Cannabis sativa
ggagaaaatttctcggttctagtaaatgcgagaggaattgaagccaaccaagaaaaaatcaaggccctaatggagatgccctcaccaccaaagccaaaagaagtccaatctttgatagggagaatggcagcattaaacagattcgtctcattcattctctcattctcttctcttatttatttctttattctatattttttttgtagcaatgaataacttcattgaaaaaagaaattataatgtcatacaaactttaagtcttaagaaaccccagtaaaagaaggaactcaaaaaaaccatactagctctctatccacctgaagagcatgccgagctaatccatgtgcaacccattggctgtccgacgaacatggattagggacactccaagaaaattagacatcaaactagctaaatcctctagcaaggaaccaagttcattgaggaaagaagagcggttagaaaatgcatttacaatcgctaaacaatcagatccatcaaaatgtaaagaaagtccaacactaacagtccaatccaatgccgcaagtaaagccaaatattctgcatgaacaactgaaaaacaacctgcaaaaaaataccaacaaaaataacatcaattctcaaaaaactaagaaaagataaattaacaatattcattctatata

SEQ ID NO: 157150 - DNA, 523 bp, Cannabis sativa
aaaaccttgacatacaaaaaaaaaaatcaaaattatacatatattcatatataaaatatatatataaatcaattatttattataaatggtccgatccgatttaatcgttaactatttattacgaaccgcaaaagccactaagcctagcttagtggtgagggagggatgggaaaaagggagatgtcatgggttcgaacctaggacccttaaactattaagctaatatatgattgtaaaaataccattacgctacactcaaaaaaaatttattacgaaccgcaaccgaaccattatgcggtaaacggtccgtattaaccaaaccaccaaaaagagtttccctagttacagtctacagtggtatagattatcgcagtctcaatttaaactgcgattttctagtttcgatgagcagccttaattttaagaatattttcacaagctcattaaattataaattacatattagttattttatttataggattcaaaaacgatgataaaataataattttaatattttggt

SEQ ID NO: 157151 - DNA, 631 bp, Cannabis sativa
aaacaaacaaacaaatcaaacaaaattaaatttattcattttcatatttaatcttattttctcaactcaacgtcaactaaacacacaatgaacgagtctacaaatataagatggacttgtgtttgtttcaaactcaaggaaataaccgatcgattttctcatcaatttcctaacaaaatttacatttatgaagaagtccatatgacagctttgatcataattgactgagtttggtactgatatatcaacaacatcatttattattattaatttctagggaaggtacgtacgtagctagtatgactatttactatttagtcattaatgtgaaaaatcatataaaatttactaattaaaaaatattaatttttgttatatgactatatacgtacgaacaaaacgttgtttacgaaatttaactacaacagattttgcgatgatacgtcttccgttaattttaattaaatttaaagtactgttaataaacttagaagcagctagctaataagtcaagcattgacttggcttagcagttagtaccaagttgagcatatatatataaatatataagaataatttatacaagcaaacacccctctgcatttatttctaattatatatatataaactt

SEQ ID NO: 157152 - DNA, 583 bp, Cannabis sativa
aattgcacaaccatgtcgaaggtttgtgagtatgctaaaagtactttatttcatatggtcttcgtaggattgggcactacaaatttcaaccagtgccatccttcagacgctctatccctgctttgcaaataagggatagggcaaaccacatcatgttctatcgacataacagagaaacataacccgattgaccagtatggacaatttctgaaagtacggcttatatccttctgcccttggagttgcaagagtgtcaatgcatatagggcctgcctttgtgatgggcaagttcctggcttagatgatgatgaagtacctttgtctcgcattgtgcggaatctagagaagaagagaaggctctccaccgacgcttggtcagtgggggtcctataggtgatgctctcttcatatcaggcctagaggccaggtttttaatagacctacacaccccgtgcccgcatctaagggcaaggacaaggctgccattgaggactctgatagtttctcttctgatgatgatggtatttgatactttcgttcttgtattaaatgtttatgattactttctgactttgctactttc

SEQ ID NO: 157153 - DNA, 739 bp, Cannabis sativa
  modified_base (533)..(535): a, c, t, g, unknown or other
aagcagcattatctcaaccagtaaagggacaatgtgcctatataacctagcttttaataagtagatctagaatttatcgagtaaattccttatacttattaattccactttgcgccactatagattcggaattgaatacactctcaattatatagaatgctctatatgtactacgatataaatacgttatcattatccattattacaatcctaatagtcaaagatcctcaatagatgatctacatcgaaaagggacaaatttatcgttctacccttcaatgtatcttatccttaaaacacttagctacctataaatgatatttgagttaactaatataattagtaaaatgggatctcaatcatttatctctattcagccaaactcgaaggaaatcatcatttcacttctaaatacttatagaagctatagattccataactataattagcgctcccactcagttgcacaaccatcttcccaagatataaatatctacaagaactattggttagcttccacaaacaacttgaannncataaataatacaactaagctaaacttaaccatataaagattaagatccatagacctgagatcaaccaattatattgacttagaaagatatgacggtaagtttatgatatcttatccacaatcaatatcggtcccttcccatgtatactctatacatctgatactggtgaactttgccagtgctctggaaaggacataacactt

SEQ ID NO: 157154 - DNA, 725 bp, Cannabis sativa
tccacgtattttgggcgaattttggagcaacaactataaaactagatctccctataaaatactataactagccaaaaagggaaacccttttgctagtagcaacttaactcttgtattttacttcatcatcatcttaggattactattccttactaagaccctaagacctaaaaagattttgatatgtaatctagtaataacaaaaaatcctacaatgctcccatttctaggatatcaaaagtttactttgaaaattatcgcaaaaataaagtaagcaacgaataatgtttttaatgcatccactaactatgactaacctttgaggggtttgctcaacgcaacgtggactctattatcttctgacaatataacaacacctaatccaactaagctcgtggtgctcaatactgctgcatttaccataagtttagagtgtaaactctcttcttgagtacctctagaatttatagctaaagctcctctattcctttcactagtttggagactttttttttgggtcatccttcattgaaataatcaactcataataactaattatccgctcaatcacatattgtggttgtcttatctgttggccatgagtaatcttattcctttctgtccatattgcccagtaacacataatgaactttgtaaaggcatctctttccaccacttcagaagcataaagtaaaacattcttgaaattaatctcttcttttact

SEQ ID NO: 157155 - DNA, 925 bp, Cannabis sativa
tctttttgtgggttggtatctcttttatatatgtattctctttacatgtgtttagtttattaatgacttatatcacttttctaataattatttttttactcaagtttgaaagtggtcacaacccacatccgcattcccaagaatttatatatgtattttatttctctctatctctttttgtgggttgatatctatagaaaatttcttgagattggtgtttaagataaagaccatcaacaaagactttacataaaacctttctccccactcttcactaattcaaaaacttacaaaactcactcatttcattcatttttttacttgggtctttaaagcaagaagaacaatacagaggaataagaagaacaatagacaactcaaacttttcaagtaaattttttttttctttatttattttttctagaacaacataaactttactgggtttttgttgtttttactaatttaattttttttcttttttggggttgtagtttagctctgattttgtgaatggtggtgttgtatcgtttgatgactcttatgacttattttgttattgttttaatgttattttactgttgttttctttcattttttaatcacatttttctaaatattattgtactgctctatttttaatagcaatagggaaaaaataaaatttgtatgcaagttattttcttcagtatcatatactccaatatatgttcagtttttctctgttgttccactgttgttttttggttgttctccttctttttatttttgatgtcttctcttgtatgttctcttgttgtgccccagctccccacatttgctgcatttggtaagttgtttcttttcccagctagcttccatcctctttttttgtggtcttctagattttaccactttaatggaaggtaagattattactgtacat

SEQ ID NO: 157156 - DNA, 622 bp, Cannabis sativa
ggtatgggtttaaagattcatacgtgagtcaaaaacgaggcagtgcggggaaatagatacccgccacgaacctgccccgatatgatgtatgtatatatttaatttttaaaatcataactactacaattaaaataacttcatgctttaggctttttattgattatactctttttttttttactatacacactatctcacttaagtttattgttttactaagtttttgattattttttttttttaattctctttgagacattacttttttttcaaaaatatatatgtaatgggtacccgatgagaattcttcccccgtcgggtaattcccgccccactcccgctttaatttaaacgggtattggggagagtatgggagtgaatttaagaagcgggtgtggggtgggggagcaatccccgcacccgtcccaccccatttacattcctacttcacttgttgctgtcggggtggaggacacgcgctatcctcagccgcacaatcggtagagggacgatctagatgggctgttaactttgatcgagagtaggatttgcataaaggctcatcagattttctttttgaaattgtattttagccccatttcttcaatatttctccaattta

SEQ ID NO: 157157 - DNA, 780 bp, Cannabis sativa
gcagatctatccagatctcatcaacagcgagtgatagggctaatgacagtgacgagctcttcgtcaccaacataaaccactctttgcagccctttctcatgccatccttgacctccaccaccgcagctgaaatactagtgtactttactaatgccctggaaagaacattccatatatcattatgtaagtaaactttattgctgattatcacgtcattgtaaatacagtgcactgataaatcatgaaactaaatacaagcatataatcatgattattttctactgtgtagagaacactgtaatcatgaataactatatgtttaggatttaatagaatttatatattaaacatataaccatgaaagtaatcatgtgaaccatgcaacatacaataatatttgatcttctattaattagtaaatctaattatattgaaatgagttttatgcaaggcacaaaatcccaacagttatcaccatactaccatcatcattatactacactagtcgctacacacattacaaaactatcacctaaaacaaatcataactatttactatattccaattaaacaaaccattagtggtatcagagccttgttcgatcatattactgggtgtaatctttccttctcataaccatgagttaccattccaaccactcttccttacctcttccattttttcatgaaaaaactatgatttttagtccatcaaaatgaggtcctattatcgatcacaaaatctatggaaaattgttgaagagggagtcactattctag

SEQ ID NO: 157158 - DNA, 538 bp, Cannabis sativa
  modified_base (32)..(60): a, c, t, g, unknown or other
tttagaaagttcttatttaggatgttaataannnnnnnnnnnnnnnnnnnnnnnnnnnnngtaaaataaatttccaacaatatcgacaatgttgctcctgaaattgctgaaatttgtggtattaaagaggccctaagttggacaaagagtaagtcttggcataacgtgacacttgaaactgactcattgttggttgtacaaggcatcaataacagttcacaaatgccatctgcctttgggatggttgcttgggattgtaagaaactattgtttgaattgggtagtattttcttaaaatttgttaagcattttgctaacaaggctgcgcatttctttgcgcgtagtgcttgttattcaccagttcgcatttttcacaataataactctcctgaggagttattaaacattgtaacagctgattcaagttagataaaattgccatatttccattaaaaaaaaaaacaaagtaaaagtagcagtatgcttagcttgttcatacaccattaaatttatgagcaatttgtaataaaatctcaaa

SEQ ID NO: 157159 - DNA, 685 bp, Cannabis sativa
acccgaccttagacccgaaacccaagacctgactaccgggacacaaccccaaagtcgaacccaaactcaaacttaggactcagcccaagacctgggacacaaacttgaataagactgggatccaagaccgagatctgaatttgaacctgaggctttgacttgacccgtaatcagtctttatatcgaagacacggacctagattcgtacccagacctagactcgaaccgggatcaagactcgatcttggacccacaatcagaatcgaactaggattggaacgagaacccagacttgggactgtaacaggacccaaacctaaacccaaactcaaccagaacccataccgcgacaaggacccggatcgggttctgtgacttaggacctaaactaagaccgagacctagacccagtcttggacccggacccaaacccaaacccaaaaattagggccggaacccaggacccaagaacaaaactcggacttgggacccaaaacctggacctaaactgggactgggactagaactcagacctaaaccctaagtgagacctggagtcgggccaagaaccagagacctttacctgaactagaacacaaacttggacccgaaataggacctaggactcgaacatagatgggggacccagacccgggaaacgggcccccaaactaggaccagaact

SEQ ID NO: 157160 - DNA, 512 bp, Cannabis sativa
tactttcacatgaatgtttggaatcattttttttttgttatggacaaagaagtttgggttttttttttttacaaaaaaattgaagttcattaataaattaaagattacttaaaatatgttcattacatataatgttcattgcaatagttgttacctccaacatataccaattaagttctgcgacatctacgaatacactcaattaattacattatgggctgcaaaattataaaattaaaaagtataactcaaaattatttgaaatattatttctcttatatcttataattttgcgacccatgatgtgactaattaagtgtacgggcagtttttaactattacgtatgttgaggtattaactatgtaatgttcatgtggcgtaagttttcttttattaataaaaactaattttcaaaaaaaaatgaaaaaaattctttgtccataaaaaaaattgattccaatcattcatgtggaaatggattctccagcattggttaagcaagttaaacata

SEQ ID NO: 157161 - DNA, 705 bp, Cannabis sativa
atgcaatggatgaagaaatcaattcaattacaaaaaatgacacgtgggagccaactactcttccacaaggatacaagccaattgcattaaagtgggtgtacaaggaaaataagaatgctaaaggcgaggtggagagatataaagcaagattggtggtaaaaggctatactcaaagggaaggcatcgacatgatgaggtatttactccagttgctcgtcttgaaactgttagactgataatttctttagcagctcaaaatagatggaagatcaaccaaatggatataaaaagtactttcttagatggtttcctcgaggaagaagtctacactactataaattacactattcacgtcagtcaacgttaccgttcatagcgttgaccgacgtgaatagtaggccctgcatttatgcgagtttttggaaatgacactaaaaaaatattatttgttactgttatatgttagacgctaataacataatcgacgcgaaaaaaaaaataaaaaatttagtgatgtttatttgcgtcggtttataaaagtcgagtattactatacgcgtcatttataaacactcacaagacttctttcaacttttataaaccaacgctaaagaccctattttctctaaacccaaattgcgaaatcaacccaagcccatttacaccacaaaaccctaccatatatattaaacttaaactttctaa

SEQ ID NO: 157162 - DNA, 696 bp, Cannabis sativa
actgtaaataaatttaagttgaaacaaaccaataaatacccgattaagtttcttcaattgcaacaaaccaaaatttaaattcaaaatctttataccaagaacataaacatagattgaaaaaagaaacgagagagaaacatgagagagcaatcgggagagcaagagttgatcgtcgtcgtcatctttggagatttctttgatttgtctctactcctccttgagcttctggatggcgacattgactagctctaagttgggatctttagaatccatggctctggttggttctcaataaatctttggatttttctctctgaattttagtaatgaaaattaagatgagtatgtcacgcatgctagaacaacggcagagctcacgtcgtccgttcgaactccgacacgaaaccctctaacggtgaggctccacctaaactttcgaagaagatgaagaaatcggtgagtgctaaatcggctttttctcattttaaggaagatgatattgttgagagtcagcgactgtgagagaaggaaaacctaaggtggttgagaaggatgaggaagaagaagatgagtgggtggctggtttttattttatttttaaaaaaaatttttggactggtttttggtggccgattgacaacatcggggctggagtggggttagggctggccagagttagcagtcgggatgtggttg

SEQ ID NO: 157163 - DNA, 828 bp, Cannabis sativa
cttttattccttaccatatttcttccatttgaatttggtgttgtatggtgagttctctacatatttctcagttttttgtttgttcctttatttgatctcttaattttcggtgttttttttattataaatttctcaattttaatcttttcttctctataaagttttaacactatctcttattaatcttgcttctatagatatgatattgcagtgtttaatttttgtgttttaacttttgattttttcatctctactagcacttcattatattatttattttgtatcattatgtatcgagtaaacttattgggaataacaacgacaatgactacaggtgagatacggtgatggcaatgggtaagatacaatgatattgcagtgtttaatttttgtgttttaacttttgatcttttcatctctacccgcacttcattatattaatttatttgtattattatgtatcgagtaaacctattgggaataacaacgacaacgactacaggtgagatacggtgatggcaatgggtgagatacaatgattgacaacaactttgaataattgagatataaattattgattgcgggaaagagttttacttaaataataatattactctaatttttctctatactactttatttattttattttatattaataatttttaatagagaaatttaaaattttatatatattatttatgtaaattttaagctttttaataaataaaataaaaaatttcaagttttatttttaataaataatttgatacatataattttaatattattatatattagattaatttttaagttattatttattat

SEQ ID NO: 157164 - DNA, 515 bp, Cannabis sativa
  modified_base (219)..(221): a, c, t, g, unknown or other
actcgtttaagaaattatggttgacataaatattcaaattcgctgccacataagtagatgcgagataagaataacaactattaacagataagcttgagaagacattaagtccatcttaagataaaaagagtacataataaaagatgctcaaagatgagagaaccgaaagtgcttgcagctcattgacccacatacttgggaataagagcttgcagctcnnngacccacatacttagaaataaaaggttgcaactaattgacccacatattggaatatggagaaaataactacattcatccatctcgctctttatacgttgaattaaccacttcgctaatactatcatggtaaaagaggattgcgaggagcattatatgtatatttagcatttttcctataaagacggcaaagaaggacaactcatactcaacaaagaacaactagcatagtcagcataaccgtttaaggataatgacaaaagagcagttgcgtgattattaaatattattccatg

SEQ ID NO: 157165 - DNA, 608 bp, Cannabis sativa
  modified_base (31)..(33): a, c, t, g, unknown or other
tacctacagaagttccagaattataacttannnattattaccgccaaaaattaaacaaaaaatttatttgcaactgtaaattaaatttaagtatttatgacacaaattactcaaataataataataattataaaaataataataacaatcaatatatatataaagaagaagtatgaatcggtgacatggcattataaaatcactctaaaactatttttctcttctctccttaattctttcaattttaatattttattaaagcataaatctacaaattgatattttactattcttttaataatttttctataaaaaaaaccataaatcgacaaattgatattttactattattttaataattttctataaaaataaaaattattctaaaaaatttagaaaataaaaaatagattccaaaaaaaaatattaaaacttatatcaaatataattaatcgtaaatttcattgatatacatacataaaatattaattaatatatatacattaacgtttttggctctttttaaaaaaaaattaacatataataataataataataataataataataactctaatgtgtatgtttttggctttttttttaaaaaa

SEQ ID NO: 157166 - DNA, 787 bp, Cannabis sativa
acatgataaacatataaatataaattgtattggcatacaagttgaagaaaacatgaagctcaattcataaatgcaattcataactaaaagagaaaacattattaatattcttaaaaaatgaattgtctgcgtaaatatgaaatagggaataaaatcccaaaccaataattttaattaaattgttcataaattaaaataattaattcaaaaaatttaaaagaagattccgagcttcataatcaatctttgacattctccacccttctgtccaaccatctggcttatctcgctaggatagcaatccaagtttaagcagttggagctgaaataagaagaaaacaaacatggttagtagatccagaattaataacccaaggggataataattctctaaaacacacgagtttatagcatagaaagaaatactttgtttctttgcaagaaacttagggcattggggtttccagtggcccttttcattgcaatagaagtattttacttttggctttccctcgggattagcagcctttttctttttaactgttttcacagtttgaataggctgataacatggtcgattgtactatactacttgacagtatcacatcagtacgactagagtacaactagcgtatcgagtataggctgatattatggtcaatagtactgtcgtatgaacgttctagattcagtatcgtgttggagacggggatagggttatggttgggtgtatgggcacctgattataatccgggttattgctatgttattgcttatgcttttctta

SEQ ID NO: 157167 - DNA, 515 bp, Cannabis sativa
ataaaaactcaaaattttttaattttacccattcatggataatacccattaagagttcacccatatttatatatatatatatatacatattatattttgtgtattctaagtaaaatatatttttcaattaaaagaaaaaatacaaagccaaaaaatgatgacagatttagagttattgtttttttttaaaaaaaaaaaatagaaaattaaagaaaaaaaaacaaataaaaatatatattttatatcaattaatatttatgtgtcatagctgaaatctctttatttatatatatatatatatatataaatagatatatagataaatttataaagctaataaaacataacagaattaaaaagagaataaattatattatttcatatggattgttgtggcggtgatttcttgaatggtttctatgtggattgttatatgaattttggttaccatttaggttgctcccttagttgatataggagtttttatgtagaattctgtaaaaaaaaaaaaaaaa

SEQ ID NO: 157168 - DNA, 573 bp, Cannabis sativa
aagcaagctgaagctgatatgatttgtcttattgccatgtatagctgcgcgatctggaaggctaggaacaaggttgtttggaaaaagaaacactcctctgttaatgacgtgcttacaattctgcacaagtagctcttgatcactggaataaagctcatgataaaatttcgttgtcatcaatctgtctggaaagcatcggtgatggcactgagtcatggactagacccgcagaaaacacaatcaagattaatgtagatgcaacactctttgatagcgacaacaagtatggtttcgaaattgttgcccgaaaccatcttggtcaccttgttgtagcacaggctggttgccatggcggaagatatgcagctaaagttgttgaagccatgaggattaaagaagctctcagttgggtaaagaccaataattgacaacatgttcaaattgagacggacagtcttgttttagtacaagctatgcgaatcaaccaagcaatgaggtccactttcgactttttaatcaaagactgccaacttttgttatctaccctcccaaatgttaatttatttttcatta

SEQ ID NO: 157169 - DNA, 512 bp, Cannabis sativa
ctataaccactaaatcctatcgagaacctgtcgagaacccatcgataatcagtatacactcatcaaacatgacaactaaaagactaattaatagtatcaagaatctatcgataatccatcgatcaatatgtctataatcaaacttacataaattaaaagaaattatcatcaaaatgaaatgtatttcaacacaaataatatataatcaatctaacttaaaaaaaccaaaaaaaaaactttttctaacaacatcttgtcgataatctatcgagaatctgtcaataaataattgagatacataaccaccaccaccacactagattgaaaaataccataactaccatataaaatcgaccataaattaaggaaaattcatcaaaataaaatgtatttcaacacaaataatatataatctctctaaactaaccacaaaaaaacctaaaaacaaatttttttaacaacatcttgtcgataacctatcgagaatctatcgataaataatcgagaacata

SEQ ID NO: 157170 - DNA, 566 bp, Cannabis sativa
gaaaagaaaatctttgtattagggacttagagtgttaagtttgaaagtgtttggttttgattagggcttctattagtataaggttttactagtatttgcgttagactagtattagaattataatgtttgacttttaactaagtattttaaaagaattaggatttctttctgtctatgtaatttagtatagcattattctagtattagtattatactagtattagtactggtattatactagtattagtattggtattatactagtgttagtattagtattttactagtataaatgtcttgtctgttgacatggttttatagttttctttaattggtttgttttatttgttttggcgttagtgcttggttttgagtttgttcgactgtccatggcgtcgagtagttatcagcaaatgaaggcagcggagaatatgacgattgtctctattgacgatgaagaagaggcaatattgtcctatgatgctagtaatactacggggaatgattatgatgaccgatggtgcattattggaaggttcttgatagaaaaatccattgattttgat

SEQ ID NO: 157171 - DNA, 808 bp, Cannabis sativa
  modified_base (242)..(273): a, c, t, g, unknown or other
  modified_base (430)..(432): a, c, t, g, unknown or other
tataaatatatatagcaaaattcgaaatctaatgtatttaaaatatatacatttttcctacaaaaaaatatatatacattttcaaaaatgatataaaataaaataaaataaaataaatcttgaaaaattattctagtttatgttgatccaaaattaattaataaattgattttcaacacaaatattattttcctatttaattaaatttgtgacaaatttatcaaatatttaagtatcttgannnnnnnnnnnnnnnnnnnnnnnnnnnnnnnnaattaaatataactagaaaaatacatcatgcatttaaaaaataactatctagatatttcactaactaattacttatattttaattaaaatgtaatgcattttaatctatttattttaataagttattaatgaaaaatttacttgatttaagttgatnnnaaattaattaaaataattaattttcaactttaatccatttttcaaaaaaaaaaattaaaattatctgcattaaataatgcaattttgaaatttgtgggaaaacatgattaataaaataaaataaaatatatttttaaaattattctaatttaagttgatctgaaattaaaattttcaacttaaatataattttatatctaattaaatattctgaaaataactaatatttaagtgtctagaataaaatcaacttaaatatttaattttcaatttaatgaaatgtataaaataaaagaatcaaataattaaatatcgtgaataaattaacttatttattaattctaatttaataataggaaaaatattctaaattaag

SEQ ID NO: 157172 - DNA, 1080 bp, Cannabis sativa
agaaaaattagaaattaaactaaatatgtttacttaaataaatttatatttttggagaaaaaaatagacttgttcccataaaatttagtttttacaaaaattaaaatttaatacttttttttttatatctaatggatttttttaataattttttttttaattgcttacttaattttaaaattttaattttttttattttcttaataatccaaaatgattttttttttacgatctaaattagttttttaagatatactaaaataatgttgaatctttcttatttttattttgagaggcaagatttgatagttgtcaaaatttacgaggtaaaatttataatttacaaagacacatttaaacaaagtaataaaacaatatctaactgaactaaatttgggataagctgaaaaatacctcttttttgtatcgattaatcaaaaataccttcatattatttttttattaaaatatacctacttttttgagtggattgcctaatataccctcactctctacttaagtgtagcatataatttacataacctacgaggtcttatgggaacatcatccataaaagtgggtatatctaaaaaaaatataaaaataaaagtaaaaattaaaacaagtaaaattaagtgggtatacaatctaatttcttcactaaattttcgtaaaagttataataataataagtgaaaattacatcaaatatggaattttatataaaaattacaaaaatatgacatttataggtttgccactcttctatggcattttttaacatttaagatttttaatggtatttaatataacataacctaagattttttagtttattttatatttatattttagggtttttctatttgggaaatttacaccaaatactaattttttttttcaaacattatatttataatctgacaagaaaatttttacatttgtacttttcttaatttttttcttttttcattgttttttacttattaaagcttcaaaaaagtcttttctgtcttttttatatatatattttagtcaatgttggctctcttttttctttttcattttttaagtcagttg

SEQ ID NO: 157173 - DNA, 670 bp, Cannabis sativa
ctggggcaatataacttttgttttcagtcttggattggtgtggacgatgttgtcggttcctgtcatgttagtctgcaagaacattggatttttgttcactttatcattttgaggaggaaaatcttcgtatacaattcaatgaagaatacgaagacaaatcagaagaagattttgcctgatctctgcgtattgtgagttactgccatatttccttaatttcttaaatttttatgatggtaggaacaatattagtttggagtcaggcccttatgttgttgttccgaaggataccccaattgcgtatgagtttgtggacaagcttcccacccaaagcagaaggtaaataaatgattattttttatcatgtgactactattaatttttcgtatttttttctgcttaaataactggtcatatttaattatttttgttttatttttagtgattgttgtgcatttgtgattaagtatgctgatctattcattcggggcaagattaatgagattcttccaaatatggatgacatgattgcaaactatagggatgaccttgctgtgacattgtatatctatgcccagaagaagattaatgaaggatattcgactgaagatatgacaaagggaaagaagtccaagaagaagaacttagattcttgttaaatatttgactt

SEQ ID NO: 157174 - DNA, 1702 bp, Cannabis sativa
  modified_base (31)..(36): a, c, t, g, unknown or other
  modified_base (139)..(141): a, c, t, g, unknown or other
  modified_base (281)..(281): a, c, t, g, unknown or other
  modified_base (1316)..(1317): a, c, t, g, unknown or other
  modified_base (1617)..(1629): a, c, t, g, unknown or other
taaattcgaaattaccagaaagttattcaannnnnnaaaattctacactgtattatctctatttcatttttaaaagaatgagagatatgtcttctttttattcagatgcactttataagcagtaaagatttcagtatcnnntgatgagtaatgcatatagtaaacggatgttgcataaagtttatgaacatggttccagaaatttgggttgagtcaaaaatactatgcttgatgtgaagatcaagccaatagattgattggaatgcacaacttgttttatnttagtgcaagtgggacttttttgggattttatgcctcaaataaaacccatttcaatctaatctgatttgttatcaataaatctagatggattcttataaatagatagtgatggtctcaaattaaaagatgatgatgcactcaagaattttagtcaaattttgagcctagtcttctctttctatttcaaatccttcccctctctttctctattcaattttcgaaccctatagtgatagagtacatgcccacacatagcaagtttccactcaatcataatgtgtaagaatgtgaagaatccaattcaactgaaggagactcaggctcaaatcttggtgatactttgctactgaaaggatacaagggttaaacattcgagcggaaggagtcatttaattccgctacaaccaatgtaaagtttcttcaactatatatgtgtttaaattacattgttttagaaattaatatttaggatgttaaacaacatacatggtagtaaatttaaatttgggtaaataatccccaatacattctacctaaatgataaagatattgagtattcatgctggactcaattttccaagtggcttcctccaccttgctattcctcgagagtactttgaccaatgcaatggtcttgttccaaagaactttttccttcctatagaggatttgaattggttgttcctcataggacagatctaattgttattttaaggcttcgtaactcaagacatgagtccggtttgacgcatatttcttcaacattaacatatgaaatacgttatgtacagtcgataatgctggtggtaaggctagctaatacgcttcctacccgaccttcttcagtatcttgaattgctctatgaacctaaagcttaactttcccctttttccgaagcgtcgtatacctttcattagtgaaactcttatgaaaacatgttctcctgcctaaaattcaatgtctttgcgcttaggatctgaataacttttctacccgctttgtgaagcaagctgtaaagaccgcttagctttannttggaaattagcagataattaggacttaattatgaaaactatttattatcattgaattaattatttatgacgatatatttgaattcagaatgcattttatatatcatatatagaaatttcataattttgcatgttttgtgccccgcaacattagaacgcggtgtttggctattagaatcagatcctactatttttaagtatagcgggacaataaagttagacattgggaatggcggcattatctctacggagagagatgtgaaatttgtactgattataaaagtctcaaatatttctttnnnnnnnnnnnnntgaatatgagatagaggcgttggttagagttggttaaggattacgattgtgagatcctttaccatcctgggaa

SEQ ID NO: 157175 - DNA, 536 bp, Cannabis sativa
cgtaataattaatagaatacattgctttatccatagtgttatttattatttaatacaatacgacccttatatggcgtaccaaacgagtcctaactagccaatattaggacaccactcaacatagtcgtccagcacgctagggtcaggcgccacctgtgagactaagccgaaagtgttggtgctgaataggggtgttcatccaatccaatccgcactattttgctcatagtgcatccaatctgcactaagtgcggattttattttttagattcaatccaatccgctaaatagctcaaattcaatcgaatccaatctgcaaacgtgcgcattggatcgattattttagattggttactttttaatattaaattattagatatttatgaaaaaaaaaattttttttttcatataactagcaacaaaataaaataaattataattatttatgctccaacaatacattaaaataaataaatatcatattcaaaggaagaaaaaaaaattgtatgtataaagaaatgtttacttttatttta

SEQ ID NO: 157176 - DNA, 771 bp, Cannabis sativa
  modified_base (690)..(690): a, c, t, g, unknown or other
ttacgaaatttttccgtgaaaatatttttattttgtttttgaaaatattttatttggattccttgtgaaaaagtaagcaataaaattgaaaaagatatgaaagtttgaggttttgtggttcaatggtgtcgagtgggtggattgagtgcaccaggcgctcggacaatggagtatacgcgcgcggatttctgggtacaacttctgtctgaagccccgttgtcccccccagctcacccagctcaccctgcaagatgccgagaaacctcggctgatgaccctgcatcccctccttccgcgcgcgtgtaagccttgtttgcagcctattttggttgcacgtccagcccttcaggcagcacaccccaaaacccgaattttgtgggatttttccccaaatttcaatttttttcaattttcaaaccctaatatctatttaaaatattatttttatcatttaaacctaaatatcaatattctaaattaataatatttatttttaatagattattattattttgtgatattttgagatttaaatttaaaaattgattattttaatttttaaattatggtcagatttaaaaatttgttaatttcattagatattttaatattgggcatattttaaattaaaagataactttatcttttttatttataatattatattaaattatcttatatgataaattnaataattaataaatttgaaatttaacctagatattgttagagatattctaaccataatattttcaaattcaaaaatttgtt

SEQ ID NO: 157177 - DNA, 1021 bp, Cannabis sativa
  modified_base (616)..(616): a, c, t, g, unknown or other
attataattattcaataaatagttttgacatttataggattgaaattagaaaatatggtattattgaaaaaaaaaagacaaatggttgaattaaagtggtaattgtaactagtgaggccgaccacttagtgcattttttcccgttattttatcttttttactcaatataattatatatcctaaatcctagctgaaatactaaaaaagaaatatgatgctcttattctcatcaaacctacatcaaccaatctaaacctagttttctaactctgttaaacaactactaagtgagagtttccttctatagtgattttgaaatccttcttgatgttcttctattaatcaaacctttagtgatagagtaccatgccacacataacaagtcgagtactcaatcatagtttggaagacggtgggtaaccaaactgaaggagaaggagatttaggcttagatcttgttattactctaagacataaaggaacaaggatagagatctgagttaaaggagacatattattccgctgcaatcaatgtaagattttctaaagtttatatgtgtttattctattagtttagataattcatattttgggtgttaatcaacatacatgttantaaatctagatcctgataaaataagttctaacagtaactcatataattggttttcttatgtagatctgaagctcgtgtaggataaaagctcaaaaattaatatttgaggtatttcgatctttttctttgtacatttatatatatataatcaatttccttgatttcttcgcaatgtaaattaatcatatatgtttcgttttttataaagtaatttcttaattagttatcttgtttattagattgagaatttttttcaaaataaaaagacattgactaaggaaaagataatggaagaaaagggactgaaaatagataaataaattaatagttggagaattttttttttttttttgaccacaacaataattatatattttggcaaaaaaaagctttataacttccaca

SEQ ID NO: 157178 - DNA, 827 bp, Cannabis sativa
cactgacgcccgtacttacgcccagtacgtcgctaggaaaattgcatcacctaatcaggtgagcctgtatctacgttcggtactcattatatattactaacgcctatactcacacccagtacgttgccaggaaaattgcatcacctaatgaggtgatcccatatatcacatgcataatattatcacattattaatacttaaccaatctatgttttcaatatataacaatattaactatatctcaatattaatcatttcataacaatactaattgtattacatacaacgtactatgcagtacaatatacttttcttacctttaatccagcttcatacatttcggccaacccaagtggagaactatccccgatgatctcgtccctatgtcacaacaacggtaaaccaataagtggttatcccaaaacactacttaatattcacataaggcaatctagagtttcctaccaaaccccgtggtataaatacactaaaataaaacttatattttggctctaaaatatatataccatattatagagcttgttgccaccttcaaaacggtatatagaatatccaaaacgaaaacccgagtcaaaagttatgacaaaaatatgatttctgatctcttagacatttctaagaactataaaactcacaaatcctaattttcgcactcaccgaaacacttccaaaacatatctaaatccctccaaacttcacagggcgcatacataccataaatattaccatccttacgtaacagaaataaaaatcgagcccttaaataaaaaacgccattaacattcggactaagctttaaaaagttc

SEQ ID NO: 157179 - DNA, 544 bp, Cannabis sativa
cataaccacctctagctttgacattcagtggtccacaaagatctgaatgtactatgcctagtggttccttggcacgctctccctttggagagaaagaacgtttcttcatttttccatctaggcaagattcacaaactggtaattcacctaaggtgacatttttaaatggaccacctttggttaacctgtgaagtctatcatagcctatatgaccaagacgtaagtgccatagatatttttcatcttcattatcgatcttttgctttttgtggtttctaggtttagctaccttaaacagttcgttattaaacgcagatggttcatttggtcttagaacataaagcccctgttccatagatgcaacacaaatttgaatgtcatttcaagaaatgatagaaccagaactcgaaaaattcaatttggattgttgcaactgtaagcatgaaacaaaaataaatttctactgaaatttggaatgaataagacattgtctaaatccaaaattctgttctgaaacttgagtttggcttttcctctagctcta

SEQ ID NO: 157180 - DNA, 513 bp, Cannabis sativa
  modified_base (458)..(466): a, c, t, g, unknown or other
ttaaaaaaaaatataaaatttaagtaattttgctgccaatatcgcttaattattattagtacaaggaacttactataattaaatatttaataatttgtgtatatattacttattgttgactcagtttttagttaatgacgcggagtcaaaagtaaaacaatatgtttcttaaaaattgctaggctcatcatgattgcattatagaggactttgtgaaaattcatgtgtcgttttttaaatgaaatttatcgactatttactattatttattgattattattttattatgctaacaaaatatcacaccacttagactatttttaatagaaggcgtaaaaattgtattatatttggcacaaaaaatagacttgtggtagatttaaatcaaattttagcattatgctctaactagtaaacaggccgcgcttcgcgtgcggcaatcaaattattatataaannnnnnnnnaaaaattttaaattatatatttattaaaaaaaaataataaatttata

SEQ ID NO: 157181 - DNA, 719 bp, Cannabis sativa
gtcgaattaatgatgggattcatttgacaaatattagttattacaacactaatacatccctttcaaaaaaaaaaaaagggctagttacaaaaaccaagcttaaaatatattaaagctaaacataatcatatttttttgtattgtcctagacttacaaatgatattgttcatgtttttttttttttttgctaaattggctttgactagaaacattaatcatatttcaattagattgaaatatatatcatattttaattgttatttcaatttagagtctgttctcactaatttattactttggttagtagcagaagtcgttatttaataaaaaccaatctttcactcaaaaaaaaaaaaaaaaaatatcatatatgcaaatattaaaaaaaaataatagttagtgtcactatcatgatacatttttttttttattttatagtttttaaggtatacatttgaaaaatatgatttttttttgttaaaaaaaaattattttatggaatttttgaaaaaaaattaaaaaatatatatataaaaaaaacagtataagataactagttatccctcgagttacctttgtttatgtttcttcaattttttaataattttttcttaaaaattataaaagctatattttttcttaaaaattataaaaacttataaaatttataatgtcatctttttattagattcggataatatattttaatttaataatt

SEQ ID NO: 157182 - DNA, 770 bp, Cannabis sativa
  modified_base (254)..(256): a, c, t, g, unknown or other
tacttccccaaactggatgacaccgatagcagcctacctcaacactggggaactcctagataatcaaaatgaagctcaaaagatgagaaggaacgcagcacggtatatcatagtagacggaattatgtacagaagaggattctctacgttgttgctcaaatgtgttactcaagaagaaggtacacgacttcttctgaggtgcaagatggattctgtggaaatcatgcccacgggcagagtttatctaagaaaannntaaggcaaggttatttctggctgacaatgattgaagattcaccggcctatgttaagaaatgtgacaaatgtcagagattttgaaagatacctcgagctctgcccaacgagttaactcaaatgcaaagtccgtggcctttcaccatttggggaattgacctgatcggacaattacccaaaggaaaaggaggattgcagtatacagtggtagtggttgattacttcactaagtggacggaagccgaaccacttgcaaccattacatccaagaaagttcaagactttattatgaagaacataatctgccagttcagattgccgtacaaaatagtttcggataagggaaagcagtttgacagccagtccttcactaatttttgtgcgaaccatggtatcatcagaagcttttctgtagtggtgcatccccaagcaaatggtcaagttgaagcagtcaacaagaccctgaaggatacactaaagaaaagactcgaagatgccaaaggaaattggccgaa

SEQ ID NO: 157183 - DNA, 516 bp, Cannabis sativa
  modified_base (291)..(296): a, c, t, g, unknown or other
cctttctcatattttattagtttttggaaatttcaataaatactcatgtctcttggcgggtctgcaccacaaactttgctgatatatcttcatccatagccaaagagtcatttggaaccaccagtgccttacttttcttatttttcttagcaaagttagagctagtttggcacaactatgttgtggaaaaaaaacagttgtagctgtgctgtaagaaaaaatagttgtagcaaaattatgaaaataaactgagttgagtgtggtaaattataatctagttcattataatcnnnnnnatatatataaaaaaaaaattaattcattataatcacaaatatataaaaaaaaattgagctgatcattataatattataatctagttaattataatcataaatatatataaaaaataatgtctcataattttttttttattttttttaatatatttttaattattttttcttcatagtataaacttatatgcatttgatatatataaataatttataatat

SEQ ID NO: 157184 - DNA, 615 bp, Cannabis sativa
agcccccctcaaggccactagaggccaaaaagattaaacaaggaaaagaccttttttgcccccatcaccaattaaagtaattaaaacatctcaagggtaaaatggtcattaactaaaccccgaaaataccaataccgctaaaacttaacaatgatatcccgaaaatattccaaaccatataaaatgcgactctctaaaggcccaacgtcgcttcccacagcttccgaacacagtcacagaaattgagaaattacataaatagcatgataaatatatatatgcactcaaataaattcccataatcacaatattattgataataataaaatctcatacataaactttaattattaaataattcaacgtattattcatatgcggtctttacaactttgttgtgtatttaacactttgttgtgctcgggaaatttaattttctatacttaaaaattttttaaaaaaaaattctaaatcaatacattttacactacaaaaaatatgatacttttttcaaaatctcaaacccccttctatctactttgtctctctctcggaccgaacaaacaaaaaatacacatggtctgatggggtccgaccaatcggacccatcgaacc

SEQ ID NO: 157185 - DNA, 674 bp, Cannabis sativa
tctcaaaaatatatttcgggccccaaaactggtctggcccaaaatacctggttgtgactacaccgcgcctacttgtcaaaaaatacttgcaaataaacataataaatatactatataatagtatagtccataagcacaatatatcataaatttatgttattacccttctcgggtcaaaattacaaaaatacctctaccacgctaatggggccttaaaatacaataaacaaaaaatagtttcacatattaaattatataataatataattcctcattaatacataattaatctagttagagttgctaatctagttattaaaccttaaggtattacaattatcccctccttatagaaatttcgtcctaaaatttacctaaacaactctagatatctctactgcatatccgtctcaagttccctggttgcctcttaaactttactgttcctccataatactttgatcagtgcagttgtcttgtttctcaagactttttctcttttgtttaatatttgcactggttgctcctcgtatgaaagatctggttgaagttccaatgcttcataactcaatacatgggacggatctaaaaaatattttcgaagcattgaaacacgaaacacaccgtgtacaactgccagtgctggaggcatagccaacctgtacgctacttgc

SEQ ID NO: 157186 - DNA, 562 bp, Cannabis sativa
aaaaaaaaaaaaaaatcagtgtgtggtgtttggttaggaggaatgaaaatataaaaataggaatatgaataagaatgggaatgaaaatgagaataggaatacgaacggaatggaataaaatttgaaatgcataaaaaaaaattttaaaaaaaatcattaaatttttcctcttgttatattggaatgatttttcctttctttttaaaatagaatagtcattttaccaaatggcggaaagggcgttccattggaatgtattgccaatactttaaaatgcaatcaatcaaaggaatggaatgaaaattgtttctttttcattctattttatttcatcacttccaactaaacactaactaattctttttatagtcatatatattatatttgttttaagatattctatatataatattttgagagattcgaaacagtttttaatttagtaaacaatgtttaaatattttatttcacacgtataaaattaaagaaattacgcatgtaacaagttgttttgaattttattttgggcgagttaaatattttttgaattttttaaaatttt

SEQ ID NO: 157187 - DNA, 527 bp, Cannabis sativa
ttaaaaatgataattgtgataaaatcagtactctagaagagactccttcgagaagttagacataacatatttgattataattgaaccattgcagtggttctatataggtacctataaatgatatacattatttaaaaaatatgtaatttaaagagatctctataagttatgccaatataagaggaaattatcatataataatttttcttttcgataatagatgttacatgtttgatgtttgtattttgtatattgtatatgcaataaactaacatgagataataaagattatggtaatagatttgtctagaattatagacatacattttatttttagccaaaatattatgacgccgtctagacaaatttattctcataaagtgaagtaagacatgtagaatatgcaaataaatatgttgaataagaaatttgcatatatgtatttatacacaaaatgaattattgtacaaaatgaatcaagatttgattatagcctcgaatatattttatgaggatttataagcgtc

SEQ ID NO: 157188 - DNA, 729 bp, Cannabis sativa
  modified_base (383)..(388): a, c, t, g, unknown or other
aacacatctgagcaacgacatagagaatcctcttctgtacataattccctctactatgataaaccgtgcagccttccttctcatctttcaagcttcataacgattatctgggagttcccaagtgttgaggtaggtggctatcggtgtcatccagtttggggaagtattaatcattttgatctcttccgtgctagtgatgctaggctcttcgaggaactggataggaaccaagttcgccttatcacttacattactgcttgccaatcaagctaacgcgtctgcagttgtgttttcttcccttagaatttgtctgagactgtagcttttgaactgtgcgagaaggtcatgtattttgctcagatatgctatcaccttttctcccnnnnnntcatattctccggatacgtgatttacctttagctgtgaatcactgcagattttaatgtgctcggtctcatctcccgggctaactttaggccagcgattagaacttcatacccggcttcattattagatgctttgaatccaaacttgactgcagcgtgcaagtgttgccccccaggcgtgacaagggcaattcctgcaccagatagttgatttgtagccgacccgtctacgtgtagtttccaagtcggcttatcttcactgtgatttggctgaggtgtttgtatcggctcggggttactttttggtacgctttcttctttgtctgtgcattctaccacaaag

SEQ ID NO: 157189 - DNA, 611 bp, Cannabis sativa
tgaacaataatatatattagcctacactacaagaatgattagttttacaggcgctttacaattgatgcgcctgcaaaagattaccaataaaggcgctgaacagtgcaaaagcgttcataaacgtagccatacttttgtgggggctttcagctggtctataaaagtttcaaaaataacacaggcacttttaaagcgtctataaatgtgtaaacacttttacggacgggctttttgataaaaatgaaaacagtctagcccagttactcttttattcaattttcagctcagcccagcccagttactattttcatctcaattcaatttttattacacgcagtcaaaagataaccctagccttccacgttgttgttgtcgctgccgcaatgccgccacctctccgtcgacgtcgccgttgttgttggttctagttcttcgccgttgtggaggttcttcattgccattttcgctgcctccattggttctctcctcttgtatctgaggtaatattacacttttacattttctttttctctagattttgattacattttcattttcgctacctcatgattcatctcttctctataagtttctctctctctctctctata

SEQ ID NO: 157190 - DNA, 894 bp, Cannabis sativa
  modified_base (810)..(813): a, c, t, g, unknown or other
aattggtaaaaatattcgaactcatttttttagaaataaggacgagccatgagtgataatcaccgttttgtaagaccagcaatatgaacaatcaacgtataaagtctatctcggaatacacagagtacacaacagaacgacaatatgttagaaatggtataatgaattctctaagagcttgcaactcattgactcacatactcgtgagtatgttgaaagactaaaggaactacatccaatataattcatctcgaagttgtcacactatgatagtgtctcgcgttcgcttctctgatcaacatttacagaaagacgcgagaagtacttcccatagtatacttagacgcaaaaagttatcttcataataaagcatcctaagaggattgtttgtatagcaagacaaagaagtgtagtcagcataaccattatttatagataaagacaagagcagttatagcagttatttattattatcccatgtgatgtaaatataaaacgtgtgaactctccatatttcataggcagttataaagataagatcccaagggaatatcaatcaccctaagactcctataaataggggcagggcctaggaaaaaaggatggccaattttagaaagaaagaagataattcataaattatattttgtatttatacattttgtaaatttctataaataagatgtactcgtggagtatgaagaattaactttaaaactaccttaaaactttcttgtcatttatatttattattactattattattattcattaatattctaaagtcactataaaaaaatcttacttttnnnnacaacaaaacttgtgactaaaagagaaaagattgtgactaattataaattattattcctatgttgtgattaaaaggtccgt

SEQ ID NO: 157191 - DNA, 504 bp, Cannabis sativa
tttcttcttattattagtactattattcatttttggtgttgcaaattttgctcgacaacagagttgaaccgttataactccctgaccaaacctttttgacgagaaaggagtcgaaccgttataacatcttaatcaaacctttttgacgaagaagggatcaaacaactataattattcatttaaaacttgtgtggcaggaaaggaaaatcaaaagttataactcgtgtataaaattgaatactaatggttctcgcgagctaggaaagtactgaacgaggcatcacaacgccttgagaaaagtacttgaacctagaaaatgaagaataaataaataatataactattcataaataagagaaaattaaaaatatacaaagtaataaaatcattaaagtaaatttaagttttcttaaagtagattgtaattgctataatgaggcagaatcgacaactgctcgaaaatcaaaaagtttagtagattactaactacttaaataggaagat

SEQ ID NO: 157192 - DNA, 696 bp, Cannabis sativa
taatcatgctctgttacaactcaaagtgaacccctcagctcacaacatgaactctctctttctgtcacttacataattacagaacacaagctagcctttatatacataggctgagattacaaacaaaaataacagaaataactgtctagtttacaaccgaaaaataactaactaaactaatacttgcaactgtacataaaccccacaaattccacctggtttatctacatttgcaagtaaggaaactgagctaaaaataacataggcaaaactgttccatcaataaagttttccttcacaagtgaaggatcaacaatctccaatgttcaacaatttcatgcatagcctgaatttctcactagtgactgccttggtgaacatatcagcagggttttcatgagtacatatcttctttactttgaccaatttgctagcaataatgtctctaatgaagtgtagtttgatgtcaatgtgttttgacctcccatggtacatgggattcttcatgagatgaatggcactttgattgtcacaatgtatgaacaagttgtcagaatcaattcccaattcagatgtcaaacccttcagccaaataacttctttcacagcctctgttgcagccatatactcggcttcagtggaggacaaagcaacaaccttttgtaggtttgctttccaactaacacagcccccaaa

SEQ ID NO: 157193 - DNA, 515 bp, Cannabis sativa
gaagtgtggacagtgttggctgctggggtagtttgatgtgtaacatcagtaggagtgccctcgtgttgtgatggtaagttggtggtgttgacaggaggaacaacaggattagtggtcatatgagaggtagtataaaatgtagaagtaggatgtatgtgtgagtgatgtacctgggaggttgttgcagtagtgagtgaaccaggaaaatgagattcattaaagacaacatgtcttgttatgaacattttgccatttggatgttcacaaatgtaccctttgtgatgtgtagaataacccaaaaataagcaatgttcagatctaagctccattttatgtgagttatatgcccgtaagtgaggaaagcaactgcatccgaaaggcttcaggatgttgaggtctggtttttttgaaaacagacattcatatgggctaacattctgcaaaaccacagtgggaagtctgttaatggtaaaaacagctgaggccattgcatgccaccaatattccattccaag

SEQ ID NO: 157194 - DNA, 656 bp, Cannabis sativa
acgaggaaaacctagtacgaaaactataaatagtaaggatgtgatttttaatgagaatatttttctatgtgttgctactaaccctaatgttgcagccctagtactaaccctgcatgtaactctatcaaattcaatctaaggcctactactcctagtgataaacaaaatacaaatcaagccaagagcttagaagactatcagctggctaaagataaagttagaagagcacgtagatgttcattttgtggtactaaataaggtactcagcgaaagatttatatatttaattatcattgtaccatagctcaaggatctccaaatgtataaacattaaatcaaaacataaatttcatgaaagaaatatatgtatacctgttgatgactatcagggtattctcgaaacttcttgtaagttggatccaataatcctcacactatagtcttccaaataaatccttcacacataaggagtagtgtgggatactaggataaaatttataataatttgttcttgataaattctcaacacatgagcaagaactatctgagaaagaaaaatagttttcctttcctctctatgtattttgaaaagtatagtgtgtaaagcttcttctgatttctcaaatgaggcttcgatttatagtagttaattctta

SEQ ID NO: 157195 - DNA, 1176 bp, Cannabis sativa
gctatccaaccaaccccaaagttactgtttccactaattacagaaagcattcacattgatcttaatcatgttatcaagaggagacctccaatgcccgctactaacaacaaaggaagaactagttgttaagattttatgccctaaatagtgggataagtacctaaagttttaattttgtaagcggcataaatctaatatttatttttagcggcataagtaccaaatgtttataaaattataattttcctctagttttgttagtacagactctgttttggatttattaaatgaacattttgaagtaactgatactacatgtttctgtctagaccaaatgatcaagaatctagaccttatatgtggtctgtttaagaatataacagagtttgtattgacgaaattagagaaaaattaaagttttacaaacattgggtacttatgccgctaaaaataaacattgggattatgtcacttacaaacttgaaactttgcgtacttatgccgctatttaccctaatgttatttacttttaagaaatatcataaatcatatcttgaccttgtcatatgcattgttcacatgtttctaacgtgattataagtttaatatataaattttattaaattatgaatatatagatattcacaattacagtgatgtcatcacagtagaaaatatttgtaattatatgcttcaaatttatttagtccatcgatttatcagtatactagatttacacttggataagtgaaatgtcttttcaagggcattagtaaagtaaactaagataagatgtattaactatatatcgggctgagccgatatcgacaatagaaaagatatcataaatttaccattatatcttttctaagtcaatgtcatttagttgatcatagatcatttgatctcaatcctgagatggttgagctttagcttaattgtattgcacgagttctttgacttgttcgttaccagcttacccgcgggactagggctgaacattcagacccgcaaacttgaaaacccgaccaccaaccctgacccgctaccaaaaaaagccaaaaaattgaaaacccatgtggtcgagtcgagtccaacctgaaaatactccacacgagtgtcgagtttgggtttttaaatatagggtttctttagtcgggttttaacccgataccc

SEQ ID NO: 157196 - DNA, 592 bp, Cannabis sativa
cacaatcgtaatcctttactaattgcaacaaacacctctgtctcatattcaaatctttctgagtaaaaaagtatttgagacttttgtggtcagtgtaaatttcacacttttttccataaagataatgccgccaaattttgaaagcaaacaccactacggccatttctagatcatgggacggatatcgctcttcataatccttcaactgacgggaggcataagcgataacccggtcgtcttgcatcagtacacaccctataccctgtttggatgcatcaaattatactacaaacttttccttctcagaaggcaaacctagcactggagttgtaatcaatctctgtttcagctcctaaaaactagcttcgcatttattcgatcacacaaatcgctgattctttttcataagctcggttaagggtgttgagattttaaaaaatccttcgacaaaccgacgatattaaccggctagacttaggaagcttctaaattctgtcactgttttcggtctaggccaatccctgactgattctatttttcctggatccaccttgatcccatctttactaacaatgtgccctaggaaggacac

SEQ ID NO: 157197 - DNA, 922 bp, Cannabis sativa
  modified_base (727)..(729): a, c, t, g, unknown or other
gagaagtatgaggcggtgacgtggcggtccaaaatcacttcaaatagcaccattcctactctccttaattctctcattttttaattttttattaatatttatctatatatatcataaatctaaatttaaattaattctcacgttttggtttttttatttaaaaaggatttttttttaaaaaaaaatcaatatatatataaatatatattattaagtttataataatatgttattaatctatctatatatctatcttcaaatatctactctccttaattctctcattttttaatttttttattaatatttatctatatatatcataactctaaatttaaattaattctcacgtttttgttttttttatttaaaaaggatattttttttgaaaaaaatcaatatatataaatatatattttaagtttataataatatgttattaattaattaaaaaataaaatttgaattgaaaaaaaaaaaactacacgtgtagttattattttttttaaaaaaaaattatatatattattaagtttataatattatgttattaattaattaaaaaatttaaatttaaattggaaaaaaaactacatgatttttttattattataattatttattataatcaatatcttctaaaatcactctaaactatttttctctctccttaattctcttaattttaatattttattaaacaataaatctataaattgatattttnnnattattttaataatttttctataaaaatcataaatctacaaattaatttttattattttttaaatatttctctataaaagtacagaatatattaaaaaattagaaaataaaaaataaattcaaaaaaaaatatattaaaacatcaaatataacgaattgtaaattttgtttatatacataaaatatcaatcaa

SEQ ID NO: 157198 - DNA, 609 bp, Cannabis sativa
  modified_base (469)..(470): a, c, t, g, unknown or other
cctaagagttttcaaaaacccaataaaactcgaggggaaggatctcaaagtgagtagagattgaggtctgatcgtgaatcaaatgttgggttggtggcttaagtttcactatctgcatttttggaagcacagtggtacttggatagtggttgcactcgacacatgactggcaacaagaaattgttagtcaattataaagaagcaaatgagggagctgtcacttttggtgatggaaataagggccagattattgggaaaggagacttggtgatgagtagagctgcacctcttactaaagtactgtatgtgaaagggctcaaggcaaatttgataagcatcatttaactttgtgatgtaaattacactgtaagtttttctaaaactcattgtttagtttcatctgatgggtgcttagacttaacagggaagagatctagtgatggtagttatttgttggacaatgttgtcnnatgtaatagtgcatcattggataaatcacatattggggattaaactgctattccaaaagttttaaccaaaagaaataagagtgttaaatcatcacctcgtctttcaagagctcattcactattattagtgctatggtat

SEQ ID NO: 157199 - DNA, 585 bp, Cannabis sativa
  modified_base (332)..(343): a, c, t, g, unknown or other
ggtgtagaaatatttggttatgcagttcaaagatcattaagttgaacttcgaattgtatccaaacttacctccctagaaatttgaattgcatactagtgaaaataaaaggtctatgattagttactagcagctgcttaagtccttctaggaaaatactcgagtgataagaaaactttagaatgatggaatggtcgtatacttagtgtacaccaattctagattcattgatgtcatgatcgtgaacttaagaaaagctaaaaccgttaactaagatttgcatgtttgctaactattctaaagtgattaagggtggaccatcctatggtcattnnnnnnnnnnnntgtttgtttcaacaaatactactcttctaagaatatgactaaatcttaaaacaaagtagaaaagtagaagagatatttttaattccaaagtattctatcatcttattctatataagatggtcttactgtctctgttgtctagacacaaccgatgaggacaataccattaatgttcctagacagaaagtcacggtaccttgtcgtagtggaagaattttaaagaacccaccctgttatgactt

SEQ ID NO: 157200 - DNA, 519 bp, Cannabis sativa
attattacttgtttttaaaataaatagtaaataatatttgaattatgcattttattaaatgataaagtagattttgtattttttaaaatagtacaaataggacgttaaattgatctttgtcaaaataaaatttaataataatttaacctagaggtgttatgacaaagctgattaaattttctgcaacggtttgtgttagaaattgtcttcaagttaattatattcaaaaaattatcgaaaattgagttcagagtcctatttattcattttgtcatttaacaaaacagaaagttcaatctgtaacttttacaaaatataaagttcaaaatggtattttattaaaataaaatagtaattggcgacaaaaacttcttatattttaatttttatacacttaattcttttaaaaattactattaaatacgaactagatgattattgtatacactcgtgtatacatgaaaataaaatctcgaagtcaatatagtaataatctaattagtatttaatggtaatatc

SEQ ID NO: 157201 - DNA, 653 bp, Cannabis sativa
tcaatgctatgagcctgaaaataaagtcgtaactttcttgacgatattagggcgaacgctaatttttccatttgagggtaatgagtctcagcatctaataggcgtttactgacatagtattccgggtattgttgtccttggtcttcgcaaattagtaccgaactaatcgcatattctgacaccgctaggtaaatggataagacctcgtcggtcatgggctttgacaggattggggttgccccaaatgtgcttttaacgcttgaaaagcctcctcgcattcctcggtccattggaacttcttactaccttttaaaatctgaaaaactctttgcatttattagaggatcgtgatagaaagcggtttagagaggtgactttacatgtgaggctttggccttcttttagtgggtgatggaatttccaccaatgctttgatcttcgcggggttggcctctatacctcattgattaaccatgaatctgaggaatttccctgaaccaactccaaagacgcattttagggggtttagccgcattttgtatttttgcaatatatcaaacattgcctgtaaatgggtgacatggtcttttgcatgttgagattttacgagcatatcgtcaacatatacttccatggtgtccccaataagatct

SEQ ID NO: 157202 - DNA, 524 bp, Cannabis sativa
tacgcccaattctacaaaattatggcctaattggaatatattgtaggagaactttcaaaaatactacaatgggggaagtttataaaactagacacagagtttttttatatttttattgttttaattttttaaaaagactgtgtttaacatttcaaaattataaatatattatgttccagtaacataaaaaaaaaaacaattcaaaaataaataaaaaacaactctagaataacttaacaaataatatgaaaataactataaaataacaaaaatataactacaaagcaatagatgaataacaaaatattgacctaattgcaataagcaaaataatattaactcctcaatatattttggtattacgaatttttattacttagttttgacaacatgatttatctttttgtactatacattacattgttttttatctttcatgaaatttgttgttatattctttcaacttttttttttttattgtgagttagtgataattaaaaaaataactataaattgaaaaacaa

SEQ ID NO: 157203 - DNA, 578 bp, Cannabis sativa
  modified_base (419)..(419): a, c, t, g, unknown or other
tgaaccttttgtggatggaggttcattaagtaattttcctaaagcacttttgttatggtgtttgggattttgctgtttggaaggagtacatcatccagacaggtcatctgtttttcactcaaacggacttgactcttagattagtagtttcgacccatggtcttagttgggccttaaactgggctttgctttggccatccttgactcaaaaatgccatgtgtccttaagctaggaactcagtcgactagtcttacgaattggccatcctttaatgcttccttaagctttatcaatccatctacctgttccaagaattcttccattgagcctatagtgatgttgggaatattaatttaccaacatctagatttactaacaagtatgttgaattaatatcctaaatatgaatatctctaanacaataaaattaaacacataagagtttaggataccttacattgattgcagcaaaatataatggctcttttcactcagatttctaacccttgctcctttctgtcgcagagtactatcaagatctgagcaggatctctttctctcctttgggttggttacc

SEQ ID NO: 157204 - DNA, 811 bp, Cannabis sativa
  modified_base (595)..(596): a, c, t, g, unknown or other
ttttcctttgggattcaaaaacccgcatgtctcgtcctatgatggaaccacagatccagtctcacatttgaataactttaacacaataatgcgatcgagtaacgtgacgaataatttaagttgtattttgttccccacctcgcttgttaaagcagcaagtagctggtttaacaagttcactcgtcattcaataatttcctgagagcagctgtctagggatttcaagaagcaatttcaagccgctagggataggagacttgaagcggcctcgctaacaaatataaagcaacagcctgacgaatcacttaaggcgtacttaagtcattttagcacggctgccgctaaggttagaaacttggatgacagtacgcaacttacatctcttcaggcggggatctccactaatcccctaaccgctgggagcaagttgtgggatgatttacaaggacgtccgataagaaacattactgagttcaacgagagagctcaggtgtttgtccgaaaggaagaagcccgaaagcaaatgaacttattgaaaacaagctcgggaggtaaacccagcaatgtctcaacagggactgcttccacgagaatnnataactcgggggcttctggtctgaaaagaaaggacagaatcaggaaatcgtcgaaggatagaaagaaaccaaagaagcatgacaaatacgtgcagtgtataccatgtatatcgagtgtaatgaaactcaagaaattatttacctcgcacatgagcagaaggtaacctttggtaaacctgagcctatgaagaatttgaggagcaaaagagatccta

SEQ ID NO: 157205 - DNA, 547 bp, Cannabis sativa
tgaaccagagtctcgtctagactttggtcgtacgacgaaaatcgaagagagagatggggagaagagagagacgaaaattggggtttctctgattttgtccaactatccatttatttttaatttaggtaagtccttaacatttatcaatttttttaagaagtggtaacgttttttttaaattgttattgttaaatgtaataaaatggtaaaaatgttgtagtgacattgtactgaaatatagaaggtgagtactgcagtgccttaccttggcaactgaaattttgttgtgaagggttatactgtgaaggaactctgagtgttgataacagatgtgtcaaaaaaagtgattgtggtggacttggtcaaccttgtgctcttagctacgattgttatcccaattattaatgttttaatcttgaaatgctagtgcaagtgctggtaagttcattgagttgaacaagagttaagcagtgttacacaagaatataacgatcgagtttataaatctaaagtgctagtgtaagtgttcctcctcgaatcacaaaaa

SEQ ID NO: 157206 - DNA, 517 bp, Cannabis sativa
gaagcaacctgatgtcgctacactatttgagaaaagggtatgtcaatcttactttctttgttgttttggtatttattttgctaaactgttattttcaacgattttatgcaatttcaatgcgatgttagtgcgatttaaacatgtttttcatttgcgtctgttttattttgtgattttatgcgattttcgtgcgatttttgtgcgactttactatgttgtttaccaatctgctattttctgcgattttatgcgacatctatgcgatgtttgtgcgactttactatgctgtataccaatctgttattttctgcaattttatgcgacgtatatgcgatgtttgtgcgattattaatattttttttcgcttttcttttttcaaatgtttgtttttcaaattttgtatccgcggaatcgggaggtggactattggaagagcaattgtgagggtgaggtccccacagtggaaatggggttggatgaggtcgaagaaacacaactgccttctctctgcatctcc

SEQ ID NO: 157207 - DNA, 528 bp, Cannabis sativa
cacgtgtcaaattgggaagaatataaatcaatgtatgtaacggtaattacatttgaaaatggaataactcattaatgcaaaaataatagagtatatttacaacttgctgaccaaaatgtcttagcaagataaagatacacaaactattatcacgtgcgttaacgagaaatcatatgccctcgaatgtgtaaggcgaggcaccaatctcgttacgcatgaagggacataagaaagatataatgactgttaagacacttagcgtataatacacaatctacaaattaagtgtaatagtcgggcaaacccgaacaactaatagcgaggcatccatctcgctataggaaggcacgcttctggtaccttcactaatcagctccagagatctttcaatgagattcatattctcatcaaggcagttctctcggatagagttgacatccaaatgatgttaactgttgaagttcaccttgtcgccaagagttgcggttgtcagatggagcattatgtcttcgagcgcagaaacgacaa

SEQ ID NO: 157208 - DNA, 724 bp, Cannabis sativa
gacagaggaattcattatgttgagcagtaacagtaggtggaatgacatttaggacatgttgcaatgcccaatggtcctcagtttgagcttgaaaaagactttcaaaatatgcagcaaccaaagcagatatttcatgctttgacgtgtagatagtgccatcttcatcagttaaaaatttaatcttgttgttggaaaatcttgcagaagctttcgcatgaaaaaactttgtatttcgatctcctgattgcaagatttttattctctctcaacaaactaattttttggtgtttatcatttcatattttaaaactttaacgacgttaagttcagaaaaaaaaaatcgttactttccaaagaaaagtttgaaaaaaaaaaacaaaaacgttaaatcaagaattaccgttagatagacacttttaatacataaagataaagatacaaagataaaaaaaaaattaaaaaaaaaaaaagagagagacacacacaaagagaaattaaaaaaataaaaaagaaaaatagagaaagagaagagaaagaaagaaaaaaaaagtcaacaactaacttaaaaaaataaaaaggaaaaagagagtccaaattgactaaaaaatatataaaaaagacaaaaaaaaaagatttttttgaagatttaataagtaaaaaacagtaaaaaaaaattaagaaaagtataaatgtaaaaattttcttgtcaaattataaatgtaat

SEQ ID NO: 157209 - DNA, 895 bp, Cannabis sativa
aactctatgcgatagcaattgcgaactaacatctagtcgccacgcaccactcccacgccatcttgtgtttggaattttaaagataggtgcttgatcgaactgactgcccctagtccgatcagtgctagacgacccaataatatcttgtaagccaagggcaggtcaacaacccagaagtcttgcagaacagtagcagttaaaggtgcctcacctaaagttaatgcaagctcgattatgccaaggctagcgatgctatctccgatgaatccgtaaagattcaccgtacaaggccataatttggtctttttgagcccgattttctttagagtctccttataaataatatttaccgagctcccattgtctattaacactctcttgatcctcttattggcaagttgaatggttatgaccagcggatcgaagtgagggtatctcacgttcttcttgtcttcctctgcgaatgcaatggggggttcctcgattttcaccttcttggaaggttctggggcaaagaccgactgctcgttctttatctccttcacatatcttttctgggcgttattgctttcccctgcgatatgcggccctcctgaaataatcaggatgtcctctccttctacaggaatttgttgtaacccctggttgtttgggttattaggctgcctgggttggttgtatccctggccctgtcttttcacatactatttaaaatggcctcaagcgatgagactctttatctcatcttttaattggcaacattcattggtcgcatgtccaatatgtttatggaattcacaatatttgttaggatctcttttgctcctcgaattcctcataggctcgggtttgccgaaggctaccttctgcgcatgtgcgaggtaaatattttccc

SEQ ID NO: 157210 - DNA, 557 bp, Cannabis sativa
gagttggcatggggagtatgtacccagccagactctacattctcgtaagaatgttcaatattcaactgagaatgatattgatgattacccattagaaatggtcgaagatgcatttgatgacaatcttgtagatcgtcctaatgaatttgccaaaattctagaggacacagagaaaccaatttattctggctcaaaatttttaaaactttctacattagtaaagttatataatctaaaggcacgatatggatggagtgatattggattttctgaattgattgctttttttaaagaggtgatgccagaagaaaatgaaattccaatatctttgtataaagcaagaagaccttatcattattgggaatggagtacgaaaaaatacatgcttgcctaaatgactgtattttatatcgtaaagaatttgctgaagcaaataggtgtccggtgtgtgcacgttcaagatggaaaatgaaaaagaattcagaagaggagcgaaaaagtattccagcaaaagtgttatggtatattccacgatttaaacgtttgttccgaaatta

SEQ ID NO: 157211 - DNA, 654 bp, Cannabis sativa
  modified_base (43)..(63): a, c, t, g, unknown or other
  modified_base (579)..(582): a, c, t, g, unknown or other
aaacaacatccatctaaccctaatcaagtgtttagctacacannnnnnnnnnnnnnnnnnnnnacatattaactttaagaaagagaagaagatacagaattaaataatgctgaaaaccctctgcagaatgcctctagtattgacttctgtctctaaaattcgtactccttttttcctctaaaattgcttcactaaaatcaactccagttcaccctttatataggctttcagggactaaaaagatagaaaaacgcacatgttaaatgcctattcgaattaggaaaccctcaccacccacgtgagagaaaaatacgatttttgtgctgtttagggggctgggccgcggcatgctaaagctgggccgcgtcccgtgttggagttcgatagtgagtcttttactgcgttgactaatagtattttggccataactctctcgatattactcggaatttgacgattcaagatgtttcggaaagataagagagagatctagaacttttatgttttgggtttttccaaaatctaatcagaagatagtttaatgcaggcatgaagtttcaactttattttcttgcacannnntctctattttaaatatcatctttttgtgagatattttatcttttttttcccatctttttcctctaatatttt

SEQ ID NO: 157212 - DNA, 537 bp, Cannabis sativa
  modified_base (97)..(101): a, c, t, g, unknown or other
cagggacttccgaagttgcgtgtagaatttatccgagctgcttctgcttttagatggggacacgtgtcgagcgcgaccgtccgagactcgatgtgannnnnactgggcgtcccttcggttttcggataataaatgctctgacacttaatattttgaaatcccactttctctctccacggctaacggctacacttgattttttgtgatttcccatattcatttttaaggagggaagctgaggcgtctgaggttcctctgagacggttacctcttttcgtgacttgcctataaataccacacaacattggcacataaactcattttcatcacctttctttgcctataaataccacacaacattggcacatagacatgtgatcttcgagtaagtctctggtttcctttatgcttatctttgcatgtttatgtgttaactgcatcctctaatttgctgtagaaaaatgtttaggaaaccctaggcccagaaacctctgcgattcttctttatcatgtctttgtgcgtttttacagtcataa

SEQ ID NO: 157213 - DNA, 589 bp, Cannabis sativa
ctttggaatgggctttcaagttctaataaagaaaccaaacacttgattgagctttcttaaggaatagcaagtccattccaatgctcattcatgtgaaccaaacaccacgagacctaagtggagagaaagaagtagagaatgaaatttgtgttcatcgtttaattgaatggtaaaaccctaaagttaatatattcaaccgattagataaaatctaggaatttaaaatttaaactcagctatacttttttttagaataaaatattaattaattactaatataaaatttctcataatttaaatttaactaagtcaaatatcctaaactaacttcctcattctcacactctcacgtgtctctctctcttccactctctatacatttactactatagcctttacaaatatatatatatactagaaaaaaaattacgtgcaaggcacgtataattagttttatgttaggtgctctataatttaattgagaaagattcaataaataatcatattatttgaaatggttcaaaaactaattttaattactgtgtggagttatttggaaatcagtagtgaaaggtcaaattcaaaattt

SEQ ID NO: 157214 - DNA, 618 bp, Cannabis sativa
atgcctcgctatgtattatcgatgtcttccttgcgattatgtcctctgacgcgaaatggtttctcgttaatacgtgaatcaatagttcgtacatccttatctcgctaaagattgtgcagtctacgagttataaatataccttattgactctgaatttaatgagttatttcatttaatatttttactgatataattattaatatttttattgattcatattccctgagattgacacgtgtcaccctctgaagtaccagccgaattttgggtataacaattttcccttaaaaagtttttttcaatgaaaagtgctttttaaatgattaccagagggtatatttgtcataatccattttgaaaaaaatacatgcctttgattttggcagttttgtagtttcgagacacatcatgagcattaaataaccatcttttccacttctttcttatttctatccattggatcctttgtatttgaatctaacggagtccaaacccaatggtataaaactgaaaaaggatgtcacaccctaactagcctaggcgtgttaacgtgattttaaacttgctgtgcagctcgttgctaatcaacgagtttaatgaaaaacgtgattaattaaa

SEQ ID NO: 157215 - DNA, 505 bp, Cannabis sativa
ttatttaaatttttgaattagaggagatattttaccatccgatctaatccaattaattacagttatctaattgattcaacattcattagatgttggattagatcgattttatccgtcagatgtattttatatatatttattaatttattttgggtttattcaatattatacacctaatattatttagatcggatcaaatccctctaatattataggttcaatatgtattggatggatctataatacaattaaaaaaaaaattaaattttaatgttaatttttatatatatattttatgtataacaatataaaatctaattagtcattcaaattaaatgaaaatactaattagttcgattgaatgttacatatattagatgtttagacactctatccaacattctgtgcgatccgattggatattaaaaaataacctctaatccaatccgatcacaattaaatatcaatacgtttgtattgattatcattaaattgaatgatttat

SEQ ID NO: 157216 - DNA, 546 bp, Cannabis sativa
  modified_base (267)..(282): a, c, t, g, unknown or other
  modified_base (404)..(404): a, c, t, g, unknown or other
aagcttccaataagcagctttagattttaataagtaaattctctaacttattaattcttctttacaccactatagatttcgaattgcactcttaattgtatagagcgctttatatgttccgcgatttagatacgctatgaattatctattgttataatcctattaatcaatgatcctctatagatggtctacgtcgagtaggaacatatttaccgttacacccctcaatgtattttatcctaaaagcacttagctacctataaatgnnnnnnnnnnnnnnnnatataattactgaaatgagtactcaattatttgtctctattaagccaagctcaacggaaatcatcattttactactatgtccaaatagaagctatatatttcgtatctatgattagcgctcncactcaattgaactaccgtgtcctttatctatatgtcacaagaagatccattggtcgacttaactaatgaattgcagaacataaataatacaactgaactagaacctaaccatctcagaattgagatcatttgatctaagat

SEQ ID NO: 157217 - DNA, 571 bp, Cannabis sativa
aaaaagctcagaaaaaaccctcccttcttttgaagaaaaacaaccttctacatggctcaaaatccagaaaatgttaacaccccgcatgaggaagccaaccatctttttggaaaagagcccatgggctccagaagatctaccaatctgtagtccagaagggctcaacctgagggtggccccagtgcacggaccacacttcctaaagaactcaacccgacgttgatcctagtacgcggacaacacgctcgaggagaactcagcgtgggaatggtcagaaccctgagacgggggatgaagagctcaatcgtggaggtgcccaatctgtaggagaaagaacttatgaaacggaaagccgttgccagagatgccgtctagaagaggcctagcgtaggaacactgagttagaacgtgaggcagcctcggccaggtcggcacatgaacgcttaaaatcaacctgaacttgaagtgagaagaccacgaggcagaccttgtggctcacgaaccaggagacaggaaaaggtccgggaagaacaacctagggaaaataagacaccccctaaaaatcaggatg

SEQ ID NO: 157218 - DNA, 527 bp, Cannabis sativa
  modified_base (498)..(501): a, c, t, g, unknown or other
caaaattccaaaccattgtctgtccttaggtttttaatccttctgttagtaagattttcaacaagtgttttcccatgtttaaacctttgaaaaagcatcatttttattcttaagtaaaaagatccacactttcctagaaaaaccatcaactatagacataaaataagtgttacctccatgagttggtgtcttttcagggccccataaatctgaatgtatataatccaatatacctttagatttatgtattcatgttttgaacttcagtctatgatgttttccaagtatgcaatgctcacaaaattccaccttgttgattttatctttacctagcagttgttgttcattaacaatttgcaatcctttttctgctacgtgtccaagtttgttgtgccatagtatagctttagcatcttctggactatgcaagatattgttttgtccaacagtgttgttacttctaactatagtgtaatacccggaattaagaaatggatnnnnaaaaccctaactagataattatgtat

SEQ ID NO: 157219 - DNA, 597 bp, Cannabis sativa
aatctagatcctggtaaaattttcctaacacaatattgacttggtttattcatatgccttccagcaatggaatgagcaccaatgtaccgagaaaacttaagaactgctctttgaccataaggcctcgcagactggacaatcatgtcctacatgctcccaagttggtacagttagttattataatgtcgattatacggtgagtgtttcaacagctgactcgccttgtcaagacttccttacatgtagcaaggtagatgtctcactatgcattgtccatagttccctcgagattaggccttacgaggcaagatagtttcttgtcaatatatgaattgatagtttgtgtatccttgtctcgcctaagactatacaatcggcgagttatgaatgtactctattaattctatatttaatgagttattccattttgcatttaatgacataattgttattatatctggtggttcatattccatttgttcgacacatgtcactctttgaagtacagccgaattttggatataacacacaatatcaaggattttgtgattaagaatatgtaatggtggagagagtttgtattgaatacaacttgtc

SEQ ID NO: 157220 - DNA, 551 bp, Cannabis sativa
ataaaatggaccttgtattttctaaaattgtacaaataggaccctaaacttatttcttgtcaaaataaaacttaataataattaatctagagatgttatgacaaagacaatttttgtatctattcgtgttgaaaattatcttaaagttggttatattaaaaaaataaaattattaaaaagtgagctgagggtcctatttgtacaattttggaaaatacagagtctattttatcacttaacaaaatagagtgtccaattggtaacttttacaaaacaaagggcccaaaatggtatttacccataatattatctcatttacatttttgttacctaccaattaattacttttaaaatcatattgttactaattagttacttttaaaaccataattttatttttaagttatattatattattgatcaagatgcatttgtgttacttttacatataatatattatatatctcctttacgttacctttaaacatattcgaaactaataaattacattaaagtataattaaattatgatataacttattagcaaaatt

SEQ ID NO: 157221 - DNA, 557 bp, Cannabis sativa
  modified_base (455)..(467): a, c, t, g, unknown or other
gggttttatttttgtattttaaagagagagaaagagagaaagatagatagagagagggggacgaaggggttcagtatatattcaaaataattttttcttttttacatacaaatatatattattaaattattattttatatatatataaaaatagttgactcggtcaaaccgagtctttacagttactgtcagactaaaaaggactgttcgaccaaggaaacctaacatttacaaagaaagttgtacaaagaagctagaaaaaggctgccaagcatatactaaggttggcaggcacatagaaaggttgtcaggcacatagaaagctggcaggcacataccgaggctgtaggaataatacctggccagccataggaggtcatagggcagccaggccctaaaaatagggctagtcggccaacttatgtgcacaacttgggtcagggtgatacgtacannnnnnnnnnnnnatagtataattgagtgggagcgcgctaacataaatatggaatctataacttctataggaatttataagtgaaacgatgatatccttcgag

SEQ ID NO: 157222 - DNA, 601 bp, Cannabis sativa
gatgtgcatagactatcgtgagcttaacaaggtgaccattaagaataagtaccatttaccaaggatagacgatctcttcgatcaattgcaaggctcggctatgatctcaaaaatagatctaagatctgagtatcaccagctaaaggtccggaaggaagacatacccaagacaatattcagaacatggtatggacactatgagattttagtaatgtctttcagactaactaacgccccagcagccttcatggatataatgaatagggtgttcaaggagtacctagattgtattcattgatgacattcttatctactccaaaactatggaagaacatgaggaacacctgagaatgattctaaaccgacttaaggagaaccaactatatgccaaattcaagaaatgtgaattctggttagagaaggtggcattcctaggccatatagtttccaaagatgtagtcgaagtgggtcctacaaagatcgaagcggtcaagagctggccaacacctaagactacaggtgaagtaagaagcttcttgagtctagctggttactatagacgctttgttgaaggattttccaagatcgcaactcctctaac

SEQ ID NO: 157223 - DNA, 827 bp, Cannabis sativa
acctggcactaactaacacctaacaataaccgacttaacagatcgttagtgcagatataacagacaaaaactccagaaatgactagacattgtacataactaaactgtcacaaagtaacgacacttacaggttatatccagaatatgcgtccataaatgacataagctcgtgcctagcagttgcatccgctaattggtcgatcttgggaagtggaaaacagtcttttgggcatgccttattcagattggagaagttaatacaagttctccaagttctgttgggcttcgggatgagaacaggattggctatccacgagggataaaacacctcacttataaagtcattggctaataacttggcaacctcctgttttagtgcttcttgcctctttgaatccaagggcctccatttctgtctctttgctgggtagcttggatcaatatttaagtgatggctgataatattagggtcgatccctatcatatctccatggctctagggaaactgatcctggttctccttcaaaaagtttattagctactatttgagttgctcgtccaggttcttcccaatgtatacacattttgtgggatttcttgggtcgagaataacctcttccaattcttcgattggttttagcaggtttctttcatcttgaactcggggatcaagatcttcgtcttccttctcgttatctcctgccgagatcgtcatcaactgatgaccagaatttctatgctgcaactctatgcgatagcaatcgtgagcccacatttggtcgccatgcaccactcccacgccgtctggcgtttgaaatttcaaggat

SEQ ID NO: 157224 - DNA, 507 bp, Cannabis sativa
ttattccaaataattcaaccctaatcctagtggaaattagtataaaaggaaagctattgtctcattatccaactaatgcctaaaaagctcaaaacctagttttctctctaggtttatgagacctcttccttcttctccttctaatcttgaaaatcatatagccttcttcgcaaacaaaatttaagccttagtgatagagtacattcccacacataacaagttggtactcaatcatagtgtgtaagactatgaaaaatccgattaaagtgaaggagaatcgacctcagatcttggtgatactctgctagaaaaaagatacaagggttagagatctgagcggaaagagtcatttaattctgctgcaatcaatgtaaggtttctaaaactttatatgtgtttaaattacactgttatagaaatttatatttaggatgttaaagaacatactgttggaaattatttaaactggatccagatttactaccatgtatgtttcattaacatcct

SEQ ID NO: 157225 - DNA, 838 bp, Cannabis sativa
caaggttggatgacaaactttactttatttttttctttattgaatgcttcatacttttatatttgaacttaatatatgcatttttgcttgcatttttattcacaatttgaacagtcatattttgatcaaatgcaaaatactctaggcctttccactgctcatattttcctttgataatatttaagtagttagtaatctactatgtgtgcgagtaatctattatctgccatgcttttggtttgcgagcaattattgattctgcttcgcacaaacaattataatctgttttaagcaaacttgaatatactgttaatgatttatcactttgtatatttttgattgcttatatgaatatttagatcgtctattcatacactaggtttaagtacttttttcaaggcaccttgatgtctcgtttaatactttccgatacaatgcgagtcgttagtattcagcttcacatgtgagttatgagttatatctcatttttaactattgattttcctttctcgttagaaaggtttttaatcaaaaagttattcataatagtttgatcttcctttctccttagaaaggtttgatcaacaagaactttaaaaaattttaaagtggtgggttttcactatatcatgtatttctagataaactctggttaatcatacacatatgcctctcaagtaattttaaagagcaacactatgtaattacttgaagaaagatgattaacattattcataactgaagttcaaaatattacattagaaatgtgagttacaacatcaatttactggtagtaggtgtaaagaccgcttactttaaatttggaaattagcagata

SEQ ID NO: 157226 - DNA, 683 bp, Cannabis sativa
gcggctagagtgtagctcgccgcggccactgggcagtacttcgaaaatttttcttttttttttctttctgtacagtacaaaacattaaagaaaaccaaaattcggtttaccagttcactaaaaataaaccaaaaagaaacaaaaatagtaatcacaactaaaagaagcgaaatacaaaagctcaactaaaacaccaagaaaattcgggttgcctcccaatagcgctgtctttttcgtcgtacagctggtcattaactgagttcttcagagaggcgccagaatcacagcggacttggcttggtcaaattgacctcccaagtagagctttaaccgctgcccgttaactttaaaagtctcagggctttcacctttttgatctaccgctccataaggaaatgccttgaccactataaatggtccggaccaccttgactttagcttaccaggaaacaatttcaaccttgaattaaaaagtaaaacttgctgcccaaattgaaactccatcctgactaagctctggtcatgccacttcttggttctctccttgtagattttagcattctcgtaagcctcatttcaaaactcttccagttcattcagctgtagcaatcttttctctcctgcagctttcaagtccatgttgagggtcttcatagcccaaaaggccttatgttctaattcca

SEQ ID NO: 157227 - DNA, 561 bp, Cannabis sativa
agtccaggacccggggccaaggtctaggtgccccatccaggtccgagtaccgtgtttagatttgggtctgggttccgtggcccaggtccagataccccatccaggtttgagtcctaggttgcggtttgggtcctagtccgagttttgatttcgattcagtgtttgggttcgagtttgggcctaggtctgggttgaggtctgattccttgtccgagtctgtgtctgagtctgggaccgggatcggatccgagtttaggtctgcgtttagctccaggttcgagttcgggtctcgggtgggggtccaggtttgggtctgggttagggtctcgtttagaatctaggttccgagtttcgatcctggtctgggtccaggcttcggttcaagtttaagttcatatctagatccctatctaggtcagagtttaggttttggatagggtcccaagtgtagatatgggtacgagttttggtccgggtctcagtgttggttcgggtacacgacgtgtcagggcccaacttcaagtcacggtttgggtctggggctaggcccgagttcagttc

SEQ ID NO: 157228 - DNA, 655 bp, Cannabis sativa
  modified_base (619)..(621): a, c, t, g, unknown or other
gatgctgttacctcttttcgtgacttgcctataaatacccatagcattggcacataactcattttatcacccttcgttgctaagtaaacttcagagcgaaaagagagtaatctggcttcaaagttgccgaagtgccttcgtacaactgctggtttgcttgacgttgctcaaacccagacattcgaatctttgagtaagtttctgattttctttatgcttttttttgcatgtttacactttgaatacaactatgctgggtgtcgtggccgtagtctccgtggaaccgacaaaattttgtcatgtcccttttattggtatctttcttcatgggccccggcttcttgtacggaattaacgactgagttgccatatacacactctcaatatcttcagttagaatagtgaacgcagtgtgtttggcatgatcacggggagtctgtccagatttatctgtgaattttcctttcttcccgtttccttgcttgtggttgtttcttgaacgcttgccacttgaattgttggaatagttaggaagtagggtggatgttctagtagaaggggcctttgttttgcccggctctgctcgttgaatggctttttcgagcttgatgaagccttnnncttggtcaaggaaatcactcattgagtcgaccgg

SEQ ID NO: 157229 - DNA, 565 bp, Cannabis sativa
tgttttgaatatactaaaaatatatacacataaaaaaactacacataaactaaacaataactgtaccaaaaaatagacaaaaacaacagaaaaaaaagaaaaaaaaaaacttataaaacaactatagaacatctaaacaacaacctgaaaacaactagaaaatataacaaaaagacagctataaatcaactaaaaaataataaaacatcaattttgttaaaatatgtaaatcattgataaattaattctaaataaactacaaaacatccaaaaaaaatataccattttttattaatcatgttaaagataaaaaaaaaatataggatacgatgagttctcttatttttgtaagagagagaaagagtttttaaaaaagtaagaaaaatgatgaaagtaaaagaatcatattttagtaaagattaaaagaaattaattaattttttttatgtataaaatgtgattaattaaagaaaataagtttacaatagctagagtgagaatagtaagaaaataaaaaggagttaaaagaaatagaataagtgtttgtattttattttattttttt

SEQ ID NO: 157230 - DNA, 676 bp, Cannabis sativa
tttaaaataagataaaatagataaataatccatatactttacatatttttatttgactttatttataattacagaaaaacaaaagtaaaaatactataaatatacataaataggctcaaaatagtataaactatttttaaaaattatagtataaaacaaaagattatataacttaccaaaaattaataaaaatactactacataaaatattagactttaaaagtgaaaaactaataaataataaaataatactaatgaatcgtcaaaaaagcaataaaatatgaaaaaatattataaaaattgaaataatatatgaaccattaatgtcttatgctaaaaaacattaataaagaatcttaattgagaatgtttaatatacaaaatataaataacaaaagttcaaaaatcaaatattaaaacaatagtacaaaatgctaattaatataagaaaggaaattctaattaatcaatatagtaaattataaatactaaaaatctcacatttagactaaaatatttaatggtaaaaatcatcatagtcataaaactaattgatagatttagtacaccaaaataaattagaaaacgagaaaaattttctataataatctaaaatactcttaaaaaattaattatagggttattaatactgagaattaaaataaataaatttgat

SEQ ID NO: 157231 - DNA, 626 bp, Cannabis sativa
  modified_base (400)..(411): a, c, t, g, unknown or other
  modified_base (459)..(466): a, c, t, g, unknown or other
  modified_base (573)..(578): a, c, t, g, unknown or other
gcactacctaaaatctcatacactcttaattattctaatacctacattatcaacttatcacaatattcccactaactctatcaattaagcctgttagacatttttgacccctgattgagtctccaatgtcgccaaaactgaaaatatttgttattacaccaataactcatattacattcacatatgccatataaatctccgtaatttataaattatacttatttatccacttatagcaaatttaaaattttatgttgaactagattagtaggatcataatcccacttattacctggttaactcataatataaatataaactctaattattaattatttagcttattgcgatattacagtattctaggaaactgaaataaatttctatttggaatctaaannnnnnnnnnnnagacttaaatttataccaaatacacaatgagttttattctagcttggnnnnnnnntactaatctaactctaagtttaggttgtaagcatatacaattaggagagttttaagattgagaattatatcattttgggataaaatgtcgggaatatagtcatctgnnnnnntcaatttcataagagaaattagagtgacatcataagcagatgatttat

SEQ ID NO: 157232 - DNA, 577 bp, Cannabis sativa
gagaatcaagtgaagaaggctgtgaagtgaaggaatttgaaattgggcaaagaaactaagtttggggtggaaacttatgttcagttgctatagcaagggcttagcaatgtgtttggcagagaaaggagtttggttttgggctgatcaaaggattagggtttaaaaaaaaaaaagaaagggtacttggtctgatcaagatgaacatgtgaaaattatgttaatgatgcaatcattgggcataactttttttactcagcccaatcatttggattgatgtacccttgtacttagaaatgccaaataaagtatacatgtattattttgtggggctttatgtttttgactttggtcaactgggcccctctactaatcagagcccacttctctcagcccaatacccaaccctaccatttcatcatcttcttcccttcaccaacgtgacccagccgcatgaccactcgcaccagctcccataatctcaaccctcccagccatttcatccaagtcgacccaacctccatttcacctgaaaccgaacccaaaatatcacctaaacccgagcttccatttcctccat

SEQ ID NO: 157233 - DNA, 701 bp, Cannabis sativa
tagttcatgcgagatgggaaaaatgaaatagtgcctattgttgtgtccatatgtgggcgagaggaatgaaagagagcaagagagatgaggggagtgctatgcgaatggctgggcatgatgacatttcaggcgagagaaagtggtggagatctagagagctaaacggagttaaatgggtatcgtggctcaggcgagatggggtggtggaggtgacgctcgtcgggaagtgggtcaagcgagatggaatgggtagggatggagttttggacgaaaaaaaaggaacaaaaggtggctggaatctgggcaaaactgaggtcgattggggcagctatggaggttgagtgtggatttctttggatgtctctttttatttgatttggtttttgtcttcttgagattaaatattttgttttgggtaaaatattatgtatggttagaatcaaatttagaattttttatttggattattttgattttgttatgtattattggattttgttctgggtttttggattttatataaacatggtggtgcataagaaactcaaatctagaaaaaggaagctcaaatttatcgatgttgatgtttgtgttttagatttgtgatatttgggtttgatctttgtgaaaagtttagattttttgtttatgtatatgattcagatgggtggtggatagtggttttaatggtgattggtgat

SEQ ID NO: 157234 - DNA, 662 bp, Cannabis sativa
gggcttaaatggattgatgagtacaacctatatcaacaaggtgcgtcttgttttttggtagcccatcgcaaaagaacttcacaattaagcgtgcttgacctgggataatttcaagatgggtgacctcctgggaagttttcccaagaagtgtgcaagtgaggagaaagcacgctggaaacactcgggtggtttgtagggtcagtcgtcattccatgaagcaggcatagtgacatactcgtgtataagagccatcattccgtgggtgtaagggtccaatagaggcttgaagtggggatgttacaggttgtctcacaatcctcccattacgacgttgcaccggattttccttttcaagagttatggtctctctggttgatttaacattaactgatgaagatggtggagaggaaatcttgtttgtcattatttcctctattactactttgttccggggtttatagttattcatatagtcatgttctaagaaggttgtatttgttgaaacaaacacctttttctcacatggactacagaaatatccatctcttgtttctggagcatatcccacaaaaatacacacttcagacctcgaatctagttttccagatttaggttaaagcacacgagctggacaattcaaaataagaaaatgtcatgaacta

SEQ ID NO: 157235 - DNA, 502 bp, Cannabis sativa
  modified_base (64)..(69): a, c, t, g, unknown or other
taacatttactaagagcgttaaccctaactcatgctttcactggattcataatattctagggtnnnnnncctagaccgcattaaaattaactcaaggtactagtatttacataatctcaatatacacgtatattcgacatggcatagtatttacatagcatatatcactagggtaataaccctaggctattaaaccgctcatgctagggtaataaccctattcccagctactattactcacatatatcactttcaatataagcgccaccacgcatactctatgtgataactactgtcttacctgatgtcccgtaatagaagagattccaaatcccacggtgcttctgaccaggtgccggtaatcctagtcataaattctgggatttcacaaatagggttaacccctgattttcaacacttaaaatttaatcatggcatttaaaattcagataatcatatagagctcggaacaagctttccaacgatataaagaactcccaaa

SEQ ID NO: 157236 - DNA, 792 bp, Cannabis sativa
tgaacttattattcaaagaatccttcacatccataggcctcacggaccgggattcatcacccagcggttcccaactcattggattcaatggaaccacgcttattatcccaatgggaaaagtgaggttgccagtcaccctgtgcctggatacacctcagagtacttttaagtactgcacctttgtggtggtagactgcccaactgcatacaacacaatccttggctgacttgccttggttgattttggcacagtcacatccatccgacacttgtgcctgaaattccccattcaggaggctggggtgggaaccgtaagggtcaaccagggagaggccaggaattgttataatgtcgcagcccacttgctggtgttgatggttcgtgagaatattgagccaaggttggcagaagaagatgagttggatcctcgtgtgggatccaaaaaaatattagaacacatggaagacatcgaggaagtgcaagattgtgacctcgaccctactaagatcctccgcctggggaacagcctagagccggaggagagagagaaaattattgaagcattaagggcagccacagatgtttttgcgtggtgccaaggagacatgaccagtataagtccacatgtgatacccacatcctgaatgttaatcttgatatgccgccaatacagcagaagtggcgtccccttgacccaataaaggcagatgccctagagaaaaaggtagatacgctactagccaatggcctgatccgagatgtgtattatccggaatggctggccaattcggt

SEQ ID NO: 157237 - DNA, 544 bp, Cannabis sativa
tccttttttgtatttttttgtttttttcccaaaaaaatatagttctggtgaactgttgctgtaaatacagtttggatttttttttatatgacacgaaatcggtatgagcacgattaggcatgaaaaattatgagcttgaacacgacataatataatgctacaaattggcacgacaatcttaggactgttcacaaagtatttgatttaatctaatccaatccaatttacaaaatgcggatattcacacttgcagttgtttgacatcaaaaaataactgattcaatccaattcgtacttaattatatatatgtacatattttaaaaaattaatataaatgtaatattatattagttttcatgtgatattaaaaaaaaaatacacaaacttttaatatctatacctattaaaatcgtttttagtaatatattgagttggtgtattttatttatttttatgatgaaaaatatcataaaataattcctattcgtgtagacacatacacataaatttagataaatatatatactagcttatttattttag

SEQ ID NO: 157238 - DNA, 650 bp, Cannabis sativa
ttcttcttcttcttcttctgcagaaaccacccatcttcttccttggagagctaagcttctttttaattaattaaatattataaaatataattagttactagaattaactatctagaatatatctcattaaactaagtgtttttctaaaaataattttaaaataatctaatgaaaaataaattttatatattttaaaactaattatgttgctaattaaattttaattaggttagactaatatacttaacctaatacaattatttaaataaggtaaatgagccttcacaattggggtgattcgtgtgagagagggctgggttcagtatgtcatacccactactaatggctctctatctctcacacaaggccaaaggagaaaaatttaaccattaaataaataattgttattcattgaataagcccaatattaattgggcctaaacaaaaactatcttatgtgatattttattttagcaatctagtccattaattaattaaacttaaatgggcttcctatatgcatctaagcccaaaagtaaacacatagacacacacaggtcaaataatttggatggaccctatcatgtttttaagtttacacagatgaaagaaattgcaaaatttacctgttataaattatttataagatc

SEQ ID NO: 157239 - DNA, 639 bp, Cannabis sativa
ttctctctcaaactcaactctctcatctctctctttccctagaaccagctagggttgggattattatgcagcaattcaagctttttccaacaagtcttaggtgatccaagtcaaggtatagtctctagaaatctcctttttgatttcttgggtcttaagctatggtattatgcatgcttggtgagatttgttgttgtagttgctgcttgtgtttgttgttgttttcagtggatgaattatgcttagatatgttgttttaggcttgttgtgttggctagtttgatgtttgagcaagttttgagtttagaacacaagcttggctctcaaatggcaattcttgtttctgagtttgggtgcttgatttgttgcttggaaaatgttctctaggttgtatagaataggtctggaaagtttggtttgatttggggttgatttgaatgagttaggaaatttttggtcattcctgcactgaaccggaattccggttcagaggggcatgtaggaaccagaattccggttggctcccaggaaaccccacagaaccggaattccggttgggaaccggtttgctggtggggaaattttgggaaccctagtttttttcccatttttgtgttgtttagggtattgccatgttat

SEQ ID NO: 157240 - DNA, 622 bp, Cannabis sativa
accaatggatctatatatttcatcaacaccatattacatcctctgcgagctacgaaaggcttctccccaagctcatcatctaaagtcttgtattgttggtgctgcttttggttcaaactcatcgcatgccaagcttgaaggcaattacaacaacagttttcaagttgtcttgcatgctgcttattatgggcgtcaactgcttgttaatgtggtgcttaggtaagttccctttcctttctctttaatgtcacattggggacaatatgtcactttagtttgggtgtgaacttaaatttttatttttagttggtttttaaatttttagtttttagttgtttcttggttttgagtcaatttgctaaatgtgagtcaatttgaaagtaggtagatagcataatttgaaaattttatttatttatttatttatttttgaaaaatccgtgtgcttggtgatattatattcttgactaatttcaattttgtgatttaaaagaacatggaatcataataagtaaattcctagcaattcaattagtttttgtatagtaattgagaaatgtggaaagttgtttgaaaaattctagaacttgcttgcttgctatttgaggcgaaataataaatt

SEQ ID NO: 157241 - DNA, 722 bp, Cannabis sativa
  modified_base (537)..(541): a, c, t, g, unknown or other
aaatcacaaagagctcttccaacatctcgacccccaatagaaattggaattgtaaagttgccaggatctttcaatttgggtggaattttacttttcaacataacactacatccctacgtcaaagcgacagtttcaaattcgccaagcctccttttctttgtcaaaatatccttcaaaaacttcacataagttggcattttctccaaagcttccactaatggtatattgatgtcgagctgctttacaatataaagaaatctccgaaattgaccatcgtcttgttgtttcttgaaccgttgaggaaatggtggaggtggcttttgcaaagacttttctgcagcagaatgctgactggatgctgtaactactgtggggaatttcagcagctgaaattgctggttttttcttcattttcccctctttttggattgaagagggctccttactgcctattgcagccacatttaactcaagaatttttccacttctcaaggttatcgctttgcaatgctctttgccatctcttcgtgggttttnnnnntcactaggcaaagtgccttgtggtctattcttcaaatcattgaccaattgcccaattgaaattcaagattccgaagaaatgctgcctgactttgaattacagcgtcattcttggccatatagtctctcattaagctctccaaagaactagtttcagagcttgaggttggtgtggttgttga

SEQ ID NO: 157242 - DNA, 623 bp, Cannabis sativa
atctgttgactttgaaacaaatctcctgagtggggcaatccgaccagtcaaactttgaacttctttggtttttgttggcgatttcatatcaaggaggccttgaattttctctcgattagcctgaattcctcaggaatttaaaaatttgcccgagctgactccaaaggagcactttaggggattcagttttatattgtatttcttgaggactttgaagcatttgtccaggtcatctatatgcccccagccttcctggatttgaggagcatgtcatccacgtacacttccatatttcgtccgatctagtctttgaacattatgtttgccaacctttggtatgtagctttgacattcttgagaccaaatggcatgactttataacaatacaaacccatatctgttcgaaaacttgtatgttcttgatctggtggatgcatcttgatttgattgtaccccgattaggcgtccatgaagcttaatatctcgtgtccagctgttgcatccacaagttgatctattcttgatctgctgctgtagtcttttgggcacgacttgttgaggtcggtgaaatcaatacacactcgccattttttgtttgtcttgggtactagtacgggattagc

SEQ ID NO: 157243 - DNA, 776 bp, Cannabis sativa
tattattttaataggacctctttccctacaaagagagctcctctagctcattttttacattcagaaaattacccataatgtcagagcatctctctctaatttcttgttgggatttatgttggttttatagtactacattaggtacgcacagaagagttttgtattatctgattatgcttgtaccattgcccaaaggatctccaaatttgtacactataaatcaaaagaataaaaataataagtttaaagtatacctcttgaagcctatcagggtatcctcgaaactttgcatacgttgaatcccttaatctagttgataaggaatttgtaatttggactcacaccagtgtcttccaaatcgatccaccacacacaaggaatagtgtgggctattaagataaagtgtgtaacatttgttcatgttgagttctcaatacatgagcaagaacaattgagagaaaaactaatttcctttttctctccttaatttcaaaaattaggttaagatttctcaaatcatgcttctatttatagtagttaaatttctttgatttattattgaattgtttaaataaatatctataatcgaatatggttactgatatttatgagggaatttctcaatcactttgttatcctaaagtttttccacctgatgtggaatgtccacgtaagccaaagatagagtacaggtggagtagagcctcgccaatagcataatagagcctccacacaagatatagcaaaatcgtcaagcaacaatcgaatggagtgaa

SEQ ID NO: 157244 - DNA, 609 bp, Cannabis sativa
  modified_base (38)..(61): a, c, t, g, unknown or other
attgacttaagaagaaggagaaagattccttttcttannnnnnnnnnnnnnnnnnnnnnnnatatataattcttagataatatatttagggtatagtgtcaactgaactatttttgactgatcctttgcccattgaacatgcatcactatttatagggctagtaagcttggagaggaagtctttcccctttcgttacaatgtgtataaacagaaagatcgtgggatcaatgctgagtacaaagatcatgggattgatgttgaatacactgatcgtgggatcgtgtgtatgccatatccctgtaatctgatccccaagttctagggattttgttgatgactcacaatgcgaaagctaaatttgctaagtgttggttgctctgtgcggattgttgattgctttgctctaggcatgccagccacgcatcctgctcggactattccctccgaccaaatactccaagtggattctgtgtcaccattatgtgatgccacgtcaaattgcgaaaattgaaataacagaatccaaataaaataatttcagaacgaaaataaaattatttttatggaaaaatttggtaattcatatacattcatcaaataacacataa

SEQ ID NO: 157245 - DNA, 731 bp, Cannabis sativa
  modified_base (136)..(137): a, c, t, g, unknown or other
taactaattaaaatgcacatatatatattttttttctcgatttcttttttcagggtgggcgactgccccacctctatgtgggtccgcctctgatattagctatctttttattaatattttatattatgtgtttgtnnttttgtagtatattagtatcatttttataatattttaagttatgtgttgtacaataattagtatattaaataataaataatgtgtaatattttaacgttgggtattgatttgagatggagcagattttagtttgagtatgtgatggagtataaaaagtgaggtgtgtgaagagcacttagtagcttttgaatggaataattttctcatttctcaactaatttagcaatgtgatcacttgtttttatatgatttttcaagaccaataaaataaaacaataatttaaggaccagagtaaatggaaaaaatcagaggaagtgtttttctttgcatgaaatttcttgaaaactttgaacattaataactcttgatccggttgtccatttgaggcatttttttaacttttgtatttttttcgctttctacgcatcccaaacagtctaaggcagtttggccaaccaatttttcaaaaaatgttgtttgtatactaaattcatgttatgcacttctttcacccaattttttatgttttattttgctattttacttaaaataaactaatagaattctcatgttaagtattagaatcaatatt

SEQ ID NO: 157246 - DNA, 685 bp, Cannabis sativa
ccagagcaaatggaaactcgattcctctttatcatcacagagtggacacaaggaattctgtatagaaaaaaaatcccccaatcttttgtcgagtgggaagcgcattccttaagatctgccatcctaaaagcttgagccttgggtgtaagggggaattccacaagtccttccaaatccagtttgactgggaagcgaaggaacggttccttactaatcgataggccgatttcagagagaattttccactttcttcaccaagccatagccaagaatcattctgagggtgggtcggaagacctatatttaagatatgtttcacatcttccttcctaaaccagttgttgaggcgatcaatattccacgtgagattgtcatttaagaaataatggacaaggttagccccctgggtagcgtccttcagcgggatgggtttatgatcccctgttggaacccaagaatcgaaccaaatggatgtagacctcccgtccccaatccttttacacaaaccttcacagaggagagttctagatttcagcatagctttccaaatacaagagtccgaggatttaggctcgacatcaaagaagttattgcctcttaggtacttagtggacattgtggtgttccaaatggaggatttttcagttacgagtttccacccccatttgaggaagaaagctttgtt

SEQ ID NO: 157247 - DNA, 1293 bp, Cannabis sativa
ttcgggtgtacactgaccaaccgttacgccaaatattgcaaaagtcggatgcctccagacggttactcaagtggggggtagaactgggtcagtataaaattactttcccacaccgaacaacaatcaaagtccagccttagcagactttgtggtagaatgcacaggcaaggaagaaagcatatcgaaaggcaactccgagccagtacaaatacctcagccaagtaacaatgaagacaagctgacctggagactacatgtggacgggtcagctacagatcaactatccggtgcaggaatcacccttgtcacacccgggggcaagacctacacgctgcagtcaagtttggatttaaagcatccaataatgaggctgaatatgaagcattgatcgccggtctaaagctagcccgagagatgaaagccgagcatattgaaatttgtagtgattcacagccggtggtaaataatgtatctagagaatacgtggctcgagggaaaaagatgatagcatatttgagcaaaatacacgacttgctcagacagttcaaaagctacggtctcagaaaaattccaagggaagaaaacacgactgctgacgcgttagctcaacttgcgagtagtaatgtaagtgataaagcgaacttggttcctatccagttcctcgaagaatctagcatcactggcacagaggagatcgaaacgattgatacttcccaaaactcgatgacgccaatagcaacccacctcaacactggggaactcccagataatcgaaatgaagctcgaaagatgagaaggaaggttgcacggtacatcatagtagagggaattatgtgcaaacgagggttctccatgccattgctcagatgtgttacccaagaagaagctgcaggacttttgtctaaagtacacgatggattttgtggaaatcacaccgctagcagagtttatctaagaaatttctaaagcaaggttatttctggccgacaatgatcgaggattcaaaggcctatgttaaaaaatgtgacaaatgctagagattttcacagatacctcgagctccgcccaacgagttatgtcaaatgcaaagtccttggcctttcgccatttggggattgatctgatcggacaattacccaagggcaaaggtggagtgcagtatgcagtggttgcggttcattacttcaataagtggacggaagtcgcaccactggcaaccattacatctaaaatagttcaagactttgttgtgaagaacataatctgtcggttcggatttccatacaaaatagt

SEQ ID NO: 157248 - DNA, 512 bp, Cannabis sativa
agaacgagttgcatttttttgttatacttacccagtttgtatgctcctgattcgaaaaattcaatcacttgatatggtccttccctattccgtctgagcgcacctgccgtgctatctttggtgttcaagaatacccttctgaggaccatatctcccacaaagaattttcgtgctttcacttgcttgttaaagtaccgagctaccttttgttcatgggctacaaatttcatgtttgctgcggttcgcttctcttcgatttcatcaagtgattctgcgaggagtgtatgattaacctcttggtcatatgtcaatcttttgtgggatggaggttcaacttttacgggcagcatagcttcataaccatatgccatggcaaatggagtttgtccggtcgctgttttctcagttgtgcggtacaaccaaaaatacttcagggagttcttctggccagtttcctttagcatcttcaagtcgtttctttagagtatctttgagtgtcttgttgactgctt

SEQ ID NO: 157249 - DNA, 751 bp, Cannabis sativa
ttatgcctagtccatgcgtctcgcaaactacggccatacttccaggctcaccccataaaagtgttaaccgatcagccctttagacaaaatttatcaaaaccacatgcttctggaagattcataaaatggtcgattgaactggggcagttcgacataacataccatcctcaaacatccatcaagggccaagatttagctgacttcttgagagaatgtataactctagaagaaatcccaccaggtcagcgggacgcagaaacctggaagttatatgtggatggcgcatccaacgaggaaggttcgggtgtaggggtaatattaatatcgctagaaggctttaagtttcactatgctctgaggtttcaatttgacaccgccaataacgagattgaatatgaagccttgatcgccggcttaaagatagcagaggccttgaaagtcaaaaatatcacttgtcatagtgattcacagctgattgttaaccaagtcctcggggaatactagggcaaaggcttaaaaatggcgaagtacttagaaaaggtttggaagaacttggaaagatttgattactttaaattcgaacaaattttgagagaagaaaactctaatgtcgatgccttagcaaagctggccccgcagaatgacctggataactaaatcttgttctagtagagatgctgagcgagccaagtatatgtgaaactgaagacgtcgagatgatagatagctctccaacatggatgacgcctat

SEQ ID NO: 157250 - DNA, 619 bp, Cannabis sativa
cagccatgagtttaggagctgggcgaagaatgcacatgtctgagccacatcagaccaagcaggttaagggtctaccagtgatatattttgaaactctattttgccgctcaggccagctgaaagaaaaagacttgtaataaagtttgtaaatatttttgggatcccaactgctgtaaagtttaaattattacaagttttattttcattccgtttaatgtaaaagtttaaattctgcgccgcttggattagcaatcccgtttaggggattaggatttcctaaataacttgggtagcgtgcctaattatttagggcgttacactagaggtgaatgttttaaacattgtaaacaaccatctgataacgatgagtgtttccaatcatttctaatcgatacacttatttcagaagaggtagaagcacaatacacttccactcatttcaatgacctctttgaaatttctacgagttctgagtcgggtaatactgtaatcaaccatgaagtgaccaatcaatcaccaaccaaaagaaccatgttttgaatccaatcttcgagggccttcctcaagatagagaaacaccaaaaccatccactgtacaagctcctcaaccaaacttggc

SEQ ID NO: 157251 - DNA, 739 bp, Cannabis sativa
cctcccaacaaaggtacaacttcattcaaaacatgttaatgttgatcttttatgtcctttgtgtaatatgcatgtggagacaattgttcatgtcttggtggactgctctttctcacgatcctgctgggctttatcctctataaaccagtcggctgctggtacaaatgctgaattttgtgactggttttttgacattcttgctgccggcagtgaggctgtagcatgtgaagctgccatgttgtgttggagtatttggaatattcggaacgaagtgcaatggcaaagcaaaaaccgaactgttttggaagtggttagatcggctaaacatgtccttggccaatggaaaattacaaaatttgagtcccctattgctatgtttgctacgggggtactacagatagtaattgttggcgtaaacctgatgtttttacggtcaaggtgaatgtcgatgtgcgacttttgaagctcatcataagtttggttttggttgtgttgctcgtgatagtcatggtaagcttattgaagctatttctaggagtagatggggctgtgtgtctgcagagatagccgaggtaattggtattaaggaggcgcttagttggataaagcacaaagggtgggatgaggtggttcttgactctgatgctttggttgtggttcaagcgattaatagctcagttcatatgccatcccaatttggtttgttagttgaggactgtcgtactattttatctagttt

SEQ ID NO: 157252 - DNA, 801 bp, Cannabis sativa
ttttatttttttttaatttaattttacgtaattttttttaattattaattaatttttactttattaattttttaaagaatattggcaactaaacaacttgaattttaaattatttaacacttaactacaaaaattgatttttaggggcaaaacaacctaaactcccattctgttttgctttatacccctccgtccgaaaatcacagttaaatgccatagtggactatccacgtgtacacacttgtacacgtgagaaatttttattggtccacattgttatcctaatttttgcattctgacgtggcatcgcataatggtgacatgtggaatccacttggagtatctgctcggagggaacagtccgagcaggatgcctcgctaacatgcccaaaacaaagcaatcagcaatccaaacagggcaaccaacacttagcgaattcagcttttgcattatgagtcattaatgaaatccctataacttggggatcagattacagggatatggcatacacacgattccacgatcagtgtattctgcatcaatcccacgatctttgtactcaacattaatctcaagatctttctgtttatatccattgtaacgagaggggaaagacttcctctccaagcgtatagccctataaatagtgatgcatgttcactgggcaaaaggtcacaaacagtttagtcgagactataccctaaagaaattagctaagaatacatattcagagaactgttctaagagctataagaaaaggaacctttctacatgttcttaagtcaatacaaataacgagg

SEQ ID NO: 157253 - DNA, 677 bp, Cannabis sativa
agcccgggagtaagtgtaagccaacttcaaaccgccctgcacaaaggaaaaaagtcagcatctggagctaagtgtggaacgttaaaaaagaattatcaaaaaagacttaccctggtgagctgctttaggactacgcccaccaacacatccagagatgagtcactatcagcgccagccagttgctcactgacctcaggaaccagctgatatatatagtgggccagcatctccttgccctttttggcctcttgtagcacgggcaaaggtgtagttggtgtctgcacccgctcaggaacactcctgaccagttcagacccagtcattggtggtccagactccttcaacttagcagatttgggggtggaagggtttgcagcagttagctcgtcggaaaggtcaataacctctacaaaaggtctcttctcagaggagccctcaccgcccttagacttcttggtcggaggagaggcgctagagcttccgcccatcctcttccttagagcatcgagcatctaccgagacatgtctgcagagaacaaaaacagtgtggttagaaagcagccatcagaaaatagaaggcatgaaagtcaagaagctcaaaaaagaagaaaaatgcaaggtgactgctcccccagaaaataagaagtccatcatcacatgacatcgatttaatctca

SEQ ID NO: 157254 - DNA, 646 bp, Cannabis sativa
gtggaaagcgacgttgggcctatagagagtcgcattttatatatttagaatattatcggggtattattgataggtattagaggtgttatgaattgaacgggattggtaatgtatagaatgcccttggtattgtttaacctttggcttaagttaaaaggacaaataagtcattttgttttatgttgacttttggttttagagagaaatggatggctgcatcttttataaggttaatattaatattaattcttttttttttaaaaaaaaaaaaaggatagaaatagaaagaagcttagaaaggaagaaaggaaaaagagaagttagtgaaaatttagaagtctccctctctctctctttcgtgctgcctataaccagcaagggaaaggaatttcttgctgaaattggagagtttccagcttgtttgtagaatccaaatcaaggtatatctctttagtaatgttacccaatgttttatttaagttttggggttatgttttggtgttttaagcttaattaggggctgtgtgtatgaattcaacttggatttcatttgctgaagttgagtagtgttatttctcactgttctaagctgggattgagctttgggttgtgaataattcaagctagagcttagaaaacctaagtt

SEQ ID NO: 157255 - DNA, 647 bp, Cannabis sativa
ttaactacttagaaaattattatttctcaataaattttatccctttatcttaacctgtgttggaaatttggactataaactaagtattttttaaatccaaaattctgagccgcttgagcctgtcctaagcccgtgagttgaaatcttgagctctaagagcatctccaatggtaaaattttaaaagatgcttggtgaggtaggcatattatatgtgaatattgagatattataccattggagagaaaatgatatcattctagaaattcccatatatggatgctatgttgtagcattgatgttattcatttttttaataaaaaattaaagctaaaaagttattgtagttaaaaattatgatatatatataaaataataatgtgtgagatcataattaattatagcatttttaaagaatactatacattggagtgtttttagaagtaagagtaccaaaaataatgtgtaagagagataaaaaaatattatatttttagatgatatttaaatttttagcatccttaaatgatgctaccatcaagatgctgtaaactaggggtgttcgcggtgcgggtggtgcggtttttaatcattttttcaaaccaacccgcacatgcggtttttccaattttccaaactgcacccgcac

SEQ ID NO: 157256 - DNA, 508 bp, Cannabis sativa
atttccttaaatagaaatattcttataaatattacctatgttgagtcaaatgtcaaaacaatgaccatagaaagaaatgtttacattggtatgtcaagtgtaagaaattcaataatcatacgaagaaagaaatccataccataattgttgaattaatagttatgtcctgctcctattttcatatatttcatggtaaaagcatacctttcatggtacaaaacttgtggtatagattctttcccacaaaacaactcttcaaatcttttttcgataaaaaaacaacatgaattactttacagtaaagatagagctttgaatcaaaaacatgattatttaccaaatattacctatattgagtcaaatggcaaaataatgaccatagaaagaaaagtttacattggtatgtcaaaggtaagaaattcaataatcatacgaagaaagtaatccataccataattgttgaattaatagttatgtcctgctcctattttcatatatttcatggtaa

SEQ ID NO: 157257 - DNA, 514 bp, Cannabis sativa
tttttttcctaccatttagtcatttagtcaagcctatccctaaaacctttcacattattattaggtagtacttgatcaagcacctactatgcaactagttcaagtgactataaaagaatacatgtgtattggagattttaagttcgaatcttaaattatacattataatatataaacgcttaaatataaaaacagtaaagtagttattaaaattaatattttattgcacttataataatataataaatagttatacatgcaataaaaaattaaaaccctacttttagtatagtagattatttagatattttttgaaatttgataattttctactataatttatatatataaaaaattatgctaattacgatttttagcctataaacttgtctaatatgaatgaaagttaaaggaacatgattgagtacatgtcaaagtaaggggcttgatttgcactacaaaaaatcttacttttagttacaagttgatttacattacaaatttttttactttt

SEQ ID NO: 157258 - DNA, 706 bp, Cannabis sativa
agacaacagagaagtatctgtttgtgtttggacctttggaccggcggcactttggctcacaacgaatcacaaacggctttttggaacgatggcaatttcagctcacaacgaatcacaagtggctctgataccatatgcagaaagaaagagaaatttgaatgaatcagaattttgttattgattaatcaattagatacaagagaacagatgaacttatataccagactacctaaccgactaaaccattaaaagtagctaactataataacggacaaaactaacataaaggcagacaacataatcttgatactttctctattttatggatatatattaattcaaaatcaaatattttaattttattaaaatttggtcatgattgatttaattacttattacagtcaagaaatcaaaataatattaatggcttgtttcgattcaattacaatctaaatcagacacgaactctcttccttatctcttacaattctatatatttacctttgttttatgaaaactttatactattatattgacactttattaaattttaatttatgtaaatctttttttgttcgtattatttacgaaaagattgatattaatatgatttttagttttagaaaaatatgaataagttcataccatatttaaattttacatgggtataaatatatagtcctattttatacattggcaaacttaa

SEQ ID NO: 157259 - DNA, 715 bp, Cannabis sativa
ggttttctcttctgtaggtatattttgctttgtttgagaacttatttcaggacaaaaaaactaactgaggagatagaaatagataagttatgatcaggagggtaatttggtggtgaatcaagaaaccaatagtttgtcccatgttttgtcctctcgaatagattttggtcttaatgtattttttatgccagcaaccccagcactcaagcttcccagctctaagcagagagaaatcgagaaagagagggactgagagagttaatcgagaaagagagggactgagagagtggagagaactcaagcgagatcgagagggagaacaagcttcgatgtgctctgatgcgatcctggtggtgggaatctcgtccatcggttgtggtagaatgcctcaccggggtcgggcggaggtgcgccggagatgatacatgtgagaagagagaggaggaggcgataggttaggttaaagatgaaaaaggaagaagacgaaaagatagagagagagagtaaaaggaaaaaaaaatatattttataatttaaaattaatttttaaaatattaaatgattatttaaaataaaaaataaaaataaatctagctagactaatcacaacgtgccatgtaggtactgacctggcacttaccgtccaagtagctacggaagtttcaagaccttaacagaaggtatttttaccgccaaaaatacgacttaagtattt

SEQ ID NO: 157260 - DNA, 649 bp, Cannabis sativa
  modified_base (583)..(583): a, c, t, g, unknown or other
tttgtaattaaaaaattaaaaaataaaagtgttaccaaacggcacttaaaataactttattacttttattataaaattataaaatatttaagaaaaagagtaatctacactttgactgtttttactgtatttttattaaaatattattttttttttctttgtaatggagtgtaattgtaatgggaattacattggttttagtattagttttggtatgtaatcatcattacaatactcaatattgtaataagcattatattgtaatggattacaaaagttaaaagggaaaagcaaacaatataatacatctattcatcatcattacaattaccattacaataaaccaaacatcacatatcacatgactaggaattatgcacagttttacttgttgatagatgggaaaaaaaactactatcccaaattatgtgttccattcctgtcactttaataacagcttcttcaatagaatgctataaaatggatgtttactactaatatgaagaaaaaaaatacctaacaatcacattttcatatttcctttttttatcattagtaatttaatatatattaaataataatntaatattattttaataatttttaaagtgaaaattacatgaaatatgggattttgtaaaaaagttac

SEQ ID NO: 157261 - DNA, 685 bp, Cannabis sativa
  modified_base (643)..(649): a, c, t, g, unknown or other
gcatcctgctcggcatgttgatccgaacagatgctctaagtagagtccacgtgtcaccattcttgtaatgccacgtcagagtgccaaatttgggataacatttgcactcaagtctatacaggacctctgaggttgcgtgtagacttattccgagctggctctgcctttgtatggggacacatgtcgagtatggccgttcgagacttgatgtgaagctgactgggcatcctttcagttttcagctaattaatgctctgataattaatattttgaaaatctgaatttctctctccacatctgacggttgcactcgattacttttgatttcccatatttgctcttgaggcgggaagccgaggcgtctaaggttcctttatgtacaattacccttttgtctataaatacttggagtactggaacattacttttaccctttgttaagtaaactttcagagcgaaaagagagaattttctggcttcacagttgtcgaagtgcctatagacgatttctggcttgcttgaatgtagacattcgaatctttgagtaagtttctgattccctttatgcttttcctttgcgtgcttatgcattgaatgtaacttcattgttgaaagaatgcttaggaaaccctagggtttgaannnnnnncgactcttgttttccatgtccttgtgttagctttca

SEQ ID NO: 157262 - DNA, 642 bp, Cannabis sativa
tataaaacatgtttttgaaaattattttcactttttcaattttaaaaaaagaaaactgattaaaacaacacaaaaataaatgtaaaataatgcagtagatataaacactttataaaaaatataaaagaaccacacatctcaaaattttttggctagtgaggtcgttaaatgtaaaaataaagtgtctatgtttactcattaattcaagagaaatatatatgtgataagttgaaaaatatatttttttgtatccattaataaaaaataccctcatattaaattttattaaaatctactaacttatgagtgggtttcccaatataccctcaccctccacttaagtctagcacataatttacattaacctataaaaaatataatgaggacattatttataaaagtgagtatatattaaagaatataaaaataaaagtaaaaattaaaataagtaaagtgaagtgggtatacaatgtaatttcctcaaaatatatgtataaatacatatactttttcttgggaaggaggagataaggtgggttgttgtattagaaggtattttaattttgaattaattacataatgcaccattttttgtaaaatgtttacatttttacgttcaaagatttttttttttatatattt

SEQ ID NO: 157263 - DNA, 587 bp, Cannabis sativa
gttgttaattgtgatgcattcactttgtagagaggaaaatttctgagatggatggatgactaacagtacatcctttgatgaagccaggcaaacttagatcgctgcaataaagaggccagtggtctgataaggcggtttaaccaaagaatcgatgtaggaggcttggatctcgtcagagagccactttaagaaagactagttgatagatcacggagggtctatcgacaagctcaccaacctggccactcagggagtagaacagatcttcccttactagagggagggcagaccttgcctcaaaggtcttacagcgagaagagtcaaatctcggcaaccaatgacatgggggccgactaaggattttaggctcaacaatagtccccgctatccatcctgcagctggccacccaccagcaggagtccctatggccgaccatccccctaaagaagtccccttggccgactagagaggagcactccctccccgaggggagcgagtcgcgcaaagatcaattttcaaccaataaggaccgagagcgggtggaaacacccaaaagaactatttgagaagtgaaattaatcacttc

SEQ ID NO: 157264 - DNA, 725 bp, Cannabis sativa
actattgaggtacctattgatcccatagataatagcaaatttttgaaaattggttctaaactaacttttcaacatcgagaaaagctcgtcacttttctcaagcaaaacctagatgtttttgcttggaaacattcagacgtggtcagaatatctccgcaggtcatgtgtcaccgactgaacattgaccccaaagagcgaggtgtccgacagaagcgccgcaaaatggaccccgcgaggtacgaagcgctaaaagaggaagtagatcgccttttggcatgcggcttcataagggagtcgttctacccaaactggttagaaaatcctgtactcgtgcccaagcctaacggctcatggcgcacatgcgttgatttcactgatttaaataaagcttgtccaaaggacagtttcccacttcctagcattgaccaacttgtcaatgccactgcaggtcatgaacttctcaatttcatggacgcatactcgggatataactagatctcgatgtatgaaccagatcaggaacacacctctttcattacaaatcgaggtttgtactattacaaggtaatgccttttcgtgtgataaacgcaggtgcgacttatcaaaggctggtaaatatgatgttcgcaaatctaattggggacaccatggaagtgtatgttgacgatatgctcgtaaaatctcaacatgcaaaagaccatgtcaaccatttacaagcaatgtt

SEQ ID NO: 157265 - DNA, 956 bp, Cannabis sativa
aggctgtctgaacagccccattccacggacaggctgcacgcagcctccttggctgaggtttctaagccagtcccctatgtgtgcgcgcgcggattgtatgcactgtataccatccgcaccaaatgcaattttttcattttttttcaattttttcatgctttttcatggaattaatttcgaattttttgtgtaattttgtatttaaatttttatttttcaaattttgaatctaattatcagaattaaattattaattttttttaattaattttagatattagtagttttgaacttgaaaatagataaaatctattatttttcttaattggttattttttttaaaattttgattatcttatcttatttttaaattcaaggtcagatattttatattttttattatttaatttattttataaaatgaccttatttgaaattaaaataagattattttaatctaaaaattttaaaattgtaaccagatattttgttaactttcaaaattttgttattttatttaaattaaattataaaatcagataaatgatatttatcattttattttattggatatttaattttattttaataacataaaatttaaaaaatcattagtatttcttttgaaaagatatttaggtttgttgaaaacctaatttttcaaatttataagtttaattttcaaattaattttttaatttaattttatatttttcgaaaataataattcattatttagattttttgaaaataatataattatttaattaatttaaattaaataaatcctacatccatctatccgacttgttacatgtatgtgtgttttatgtatattgtttattatcaaaacatgttttataaaacctattattgtttgatctaaattgctatgattaatttgttgagagatccaatgatctgattttaaccaataggtcaaatatataatttgt

SEQ ID NO: 157266 - DNA, 738 bp, Cannabis sativa
gattaggctattaccaaactgctcggggctgaacctctataaaattcatgtgtctttatattgctttattatctttcaatcgttataaaatacttgtcgattatcaaattagactcactgttgttggctaaaagcgaggtcaacaaattctattatttttaaaatttattaacttaaaagctaaactttagtgtcacaaatagaaaaatttaataaaaaatatagtttataaaatttattatatattatataatatatatcaatcgaatgaataagataaaagtatatatatgtgaaataataataataatacttattattataacaacatctatttattatagtgcatttaaaataatattcattattgcgtatctttaatatattgttttaaacctactattaatataattaatgcatataagacttcaatataaatgtatttcaatataataaaattcaattcataaaagataaaataccagaaaatagcacttcaatataaaagtatattctaatataataaaactaggcaacataactactattcacgcggttattatactaattaataaatatttttttggttttttttttataatttacggttattatattatattatgctgcaaatatctttttagtgtattataaaaaatatattaacttttgtgttaattttaaagtagtaacgaacaatggttagtttcgtaagatttaataattttattagtaatt

SEQ ID NO: 157267 - DNA, 644 bp, Cannabis sativa
gctttagttattttcaataaattagtttattatttttatcataaatggttttaaacggactagctagtgttacgtctctggaaattggggtgttacaaggcccgcctaaattctttgattttcaaccattctgtccattttcccactagagcgccccggtattcaatttccatgccagggtgctactccaacatcttcaaatcttaaaattattaaaggcctatatttcaccgaatcttctaaatttttccatgaactgttccttcgacacaatagcgacaaaacttaaattgaatcttcatttttttcactattttttcttccacttgttcattttcctctttattactaaacttgataacattaataaactaaagcgtaaaatagaacaaaatgaaacaaaaactaattaaaaacactctgaaaacgaacctaaaaataataaaatctaaaacctaacagacctcaaacaggctcctagagcctcgttgacaagctaaaagaggcattacttgaccggcgttttgtgaattctaaggttgatatctccctttcggtctacactaataactcaaatatcatctatcttcttgtttatgtaaatgatattttagttacagggaactgtaacgtcctcgcttcaa

SEQ ID NO: 157268 - DNA, 580 bp, Cannabis sativa
ttaattgactcattaaaacactttcagaaactgagaagagttcatcaagatcatcaaaattttttgcaattgaatctcctcaaaaatgagagtgtcaatcaaaaatgtctgataacactcatcatcatcatgtggtttctttgcaacatgaaaaatattgacctcaagagtcatattcccaaaagatattttcattagaccattcctatagttaataagggcattagctatagtgaggaaaggtcttccaagtgtgaaagggatttttgactccatgttaaccacagattgagtatccaggatgagaaagtccacggggtaatagaatttgtcaacttgaaaaagaacatcctcaacaatacatcgaggcttcttgatagaacgatcagccaactgtaagacaacagaagtaggcttgatttcaccaagacagggttgtgagtagacataataaggcatgagattaacactccctcttaagtctagcaaagcttggctaaattcatgagtctcgatttgacaagaaatggtgggacaaccaggatctttgtattttggcggtgtcttttgttcaattacc

SEQ ID NO: 157269 - DNA, 829 bp, Cannabis sativa
gatgcgccactgcggagaaacttttgatgattccatggttcgcacaaaaatcagtgaaggactggctgtcaaactgtttgccattgttcgaaactatttttgtatggcaatcagaaccggcagattatgttcttcacaataaagtcttgaaattttttagttgtaatggttgccagtggttcggcttccgtccacttagtgaagtaatcaaccgcaaccactgcatactacactccaccttttcctttgggtaattgtccgatcaggtcaattctccaaatggcaaaaggccacggactttgcatctaagttaaatcgttgcgcagagctcgaggtatctttgaaaatctcttgcatttgtcacattttttaacataggcctttgaatcctcgatcattgtcggccagaaataaccttgccttaggcctttatgagaggctttgcgagttgcatttttagctcctaaaaagctttttcacattcctctgtccactcaaatggcttatttcctcgcaggatgttgaagaatggaacacacttgtctgttgattttgaaacaaatctgctgagtccggtgatctgaccagtcaaactttgtacttcctttgttcttgtcggtgattttatattcaggagggcttgaatcttctctggattggcttcaattccttgggcattgacaataaagcccagaaactttcccgagctgactccaaaggagcacttttccacttcttcttattattggatttctaatgtcctttctcattgcagtagaaacattttccttttggtgtatcaccagaagctccagcctttttgttctta

SEQ ID NO: 157270 - DNA, 628 bp, Cannabis sativa
tgggtttacctcccgagcttgtcttcaacaagttcatttcctttcgggcttcttccatccgaacaaacacctgagccctctcgttgaactcagtgatgtttcttaccggatgtccttgtaaatcatcccacaactcgcccccgagggttaatggattagtggagatccccgcctgaagggctgtaagttgcgtgctttcatccaaatgtctaaccttagtagcagccgtgctaaaacaacttcagtacgccttaagtgttttgccaggctgctgctttatattggttagcgaggccacttcgggtcacctatccctagcgacctaaaattgcttcttaaaatccctggacaactgctcctaggaagttattgaatgacgagtaaacttgttaaaccagctattcgctgctccaataagcgaggtggggaaaaatacagcataaattgttcgtcacgttactcgctcgcattatcgtgttaaagttattcaaatgcgagacaagatctgtggttccgtcataggaagagagatgcaggtttttaaatctcgaaggaaaaggggtattcataatatctgggtgatatggctcaagctcctcgtcagagtcgtatccagatgatttcccta

SEQ ID NO: 157271 - DNA, 597 bp, Cannabis sativa
  modified_base (546)..(549): a, c, t, g, unknown or other
ttatcgttttagaaagttcctatttaggatgttaataaacatacttgtgaatagatctaagatcctggtaaaataaattccaacacataaatcatatcagaccaagttgtgtagaaaagttgcataaagaaaatagtgactaaacaaatacatgtgttttaaaaagcaccaagttgcatctataaacgcataaaaagcataattcgagtatgaaaataccaatgtgatactatcaaatagtacttaaaacaggatacatttatcgatatccaatataatactaaatatattgatactgctattcgaatgtaatctaataggcttaacaaacatgtacgctaaacatgtaaatatttatgcatatcattgtactaatcttacctcacttccgaattcaggtgtgtcggcgaacctgagtggaactgctgctcgataatttacaggcccttaaatcacattattcgtaaaactgatgagtgacacggtaaatcacttttcagggacttgaaattgaaactaaaattttccctatcgatggataacatnnnnataccctaaatattgcaaaaatgagaaaaactagggttcctaaaactg

SEQ ID NO: 157272 - DNA, 518 bp, Cannabis sativa
  modified_base (64)..(67): a, c, t, g, unknown or other
cccatccaaatcaattgacctgtgtgagcctatgtgttagcttattgggcttagatgcatatannnngcccatttaagtttttactaagtacattgactaggttgctaaaagttatttcactgaagaaattttatttaggcccaattgtaattggacttattcaattaataataattgtttatttaaatgttaaattcctcttctttgggccttgtgtgaggcttagggggccaatagcagtgggtacgacatactcgacccagccgtccctcacatgaactaccccaattgtgaaggcacatttcccttatttaaataattgtattagattaattatattagaataacctaattaaaattgaattagaaacataattaacttttaaaatatgttaattttatttttcattttaatattcagaagataattttagaaaaacacttacttaattggatcaatttaaataaagtatattttctagtattaaactagaattaataattaaagatcggaaga

SEQ ID NO: 157273 - DNA, 802 bp, Cannabis sativa
gtggaaagcgacgttgggcctatagagagtcgcattttatatagtttagaatcatatcggagtattatagtagatattagaagcgttagaattttcggggttttaattaccaacttaccctttttagttagttaatttaaggattttagttaagggcaaattagtaaattgtcaaagggaggtttttgtcttatttgatcttatttaaatctgattttaagcttttcctttaagaagaaaagatgagaaaggaaagtcaaagtcaattgtcctttgtttgaagaagtaaaaagaaaaacctagaaaagtcaccatttttccctcaaccttcttcttcccctctctctcgatttttctaggcagtaagaggctgtgagttttcagctgaatatcaagaattctaattgaattccaaggttccaattgaaggtaactacccctattctttttccttaagtttttctttaacctaagttagttattttgaagaaattgagagttaagttactgtatgatttaagatggtttaatttggtattctaaaggttgtttgatgttgattaagttaagttgaactgaaattatggatttatttgagtgtgagctaagtttgagcttaaagagcttacttatagctctctaatggtggaattggattttgtgtgttttgttgggttctattgcttgggtttggtttatgtcaatgcttacaggtgttctggaagttattatgaagtttgggattgttttgaattaaggggagaaaattttgggttcccagctcagaaccggaattccggtt

SEQ ID NO: 157274 - DNA, 565 bp, Cannabis sativa
atgtattttgaactacaagcattagttcgcgatgcgtattaatgtcatatgaattctttttaataggcaagcctattaactttcgaatttttgtacacgtgtcctgaccatatttgttgttcaaaatatgagtataataatatatacataatatatcgtgtatatatatttgttctaatatatatttaatcaataacttatattattcttgtactatattttataatagagttgtaatacatcatgattttctttcattgtaataaaatttctaatatgttgttgtaattgattcactttattaactaggagtgttcataaaatgaccgatataatccaatctgcacgatccaatcctatccgcacgatccaatcctatccgcacgatccaatcaaatttaatccgcaaagtgcaaatatccgcacttgtgtggtttaattggattggaaaattcaagatccgcatttgtgcagatttgatgttgattaacatgtaacagtaatcaatccaatccaattgtcacatatttataaaaagttaaaaaattatatatacaatttatat

SEQ ID NO: 157275 - DNA, 1064 bp, Cannabis sativa
aagtcgtttatttattgttcagaaaccctaaaacacctttagacatatataagcttcttttcattcaaacacacagcctccacttttaaaaccctagcagaaaatcctagagctgccttcgtcttcgatgttcttctctgaagaacacgaagacagcagcaccaatatcagcccagaaaaaccagaaataaaatccagaaaaaaaaacccaatcgcagttcgaacaaacccccttaaaacgaaccttcttcttcgtggttcttctctaaagaatatgaagaacaccaacataaaaataccttgaaatatacaacacttcaagaaattatttgaaatgcagaaaaagaaaataaaggaaagagtgcaccgattttatccccaaaaattgttgttgggtacattcttttcgcgctcgcctcagattgctcgtttccattatagaccttcaaagataaaagattacaccaaatcactggtacgattggtaatctataattatttatagtgtttgaaaactctctctttctctttgtttattactaaatcaatactgactttttctgctctcttttccatgaacaatcaccatccgagtttattttcactaagataagattgagtaaccaccatgctagtttaattttttatcctctactcaaaaaagattcatactccaaatcattttttttccttatccacttatattttatttttacaattttaaaaaatacacttaacatttaagggtcagtttggtacgcaggattagactagactagacaagattagatggaattatttaccccaccctgctagatgggataaataatcctagatatatgagattagttgtaatagttatccagacttctaacatgcccaaatactggattagacaaattaatctgtgttatccaatctagtcatgcgtaccgaacagaccctaatagtaaaatcttttttatataatatagtagcagcagaatttcaagaaacatgaaattaattttaaacaaaaaaaaaaaagacttaacttcgtattgtaatattagatcggaagagcg

SEQ ID NO: 157276 - DNA, 672 bp, Cannabis sativa
aataataataataataataaggtatgatagtatatatagtatgttttttttttaaaaaaaaataattattaaaataatataaaattattaatttgtagatttatgttctaataaaatattaaagataagagaattaagcagagaagagaaaaataaattactaaaataatagtaaaatatcaatttataaatttatgctctaataaaatattaaacatgaaagaattaaagtgagaaaagaaaaataattttaaaaaaattttaggtgttgtatcactgcttcatatcttataatataataatatgtatacatttttataatatacataagtacttgtaaaataaaataaattatataatagtataaacctttttttataatttcaaagaataagattaatatatattctttttataaaataattaaaaaaaaattaaacatgacactaaagataattaactaatgaatgaaaaataaatatataaaaaaattatttaaccgtggaaacttaatattgtcaaccacaacgaattaagaacttagaaatcaatttagtaaaaaagaaatcttgggcataaatttgtcaaaacttatatggttagagaccaattgccaatttaaaaaaaaataaccaacaatacaaataaaaaaaaatagaactcttaaatctt

SEQ ID NO: 157277 - DNA, 632 bp, Cannabis sativa
tgtaacgtttgtcatgaatgctccttgaatgcttgactattgacttccgttgattggtgtatgtatttgcgccttttcctattgatactgcgagttcaccatatatgcaatgtgagcctttcttaatatagtgaggtctctttaagttaatattgcgagatcctttcttttggtactgcgagtactataatattgcgagccaccttcaatacagcgagttctctatagacaagtctttctcgcggggagggtaaatttatgcctataacacatgccccttgttcttaggtataacttgctctatgctggagaacttaaaatagtccgaacccgcgtttgtcgatgatcatgatgccttgttatgttgggcgtcaaattttcgattgattatccaaagtcacaggtttcttataagatcatgccacaataaaaatgtgaacctcacgagattcttttggatgtgtgaacctctcggggttcgtattgatgcacgaccctcgtagggtttttatcgatgcatgaacctattggggttcttatgaaccttgtgaggttctaattgatgcatgaacttctcggagtttgcactgatgtatgaaccttacggagttcgaataaatgcaggagcctct

SEQ ID NO: 157278 - DNA, 571 bp, Cannabis sativa
gattttctctcaccacggctgacgtgtgcacttgattattttttatttcccatatttgcttttaaggagggaaactgaggcatctgaggttcctttgaaatgattacctcttcccatgacttgcctataattatcaaccaacattgccacataaactcattttcaccatccttccttgctaagtgagttcagagcgaaaagagaggttcttggcttcaagtttactgaagtgccttcatcgaaactgctttttggattgacgttgctcgaacctagatatctgactcttgagtaagtttacgatttcctttatgcttatttttgcatgtttacatttcgaatgcaccttcgactttgctgtagaaaatatttaggaaaccctaggttcagaaactctgcgattcttctttgtcatagcttcatgtgattttacagtccataatgcttgttttttgaactacataacatatgtctttcatctttcttattctaagctttatgaaattttttgccctaactcgagaaaatttcaaacttcttgagttttgacttttctttgaacattcttgtt

SEQ ID NO: 157279 - DNA, 574 bp, Cannabis sativa
gattcaggatgttccttccatatgtgtcctaagaaggagatgttccaagaactcaaggaaatctcaggaggaattgtattgctaggcaacaacaaggcctgtaatgttcttggcactggttctgtcatgatcaagatgtttgatgggatcacaaggactctgcaagaagtgaggtatgtccctgacctcaaaaggaacctggtatccattggcatgcttgacaatcttggatgcacaatcaaggtggaagatggggtattgaatatatccaagggattaatgacagtgatgaaaggagaatcgaagcatggcctatactctctcattgggagaactgtcattggaagtgcagcaccagctgttgcaggtcaaaatgacgacactaaactgtggcatctcagattaggccatgtaaatgagaggggaatctcagagcttgacaaacaagggttactcaaaggaaaattggacacaaaattgcccttctgtgaagaatgtgtatttggcaaaagttgcaaggtgaaatttaccacaggtcaacatacaaccaagaacaaacttgattacatccact

SEQ ID NO: 157280 - DNA, 526 bp, Cannabis sativa
agtttatgtttagtttttgtatgggtacatatatttttgagttgatatacaaatattatgtagttacttttaaatttattttatacataactggttttttatttcttcttggagttgatgcaattactggagttgttttatgatgcctatttaattttcatattacaatagagttgtcatacagttgtttatttgttattatttagttgttctattaattaagagaaagttaatatatatatgtatatttaatttttcatcgtacatattaagattgtttttttttttttttgtatttctaactgtcgaaaaaatcaatgtattgatgtatatttttatttttatatatagtaaaatagtgttgttgtctagtaactttatttttagtttgttattgttgttgttattttgttgccaaaaaaaaaacaatctaaaagtctgtttttttattatttttattcaaaataataataataaaataaattatactatttaaaagtatgttttttttttcttaaataatatt

SEQ ID NO: 157281 - DNA, 548 bp, Cannabis sativa
catgttatctttgcattctcgattttttgtcgatagttttttgatggtgtgtatagttgtgttttcagactttcttgtcccatgttattgatgatttctcgatatgttatcgactgttttttgatggtgtgtttaattttttaaagtgcagatggcagcactgttcaatataaggcaaggcttgttgctaaagggtttcatcaacaaaatggctttgatttcaatgaaacttttagtcctgttgtcaaactagaaactataagagttgttctcactttggcagtaagcaaaggatggaaaataaggcaaattgacatcaacaatgccttcctaaatggagagcttgagggagaagtatacatgactcaaccacctggttttgttgacctcaatatccaaatcatgtgtgcaaactcaagaaagctttgtatgggctcaagcaggggcggacccctgaaaaaaaaaatcgaaaaaaaatgtatatgtattttaattagttacaacatatatttgtattaaaagatgatatttatagacataatagtaac

SEQ ID NO: 157282 - DNA, 796 bp, Cannabis sativa
ttaagaaagactgtcctcagttgaagaaagaggaaccaaagcctgaagccaaacctgcacctgcacgtgtatttgctatcactcaggctgatgctactaccagtccttcagtggttacaagtcagcttcttatcaacggtcttgtatttactgttttatttgattcgggtgctactcgatcttatgtgtcatcgagagttcttaatcaacttgataaacctagtgatatttttgagacgggatttggaaccctgttgcctaatggggaattgattatttcaagaaagtgggttagatcagtactaattagagttgaagacagagaattcagcgctaatctagtggagttaccattggccgagttcgatattatactcggaatggactttttgtccaaatattctgccagtatcgattgtaaacggaaaatggtgatttttcaatcggagaatgaggaaccatttatttttgttggttcggttcaaggttctcgtgtcccaagaatctaagcgttgaaagctagggatttgttacgcagtggatgtgttggattcctggcagttgtagtggattccagtaaacttgtgttacttggacctgaagaggttaaagtggttaaggaattcctggatgtgtttctagaggaattacctgggttgccacctcagcgggagatagattttatcattgatctaattcctggagcagaacctgtttcaaaagcaccctaccgaatggcagctgccgaaatgaaagaactaaagatacaactccaagggatgttggatctagggtt

SEQ ID NO: 157283 - DNA, 535 bp, Cannabis sativa
attattaaaactaaataaaaaaaaataagtttactaatttagaataaatccacaagacaaatgaattcattggttaaaagatcacttcactttgcacactccaaagacatacatgccatttaggggtaatttggtcatttctaaaatcttgattattctagattgcccagctgctagtaaaatactaaatcataagaaaacgtgactctatcggcccaatatcgtgttccactgttactgagcataaatatgaaaaataagatatttcatatatatgctcttaatgggtattactcatgaatgggtaatattaaaaaaatttaagtttttataattaattttttttatttaattagaaaaatttctcattttttttattatatgggctgaaattggttcatcagctgaaaataataataataataataataaaagtttttcgataaaaaaagtaataaaaaaagttgactttgacttaaatatttttcatataaatatatttttgatatagataaaaagaggtattttttgatat

SEQ ID NO: 157284 - DNA, 513 bp, Cannabis sativa
aaaatagaataggataatgtgcacctttatttatatatcagtaaaaatctatacaaatgaaaaaattaaagaaaaagaaaatatattgactcagtgtttcagcttcttttcttgcgcatggcatttccccattgagagcaagattttgcttcttgctcagaatgtgcctttatgagagaatctctcatgatcaacaagagccccaatttcaacaaaatttctcgaacaaaaatgacacgtaagcccaagaatgtcttcataattcatttcctcttctttttcaatattccccagctcgattaatatattataaaatttttccttcaatttttttaatattaattttttgaatggagcttgattgtttatataagaaagtataagtaaaaggatttattttttcatctatgtgggacacaactatttaaaactcattttttaattttttttttatgtttatgtacataaaaaacagtagcatcaggtgatcatcggactactattggaccacca

SEQ ID NO: 157285 - DNA, 516 bp, Cannabis sativa
acgttttcttgtattttctgtacagtatgtcattttttgcagaagggagttccatttcttgtccactgcttttcaatgattataattatccttattggaaggttagtgtaacgccgtaaaaccttgacgcggtgcagtgattttctaattgatgtgccacatttgctaattaaagggttttccttaaaaattgtgccaaattaaaacatttgattaaattactaaactttataaccttttaaataattatttacaaaagtcgggatccggtatttaaaatttacattctcaaaatatattaaaatttggtcgcacagcgactaaaaaatacaaccctagatgtcacgagaccgaacactctaggttgcgtcgcctcgacatgtataaacaccatcctagctcggacttcactcctattcagctttttcctttcctttacctacacatggaagtagcaactgtgagtctacaaactcagtaagaaaaacatataacaaataatataatatcgacttg

SEQ ID NO: 157286 - DNA, 505 bp, Cannabis sativa
  modified_base (341)..(341): a, c, t, g, unknown or other
ccgggtctgggtccgggtccaagtgtcgggtcgcgggtctcaggttcgggtcacgggtccgagtagggatgagcatcagtcaatttagtcggttttgtttctatataaaaatccagaattcggttttctgtcttgattggtgcaatctaaaaactgaccgactaatccagaacctatcttaaaaccgaccgttttgaacctcagtttgatcggtttaaaccgcccaaaccgaacttcttttttttctttaaaatatgatctaatttattctataagcacatttttctacattctacaactacaaccatacaagttaattgtcttattcttttaactttaanactaataaaataataatatattatgtgtaaatacaatacataaagaaaaaaaacttaataaattaatatatatatgtataacgctcagttttagttttttcgatcgatttattacccaaaaaaaattgactgttcaatggcggttttaccgttagcagtttttt

SEQ ID NO: 157287 - DNA, 557 bp, Cannabis sativa
gtttgcctacgacaaactcaatgcttgatttgaccatgttctcagctaattgaggtgaaatctgaatcatactagttacctgcccaggacccttcctgctcagagcgtcagccactacattggctttcccaggatggtaaaggatttcacagtcataatccttaaccaactctaaccaacgcctctgtctcatattcaaatccttttgagtaaagaagtatttgaggctcttatggtcagtataaatttcacatctctctccatagagataatgccgccaaatctttaaagcaaacactaccgcgacaagttctaaatcgcgagtcgggtactgctgttcatattctttcaactgacgagaggcataggcaataacccgatcgacctgcatcagtacacaccccaaaccctttttagatgcatcacaataaaccacgaacttctctttatcagaaggtaagtctaacattagagctgtgactaatctctatttcagctcctaaaaacttgcttcacacttatccatccacacaaaatgttgattctttttagtaagc

SEQ ID NO: 157288 - DNA, 583 bp, Cannabis sativa
agtgtggcatccatacactggaaaagaagaccctttctctctcacatacataacttcgaagtacaaattgaccggcaaggcattagaaattattctagttgtcgagtttttcaaacacgctatcaaaagtagcacaacaatggtatctcaagctttccctgggatctatcaattcctaggagacactcaagccagaattccatgacccattctcccccatcaaggcacaaaacaattgagccaaacgatttggtctatatcaagaaaaaagaagaggaacctctaatggcgcctttactaaattgtaattggaatcagaataatcaatgagagaaatgtattggtttaaaatacaaaataatcagaaataatattttattatgctgtttactaaactatctggaaagaaaacaataataatattattttatttacataactaggaaaggtaatcggaatgctttaatttgacaaaattgtcattattagaacatgcaattattttttgcttatagatttttaaaaggcatatttgtctttttcatttttaattaataaaattaaaataaaaataaattaagtt

SEQ ID NO: 157289 - DNA, 724 bp, Cannabis sativa
tagtgttatttatgtgattttagtgtagaggggcaaattggtcattttgccccattattattttgtcttctagttaattaaatatatgtctaaatcatttattaatatcatcattaatttattcatttcatgaaaaaatatttatatttatatataaaaaaaaaaaaacctacctatctaattcaaattttataaataatattttttctaatcttttaatcaaaattttctaaatcatataattaataattaaataaataaaatatctatctatctaaaattttataaattatataataacttgattttaaaagaaaaattaataaataaataaaaaaaacaaaaaatatctattgaatttttaaccctaaatggcataacaatttttatatttaatatactaaaatatttatctaatgactaaccctaaactgcatatctaacggcgtatataagtgattaagttgtatgggtctttaattatactttaggagagaggcatcaatatgtacgtatggaggaatatgtaatatctctttctaatgaattatcatcaaggaaatacaaaaaataccagatatacacatacatatatctatgtctgattattataattattgataattcacaaaagttatatgagaaatagaaaacgatttgataataaactatgtttattttaaaaagttgatagtttatgtttaagggataaaattaagagata

SEQ ID NO: 157290 - DNA, 802 bp, Cannabis sativa
cttgttatttatgtactgtatagaaaaaaaaaagttttttttttcggggtttagcccagtggccgcgactagatgggccttacagaatggcctatttttcgatgttatctggccgcggcaaggggtaatgccaccgcggccatataagagttacaaagaggtatgttttttcgtgatatctggccgcggcgaggctatatttagccacggcgagaggagtcacacgggatttaaaaggcgaaaattccaaacatttcaaaactcaaccttttctcaaccctaaccacctccacgccgaatacccctcttctacaccatttttcttcttcaaatcccattcaaaacccttttgcttcaaatctaaccataaatcttcatcccaaatccttctaaaccattattcccttcatcaatcactcttttcctctcaaaatccatcccaatccctaaaacctcacccaaaatgtcaaaaacccctattcatcttcttccttctcaagaacttcaagttttcctacaatggaggttgactaaaggtggattctcattgaggtaataattctaagactctctatacaatttttattgaaaaatttgtggattgttggagaattttggaatttttgttggatttttgctaaatacattgttcaatatagttgttgtgattaggatttggtttgtttgtgagtgggttaattcccgggaaaaggatttttaaggggaagtgctgccgaaatttttaaaaaaatcttgagtgttagaaaatttgagtgaaatgggtcctaaaagatcaagagtg

SEQ ID NO: 157291 - DNA, 639 bp, Cannabis sativa
tcacttattttgtttaaattactaatttattcttacactaacaatagaaatttattaaattatgagggtcattagtgatatttcactctaacactctttgatgagttttttttttatcaaaattaaagaaaaaaaaattaagttcttttgattttatggttggacaaagaaaaaaaaatgagtagctttgtttttctgctctttgttcttattcaaagaattattttgttacatttagtgcttgaatttcttgtttggtgctggtaagtaaacgggtgagtagtaaaataattaaattggaaaatattttcttcaatatttatttctacaaattttacataaacttttgtactatatttacttgtttttgcttgttgagagagaagaagatcgagatgtgtattatttctttactccattagttcatgctctctaattgtatatggactaggaaaatagaatagtgtgtataaaacataattttgaaaaaatagagaaattgacaataactaaaataagtaattgttatgttctagtataatcactattttgaagatttcttctagatgttattattatattttattatttgctctttaattaattataaaattattattacaacaaaaaatcatactt

SEQ ID NO: 157292 - DNA, 648 bp, Cannabis sativa
aggtggaagtgtcctattaggcaagaataaatcatgcaagattgaagtaataggctctgttcagatgaaaatgtatgatggagaaatcagagctttgcaacaggtaaggtatgtacctgttctaaaaagaaatttgctttcaatcggtgcttttgataaaaatggctatactgttaagatatatgatggtacattgaaagttactagagattcacttgttattgttaaaggaaaacttagaaatggcatatattatcttgatggtcatactgttactggttctgcagcaccagtgatagacaagtctcttgaaaatagcattaaaatgtggcatcttaggctgggccatgtgagtgagagaggattgatagaacttgtcaagcaaggggtatttaaaggtggtctaaaggacaagttagagttctatgaatcttgtgtattgggaaaaagttgtaaagtaaaattcccaaagggcatgcatacaacaactgagaaacagagttacatacattctgacctctggggtccctctaagattcaaacattggggggtgcaaacgacttcctcagtatcattgatgactactctaggaaggtctgggtgttcttgctgaaaaataagaatctagcttttgaaacctttgtcaa

SEQ ID NO: 157293 - DNA, 597 bp, Cannabis sativa
atattacttatttaattattaaatttgaagtgatcttattttgatattaaaatattaataaaatttagaaataatctagttaaagtttcaaattttgctaaccatatcaggttttcaaaatttgttatttttgaaatatattatattaaattaaattataagattagaaaaatatttgttttgatatgttatcttattagatatttattttaattaattttttttttggcaaaataacatgaaattttgaaaagtttgttaattttggtttcaatagaaattttagggtttctaaccataaaaattttcaaacttaggatattttgtttgatttaattattaaataaaattgataatatcctaaccatcaaatatattattttttaaattgttcattttttgttatatttaattcattaaattatgagattaagaatattatattagaaatatctaaattttaaattaagatattatattatattatcttattttaaattagttagatatataaatttcagttagaatttaggatatttaagagatttgttagattttacatattttttaaatattctctaacaatctaaattttaa

SEQ ID NO: 157294 - DNA, 522 bp, Cannabis sativa
attcaattttactgtttcagttgttgtcgagcaaaattcgcaacaccaaaagtatgtaataatattaataacaagaaaaaattatttgaagaacaattgcaagtattcagcttaaaatggtgagtactcgggctaggaacgtgaatgcttactagaaaactggaaataacaagaagacaaaggattatagtaattcagtcagatgacagtctgcttagtccactgtaacaagagcttcgtaggtctcatttcatggtggatcactcctttatatacaaagcaattgtccaattagttatacaaagattgcattcattatcaatccgtttgcacattgaattacaataattaaactaaaaaatgtaaacatcaataaatgaataacagtttctattcactaaatacagcaacgtatgtgtcttctgacatgcgagtgcactgttcatattctagtataagctcgcgggcttaagatggacctaacatttgattaagtttaggatgtctgcgttcttatatagt

SEQ ID NO: 157295 - DNA, 520 bp, Cannabis sativa
ccttcaatccaaattcatcttttttagatttaatggttgatgttattagtcttttatcctttttccctaatgtaaatgtttcacatgtcaaacgttcagcaattgggatagctaaaagacaagacaacctctattacttagaacaagaaatacttcctatttctatttcctgtaatgttcttgttgttgagcaaaattcgcaacaccaaaagtatgtaataatattattgataagaagaaattgcttgaagaacaattgcgagtattcaacctataatggtgagtactcgaactgagaacgtgaatgcttaacagaaaactggaaaacaacaggaagacagaggattatagtggtttagtcagatcacggtctgcttagtccactgtagcaagagttttcctaggtctcatttcattgcagatcacccatttatatacaaagcaagtgtccaattagttatacaaagattgcattcattgtcaatccgtttacacattgaattacaacaattaaactaaa

SEQ ID NO: 157296 - DNA, 659 bp, Cannabis sativa
aataacccttaactaaaagaaaactactcagaactagacattataataaaaataatgataaatagtaagagtagaaggagaagaaaagaactagaatgaagaacacttcgaagtcgatctccatctcttccttgctctctttaatttttagttttttccagactcttcttttggtagcctaagagttcatatttataatgcttgaaaatatatatgaatcttattagaattaggattctaattatagtggatggataaatccccttagaattcggattccatttataatagtattaggaaatatctcactaaaagaaaagataactcaactttcaaacaaaagataaaaaaattgcaacccttgttgaaaatttatcttctttttttttgctatctttttttcataaatttcctattgcgatgattgatagtattttggccataccactcttgatgttactcagaattggacgattcaagatgtaatgcaaagctaagaacgagatctaaaacttttatgttgagctccaagtcgatttctacctctaagatcgttcgatttcgcaattaaattccaccttgtaaaatcgagctccccagcttcaactatttttcaccaaaataagctaaaatctctccaaaagactccaaatgcatga

SEQ ID NO: 157297 - DNA, 520 bp, Cannabis sativa
taagaggtcagaatgaggacccaatgcccagattgacacttggtgctgagcctagcacccaggttgacattttatcaacttgggccatttccaaagagttttgccaagaagtcttccaggaatattcttcgtttttgttaaagattaagataccagtgtttccaggaatcaaacagagtcttctagtggcctgaaactaaactcagcgcccaggttgacacctagtgttgggcctagcgcccagattgacacctagtgctgggcctagcgcccaggttgatattttgtcaacctgggttgtttccaatcatatttttgaaaaagtgttccgaacactttttttgtaattagatataacaaagataaaagtaaactcagggagaaaatgagaatcttgagggcctaaaagttgagcctagtgcccaagttaacaaccaaactggtgcgctggtttcgaccattcaaatgaaaattctactttgagcattctctctggcatggtcaaaaacagggtaggaga

SEQ ID NO: 157298 - DNA, 681 bp, Cannabis sativa
tacccaagctcaaaatccaaaatcaccattaaagctctaagtttgagttctaaaactcaaaacttgattaaatctactaacaacccttaactcattctcaaatcaagatgatctaacattaattaacctcaggaaataatttcaaacaaccacagcaagaacagcagcaaaatcatcaattcatgcaaaaattctatttcttaaaattcaagaaaactagagaagggattactagaagcttaccttggcttgaataacactaagagctgctagaaatcgcagaattgaaatagaaaaatcaagaaccctagctggttcttggtgagttcgaagagagagagagagagttgagagaaaatgcttctttttccaattttcttattttgtgaaaaaaaaaaatgaataaaaatcaatttccttaaagataatatcagcatacttgattaaaaataatcagatttatcaacttaaataactcacaaaatgacaaaaggctaatagggcaaatgactattttgcccctcccacactaaaagtcataatgggcacttaggggtatttagggaaattttaaaatctcacctattcccgacattcccaatgtctaacaatattgtcccgctatactaaaaatactaagatgtgattcaagaagcgatacaccgcgttccaatgttgctg

SEQ ID NO: 157299 - DNA, 536 bp, Cannabis sativa
tcaaatataacaatatatataattatttaaatatctataaataattttccataattaaatcttaattaactgctaacttccaaattaaactaagcggtctttacaatcggaccatcggccccatgaaagtccaacccccttctttcccacatcggaccatcagaccccataccatcggacccaacaaatgaccaccagaccctcttcttccccacatccgaacacccaaatcccttctcctttcacagatccaaacaccctaatcccaattccaaaaaatatttcttaaatcacaaacaataaatcttaaacacaaacaattccaaacaaaatcacaaacccaataaatcttaaccaatttctttaaaaacacaaaataatcaaaacataccttcgatttagacatggttcgacgtatatttggtgtgtcgaagttcggtcaccgtgggcttgttgtcgatgttggaaatattttacttggatctacatttactaccaagtgtgtttcattaacatcctaatatgaagtctaaaac

SEQ ID NO: 157300 - DNA, 1079 bp, Cannabis sativa
tgatcaagctctatggggcataagtttctctttcttttttatgttttatttttttgttggacatatttctatattttcatatttttttttatctttggcccctagataaacaaaaagggggagtaataatttatttttaatttctcaactctggatcctttttccagggggagttgtgtttggtacttgtgattaactttggattaaaagttagcttgttattttgttatttcggttttcgattgtgtttctcagggggagttcttgtttgctcttgctaactttgatttgcaggtacttccttgattaaaaaatatttttattatctaaagtgccaaagggggagattgtaaactcctttgttggcaagttagatgccaaaatattttttatttatggtgagttttctttgtgtttccaatccgattttctcacctttattattcagtttaattgctcttttctataataggaaagatgtattttcggatgaacttttcttgtatggaaagttcttgtaagagaagcaattctcttatggaaagttggtttttaaagaaaactttgactattccctttttccttattaaatttaattgcgtcttgatacaatcagaatatacaaactatttatggcaagtatcaagacccaatacaagatcagactcgtttatggcaagtttccttttctagtctcttttgctgcgtcagaatctgtttctgatgctacagatcatgttcatcttaggaaagttttgtacagctgtagatttgaccttgtggctgtctctagggtttctatgttctataaatataacctagagagcagccatttgactaaactcttctagtattcatttttttttttgcattttttcttatttgtgagaagagagtttctttttgtgagaacctagttgttcatctaggttctagtgtttttcatatctgttcttactctgtcttagagtttttttataacgacttgactgaacaagagagtagtctttgggagaagacttgttcaagccttacttcgggaggaagtaagcatgcacgcttcaaagacaaagggagtt

SEQ ID NO: 157301 - DNA, 727 bp, Cannabis sativa
aatatattaataatattattaatattataaataaaaactttactaataataattatcatatcattttttagccactaagaaatctctacttttgggctaggtcaaaccataaatacttctaattaccataatgcttacactatcaatttgtcataacattcccattaaagtcactaattaaatctgttataatattttagcccctgatcgattctctaaagtcaccaaataacctaaaaatatttttattccaccaataactcatatatatccacacatgctatataaatctctgtaattaataaattactcttatttatccatttattacaaaattaaaatttatgctaaaataaattagtaggatcataatcctacttactacctgattaacccataatatatataaaagaattcttggtttataagaaattattgggtgacttttttttttaaagttttttattcaaaaataacagttttttttggataatggcctctcttttttaactcgtatttgtgtttcagccggtttattaggccactattaggattcctgagccttttatttacatgtccatgagtaatgcattttgactgtcgagctggttatatatttttcttatatacttaggtttttgtaaattaattttaagcctggattgtaagacaatgttttagttctttccccatggccctattaggttgaataattctgatttttctt

SEQ ID NO: 157302 - DNA, 567 bp, Cannabis sativa
tttttttttttaacttaccatgtgaagcaatgcaagatagttgcaagatttactctgatgacgcaaagattcattgttgagctccagttcaatgtctgataaaagatgcttcaatagggccatatgaattttcccaagtaacaaggaatcctgaaaggcgtttcagagaacatattatatcaaccgaaagaactcaaatcgaaggaggtaagatcaaaaagagaaaacaaaatgttacaggcggatggaaagcaaagttgcattaaagatggaatgaaaccttgtcatgaaatgcttgagcaaactcatcaagggtgaatgggcaaacatcaacgacaagagaataagtatagaggaaatggaaaacctgccagcaaaagtcaacacattttttagcattaatgccaatgatagataattgtctcaactaaatgtcccaatgcattgccatttcaaaacacagaaagaagagaaacagctgggtggacgccagcatttcaaaagagagaaaacaaaaagggtgacacattttctataagccaggaacagtgttattgacaaataaca

SEQ ID NO: 157303 - DNA, 522 bp, Cannabis sativa
tgggttattacatggggacttatgccggtcatgtctccttggcaccatgcaaaaacatctgtggctgcccttagcgttctaattcttttttctttttcctctggttctaggctctttcccagccggaggatcttggtggggtcgaggtcgcatattggcacttcctcgacgtcctccataggttctacaattttttcagatcccacatggggatccaactcatcttcttctaccaaatctggctcgatgccttcacggaccatcaatactggtaagtgggccgcgaaattgtaacattgcctggcctcaccttgattgccactcacggtccctactccagcttccttggtggggaatttcagacacaagtgtcggatagacgtaactgcgccaaagtctactagggtcggtcggccaagaattgcgttgtaagcagttgggcagtctaccaccacgaatgtgcagtatttaaaagtgttctggggtgtgtccggacataaggtgactggcaacctcaccttt

SEQ ID NO: 157304 - DNA, 505 bp, Cannabis sativa
aatcgacgtaaagagtgcagaataataattctttgtgatatcacatatggcttcgttactcgtacaccatatatgatcttcattaaataaacctaaaaaatacaacccaaataatcttaaacatttgatttataaaatacttttgtcctaacaactcatattcctttatacatcatttcctctatatatgcttagcctcagtgcgaaacttgtatccatcaatcatatctatttaagttaattcacgacacccttaagagacatatcctatatttaaaccatgtttgcataaatataagtacataaccttaaccttaatggtttaagtttgaaacacctttcctcaacctattctgagccacttttgaaagaacactagttaaacaattcaatctatgtgttaccctatttaaaacacatgtaaatcacatccaattgcaattatattaaaatcttatccaaactatacttttctctatatttaatttacaataataattacctc

SEQ ID NO: 157305 - DNA, 899 bp, Cannabis sativa
  modified_base (608)..(610): a, c, t, g, unknown or other
tcatttcacttctatgtctagataaaagctgtagattctatatttatgattatcgctcccactcaattgtactatcatattcccaagatgtaagtattaacctgaactaattggtagctttaacgagcaactctgagaacataaataacatagttgagattgaacctaaccatatcatgattaagatcttttgatctaagatcaattatgtgatatttacttagaaagatataactgtaagtttatgatatctttaccaagttcaatatcggtccactctaatgtatactccatacatccgatactagcatactttaccaatgccctcgaaacgacataacacttatccagggtgtaagtaaactttatcgctgattatcacatcagtgtaaattcaatgcactgatgaatcatgggacattagctttgaaatatataatcacaattaccttccattgtgatgacatcactgtaattgtgaataataatatgttctggatttaacagaaattatatattaaactataatgatgaaaaccatatgttaacttaaatgactcctaatcttctattgataaaaaataagattatattgaaataagttttannnagggcataaaatcccaacaactcagccctcatatcagactctaactctcaagtagcttcctccaccttgctatttttctatgagtatcttaactaaagttatggtcttatttttgagaactttattctttttatcgaggatatgaactggttgttcctcatagataagtctagttgtagctctaagacttcataattgaggacatgagttggatctaatacgtacttcctcaacattgacacatggaaaacattgtgaactactaataatgttggaggtagggctaaac

SEQ ID NO: 157306 - DNA, 639 bp, Cannabis sativa
caaattctcaaccaaactttctagctaacaaataggattactagcaattaatagatgctcaaataacatattttatgcatcaaaatcccataataaatccaaaaattcagattgctcaaaaacatagaaaatcaagctcccaacttaacaaaactcaagttcttgaacaaaagcttaacttcaacaacccaagcaatttccagcaatgaaaacattccaaggatacatgattctaagctagaaaataccttgaaatcataatccatgcacaacaactcaaatcatgcaattcataccaaaactcaccaagattaacattcaaagctatgaacatgcaattccacaaacttaacaattcaaaacatacttttctatgcttttaccaccataaaattcagtaggaagacaagattaaaaacctgcaaaagctacctcaaacaaagcttgaactcccttcaactctaagctccaaaatctcccaattccaagcttcaaatcaatcaattaccaaaaccaaaaaatgaaatttttaagagaggggttcgggtttgggagagaacaacccagaaaatttatctatttccctcaaaaatcaacttttattaagtgtaactcaaattgttaggttttgtgccctaa

SEQ ID NO: 157307 - DNA, 1023 bp, Cannabis sativa
  modified_base (950)..(975): a, c, t, g, unknown or other
tgagttcaggttcgggttagggtcctgagtgcaggtttgggttgggatctgggtcctgctcccgattcgggtctacgtttgatttggagtccgagtcttgtctggttacggttttggatctaggtccaatttcagttatgattcaaagtctaagtcctagttcctgtcccggtcaacttctttttttggttctaatttagggtcataaggtatgggctcgtgtcaacttttgggtttgggactgggttcatgttggggtgtgggttctggtgcttgtcacggttcgggtcttgggctgggtcccaaatccagacaccgactacaagttttgtccaagctctgggtgaagatccggatccaaatctcaggtccgaaactttttccatttctggtgtcgggtcatgagttgggtccgaggttcaagttcgagtctttgtcgggtaataggtccatgtccaagttctatttcccagttccctatcctgattctttgtccatgtccaagttattgtgtgggtttgggtctcggtctaggttcgggttcaattcctagtctcagtttgggtttaggtctctgtcttggtttcaatctaggctcacgtttaaatttagatcctggtccttgtcctggtcctcgtcctaattcggtcttagttccatttgcaatttagatttcgagtttgggtttgagttctggtcggagttcgagtcctggtttgagttttgggttcgggtcctgatttcagtctaggttcagatcaggctcagggtgtgggtttgcgtcctgggtcttggtctaggtttggtccgagtcccaagttccaaacccgatgtgagtatggattcagttctggatctaagtccttgtctctctgatcctggtctgggtttgagtttgggtctgggtccgggataagctttgcgactgattctaggtgtgggtttgagtnnnnnnnnnnnnnnnnnnnnnnnnnngtgtccaggtctgcgccccaattttggtctaggttcaggtccatgtcc

SEQ ID NO: 157308 - DNA, 502 bp, Cannabis sativa
cgttcgtccatcatcgtgcgcaggcagtgggaagccatgaatgtccgcaggcggtgggaggccgggaacgtcgcagacggtgggaggacggaaacgtcgcaggcggtgggaggttgtgaatctacagccgtagaaagaaacgtaatgagagagagagagagagagagagagagagagagtttgggttttctaattggtgctactagggtttggggtgtctttacattctcaataaaaaaaaaactttatattttactttagcaatgagagagggaatctgttaaaaagaaaagggtttttttttctttgttttctttgaaacaagatatttttttttcatttaggcgagaaagagagagggtaaaatatgctttctttttctattattttttttaaaaaggccaattattattattaattaagtttgggaacatttccaagtactgatcattttttaaaaaataattaaaaaaataaattttagtgacgcgccaaacatgtt

SEQ ID NO: 157309 - DNA, 594 bp, Cannabis sativa
atcagagccgatcgttccttagctcgaaggatactcacagtatacatacaaaagactgaaaaagatccctctcactataatgtaagtgttacttatagtatggtcggttttgccataaatatttgtatatgtgatacgcagatctttgataaaatatgcctccttgaataagagcgtcgcgtgaagtggtacttagagaaatcaagagcatcttatcgcttaagatcgactatgttttgggtaaggaagataatatacttagagctctaagggaaattatcgctatcaatggagagattaataaaattgtaagaaaacagggagccttgatctggtcacaagagaaatatttagtattaagggtggcattatctcacgtctccgaattactttatcatatcgatgaaatttggcataataccacaaggaatgttgatgagacaactaggtacacaatattgatacaggagttagcaatgaaatttcatagtttctcttttgagaaggcttatactgtagaagtcaatggtgtggaggaaccatgcatcaagaccgtacggtacaaacttagtgataagagtaagaaagatatta

SEQ ID NO: 157310 - DNA, 1026 bp, Cannabis sativa
agtgctctgtttaatatgcatcctgataaatctcctggtcctgatggtatgaccccagattttttcaaaaaatactgggaaatagtgaagagtgatgttatgaaccaagtttgtcaattctttgcgaatggcagtattcctgatggactgaatgacacgaatattgtattgattccaaaaaagaaacagcctacttcgatgggtgaccttcggcccatatccttgtgcaacgtcttgtataagatagtgtctaaggtgcttgcgaattgtttaagagaagtgttgcctcagatcatatcctcaaatcaatctgcgttcatcctgggacaccttattactgataatattatgatagcgttagaggttatgcactatcttaaaagaaagcgtaaaggtaaagaaggctatatggcgctcaaactggatcttagtaaagcttatgatcgggtggagtggggctttcttcagctatgatgagtaaaatgggattcgacttgcggttcattgatattattattgctacggttagctctgtgaggtataaaataattcatggcggacatgagctgggaccgattgttcctgggaggggtattaaacaaggtgatcctctatcaccttacttatttcttatttgtgctaaggctttctttgatacgaagttcgagcgggatggtaggcttagaggttgcaaggttgctaatggtacttcggttatatctcatatgttttttgcagatgatagttatgtttattgtcatgcaaatgatagagaggcttcgaatatattacatctgcttcaactatttgagatctcttctggtcaacaagttaatttcagtaagtcctgttttcttcagtactaatgtgcctaatgctactcgagactgattgtgtgggattcttagaatgagacttgttgatgaaagtagtccttatcttggcctcccttgtgtcatgggaagaaataaggatgccattttggggtttttgaaagataaaatgcagaagcgcattcaaagttgg

SEQ ID NO: 157311 - DNA, 690 bp, Cannabis sativa
ttctcatactttatatgtgttactaaatctaagatcctggtgaaatatttccaataatttccaactcactatctttcagtattctatatcaccaagacatggagcatccaagtccaaggccgaggagctaaaaatgcatgaaacaacatcacagaaattaacttgggcccctagaattttacctatcgcccaagttgacaacccaactagggtttcagtttgtgggactgtcttagtgaaaatggttcaaacattgtattgggacatgaactagacacgtcacgaacatattttaggcatcagaatcaaatttggagaactttcgtttttgagcatccggagcaacaggtgaccttgacatattaataacataggtcacttccaataagcataaaactagaaaatctgcctcctgaattttcttcatcttcatcaaaaatggggaaataattgctttcgggaaagaaatagaccaacctagaggccaaaatcagggaccaaaccacacagaatgatttgacttacttttcaacaaactaaatttctcaacagcttgactaaatttaccaaaccacgcacaagggatttgtttcaaatcatatacatatttgcacagacgacaaacttgccctaactccccctgagcaacaaatccaggaggttgctccatatacacttcttcctcaagat

SEQ ID NO: 157312 - DNA, 508 bp, Cannabis sativa
  modified_base (38)..(48): a, c, t, g, unknown or other
tatatgtgtttatttatattcgttttagaagttcatannnnnnnnnnnaatcaacatacttgtgagtagattgaagatcctggtaaaataattccaacatcatcttgttcttcatcaaaaatgaggacatgagtgctttcgggtaagatacaacacatcctgggtgccagaatcaaggcccagtgcacaggttgacattttgtcaacttgggccaattctgaggatttttttcgagaagttttctgggcatattcttcgtttcaacaaagattaaggttcatctatttttggggaccaaacagaacttttagatggcctaaaactggacctagcgcccaagttgacatattgtcaacttgagtccttaacaaccaatttttcaaaaaactgtttagatattttttccatcaccagaaataacgaagatacaagaaactcgagaagaaaaccacaaactagagggcttggaaacttagcccagcatccaggttgacctggtgttgggcc

SEQ ID NO: 157313 - DNA, 924 bp, Cannabis sativa
  modified_base (46)..(53): a, c, t, g, unknown or other
  modified_base (243)..(257): a, c, t, g, unknown or other
gtaggtcatggtgtgacgactcctatagatgaaatcgcgcctggtnnnnnnnngactgggaataccagttcagcacccagccagggcattcataacacagccgtatcgcctactaccaatgttcgaacgaccattagagatgatactgagatccaaaacctctgcgctgctcttttctttataaaaccttaaaggatactattaaaaagaagttggacgctgtaaagaccgcttagcttaaannnnnnnnnnnnnnnataattagggtttaattatggaaattattcatgaattctaaattattaatttatgatgatttatttaaattcagaatgcatttttatgtcacatatagagatttcataattttgcatattcagtgcccgacaacattggaagcggtgtttggctattagaatcacatcttagttttttttagtatagcagggaagtatagttagacattggaattgtcgtgaatagtcgagaatttagaattgatgaaaatacccttaagtgccctttatgcctattagtgtgggaagggaaaactagtcttttgccgagggtttcttttgtcttttagcaagatttattttaagtttatttcagcttattctttagataatttagtagttaatacataagttattacatttatcatttatttttcatgaaaatcaaaaatcaagaaacgagctctcttctctctcttcactcctttctctcgagccccagaagaaccagcaccttagtggagttcttcagcttgttttgtgattagtagttagcttttggtgtttccattgaagataatcctctttaggattttgttttccatagttttcttaagctttaagtaattatttattgcatggattgagtattaggattctgagttgtggattatgttttctttagttg

SEQ ID NO: 157314 - DNA, 597 bp, Cannabis sativa
gaaatcacaaacttcagtaagaaatcccctggttcttagctggttcgaagagagagaggtgaaggaaagagtgttcttcaatctttttaattttcctttgatttttcctattttcttcaaatgtgagaaatgcatttcctatgcattgattcaaccaacaaagagggcagctgtcacaccctcacacagccacacaatcctcaaaaaggaaaagactaaaatgcccctaatgtaaaattctaggttattttcaacttaggggtaaaatggtcaaattccataaccccgctaatctcggtattttattttctctcaaatatttcccactcagaaataaggttctaaacttacccatgtgatcaaactagccaaccatcgtatttttccattgtggccgagcaaaaattacaaaaataacatattttacatataagtcaaattatacccctagagtttaataaaatcttcagaattgagaaattataactctaatattcattctaaaaatattggggtccacaaataaataaattcataaataattataaaattaacagaaattagtgctaattgcctttactaatccaaattactaaa

SEQ ID NO: 157315 - DNA, 581 bp, Cannabis sativa
taattttatttacagaaaatacagtctttttttgttgtactcttgttcatttattgttgattttttgttatatgtatcttattttttgttgttacttgatgttatttagataatatttttatgttacttttatatagttttcttgttgtttctatagaaaaccgtaaaaatgtaaaaaaaaaaaattgtttaaatgtaaaaatgtaatctttttacaaaaattagtgccttatgtaatcattccttaatttaagggaaatttgcggcataaatagtaaataccatatgtttttaattttatacacttaaataccttatatttttttttacggattaatactagacattgtgttttgcctttttccgtcactactattctgttagttataaaaaaaaaaaaaaaaaaaaaaagtacacgagtaaggctgagattaattcccacttatttcttaaaaaaaaaaaaatatttatttttaaaacttatattcccttagtaaaacttaagggcccgtttggtacgcaggactggattggattagacaggttaatttgtccaatccagtgtttgggcatgttagaag

SEQ ID NO: 157316 - DNA, 510 bp, Cannabis sativa
tctctctctctctctctcttagcatcaaaaccctaatttatttttttcaaattttttcatatttttctcgtcactgttgggtcgaacagaacacactaagatgaacaaaatcggggacgacgacgggcgggctggagctatgggcagtgggcgactgggaaggagctccggatctcgacttgaaacgccttcatagtcgcgcaatggtccattctctctttccctactccttttctttcactcgtcggcgccttaccctcctccggcgatggtgtttcttgactgttcgtgttcgtcgagggctggagatctggacaatagatgattgcgaaggagctctatttttaggtatttagatctgactggttccctcctttttttgttctcatatatgtatatatatatatatatattagtttatatatgtttgatttttcttttttggtcaaaacaatggtggtgctctggtgcaatagatggggtgggggtctgaatgtggctggaagaaaa

SEQ ID NO: 157317 - DNA, 515 bp, Cannabis sativa
  modified_base (237)..(239): a, c, t, g, unknown or other
acacttagattggatgaaaaatgcttgaaaattcaagaagaactcccagccctagcactccacaccaagccgagagagagagagaggaaaagagcttgagctttttttttcttctaaattttctaatttcctactttgaatgaaatgagagaaaacatgcataactcaacaaatattcagctatcaaataccaattaaaatcatatattctcaccacataaagtccactaaaggacnnnatatcattggggcaaaatgaccattttacccctccacattgaaataacataaagggcactaaagggtgttttgggaaattctaaattcctgaccactcccgacatttccaatgtctaaataaccgtcccacaataaaaacatactaagtcatgattttactgagccaaacaccgagtcccatgttaccgggcaccggaaatgtaaaattatgaagttcactatatgacataaaatgcatttcagaattcaaaaataacaatataaataattattta

SEQ ID NO: 157318 - DNA, 698 bp, Cannabis sativa
aacgataaacaagcaaatatgcagaccatgagtactcaacagattaaagaatggctatgtctaaagaaaagtcagaactcaagaagtcaaaaaattttcttaagttagggaaaaaattcatgaagcttagaataagcaagatgaaaggcgaacgcaatatagttcagagacaagctttatggctataaacccgcatgaagacatgataaagaagaatcgcaaaagtttctagccctggggtttcctaagcatttttctacaacatagtgaaagttgaatttgaaatgtaaacatgcaaagataatcataaaggaaatcaaaaacttacttaagattcgagtgtctgggttcaagcaacgtctatccaaccagcagttgtatgaaggtacttcggcgactttgaagccagaaaattttcttttcgctctggagcttgcttagcaaagaagggtgatgaaatgaatttatctgccaatgctgtgggtatttataggaaagtcacgaaaagaggtaattgtctcaaagaaacctcaaacgcctcagcttcccgcctcaaaaacgaatatgggaaatcaaaagtaatcgagtgcaaccataagccgtggagagagaaaaagggaatttgaaatattaattgtcagagcatttattagccaaaaaccaaaggaatgcctagtcagcttcacatcgagtctcga

SEQ ID NO: 157319 - DNA, 502 bp, Cannabis sativa
  modified_base (448)..(449): a, c, t, g, unknown or other
agcattagttaatccaaaggacatcactaggaattcatagtgcccatactgtgtgcgaaatgctgtcttgggaatatcctcctctcaaatcctcaactggtgataaccagattgaagatcgatcttagagaagacggtcttttcctatagttgatcaaacgaatcgtctatccttggcaaaggatacttattcttcactattaatttattcaactcccggtaatcagtacacatccttaatgttccgtctttcttctttacaaacaaaactggtgcaccccaaggcgaggtactcggtctagtgaatcgcaaatccaacataccttgtaactgaacccttagttcttttaattatacaggtgccatctgatatggggccttagtataggctctgcccctgatatcaattcgagtttaaagttaatctctcgctttggtggtaaacccnntaactcctctggaaagacatctagaaactctcgtaccaccggaacgtgttcac

SEQ ID NO: 157320 - DNA, 538 bp, Cannabis sativa
tttacccacgcctctttgatagtcagatctttcgcctagaactgtttccaaaacgtcaaactgataactagtatcagattaagtaccagatgtagcgctctgggattgccgttcaagtcttttcctgtcaagctccttcaacatttcttcctatttaaataaaaattattagaatatataattaatataaaatagaaattttaataataaatcattttattcacttacataatcttttgcagcagcttcattaacgaaagtgccagacaattttttcacatgaatctccttccatgcttcaactacatgctctccagtaggacccccatatacgaacataaacaattaagttagtttattataagggaaaaatattattaacaattaaaaaattgatatataccattccgtgccgtatggaagccaacgattttgtaccttgcgttgttggatatttcattagttgccgattcgatttatttttacttgagcgattcaaaaatgcctcgctaacaaacaattcgcaaaccggtttcca

SEQ ID NO: 157321 - DNA, 569 bp, Cannabis sativa
  modified_base (42)..(43): a, c, t, g, unknown or other
acgaaacaaaaaaacatggttagaggaaaaaggcatcagaannataaagcatgatagtcaaaaagtttaaaaacaagacagaatatcctgtgaagtgattttctgagcacgactcgagagtccatcatcacctgacaagtcccttatcttagccatgatagctttaccttttcctagcacgggagaagatggccaagcaggtgaactgggctccctaatctgaatggcatgttaaacgggtttgggttgggctggaagtttcttcctacttttgagcggagtcacctgctcttcctctcatcttcaggattcaagggcgcatgagcatactgtttggcccttgcacctctctttaacttagcttcacgcttaagttgattgagttcatcctcttgatgagctctctcatcccgtccaacaccaaatttcctcatcctctccttcacttgtttaggaatgaaatccttcgcatagagcctgtacttcacaaagttgtcctcggaggtcaattgaatgatattttggtcatcccccggcagctgagcaagcctttgagctctatctctaag

SEQ ID NO: 157322 - DNA, 604 bp, Cannabis sativa
cacattttgtgtaattattttatttttgttgtacatttatgaaaaaagccttatttttttatattttttattttgtttataacttaatttaattgtgttataaattataataaatgcaaaattttcaaataaatggtttaaaataataataattatacatgaaaatatatttttatataataccaagttgaacaataatattataatggatatccataagaaattgcatacattttaaattatttggttaaaataaaaatctttttctaatatatgttaataaaaataattaaaaaaaacttaatacatattaatatatacagataacacgtcatagtatataatgatattcatgtaatatcaggttgtcatttaatacttcaaaatataaatatataatatatactcaattagaatttgtagtaaaaaaaaaagaaaaataataatactaataaatacctccgagtataaattccaaccaagctctttccatttttataatttttttagtgggatattggcggctaaaccacttgaactttacggtttgtaacacttaaccacaaaaaccgaatttttgacggctaaactacctaaaccctgg

SEQ ID NO: 157323 - DNA, 532 bp, Cannabis sativa
agatcctggtaaaaataattccaacaattatgtgttgctcacataaaacaagggctttatgttttaagaccagatataccaattgcactcatgaacaaacgttttaatattgctaaacctaaataccataaaaagcaaaaaattgataatagtgatgaaacatatctatgaaatttagaaatttgtcatataggctatgatagacttcataggttaaccaaaggtggtctattgaaaaatattcccttgggtgaattaccagtttgtgaatcttacgtaaaaggtaaaatgactaagtgttctttctctgcaaagggagagcgtgccaaagaacctttagggttagtacattcagatgtctgtggacctctaaatgtaaaagccagaggaggttatgagtactttgtcattttcattgacgattactctagatatgtttttttaacctattgcaaaggaaaactaaaacgtttgagaagtttcaggaatttcatgctttggctcaaacattaattaggtaaaacattaaaga

SEQ ID NO: 157324 - DNA, 562 bp, Cannabis sativa
cataaaaagattttatattgagctcgtttgcattatcacatcttacagctttaatgtttttagaaagttgtgttgaaatgaggttataaaattgtgggattaagtgtttcacatcagatttggattgtaacatgtaaacccaagtatgttgctgtgatcgtccacaatagttagaaaatatctataaccttcaatactttgaacatgaaaagggccccatatgtcaaaatgaactaaatcgaaacaacattcagcaatatgattttgacaattgaatggtaatcgtttttgtttagccaaatgataataggaacatggagaaaaatcaatatgctcagaatgtaattgattattgatcatctttgttgtggacaatgaaaggtgtccaagtctaaagtgccaagaatggacactattacatgatttagtagagtaaaaatttgaattacaattattaggaggattgacagattgtagtaggaagtataggttgctaatacaattagctatcccaatcttcttgttctgtgtaccctggagtatgcaagaattatgagtgaac

SEQ ID NO: 157325 - DNA, 521 bp, Cannabis sativa
aagtttagatccacttttgatccattgattcttgctatgacaagataattctcataagtgtaactctcatagtttattttctcatctcataaaatgagataataattatcacttgtaattctttctcacaagttacaatttcttttctcaaaataactattggaaaaaaattctaaattctctttcttcacaatatagatgataataatctccacatcaatagtaataaataatatgatattactatcaacattattatcagatcatacatcaatataaacattaatatataactcttatacataaaattataactcccaaataataatcttatgctaattaatataatatgtatgttactatcaacatctcatatgtaacatacacataatatattaattattacacaactatacacgtaacatatctcacatatatataacatatacataaacttcaatattgttacgaaaattataaacactacgcaagtatacgcagtcaagtagtagctcacgcaa

SEQ ID NO: 157326 - DNA, 813 bp, Cannabis sativa
gtggcgggcggtttgagagcggtttgggcagtttgatgaacacccctatcggtagcggataatgattttgttaggctactaatgaaaccgataccctacaactaacttaattaccgaaaccactaaacacgtacagtgttagtgtcggtactgattttgttaggatactagtgacaccgataccctataactaccttcattaccaaaaccactaaacacatacagtgttagtgtcggtacttattttgttaggatactagtgacaccgataccctacaactaccttaattaccaaaaccactaaccacatacagtgttagtgtcggtactgattttgttaggatactaatgacaccaatacccaacaactacacaaccattaaggacttcgtgtgtgagaactactgaatgcaaccctaatttggtacggaataataatttctttaggatactagtgacaccgataccctacaactacacaaccattaaggacttcgtgtctgagaactaacttcattactgtattataagtttggatattagttgacacctgtaccgttacgtagattttaaatgtgagaaatgctaataacaacttaattacaactttttttcaaaaaaaaattcatagcggtattcgttatagttatagtatcaaccctttaaattgttgaaaaatttcgaataattgacagtaccgaaaacaaagttcctcatattccagtttaccacgggcgttcaaaaaacttcaaacatattgtgggcattgtaaattattcgaaattttttaaaaattgacagggatgatgttgt

SEQ ID NO: 157327 - DNA, 785 bp, Cannabis sativa
acaataaaaatgtaaccattgaaacctcttctgtatgttgccattttatgctattttgtcaccgatattttatcttctatatttttttgttattttttttaaatgatgattaaagttgatattaacctctcatatacattattatttgtgtttttcatttttttttttaaatttaggcaacagcccatcacatgatcttcccattcctaagaaaattgtggcagatttttttttaaatgatgattaaagttgatgttgacctctcatacacattattatgtatttttcaatttttttttttaaatttgggcatcaacccaccacatgatctcctccttctcaagaaaatatatatgtgtttatatatatatttctcttgagcaaatcactaaacacacacacacattatttatttttcaatgtatttgagctctttctccaatgttcatcttcttcttcgcttttttttttcccaagtctacaacattgcctaaataaaagctaactctctccttttgtagtatataataataaaaaaaagagtatgtgaaagagggaaaagaaaaagaagaatttgggaaataagagtgtggttgtgtgtatgagagagctgtagaacttcttctgtgatgagcttcttgtagaaatctttcaaaaactcctactaagttcatgttcttcagtctccttagtttcaaagcgttggctccatctttaccgtacttccaagtctttctccaacttacccttttctattactagttattttgttattgttttattat

SEQ ID NO: 157328 - DNA, 596 bp, Cannabis sativa
tgttactaatactaataatttttgttttttcagatacatatatatgtaacattatttattgatggttactaaaatagtttaactataaatattaattttgaaaatattaaatcattaaattttgtttcaatagcaaaaataaaaaaataaaaaaaggatttaaaacaaattccttctatgacatattttttttcttttccaatttcacaaaatatatatacataatatatatgagtatttttttttccagtttgacaaaatttattgaacaggaaaaactaatttaaaaagatcactttgccggctatatttgagacaaaactgtccaaagtttatgatacctaagacaatctatccaatttttctctctatagaaaaactaccatgtttactaataagtaatgaaaattaatagtaaattaattatttttttttacatttatttacttactttattaaaattaaaatatagagaacttaattaaataaggaattaaaaaaaaatacttctccaccaattttttaagaaatgccatatgtaataacttttatttatttttattttttaatattaagtatataatgaaaattttgtt

SEQ ID NO: 157329 - DNA, 723 bp, Cannabis sativa
tatatcgttggaaagcttgtttcgagctctgtatgattatctgaattttaaatgccacgagattattttataagtttgagattaggggttaaccctatgtgtgaaaatccgggatttgtgtgaccaggataaccggcaactgatcaggagcacccacagattcgaaatctctgctattgcgggacaacaggtaagacagtggttagcacgtagagtatgaactatggcgcttattttgaaagtgatatgcatgattgtttaataactgggcttagggttataccctaataggaacggtctaatagcctagggttattaccctagtgatatatgtgtgaaaatgccatgccatgttatatgtaatgagattcaagggttatgcgcttaaggcataatcaggttggactcggtaactataactgagatgaaccaattctaaggccttattgtattgagacgtgtgggagaaacacgtaggtctacgccatgtagatttaaatagatgttgagcgcaacacataggtctacaccacgtagacataactgggcatgtcagtgcgatatgcaaatctgtgtcacacaaacatatgtgaatggctttattgtttaaatagtttgatgagcatatttttattgttaagttttatactgtcttgctgggcttggttcacaggtgctctactgtgcaggaaagggtaaggctttagctgatcagccatgagt

SEQ ID NO: 157330 - DNA, 532 bp, Cannabis sativa
ataccaaaattaagataattattcccaagacacacatttggcgggtagggccaatagaacatgctatcgggattagggaacctgatatgcctgttcaaccatctgcccctatagagggaaaaggaaaggtcgtcctggcggagcatgaggaagactcttctgacgatcacgtctcgtctgtgcttgtttgggaaaatgcccctacccgcatgcagggtattttaacttgctcttacttctcttatattatgctttcacatatattatatctgcttctaactgcttcatgttctccttagaaaggtcaatgacctcgtcgactagcgccttctctttagacggagtctcactatctttagacttcttgggaggaggagacttgcctgagttgtctcccactctcttcttcaaggcctggagcaccttctcagacattctgcacaaataaaaatcacgtaatactgcttgcagactcagttaattgattttaaatttaatcaattatgtcttatttaagaattttcactaagca

SEQ ID NO: 157331 - DNA, 748 bp, Cannabis sativa
ttttagccttctaccatgaacatacatgattttggctctgtagacatactgccaaactgcataccatggtataaattagttttgccaatccgattgcaccattgtatttgtagacccaaataaatggcgaatacctagtcccgtcccgttccgaacaatattgaagatatttacgaaaaatgccactgtatactaactaagcatcagcttgccaccagcatgcaccacaacatgcgccaccgcttgatcacaacttggccaacttgtgggcatcacttagcttgtaacgtgccatcttagcacgcactttacactctcccccacttcaacatgtcgatgccctcatcgacggaccgcatgcaaatcttccagatctcgactcttaagattactccaagcttcatccgaatcctaagtctgcagttgtccctttacctccgtagaaccaccctcttggtgacgatctccctcgctcactcttggacttgatcaaagaacttttgccattgtcgctatttagaatctcccatggagtagtgcctctgcactagaatacttcccccaacatgaactcctccgagtccatcacaacgtccctcgagtcaactaagtagcccttccaacactaaccttgaagctaacacatcctctgatagtagctcactcgccaatcgtccaatgcatactccttttgacaaggactaactacggtgcacccctcagtgtgaggttcgcaaaccaactgttc

SEQ ID NO: 157332 - DNA, 513 bp, Cannabis sativa
  modified_base (358)..(362): a, c, t, g, unknown or other
  modified_base (460)..(476): a, c, t, g, unknown or other
cactgaactcactggtgcacgggttgagtggaaatctgggcagagtcttcatattactcatctcacttatgcacatgcatcactcatgaggtttgcacttagcaattgggttcccaattccaacaaaaccgtggtgtttaaagatgtggcatcttttctctttcgtatcaccttgggagcatccatcaatttggcttcctatatcttggatcagattgtgtcatttcgaagaggtaaaaagcgaactcataagcttgtgtttcctaacttaatctataaaattttgtcctcttaaaaagatgtagcctactctcatgaaacacttgagcctccccttactggcaccatattccaaccnnnnnagtattttgatggagcttttcccaagcgtcgtaaagctagtggtgctgctgctgctagtgcaagctcgagttctgctcctgcagatgtctaggaggtnnnnnnnnnnnnnnnnntggtgaacaatcatcttgctaccatggaggaggttca

SEQ ID NO: 157333 - DNA, 531 bp, Cannabis sativa
aagctattatattaaattatatggtacccgatacttaattagaccaatagcgatattgacacgtaggatggtgctaagcaccactgaaaccctttaagatttctctatattgggtatcctaatgtttaagttttttactaaattaatgttaaatacaataaacgtatgcttagtttttattttaaatattataattttacaataccaatacaatttgtataaattagcttattataaataaataaaaaaaaaagtaaaaagagaaacaatcaacaattcattaaagaaaaatcttacaaaatttaaaaggttgaaacaaatttttacaaaatttagcatccaaacatttatatatgttggaaaattgttgtgctccaatatagaaatatcaaaccaacaagattacaattctattacaaataatataaagaacaaaacatgtataaataatgttacaacactaaataaaatatacacataaaataagaatagagatgaagagagggattacaactcaaagcaaaaagctac

SEQ ID NO: 157334 - DNA, 543 bp, Cannabis sativa
  modified_base (209)..(216): a, c, t, g, unknown or other
  modified_base (490)..(503): a, c, t, g, unknown or other
gcattactggagaaggatctccatgcaagtgacaatgtctgttcataagcacgtaattcaacgtctagcttttctatgtcggacgagttccaattgttaacaacgaattggttaaactcaggtgataagctgttgagaactaaatgaactctttgctctctagattaaacaattcccaacatagttgctttctggaatttcatgttcannnnnnnnaagtgtgaagtgatactctgaccaggagtcatcttcacactttagagttcattcctaaaggcatacaaatattaataaacagaaataaattatttgttcaattaaattcatacacaagttcaaaaataaacaagtaaagcaaatatgtttgcaaaaatacaaaaataaaacatattaattattttctaaggtttccaacataataaaatacagtgtcccggtaggcgaaagttaaagataacattatctgatgcagaaaagataaaactgcaannnnnnnnnnnnnnaggcccaaatccactatgtatggccggccacttttgtagg

SEQ ID NO: 157335 - DNA, 637 bp, Cannabis sativa
gtatgattaaccaaaattcatctaaaaatacatggtataatgcaaacctgccatttcaaatttttttaaaattcaaaggttctcgactaaacccctttgacgaaaaaggagtcaaactgttacaactccctgaccaaacctttttgacgaaagaggggtcgaattgttataacatcttgatcaaaccgttttgacgaagaaggaatcaaacaactataatttttggttaaaaacctatctgacgggaaaggaaaatcaaaagttataactcacgtataaaactgaatactaacgattcttgtgagctaggaaagtgctaaatgaggcatcgcgatgctttgataaaagtacttaaacctaaaaaatagatagataatataactattcatacgagtaaattaaaaatatacaaagtgataaaatcgttaaagtatatttaagtttccttaaggaagattataattactatagcgaggcagaattgacaactgctcaaaaatcaaaaagtttggtatatcattaactacataaacaggaagatttcgagtaatggaaaaacccaaaagtactgtacatttgatcaaaatatagttgtttacattgtgaataaaaatgcaagcaaacacaattgtattaa

SEQ ID NO: 157336 - DNA, 920 bp, Cannabis sativa
  modified_base (41)..(58): a, c, t, g, unknown or other
tttaccctagagatattatttaagaattcatattcagagannnnnnnnnnnnnnnnnnaagaaaaggaacctttctccttgttcgtaagtcaatacaaataacgaaaaattaggctattaccgaaccgctcggggttgaacctctataaagttcttgtgtctatatattgctttactatctatcgattgctataaatcacttatcgcttactaaataagactcattgttgttggctaaaattttgttgatgaccgaatcatcggtgcccgtcaaccacttgaagtctggttgagagaaatagaagtacctcgacctgccttgcttagtggttgacttcaaattaaagaaccaactgacttcgtgaggagaaggcatacgccccttctgggagtcgtagaggacgaagagggcaaacagatacttaatgcccttaggattgaactgggccttacacagaccaaagaagtccgacacatttctaaagtattcatgcaaaggcatcaatgccccttgctgggcatgagcaccaaaccaagcgcacatctccttttcagggtttgtggctcgattattgtgggcgggaatgtagccaccctggtcgagagtacaaaggcgcggctcagtaaccctagacagagggcttacccacctggcgcccaaggcaccttgccttctttgaggaaccgcaggagtaagctcctcactgatgtagtccacgccctcaagcaagacgtctcgtcagcatcgactagctccccaacctcattgtcctccccatagtttgggggttcaacctttgactcttcgtctgcgtcggaggaacttctaggacgtacgttgtcctgctcttcaatctcctggacctcagcgtccccttcatgatccccctcctcctggacggctggatcctgttcggcgc

SEQ ID NO: 157337 - DNA, 740 bp, Cannabis sativa
tttttttaaaaaaaattaaaatctaatagcaattataaaattaaagataattttttttgccgcactcgacacatctgtacttcattccaccctctgccatgtaacttttctttctcaaagaaagtcactttatccttccttttttgcagttctaaattaatatattatatatgtatcaattgatgagagtggaatcataaaaaaataaaaaattgcaaaagtttaaacgttattgatcgttattggttattggtcttgaatatatattattgaaaggtttgaaagttactagctgtcatcggttattgatcttgaatacgtgttattgaaatagtttgaaagttaataattagtattggttattgatcttaaacatgcattattaaaaatttaaaagttattaattgttattggttatagatcttgaacatgtgttcttgataaacttaaaaaccgatgttattgattattattaattattaattttgactaggtattgtcaacaaagttagaacatcatttactgattattgatctcgaatatatgttaatgataaaaatatacatatataaagttgttagttttttttcaagttctgtctaaaacatgtaacttgaagatatagagatgaaataagaatttagatatgatgtataaatcatgaattctcatattctagtatttcacactattcttagaatttgtgattaattattcaaaaatatattttagaaggggt

SEQ ID NO: 157338 - DNA, 519 bp, Cannabis sativa
cgctcttccgatctcagttcgcaagatctttaaccacttactttaattgttttccaccatttctaaaaattcatgaagttttttcaaacatttcaattttttttacataaggtaaaatctagagtgatcgtcttaagaatatgccgaaaactcatatccaccccctgaatgtacatccatctacgaatatagatgatcttacttttagtgggtataggcatattgactctttacagagaatgatcttgtccaaaccactatgaacaagatacaaatgccatagacttataaaatatgtggttgtggtctttcgatgacttaggtctagttacaagataatgttcttagaatagtccaagtggatccttgtcatagaatactaaactcaaatccacacataaacatacagtttgaatccattaattgaaaatggatataaaaaaaaaacttctgaaagtcatactgtaatgtgtaatgtgttctaggaaatagaagtataaaatttttatttggaatcta

SEQ ID NO: 157339 - DNA, 999 bp, Cannabis sativa
cacctcgcttacttgttcttcgcttacttgttcttgagctgatctgttgagctgatctgacttgagctgatctgacttttacacttagtttgttcattgtacgctaagcgtctctataattgatatgggtcgctttctttggtgcctcgctattcgcatttagcgatatatggtttctcgctaatatattaagtgccattttgtacattgattcctcgcctaagatcttacagtcagcgggttacaaatatactctgatacttatgtaattaatgagtttttccataaaagcaatggcatcgattctttatcttgacacgtgtccttcattgaggtggcagccgaatttcgggtataacagctaccattattttgataataaattaacaaattcaatatttcaaagaacaaaatgtgtaggtaaaagttgtctaccaaaaatatggttagaccatgtccaatgggagatgcaaaaattgatctatatttagtacaaataatgattttgtgatatttttacatcaacttttactattatgctccaatgtataattataaatcttgttgcaaaatttaatatgtcatttatttaatgctcatctaataatattttttttattaaaaatgtaaaataataatcatcatacaataataaatataaaatttaataataaaataataataattataaaagtcattatataccaatgaacatgctaactaaattttaatagtaatatattaaaaatagcataatagtaaatataaaatcatagcatttattgtgatacgaattgtgcatcatgatatattgtgatacaaatttagatcactttttgttatgtgagacatttgcatcacaatttgacacactattatagtagatttttgacaaagtgagctatattttgtatttgcatcacttatttgtatctctattggagatgctcttagtctttaactctatgccaagtataaatatagtatcattaatctatt

SEQ ID NO: 157340 - DNA, 555 bp, Cannabis sativa
aatacaaaactacacaaaaaatcctaaattatttccatgaaaaagcatgaaaaagtggaaaaattggaaaaatttgcatttggtacggatggtatgctgcataccatctgcacgcacaaattgggctgcgtgaccaagaaagcacggcgcaggaggctgcatggagcctctccgcgcgctcctggggttgagtttcaaacaatcccgcccaacagaccaagaaaactcgaacatacgcccctgaggttgagtctccaaagcctctccacgagcgcctggggttaagtctccaaagccgcatgcgcccgagaaaagagggatccgtgcgcgtatgggtgtgacaccacccctgatatttttccgattctaaaaaattcataactaattcaaataaaatcgaaatcaagttctgtaaaaaagtgaattgcttgatttttttttccaaattacccaacaaaaataatttcagaacgaaaattcatttatttttcataaaaagttcacaaacatcaatcaatcatcaaataacacaagatcaacatgaaaccatccaaa

SEQ ID NO: 157341 - DNA, 544 bp, Cannabis sativa
  modified_base (31)..(40): a, c, t, g, unknown or other
tctaaccccctgtcttctgcccgtgtatggnnnnnnnnnncaaggagtcgcacctctagggaaaatttgcctacccctcactgttgggcaaactttgatgatcataactataatgacacaatttctggtattggacgttccatcagcctttaatgtcatgctaggccggccagccttgtatgacttaaaggctattacgtcgatattccattcatgccttaagttttcaacaaagaatggggtagggtatctaagaggaaactagcagattgctcgggaatgttataaccttgttgtggccaaggttaagaaggaagtatcctccagctagagtacggacaagggaaaaaacaattctaagtacggaacttcccatggcggggatgaagatgtggatcctcgacttcgggacccaagaagcaatggtggacctatggaagaactagaagagatcgagatcgaagtaaaattggaaaaggtttgttgctcgaagtaaaatcagtgttgataaaatttttgagagcaaaccttgacgtttttgcct

SEQ ID NO: 157342 - DNA, 507 bp, Cannabis sativa
tattattaatttaaaattaatatttaagtttaaatatattaaaaaataatattttattttgaaattagggtttgaaaattgagaaaattcgaaattttggaaaaatcccacaaaattcgcaactaggtgctgctgcccacgaggaagttgcatgcagcctcatccgcgcgcggaggaggctgcattgcagccctcgtgtgcatgtagcaagcatgcgtgacccctgcccaaacccagcgtgcacgtgtctacagacaccatttagcccagcacgcgcgcgtatcaccttgtccgaaggactcgtgtgtgtgcgattgaggcatgtgcacccaaatttttaacctttcataactttctcaatttttatcggaatcgaattccataaaaactaaagtttcttaatttttcacaaggaatccaaataaaatattttcagaactgaaataaaattattttcgtggaaaaatttcgtaattcacatttaatcatcaaataacacataaacca

SEQ ID NO: 157343 - DNA, 595 bp, Cannabis sativa
taatttatatattaatattcctaaactggttctttaaattattcattagtttgattttaattgtttaggatattttaaagactagtcatgcatttagagtcatttggagggttgttagcatattttggtaaaaaatagttgaagttgacaaactcggtttcataaggaaaaacttaattgtagatttggatgatcttaaaagaagaactggacttagagctcaacatgaaagttttagatctcgttagcttttcggaacatcttgaatcgtttacttccgagtaatatcaagagagttatggccaaaatactatcagttgtcgcagtagaaaatttctgaaaaaaaaatgataaaaagatagtttttcaagtaaagttgcaatttttatttttttaggtttaacttttaaatctttttactatctttgaggtgactttgttagcctatgtaaacactttattattagtgtttttaggagtttttcagagctcgaaacaaactcaaaaactcttaattagaagagtattctgaagctacaaattagagagagagcaaggaagagacggagatcagcttcgaagtgttcttcattct

SEQ ID NO: 157344 - DNA, 632 bp, Cannabis sativa
tctcgatctgcatcaacgaaggcagctcgaagaactccaacgtcggagaagacagagatggcattggatcttcgcgcacaagatcggaggattttcgatcatagacgacagtggatatgtgatcggcgacgactgtggatctttgacagcgagggacgacacgaagtggtcactggaggacggaagcttggtcgcgttggattgcagaacatcggagcagaaacgacgaccatcgtcttatccttactggtttgctaaaagatatatgtatatatacaacttcagttgttgttcaaggaaaatatatatatgtacatatataatgttacaaaatagtatgagaatgaacagtaagaaaggatgagagagatcacgatggttgggtaattgctaaaaaaaaaaaaataaattgaagaagctggcagcttggatcgagaagaggaagaacgttgattgccctaggtattttgggcttgggctttgttgaaaagtctactacaccaagataataatgattgggctgcaattagtttttttagtttcttatatttgtacttgtttttagtttattttttcatttttaccaccttgaggacaaggtgattttgaagggtgggaaagtgttacactat

SEQ ID NO: 157345 - DNA, 738 bp, Cannabis sativa
  modified_base (554)..(556): a, c, t, g, unknown or other
taactttgactctcgcctaaacgagacatcaatttgcttaaataatatatcattggatgaatggtttataaatcttctgcttatgatgtcattctttttttatgaaatagatggcgcagatgactatattcaaggccggccctatgttaatttgggccttaggaaaaaataagaattggggcccactaaaaaagtgaggctattggaatttgaactctcaacctcttagttgttaaactaatgaaattgccactaggctacaacacatatttagcattaaaagtattattatttattttattactaactatattttatatttatttttttgaaatggagccctgagcggtggggggcctaaggcggccgcctctttcatctcacctcagggccggccctggctatgttcctgaaattatatctcgaaatgatataaatcctcgatcttagaaatcttctacttgtatatgtttacttttggaaaattagacttggagttagattagtagtggtagtccaagctagaattattactcattgtatatttggtatannnttaagtctttgactttaaattttacatttcaaatagaaattttaaatttcaacttcctagaatacattgaacattacagtattactttcacaagttattaatatccattttctgtcaatggattcaaactgtatgtttatgtatggattttgagtttgtattttatgaccaggatccacttg

SEQ ID NO: 157346 - DNA, 548 bp, Cannabis sativa
agtcttaggtttttcttatctgaattgccttgtactgttttcattcgaacttaatacaattgtatttgcttgtgtttttattcaaaatgcaaacaactatattttgatcaaatatacattgcagttatgatttgctgtaagcaaacttatgatatgcaaacaactaccaaaccttatgattttcgagcggttgtcaattctgcctcgcaattgcagttataatctgctgtaagcaaacttaaatatactttaaggattttatcacttgatatatttttaatttgctcgtatgaatagttatattatctatctattttttaggtttaagtacttttatgaaggtgttgtgatgccttatttaatactttcctagcttgcgagaaccgttagtattcaattttatacgggagttataacttttgattttcctctcccgtcagataggttaaaaatcaaaaattatacttgtttgatcccttcttcgtcaaaaaggtttgatcaaggtgctataacgattcgacccttttctcgttaaaaaggtttggtca

SEQ ID NO: 157347 - DNA, 576 bp, Cannabis sativa
ctttattaatattctcaaaaaaatgaattgtctgcataaatatgaaatagggaataaaattccaaaccaataattgatatcaaattttcataaattaaaacaattaattcaaaaattaatagaagattctgagcttcatcttcaatcttggatattctccacccttctgtccaaccatccaacttaactcgctaggataacaatccaagtttaagcagctagagctaaaataagaagaaaataaacttggttattagatcccgaattaataacccaaggggataataattctctaaaacacatgagtttatagcatagatagaaataccttgtttcttttccaaaaacgtaggacactggggtttctactggcccttttcgttgtaatagaagcattttccttttggctttccctcgggattagcagcctttttctttttaacttttttcatagctttaacagagttcttgctattcttccgattcttcttgttgttgggtttcgaagtagaggtaatgtttgcctcagccttagccgtaccattagcacttccagaattaggagctttagttcct

SEQ ID NO: 157348 - DNA, 663 bp, Cannabis sativa
  modified_base (313)..(315): a, c, t, g, unknown or other
ccgcaggctaacctgactgaagagctgccttatacagctatgattttagagatcaacctaattggtggatcaaaaaggtggtgggtagacaccggtgcttctcgccatatctgctttgatcatgcaatgttcaaaatatacatagctgcaactgaggatgtggaattaaagtttacctctggaaaaacatgattctctaagaagtcatgcatactctagagatgagaaagaatctggtctcgggctatctcctcaacaaggcgggattcacacagactataggggctaatttatttactttaactaagaatgnnnattttgtggggaaagggtatgctattgaaggaatgtttaaattgaatgttgaagtaaataaagtgaatgtttctgtttacttgttgtgttcttttaatacttggcatgctagactctgtcacgttaataaacgcataattaaaaatatgagtagtttaggtttaatccctaaattatctttgaatgattttgaaaaatgtgacttttgcagtcaggctatcacaaaaacaccacataaatgtgtaactagagaaagtgagcttttagaattaattcattcagatatttgtgaattagatggtgttttaactagaaatggaaaacgatactttatcacttttattgatg

SEQ ID NO: 157349 - DNA, 1055 bp, Cannabis sativa
  modified_base (853)..(853): a, c, t, g, unknown or other
cgaactgtctcgatatatagaatcttcatccagctcaaaactcactgtcgttcaacaacagctttgcctttacctgcacataacatagcatctgtgactcaagagattcagtaagaaaagcataaaacgtaaatatatagctgacctacgactaagtgcccatacacctatcaacaagtcataaacaatgcaaacatgtataattgagtctcgaacgttcttgaccatagtataattgaccataataccacatgcacatagtactctagtcgtactagtgttggtagcatcaatccatactataagtacaactagccataataccacatgcactcagtactccggtgtactagtgttagcagcactagttcatgctttcaaaagtataaccaaccataataccacattcactcaataatctagcgtactagtgttggtagcatttgttcatactttctaaattgccaaacacatacattcacgatatcaagagccaatcatatatacactaactatcactctaacggatatgtcatacatctgcaaaacataaaaataacatgtacatatgtatgtgtgctacactagtcttacctcaattttgattttaggtgcgccggtcaactttagtggaaatagctgcaggtaatcgaaggccctaagtcacatttccaaaaaaaaaaaaataagtgttgccctaacactttcggggacttaaatttacaactaaaacttttcctattgatatacatcatggaaataccctatgtaaatagaaaaaactaaattggggtcctaggaaaagtcaagatggacccccaaattctgcctaaatcggatcgcccgaaactcnactatcccattttaaaacttgcataactcctgaaattctaagaaaaaccttacaaaattttgcgggatatctaaaaacatcacaatgaatatttttcctgaagaaacctcaatcaaattctcaacacaaatcaaactaaatggccgtcctaaaactacctaaatcggatggcccgaaactccttatccgagtttggaaatcc

SEQ ID NO: 157350 - DNA, 574 bp, Cannabis sativa
gccatttcactagttaactggtggttcttgatccgggcttgatgtctagcttcatgttgactcttatggattcagtgaatgggcttagtttccttgatgggcctctacaatggatcatatattagctatctagaaatacagataacatttaccccaagtcttgatggcttgagagtcacggaggctcgctaccttcatccaaatgtgagatcgtatctgggaccattaattgagtcggattcttaatattctatcgtggaacattgtggaaatgttctaaactcttggtattatgttggtgtagtccacgtgccaaatgatcgttggtgcgtgttcctctcatggtctattggagcatgtagcatcttggattgttctgatggatgatcatgtaagtgtgttacttgaggcgaatatcgccataaatacacgtcccctcggtcctatggattccactacttaagacctttggtattcccagaccaatggattgtaagatttgtgttttctcagatataatccaagtccttggataagaggcacacgaatcaccattctccttataaatgctccg

SEQ ID NO: 157351 - DNA, 630 bp, Cannabis sativa
  modified_base (602)..(604): a, c, t, g, unknown or other
ttgaaatgttggtatagacagacaaggatatataccaagttttggtcttcaaataagagctttgctgaggaagaaggatggccaattgtgtaacattaggattgcagactttactgagaaataacagaagtttacttgtgtcaactgatagaggcaaaaataaataagaatgcgtataaaagcttgtacgcataaaactgcttcctaaattcatggtgatatttataggcctaactaaaaatatctagctgcttcaaaaaattaaaaaaaaaaatactaatttaaatataattgaaataacttttaaatagaaaataaatgtatatttatttaatacaaaaaataaattctaattcaaattcatattcatattcatatttaaacaaaaacaaaaaaacagaaaaatctatctaagtggaacagttcagtgaataagaatgatttcaaaaatttaaaatgatctgaacttaaactattttatatttttatttttatatgaaagatattaagaccttgccagtttagaatcgtccatctttatgcaaatattcagtatctaaatagcctcacaactctctaataaatgttgggttttatgcccnnnataaaactctttacaatctgattagt

SEQ ID NO: 157352 - DNA, 586 bp, Cannabis sativa
atttcccatattcacttttgaggcaggaagtcgaggcgtctaaggttattcctttgtatacagttacccttttgcctataaatactcatcgtattttgcacattactcattttatcacccttcgttgttaagtaaactccagagcgaaaagaaagagttttctggcttcaaagttgccgaagtgcctacagacgtttgctggtttgcttgaacgaggacattcgaatctttgagtaagtttctgattccctttatgctttcctttgcatctttacgctttgaatgtaactgtgctgtagaaagaatgcttaggaaaccctagggttagaaacttttgcgactcttcttttccatgtccttatgttggctttcaactatagagcttatttttgaactgcattgcgtctgtcttccatcttgcttattccaagcttcatgaacttctttgccctaactcaagaaaattttctaatttcttgagttttgacttttccttaaacatagtcgttcttcaatttgttgagtactcctggtcggcatatttgcttgtttttcgtttgatactccgtccaacactcatcttgtg

SEQ ID NO: 157353 - DNA, 904 bp, Cannabis sativa
tggccaagatcttccattgcgttgtcattatgaaggcaatgattttgaaattgactatcgatcactttctggcgcaatcaatggttggaaggaaaggagtatttctgtgtcaacacattttcaggcacttttgaaattagtgggtatattatcttccatgtgggtatgctcgggtattgagatattttgtgatgtgactattttgaaccaattagtgagttgctggtgtcctacgactcatacagttttggtgaattgggatgagttttctataacattagaagatgtatatgctctccttttactgcctatatgtggtattacttccgcgattgaacctctgttgaaagatgagagagacctgttgtcagccttgacggaagcatccaatgatttaaaaaaaaaatgatgccacgcgtgatatgcacgattggataacccatatccatagaggtaacgactatagtcttgtggaattggctgcttgtatcactttatggttaagtaggtacgtttttccctcaaaacaatccaggtcggtatgtcgtgctttataccccttagcatgtaaagttgcatgcaggaagcaactccaaataggagctttttacctaggaactttgtatcataacttagactccatagttcgtgatataaattccggaagtatgaagacaattagtgccgtggatgcttctttcctccaactgtttatttgggagcgttttcataagcttgccccaccccgcaaatgtttgaaggatggaagctctcgtgcttggtaaatgtttcgttctcgtttaaagggctcaatacagttgactgatatcgttgactatttcagaattcaacttccgcccatatcttaccaacatagatgcttatttcaccttggacatgtatg

SEQ ID NO: 157354 - DNA, 519 bp, Cannabis sativa
tacataaaatatgcaataacaatatttaattctatagataacatattgcatttaattataagtatgaaaaacataaatctaaaaagtacttttgttgatttgaagagaaaaactcaaatagtggaagcgtaccttaatccatagatagtgatgatcttaatccatcttgtaagaataatctttatggtaattttaggttacgatcttccaagaaaacaagacttagggttttttaattttctctcttgatgggataagatgagaatagaaattggctcttattttttgggaaccactaccaatttataacctcatagctaggttattaattttaagtatttctaatttagcccttcaataaattagaaatatcgcttagggtgtctacacatatagtccacaatactttaatacctaatgactcacaattactaaaatgatcactttattttgggtcaaacttaaaatagcaatacactaatatacatatgagcccatattgaggattttaatccaaca

SEQ ID NO: 157355 - DNA, 752 bp, Cannabis sativa
tttggtaattaaaatcacatataaagtataaatgttgtctttaccttatggagatatttttgtaaataaaatatcattttatattttcaagagtaatttgcggcataaatacctaggtttatcttctagttgcaatttaatacctaagttaaaattttggcggcataaataccttctgttacactttcagatattccgtaggtaccttgctgttatcttgcacattggacaccaaatggcatgacatgtcatttaaaataataccacatcatttaaaatattaccacatcatcttattaattagccacctaatattgatcattaaagtaaaaattaagtttgtttttaaaaaaatatttacataaaatttaatttaataaatttataataaaatctgaaataaaacaattaatacaaaatcaaaaacaattaacttgaattattaactaaattctaagtaattttagataaaaaaacaaattctttaccaaataaaaaccaaaaaccctaaatctatggaactagagtcggggagagagaaaaaggtggcggctggccgttcttctccgaccacgagcagcgtcgggcaagaccttcttctccgaccacgggatgagccaataccgtcggggagagagaatgtgttgggcgagaccttcttctccgaccacggcaaccagtcatcgatggcgcccaatgctcatgagtgccatttggttctgcagaagcttcaattgagatcctccttaatg

SEQ ID NO: 157356 - DNA, 559 bp, Cannabis sativa
aggtgagcaaaagcctggcaagttaaaggctccttctttactggaacatccgcccaacttcccaactacccaagtaattcgagctcaagttgtaagtgttctagccataaccaaaagcaagggaatgggaagaaaggaaagttcactggcaaattcaaacaagctcccgaggagaaccatgccaaatacactccattcactattctgtttgaagatatagaaagtgtgtatatggcaactcagtaactggccccatataagaaccctgggcccatgaagaaagatgacatatagagtgacatgacaaagttttgtcggttccatggatactacgaccatgacaccaaggaatgttacaacttgaagtgggaaattgaattccgaataaggaaaaacaatccccatctgcaaaagtatgttaagaccaatcagggtcaaagagacgacagtaagctagatttgttgcgtccaccggtagatggacatctgcaagtcatcgttggaggcccgcacattgctggagattcgggcaaagcttgggagagggatgcccgaacag

SEQ ID NO: 157357 - DNA, 516 bp, Cannabis sativa
tctacttgagtagaagatgatggagcactagatggagttatatctgaaaacatttcctctaacactactttactttgtggcttgaatttctttatttagtcatcttcaaggaaagtgtcgtttgtaaatttgaacactttatcatcctttcgactataaaatagtccaccccttgtctccttagattttctgacaaacaagcaaacttcagttcgcgcttttagtttggcttctatttttcttaagacatgagcagggcaccccccagattctataatagcttaaaataggtatacaatcattccatagttctacgggtgtcttagggactgatttagaaggaacaacatttaaaatatcattagccatctgaatagcatatccgcagaaggacgttgacagggttgaatagctcagcttaggcttaacaatttctaaaagtgtgcaatttcttctttctacaactccattttgctgtggagtgccaggggcagtatactgcgattcaattccaag

SEQ ID NO: 157358 - DNA, 872 bp, Cannabis sativa
aattagtttttatctaatttattttaattaactagcctaaatagtttatcaagtgaatttaacttagcaatttttatttatttttggttacctcattttatgcttgtatgctcactccccagacttgtgtttgtagatgtatgctcgtgaccattggggttgcgacaaccatattgacgacgacctccttgctcatctatactcagactaccggtcacctccaaattcatctgattcgtcgtcttcacctagtcctttatgtagtagtgagtcatctggcgggtctcacgaaactacatgtcctattcatagagtgaggagattgaaaagaatccttccacattgggccttgtacttcctgcacgatggagagtgctccacccctctcgctatggcagaaatggccaatccttcctcccaagatggcccagaggaaaacgaagctcatattgctccttaaaatcctcctactcaaaagaggcggactcaacaagaggtaacgacccaacacatggtgaccaagaaacaaaggaagcggaaccagcgagaggctcaacacattgtgcctaccttagaggcgaacgaacgctatgaccctagtacttgggatcccagcatctcaattgaacgtccagacaacagtttggagttgtccgaagtgcaaagttacctctctctgtacgctcttggtgagggggtgaaggtagtctcggcgaagaaaggccaaaatgtcggctcttccccagatgattcatgtacctggacaaaataccacatcgagactagagcgaccttgccactccatgattacttttgagatgtggcgaattactttgacgtttccccggtccaaattgctcctcatgggtacc

SEQ ID NO: 157359 - DNA, 584 bp, Cannabis sativa
tgaagcttacccaaacatatttcaatctaaaacattcaaatacaagctaacattatgcatctcattattttactaactttttaaactaaaataaattaaaaactattaggataagaatatcaacaaaaaaaaaaaaaaagaaggaagcaatagtatatattcaaggtcacattttctttttggagtggttgtgatgaaatagaagaagagaaaatcaatttttgcattagggaaaaatggttgccattttcgaattggggaagaaactagggctggttagaaattggtcaatggaaagaagatgaaaggaaggttaaggggcggactgggctattttttgaccaatctcggcgggccaatataggtccgtcgttattggtaaccacgataaaaatggactggaccaataacggcgggcctatattagctcgtcgagattggtcaaattttaagttttaaaaaatagcaataacggcggacctatataggcccgctgttattgctatgctcataattttttttaaaacaaaaattcaggcctatctcgacacgcacacgcgagctcgccgagattgctcaaattt

SEQ ID NO: 157360 - DNA, 581 bp, Cannabis sativa
  modified_base (120)..(120): a, c, t, g, unknown or other
atttggataaaatttgatatattatgttccgttttgtttagggtccactcgctcaaccgccttcaagacgtgatgggtcgaagggaaaaagctcggatgctttctccacaaggcggtggngcacgggaagatgaattgttctcggaaaagaagatggtcttgatccctaaatcgctaaaatggatggttcttgaattcttgaacctcaaagataaacgtgatataatcacaattcttgtaccctgagaattcatagcaccgcgtacccagatcacgtcatctggagagtatttgcagcaggttgctacgtgtgacttcattaacaaccaggaaatgctgtttggaatgatgtatactcttctttaatctcattaaccttatatatcaaattctagtcaaattattataagacactaacactttttttggcaggcacacctaggagagcgtatgagaaaaattttcaagttttacgacccagagcttctcgtagtgtatgggaaaattgatgaagaaaagagtcagtcttttaatgctgctgcaagacgattggctaattggttatcattaatgaataacaa

SEQ ID NO: 157361 - DNA, 505 bp, Cannabis sativa
ctacttacaaggactcccttcagaatgatatcgtgaagtccaagcacgaagacaatccctacaatcatgggattgaattaaaaggatatggcaggctgtctcaatctcccattttgtgtattctaattatgtaatgaatgttccttcctattatacacattgtaagcaaaataaaaaccttccctcatgcactaagcccctataaatagtgatctaatttcactgtaaaagggatcgaaaaaattactttaaagagagatctaagataattactcagagatttcattgtaagagctttgagagagaaaacactgtgttctttgttctcgagttaatacaatctaagggaagtaggctattaccgtactaaaggggtcgaatctcttcaaaatctggtatttttttatcacttattggtttttgctctatttttattacatttctaatcgcttaataattaactcattgtcgttgactaaaagcaaggtcaacattttggtgcttt

SEQ ID NO: 157362 - DNA, 1051 bp, Cannabis sativa
  modified_base (868)..(871): a, c, t, g, unknown or other
  modified_base (1005)..(1017): a, c, t, g, unknown or other
agggtttcctaagcatttttctacggcatagtggaagttgcattcgaaatgtaaacatgcaaagataagcataaagcaaatcagaaacttactcaagattctagtgtcttggttcgagcaatggctatccaaccagaagttgcttgaaggcacttcggcgactttgaagccaagaaattttcctttcactctggagcttacttaacaaagaagggtgataaaaggagtttatgtgccaatgctgtggatatttataggcaagtcacgaaaagaggaaattgtctcaaagaaacctcagatgcctcagcttcccgccttaaaaatgaatatgtgaaatcaaaagtaatcgagtacaaccgtcagccatggagagagaaaatcagatttcgaaatattaattgttagagcatttattaatcgaaaactgaagggatgcccagtcagcttcacatcgagtcttgaacggtcacgctcgacacgtgtccccatccaaagccagaaccagctcggatgaagtctacacgcaacctcaaaggtcccgtacagacctgggggcaaatgttatcccaaattttgcgctctgatctagcatcaggggaattgtgacacgtggagtccacttggaacatctgctcgggaagataggccaagcaggatgcctcgctggcatgtctagagtaagatattcagcgatcctcgcagagcaatcaacacttagcgaattcagctttcgcatctgagtcatcagctcaatccctataactcagggatcaatttacatggatccagtatacacacaatcccactatcagtgtattcagcctcaatcccacgatccttgcatttagcattgatcccacgatctttnnnnttatacgcattgtaacgagagagggaacttcttctcctcaagcttcattcctagccctataaatagtgatgtatattcactgggtaagggatcggtcgagaagcagctaagctaagactatactattatctaannnnnnnnnnnnnagagatactgttgtaagagctacaagaaaaggaa

SEQ ID NO: 157363 - DNA, 875 bp, Cannabis sativa
  modified_base (380)..(392): a, c, t, g, unknown or other
  modified_base (844)..(850): a, c, t, g, unknown or other
cttaatataatattatatttaactaattgatatatttttatcgaataaactaaatagttaaatactattaattaattcataattaccataattaatcaaaacaataattttacaaattactattttgcccttaagaatttattttccatagaaattaattctcactcgaaatccattcatcaaataaaacttttccctgtacagtgttgtatagaggtcactcggggatcatggacctatatttcaaagctctaataaacccaagattaccatcaatctcatcgacaaattaatctggtttataaattatattattactccactataaatatggcattgcactctttgacaatatataattatatttacagaattcttannnnnnnnnnnnngatataatcaatataagtagcttgctgtccaattattagtttataattagagttggtcaaaatactattttatcattctaattatctcttgattccttatgtactattaattcaatgtgaacagttaatctataacttattatagatttggatctaacttttagcactctcagaattaatactataaggaaactaatattcgatatgttaggaaaacttggattccactattgtataatatgtttccagctactcatgttattcaggttgatgatctactaataatcataattgtgatatgataaactcttttcatagtatacggcaagtttgatgaaagatgtttattacatatcagtctagtcatgcataatctaattatacacactacctttactacatgtccatctaatatatgtgatccaagtcaaaatcacacacacacacacacnnnnnnncacacacacacactagaagtatagt

SEQ ID NO: 157364 - DNA, 615 bp, Cannabis sativa
  modified_base (568)..(588): a, c, t, g, unknown or other
aattagttgtggctgttaatgaattgacagacaacaaattacacttaaaggtaggcacatatagaacattttcaagaataagttcaagactcacagcttgctatacaataaacagtatttattcgtccaggtacctcaaaaacatcctatgaaatttggaaaggtaagcgtccaaatgtaagtcattttcatgtttttggatgtgtttgttatgtttctagagatcgtgagcatattggaaaatttgatgctaaaagtgatgttggtgttttcattagatattccttaaataatagagcctatcgtgtttacaacatgagaactcaaactgttttgaaatcagctaatgtggttgttgatgattttaaagattttatagaatttcccacagaagccgatgtagatagttttcttgatactacaccagaagcagcaaaagtagactctgatgcagtagaattgaattctgaagatgcaaatgacgaatctgccgctgaaactgatgcagtagaactagaatagcctatctcggctcatccaaacatcattatgttgggttttatgcccnnnnnnnnnnnnnnnnnnnnntaatcagatttacttattaatagagat

SEQ ID NO: 157365 - DNA, 510 bp, Cannabis sativa
tttattaaccaagaattttcaaaaatatatgaaaaagatgggtagtaaaaaaataactcaaaattttcaaagggaaatgcttcttttaaaccatctgtatctaacaaagagggaattcagtgcaaggaatgtgaaggttttgggcatattcaatccgagtgtgcaaacactttgaaaaagaataagaaaagtttcaatgttacatggagtgatgatgaaaccgaaagtgatgaagaaaattctgagaatatttccttaaattctgttataactgatgtgttgtgtgattcacaagtaaaagccagattggtatgtttaaataattccactgaacaattagaatctgattctgatgattctgaaatctgtgaagagtctcttgctgaatcgtacaaagtcatgtttgaaaagtcgattcaagttacttctgaaaatagagagttgattaaaatgaataaaaaattatctcatcaaatagaaatgtttgagttaaaaataaaagaatatgag

SEQ ID NO: 157366 - DNA, 698 bp, Cannabis sativa
aattaaattaagttttgattaatattttcatgaaattaatatgatatattatataattgaaaatattattttaaatttagtttatgttcattttagaggaaataaaatgatttttggcattgccaaagaagagataaaaaagagaaagcaataaattactacaaaataagtgaagttgacaaagtgggtaaggccacttctaggtttgaacccgtacaccacaagaggatatgcataatcaatttcatgcatcaaagttggcagccagctcgagatacgcttcatcaacataatgataattgattttgttttatctcttgtgtgaaccaaagggaaagaaaggttatcaacttcttcatttatccgcagtccaaggcctcaacatctccatcacatttgactaaatgagggaaatcaatttcgtataattagttttccatttattcaaattaattaatataagatcaaactcaattaattaggattttattttttttcattgaactgttatagcatgtcaaaatgctatatattgaggggaacttttctttgaagtgtataattttttattgccaaaaactatagtaaatttttgttttattttatctatctcttctcatattttctttttagattattgtgagaatgactagcatttttggctagtttcctagataaggtaaaggatgatcttatat

SEQ ID NO: 157367 - DNA, 580 bp, Cannabis sativa
actaagcgggctttacaaataatctctccattgtagattgtatgtgtaagtattgtaatagggatcatattgatacacttgtggcgatgtataatatagatcatagtattgttgattgtacatcgccatgtttctaaaggaagatttaaaaattaacactacaactagaagaacaagatagtaaagaaaaaactaaacatgaataataaaataaaacaatagtctccaataacggcgccaaaaatttgatatgtgtcataagccacaataaatttactaatatttattttcaatacctctaattatttttagtataattgtaagtaatagtcgatcccacgagaactgtgtttatttaattattcaaaaattagtgataaaatttagtagaaaattggggggtggttttgaggtttagagtaatatataatataaaaaaaaaaaacaaaagtaaaattgagactacgataggagaaattagttaaatattattctccacccttgacaatcattcttaattcctattaatgaatgtaatttcaatttctaatcaaactattaatcccacaaataaagctga

SEQ ID NO: 157368 - DNA, 564 bp, Cannabis sativa
aacaagcataattttgcacaaaataaatacaatcaactgaaacacacctctaaaaaaacttcataaaatgcacataaaaatagtctatcaaactcttttccaaacttaacctttactcaataatctaaaaataaatgaacacaaagcaagctttacttcaattcacaccacatcaccgctattaacaagattcaactcttataaaactagattttcaatccaattgctcccaatactaactttagctctcaaattagaaaaaggaatatgactcataattaaaataaataattgaaaatcactatacatccttgactcaatctatacaattccacaaactaattatcaataagcttgcatcatttaaccttctctaataatgtcaacaatatatgttttgaaatcaaaaagactctaatgggctttaacgtttaggcttagataaaggtagaaaaaaaatattatttaagctcacctatactataagggcccgtttggtacgcaggactggattggattaaacaggctaatttgtccaatctagtgtttgggcatgttagaagt

SEQ ID NO: 157369 - DNA, 518 bp, Cannabis sativa
aaaataagcttagaaattcaaatacaacaacctttaaaccctaacagcccctaacttccaaaattgcatatccaaaccaagtagaacttaaagaaagcaatagacaagagcttctagggtttaccttggttagaacctcctcaaattcttgctggaaaaaccaaaaaccagcagaaattcccttggttcttgctgggttcgaagagagagaagggaaagagggtgagttttatatttttggtctttttcttatttttcttcaaatgaaaagagattaactaattgatctcttgctgaaataaaatggccagctgtccacaccttaggcagccactaaatctgtcacaccaaaatgaccaaaatgcccttttacttacaacttaagcaaaataaagtctagggataaaatagtcaaaaatcataaccccgctcaaactccgtatcctatttcctccaatatatatcccactaagaaataaggttctagacttacccatgtgattaaactagccatccat

SEQ ID NO: 157370 - DNA, 604 bp, Cannabis sativa
taaaactaattaaaattaagcaaaataaacacattttcactactctcctcacaatactttagtttaaaagcataaaaattaactctataacatagagttatcacctggtcattgcttgacttcaaccaggtctcccagatgcaatggaagttggtgagaggaggagaattgtgcatagaattctaaagagaaggctttccatgaactatagttgggtggcttccgatagggtagcaggaaaaattctacaacacacatcccctcatatcccttgcaaatccatttgcatcacgaaatacttgaggtgggagagaggatcttctcttcctgtgtacattttccatgttggcattttaaacttgtggggcaacgccagaagattgatctcgggagagaaaggagttccacgtgctcggtccagctcgagatcattgtttctctgtccagccatgccttggaacatatttttcagttcgtctagctatgcttgtacggctgggctaacctgctcgacattctagtcgatttgaattacctcagtatctttctgagcgggaatttgagcacgggctccgggctatatgatcgtcgtgacaatctgatc

SEQ ID NO: 157371 - DNA, 675 bp, Cannabis sativa
gaatttatagttgagttttgtgcttgtgtttaagctcttgtgtaggtgattatgatgagttttttttctagtgttgagcttagttatgagtagtggttaaacctgaattttacgcattggggctgtaatttttgagctttaataagtgtttttgcactatgttatgttgggtattattgtggaatttaatctggtgattaagtatgtctttcgcttagtttgggtgtgtttgagcatgtaattcgaagctggaaattgggattttctgggtttgaaacccaggggccgcgacccagctctctgggcgccgcggcccgcctatgatgaaatcatgggttttaaacccaggtgctgcggccccatgtggggagtgccgcggcccgcccttcgtttttgggcagattcaaacgttactcgaatccttgtaactttgtgatccggactccgttttgggagttctatacatcgttggaaagctcgttcttagctttatgtgattatttttattttgagtgccaattttatattatgtgaaagtggatttagggattaactctatacttatgattcccataatttgtgactaggattactgacacttggttaggagcacccagggatttggaatctccacgtttgcgggacatcaggtaagacagtagttagcatgtagag

SEQ ID NO: 157372 - DNA, 717 bp, Cannabis sativa
tagatctaagatcctggtaatataatttccaacaataacaactctattttggagttgtttggcaacttattgcttattctaattggttgtatgatttttttatttgtgttcataaacatctaataaaatattttgtgatagccatggagttggtggataattttcaaatattcaaaggactatttgaactctttaaaaagtggtcactttctttttagagtgttctcatagtgttgtagagggaatggtttgttgttgggcaaagtcttttgagacttgtctgggccttgagttgttcggcaaaatcctttgagaattgaagcctttacgcatatattctgcttggaaaaagtcaaccatagcttcacaaaaattttatcccagaatatgtcagcaagtagtattgaaaaaataactaacaaacttttctggcaaggtacaaatcttgaatcaaatcaagtacattatattgagaaatatctttataataagattatatatctcaatatatatttgagttaatcttaaagttagcataaaacatgaagaaaacaatgtgagagtagttcaactacattgtgtttagaagaaattttgtctagacatattatgtgagaaagaaaaatactcaataatctttaaataaataaataaattcaaaataatatcatttcaaacttttgtaaattatggtcaagtgaaaacttgacaaatctt

SEQ ID NO: 157373 - DNA, 641 bp, Cannabis sativa
tttaggataggtcgaccaatcacatcattgtatgccgagtattggtcaattactgtgaagtcagccatcgatttagctactacgggtggagttcccaaagtgattgggtgtttgatcattctctttaatgcgatgacatctctagtaaaaccgtatctacttgatgtcacaggtcgcagatccttctcatgcaaccccatttgtttgaaggcctagaaattcaagagattcacagaacttccattgtctacgagtatgcggtggacattggtgaacggcttatctttggcttctctcgcatatcgctcccttttgaacaacttctccgaccattcgctcaagttgttcacatttgtgagcgacttatctttggcttctctcgcatatcgctcatgcgacttcctggaatctcctgcgatatggggttcgccaataatagtcaggatattgcgaggagtcctcgaagcactcgcattttgattttcatctttgtcattcgctcggagatgactttcctcatttttttttgtatttgcacaattttcctctcctgattagttctataatctcgtcctgcaaaaaccaacactccagagtagtgtgaccaatatctttggggtacttacagaattttttagggt

SEQ ID NO: 157374 - DNA, 580 bp, Cannabis sativa
ggtctaggtctcggtcaaggtcctagtccagctttaggtccttgtccgagttccacatcaagacatcgacaatgggtcttgtccaagccctggttctctaagccccggacaacatctgcatcccaatcatgggtcccagtttggtttcagttcattgtcccaagtcctagtctaggtttgggtctatgtccaggttcgagactggggactagttctaggtctcaatccaagttttaggtcccgagtcatgtttaatgttcgggtttgaatttaggtctgggttcgggtcccgagtaccggttcgggtttcgattcaggttttggacccaatcccagggtgagtttgtgtccgagtccgggtcgtggtccggttacagttttgggtctggatccatgtccttgtcctgaacctgatcttgggtctcgaccgcttctagtttcacttccaattttaagtcacgaggtacgggttcaggttttgatttgggtccagggagatgttcaggttcgggtttcggtctcaagtagggttccatgttgggtctggttccgagttcaggtccgggtcaaggtcctggtc

SEQ ID NO: 157375 - DNA, 549 bp, Cannabis sativa
  modified_base (378)..(378): a, c, t, g, unknown or other
  modified_base (509)..(521): a, c, t, g, unknown or other
ctccatggctttctgcatggcgaccatcacctcttccatctttttattttcttctttttgggctgcgatcatagcttcatgatcagcagccttttgccttaagagcagcagctctgtgtaactgccttcgtcgtaggcgtcatactcgtcaaagttctcctcgtactcgccatcgtttgcctcctctcgctcctcagaatccacgttgactcttgtggccacttcatcgtcttcaggattttgagcatcttgcgggggatggggctgacgtgtgttgcgagtttccaccattactgcttcaatttatagattgttgtctgtttgaagacgcttcctttagctctcaatgaaaacaccaaaatgttgaccgaggttttnggcaaccaattaaataatatataagaaaagctgtaggaagtttaatgcatgagattttcacgtagttggggcatcaaagagccttagtccacgagtcgttgttattaatgagagtatttattacagagaannnnnnnnnnnnntttttctcctattttctctctttgattc

SEQ ID NO: 157376 - DNA, 513 bp, Cannabis sativa
  modified_base (463)..(463): a, c, t, g, unknown or other
acttttagagttacgcaatgtgtgtcactaaaactcaattttctagtagtgctaccactctaacattactggtcctcatataaagaaccccacattcagcattgtattgttgcacccatatcgaaaacagtccagctccattcggagaagaatcactaacaaaattaacaaatatttcattgaataattacccataattaattgttttctttttcattaatcaattatttgtatttgagagtctttcttatataaaaatagacggtgagacttttacttatgtgatatttggaatgtgattagatgaaatcaatttaaatatcataaatatctagtaacaaattcggagggaggtgggatacataatttatgttggaaaattaattcttaagtaaaaagatccatacttttcctagaaaaatcattaactataaacataaaataagtgttacctccatgagtnggtgtcttttcagggccccataaatctgaatgtatataatccaatatacc

SEQ ID NO: 157377 - DNA, 657 bp, Cannabis sativa
taagagggagtctatttatgcataagttaattattttgtatttttgagagctatataatgaattttatttctgggcatggccctgtggactagtaataatttgaaaggattgttgaaaccacgtacaaaaaccttgtgtgttttttactcaactgcattgtttgtttttttggtttcttctggagttacagaattgtctactgtagctacagaaaaattattttagtatcagtttcattattctgcatttaattaggtaattaattacataataaaacaaggaatattaaaatacaaaattttaatataaataagagatcaatgtgaaatgagaattaatgataacaatcaagagaggcagatctaattgcaaaaaatcatacgtacctatgagattgagagagaagctgcatttcagctttactagtgaaggatcgatggttaatgtattatataatatttagtacgtgttagtggtgggatattaaagtttgtgagagtgtgtgattgtaactgtaaattttaagtactggggttgttgtattatatgtagggaaattctataatgtactcccttgaaagggatgtactgatgcactcttaatttatttcggcatttagaagaattttttaatctaatttttttttcatattcat

SEQ ID NO: 157378 - DNA, 608 bp, Cannabis sativa
tgttgagtactcctggtcggcattttttcttgttttctcgctcgatattcggaccaaacactcatcttgtgtgttgtcttttgtagatgaacccaagtgagttttggggaagtgaacacgaaatcgaccaagacatgcttcaactcttgcacgaggatcatcctcgtctctgttctagcccaccttcttcgagtgtaaggcattcttccttaaatattttgtccagccatagattatggctcgtaccaaaaagacaatgcgcagggttgatgcctctgaccctcaagtggctcggcacgccaccttatcgagcaccgaacaagatcccaccgtccaagaggaggaagatcatgaaggggacactgaggtccaagagattgaggagcaaaacgatgtctgtcctagcagtcccttccaggcggaggaagaggaggaggtcgcacccctaaactatgggggatacaatgaggccggggagctagttgatgctgatggcgatatcctggttgagggcgtagatgttcggttttgtgccctaaataaaacccattttaatataataagatttacttattaataaagaccagaaataatattttatgttgcat

SEQ ID NO: 157379 - DNA, 500 bp, Cannabis sativa
  modified_base (179)..(182): a, c, t, g, unknown or other
  modified_base (291)..(292): a, c, t, g, unknown or other
ttcttactgtaaacagatatgttaactagtctttttaactactcaacccttaaaaaaataaaacaaaacaaaataatcaaaacaaggcataattgacaaagtatgaatcaaaatacatctaatcacatatatgttgagattttatgccctaaataatatttcaatataatcagatttannnnttaataaaagattagaaattattttatgttgcatgattcacatgattactttcatgattatatgtttaatgcataaattctattaaattctgaacatatagttattcannattatagtgttgtctacacagtaaaaaataattatgattatacgttttaaggttctaagtcccgtgatttatcagtgcactggatttacactaatatgataatcaatgataaaatttacttacacttgtataagtggtatgtctttttcagtgtattagtaaagtgtactaatattggatgtatggagtatacattggacttgatcga

SEQ ID NO: 157380 - DNA, 595 bp, Cannabis sativa
taataatatattattatttaattaatattaaagttaaaagaataagataattagtttttgaacaattaatttgtatgattatagttgtagaatgttaaataatgtgcttatagaataaattggatcatattttaaagaaaaagaagaagttcagtttgggcggtttaaatcaaccaaatcgagattcaaaacggtcggttttaagataggttctggattggtcggtcggtttcggattgtaccaatccagaccgaaaaccaaattctggatttttatataaaaaaaaaaccgatcaaaccaactgatgctcatctctacatccaaagaagagatggtgatgtgtctccaactcctcatcacaaagtaaacaattagcattagtgattaattaagccaaacctgaacaaccgatccctagtttggagttttttccaacaagccaaccaagtaataaatttttattttggagcacttagtctatcccaaatgaagaaaaactatttcttcattgtataatcccttggccaaagcttggagcaaatatttgcgatgctaaaatgtaagctagtgaactccctcaaagccattttgctt

SEQ ID NO: 157381 - DNA, 735 bp, Cannabis sativa
  modified_base (37)..(42): a, c, t, g, unknown or other
tctttgcttaattcaagtgatttcaagcaagtttaannnnnntctagtagaggtaaaccttgttctagcttcttttctttgtttcttagatttttggaagagtttaatggtttgcatgcttagtttaagttgatgttgttgctgtgattttgttgttgtttctaaagtttaaagcatgttattttgagtagtttagagctagtttgatgcatgtgagttgccttgtttcaagcttggaagtttttactcgaaaatatagttttcaaagaaaaaaaaatgaagaatctgttgctgttgtttttgttgatgcttgttgttgatttctgcagtttctatatgcttgattatgtaattttaatcaaggtttgatgcatgatagtgttgtttaatcaagtttgagtttggtactcaaagcttgatgctttaatggtgatttttgattgtatgcatgaagctcggttttgaagctttagaaatgttccttatggtctaaatagcaggtctggaaggttttgtttgaattggattggatttgagcaagttatgaatttttgatagtatcctgcgaggaaccggaattccggttgtgcatccagaatttcggatggggttctgaaattccccgaaattctggttgggagatttttaggaaccctatattttctcgtttttatgttatttggggtatttccatgctttttatcgataggaaaacttttagtttctagtttaagt

SEQ ID NO: 157382 - DNA, 536 bp, Cannabis sativa
agattcataggtaattgggatgtcaaagaggatgccagtagagtcttgtatataagtttctggttccattagtctggctttacatgccctttcctccattgcattcaagactgcctctttttttattgctgatctctttcgaatgccctgttcctctagatctttgttcatccttgttattgttggtgtagtttcctcgaccatttcattacagatagcatgaaaattgggagttaaattgggttcttcaacacacatattcaattgattataattattaatgttaggtgttataggtaatgtacctgattgtgtgttgttgttataggtgaagtcctctctttcatttgtctggtgcaccattttgggaattgattggtgatttatttcttctaagccctctggttgtgaatttttcattgtgtcttctcttttggtggattctattttgcctatattatccacctttagccatgagccgtaagccaaagtagtttgcccatcctccttagtcaccataatcggattaattgcac

SEQ ID NO: 157383 - DNA, 749 bp, Cannabis sativa
cagggaggttattgatctttccaaggagctgactgctacaaacccctctacccctaaaactgccaagtccaaggagtctggaccaccaacgactgggtcataactagtcagaagtgatcctcaacgggtgcaggcacgaactccacctttgccagtgcttccagaggccaaaaagggcaaggagatgctagcccacgacatgaaccggctggttcctgaggtcagtgagcaactggatggtgttgataatgagtcatcgttggatatgttggtgggcggagtcttgaacgagttcaccagggtaagtcttttttgatacttccctttaactttccacacttagctcaatatgctaaagtttttcctctgtgcaggccggtctgaagttagcctacacttactcccgggctaagtctgttgcttctaagaatgcggctctgtccgacaccttgagggcggaggcagacttggccaagaaggaaactgaagaagcgagggcgaaagccgaagctgttcggttggagttgggtgaggccaataagaagctgttcgctgctgagaagaagatctctgtgctaactaaggatctcgaggctgctgaccgttttgaggagaccatagagatcttatttgctgtggtaaacagtcttcaggatgagaggacttctctgcgagcagttcttcttcggatgaaggaggagaaggactccaaggaggggagctttcggccgaggtggacaggttgaagg

SEQ ID NO: 157384 - DNA, 533 bp, Cannabis sativa
ttacatctaaatgaacaaccttcttacacaacatccaatttaattcaaagagttcatgactcaagcacacagttaaaattccaatccattgcacaagtaaccaacagtagttaaatgaatattccagctcagatatcaacacatgacactaacaataacaaagactaactaaaaaaaaaaactgaacaatttaaatctctccccccaaactaaagatgcacattgtctccaatgtgttaaaataaaattgtggttgagagagacttacttgagccccatcagaaggggtttggtggaggtggctgagcataaggattgaagcggggctgcattgcaaagtagttgggctcttccactccgacattcattcttatgattagcgtgttcaattgttgcacctgattctcatcaaaaatgctcctttgggccatataattttgaatgtgcatgttctgcttcagttgatcatgcgtgtactgcatggctgggttgagaggcccagcaatacgttgcggtacatgctcttcacgttc

SEQ ID NO: 157385 - DNA, 566 bp, Cannabis sativa
  modified_base (43)..(55): a, c, t, g, unknown or other
taaatggctataaataatttcatgattaaacataaacaactgnnnnnnnnnnnnntaactaagcgggctttacacaaaaataattcacgggttcgaagaacacttggcgacgctggagaggttggttgtccaacaaaagagtgacgaagatgacgagttcaaggcaatcgccattgtaaaaacaaaaggaatcggcaaaacgtcactctacactgtagtttttgacaacgaaaaggtgaaaaaaagattcttaccaagggtttgggtctccatgcccacaccgtcggatgaaatacaaaaagagccgcaagagagcgatagccaaacagatcttatcctcgctcggagtgggagaagaggtgagtgagttggtggtagagaatcacggcctaaaagggctcatttgtgctcttcgccaagaattgaggaagaggtatttgatcgtattggaccagtggtacggagatttgagttcgagtgaaggggatagtttggatttggtacatggatttccaaaaggctatggaggaacagtgatagtgacgagaactacagagatcttgatt

SEQ ID NO: 157386 - DNA, 610 bp, Cannabis sativa
ctatctatcatctcgacgtcttcagtttcacatatacttggctcactcagcatctctaccggaaccagatttagttcatccaggtcattccgagaggccagctttgctaaggcatcggcgttggatttatgttctcttggaatttgttcgattttaaagtaatcgaatctttccaagttttttagaactttctctaaatacttcgtcattttcaagcctttggcctggtattccccgaggacttggttcacgatcagctgcgaatcactatgacaaatgagatttttttactttcaaggcctctgctatctttaagccagcgatcaatgcttcatatttagcctcattattggatgcgtcaaattggaacctcaagtgaaacttaaagccttccgcaatattaatattacccttgcaccgaaaccctgctcgttggatgcgccatccacaaacaacttccaggtttccgtgtctcgctgatcaggtgggatttcttctggagttatactatctatcaagaagtcagctaatgcttggccctttatggatgttcaaggatggtatgttatgttgaactgccccagttcaatcgaccattttatcaatcttc

SEQ ID NO: 157387 - DNA, 504 bp, Cannabis sativa
  modified_base (459)..(469): a, c, t, g, unknown or other
ttccactatcccattctgttgtggagtcttaggtgcagagaactcatggctaatacccattttattacaaaattgagcaaatatatcgtttttaaattccttcccatgatcgcttctgacccgataaaccttgcctatggtgacattcttttcattctgaagctgcagacaaagagaggagaaggccccaacggtgtctgatttttctttaaggaagtttacccaagtatatcttgagaagtcatccacacacaccatcacatatctttttcccgcaatgcttgcagtttgcattggacccatcagatcaacatgtaataattccagtaccttggaagtaagtaaggcattgataggaggatgagaggacttaatttgtttaccttgttgacagggaccacacacacaatcttttcccaatctaaattcaggaatccctcggacagctttgatggagannnnnnnnnnnaggtctctgtagtttagatgcccaagtctgtagtg

SEQ ID NO: 157388 - DNA, 734 bp, Cannabis sativa
tgggcccacaaaactaccgagaaatagccacgggacacactcctttcttgctagcatttggctcggaagcaatgctgcctattgaagtgaatatatcgactcacagaagagatttttaaatctagaagaaaaccaggaacttttaaaattgtccttggatctacttgaggaaaaatgaactgagtcacaaatcaccaatgctgcataccaacaccgagtcacaagacacttcaacaaaagagtcaagaaaagactgttcaatgttggagacttggtgttaagacgagtttttgcaaatacgagagatgcatctgcatgagtgttcaacccaaactgggagggtccatatgtcatcgaagcagtagttggagtcggagtctataaatttgctcagtcccatggcttgctaataaaaaactactggaacatagaacatttgcgaccctactatcaataaataaatgatgtaactcgcattactgatgtaagctttaaactttagttatgaataaagagaaccatttatattaagtaatgacaaagtttcattctttaaaattacttaaggggcatttatgtatgactaaccagaattcatctggaaatacattgtataatgcaaacctgccatttcaattttttttttcaaattcaaaggttctcgactgaacctcttcgacgaaagtggagtcgaaccgttataacaacctgaccaaacctttttgacgagaaag

SEQ ID NO: 157389 - DNA, 716 bp, Cannabis sativa
  modified_base (650)..(652): a, c, t, g, unknown or other
aaaaaaaaaaaaaagtattttgaaaaaaataaaaaagccccaataaaaaatcatgttgaatacacgtgcagagcacgtgtgcctcccactagtttatctaaaaaaattattgtgtgaaacctctaaggcttcggttattttgcctttagctttttttttttttttttggccccttctgtttggagtgccttcgattgcgagatttgtcaaaagtttctgtatacgtcggttgatttggtcgggttatagcatatttttattaacccaatataaatatcgggttgtaaatatttaatcgtaacccacccaataaaaatttagaaaaagttcaacccgcccaataattttgtcggtttggtcgggttaacccgtccaaaccgttcttctttttttttttatcttttttataattgatattgttagtttctagaattgaagtaattaaatttttttaaaaaaataaaaatatattatttatatttcaagctaaaaatgatgtagtttaaattaattttaagaactttaatataagataaatataattgagtagcattacaagaaaagggaccttttatcccacttttttagttaacaaaaataaaaaatggaaaaaaagatatagtgagactttctatcccacttttagattnnnagcctcaaatatggagcaaaaaaatttttagacaagggccctgtttggtagaacgttgaaaaaa

SEQ ID NO: 157390 - DNA, 672 bp, Cannabis sativa
gtgtgggtgtgattctgggtttctagcttagaatcaagcaagttcttgaagagaacttgctctgctagggtttcgagtttgtgaggcagagtgtgtgttgtgtgtgtgctagggtttctagactcttcgatcagagtctttaaactcaaagttcaatacgacactaagtttggagtcgtggagtttgaatggttccgttttagtctaagggttaatttagacaaataaaggtctattttgaccttgatactgatattatatagttttgttggtgtagggcaaaagggtcaaaatcctacagtggtatcagagcctggtttggctaagaaggatcaacaagacttaaagaaaatatcaggaaggaattggcaagaaaatcttgaaagaaagattgacaatcaagaacaacactcaaaccagaaagaagatcaagaattttaactaaattcaaactcagaaacagaaacatcacaaactgagaatttctaaaactctatctgtttttcaaatttttattaatatgagtaatataaaggttgatattgataaatttgatggtacaggggattacagaatctggagaaggaaaattaggactctcttagctcaacagaaattactaagggtgctagatgaacctattgaatggccagaaggaacctcaaagattca

SEQ ID NO: 157391 - DNA, 595 bp, Cannabis sativa
  modified_base (182)..(182): a, c, t, g, unknown or other
ttatttgttaattaaaagactttagtaagtctaattaataaatatatttgttaattccatttttggcatatttaattgacaaaaatattctattatttactgtatattttcggctggagtgtttaaattagtgtccatattttgtgtatctaaatttaaaggaaagttgtctagctttcctntttatggaaattgaggtaaaaatattaagtttgattacacaatttattcttgtctaatcagctggcatattctaatcttgtgtgagttttccattttgttaggtcaaatttcttgaagagaaaaccgaggctaaactttccttttctataaaaggatagttatacttactgcccacgattttgtaggtacagaaatggaaattcctagaatgattgaagatttattttaggaaattttctagtgggttaaggtcttgttcagaccatgtgtaagctgtcaataaggtgtatattgattataaatacaccttatagtagctcgatttagtatctcttttgtatctttgtatttcactcatatctttagaaaagagcgtctttgttttgttgagaagagcttgttcgactcttac

SEQ ID NO: 157392 - DNA, 844 bp, Cannabis sativa
ttatagttgcattatcgttttataatagtttattattatgtaagaatttcgtttgatggttaagaagaattatcagttatacatggtaagttttatggaaaaagttacatattagttttataatagatgcaaaaaagatttgatacaaacagaactaatgaaaaacataggtttcataattggcaacaactgacttgaaatgacgaaaagatcaggagctcccaatcaatccaaatcagatataaacaataaagataaggtatattcagttgcatagtcgtttttttatgattttaaaatagaatcaagctacaaccatgttaattggagttaagttcgaagttttttcaagttgatttatagttgcatcatcatttcaatatggttttaatcaatattgcaggaatttattttgacagagaaaaaagagaaaacacttggacaaatggttagtttgtttaacaaatttaaaatatgtttcgtaatagttgcatatcagttttttcatagtttcataatagtattaaaataaaaaaaatagaagtaagtttcttttctaattcataaagatcatttctttttgttataaaaatcagtataaaaaatgttcagaaacattactaacattatcaataacaaaatcaaaacagtttcaaaatagttgtcttacactaataataatttcaaaatcacaggaaaaagaagacattccattcttagtcttttgcaatagacaacttgatgatcgaataaattatgaaaattatgaagctagtggacaatacatctcaatcgattgtaagtatgatgaattacaacagaagttgaaagaggtcctggaatg

SEQ ID NO: 157393 - DNA, 670 bp, Cannabis sativa
aagtacctgggtgttcctcttagagcaataaaatggaaggttgaggattgtgggatcataatcaaaaagattaaacaaaggctccatacttggacaactgtcttttgctggaaaagctcaattgattcattctgtgttacttgggcttcggaattattagatgagtatttttgttcttcctcatagtatcaccaaggaggtagaaaagctgtgtagaggctttctctggggtctaaacggcaacaggaacaagatccacttagcttcatggcataaagtttgccttccaaagacttatggggggcttgggttcaaagacggtatcaagtggaaccaagcaatccttgcaaaatatgtttgggctatcactaccaaaaaagatctgctttgggtcaagtgggtcaataacatttacctgaagtcttcgtgcttttggtcttataatctaaagcaagattcgagctggtattggcgtaaactttgtcacttaagacagaagtttaatcaggatgagattgtgaaagctggggcctttggtggatttagaacaaattggttgtacaacaaaagtttgaatcaaaatccagtcaattatcacaaggcagtttggagctctctaactgtgcctaaacatagattctttctgtggcaagtgatgaactctcacctt

SEQ ID NO: 157394 - DNA, 586 bp, Cannabis sativa
aagagttgtcttgttgataaagggccgcatctacatttatcttgaggttgtttgttgcaggtggtgtccataactcagccccttcatcactattactaaacgatagtgttaaaagaacgcttttgtcttgagctttcctccaatgttcaagagtaattgaagaattgaccataacttctttaacagtcggcttgtgttttttccatacaacttgatttcggcctttccacaaggcccaaaaaagtgttgctgcacgacagatgaaatcagtgtcgcaagtgtgcagcaactgctcaaaccagtagccaaacgatgaagatgaatcaaccagcacaggctgtccaaaactattccagcaggtagggctgcacacgggtcggatttttaggttttcggataatcgggttcgggttttcaaacttcgggtgtttaaaatgtgtaaccaaacccgattttcgggcggtcgggtcccacgggttagctccggtcgggttcggattaccacctgaatcaatatttacataaaaaaaaataatagtgtacagtttaaatttctggacagcactgtaaacaaaaagtaaaataa

SEQ ID NO: 157395 - DNA, 632 bp, Cannabis sativa
ccatctcacccctatgctggaaaagggaaggctgttacggctgagatatcaagtgatgatggacttctaactttctgggcgggcagtcgctctgcgctcttacttctttttcagcttcttgacttccatgctttgtattttttgctggtttttgctaaccacactgtttttgttctgtgcagacatgtctcggcagatgatcgacactttaaggaagaggctgaggagaagctctagcgcctcccctccggccaaaaagtctaagggcgcagaggggtcttcagagaagagtccttctagagaggtcattgacctttctgaggagctgactactgcaaatcctcccactcccaaatctgccaagtctaaggagtctgggccaccaacatctgggtccgagctggtcaggaggattcctgagcgggtgtaggcaccaactccgcccatgcccgtgctgcctgaggccaagaagggcaaggaggtgatggctcactacatgaaccgactggttcctgaggttggcgaccaactgcctgatgctaacgactcatctctggatgtgttggtgggcagagacttgaaggagcttaccagggttagtcttttcttttcgacacttcccttttagcttt

SEQ ID NO: 157396 - DNA, 512 bp, Cannabis sativa
atatcatttaatgcaaaaaagaataactcgttaataaaggaataatagaaaatattcataacttgctgactacatagtcttaagcaagataaggataaaaagctaatgaaacttatatcgacgagacacacacataccttggagtacatttattcaaagtaaagtgaatgtggtcatacaaagcaacctcaagtcaggattagcgagacagccacctcgcgattctaactaaagaaacttgacgaggcgaaccatcagttaacacttagcgtgttttccacattatgatagacaaggataaaaactcagggtttgatcattatttattatttctgtgatatatttattacgtaaaggctttatattttaacaaaaatctgtgttaacatatagaattcgaatctcccttatttttttgcataatttcgagcctcatagtgaaagagtacatgcctacccatagtaagttaattattcaatcatagtgtgtaagactgtgaagaatctaacac

SEQ ID NO: 157397 - DNA, 546 bp, Cannabis sativa
aaagtgtctttgcttgggttttctaatgcttatatagatgtgagagttgcttctgaaggtgtgcaggaatggcgtttcactggtgtgtatggggaatcaaataggagtaggcgtgctttcacttggaacttgttacgtactcttgctaatcgttctaatctaccatggtgtgtgatgggtgatcttaacaatgttttatctcatgatgacaaaaggggcggtaataggtatcctcattttttaatccaaggttttcaacagtctttggttgatagtggacttcaagacatggagttatgtggttatccatttacttgggagcgtgggaggggtactaatcattggattgaagtgcgtttggatagaactagctaatcttacttggttgaacatgttcacttctgctaagctccataatcttgaaattttaacttcagaccatgctccaaatcttatggtcatggttcctgctgctggccacaattttgtgaagcagtttcggtttgaaaatgcgtggttgagggaacctctttgttatcagattgt

SEQ ID NO: 157398 - DNA, 555 bp, Cannabis sativa
ttgggaagattattgtggttgaattctattaagcaggggtcaaaatgccaaaaattaagaggtgtgctcataagcctcccgagaaagatgctcgagaggctaaaaaatttgtttcacgagctgctgaaaaaaaaatatcttaattcagttcgccacaaagaattctatgtcaagcgaggaatgatagtaggagatgaggatttcggcagcatcccgccatggctaatagagaacataaagaagaggaattggttacaattgtgcgaagatccggcttctgcagtttgtcaagtagtaaaggaattctacgcaaattttctggcacatgaactgccagctgagattacggtgcgagaggttaaagtgaaattttctgacagagacatcaatcattactacttgctcaaaaatgtgacttgtgagttctctaaagatgttggtaagcttattgatgagctaatagatgggcgtggtgtgttccgtttcaaacggactgatctgaagcaagatatcaagtgtctatataatttcatgcaatccactctgctgcctacg

SEQ ID NO: 157399 - DNA, 517 bp, Cannabis sativa
ttggtacttggtcaattcaccaagaccaaaagaaaaccctccagaaaaacccatataaaggcttctaattcttcttcttctgttcttgttgctgcaccaaataacagtatagaatttttctaaaaaaaaaagtaagaagaagaagggcagattgaagaagaggacgatgaagggaatgacctttcaattttcttttgtgttaatttgttagttttaggttttggattttaattaatgatttagtttattttaatttaattaaaatatgaatattaaataattattattttattttgattttaaactatttttgttttatttttaatttttaaattgatttacaaataaaaataaaaattaaatgatctggactaatcacgtagtgacacgtggacactaacctggcacataacggccaggtacctacggatcttccacaatagtgacggaaggtatttttaccgccaaaaataagacttaggtatttatctgctactcggcataaaacttaggtatt

SEQ ID NO: 157400 - DNA, 527 bp, Cannabis sativa
ataggatgcagcccaagacctgggacataaactggaataagatcgagatccgaatctagacttgaggcttcgacctaacccgtagtaagtgtttgaatcttggatctggacccggatccgtatccagacccagacctagacccagaccgggatccaaacccgatctcagaattagaataggaatcggacaaggtcaaggactagaacgcagacctgggaagtagcaggacccaaacctaaacccaaactcagactagaacccataccgagacttggacccggatcgggacctaaacaaagaccgggacccagaaccagacccagagccagacccaaaaactggggctggacccaggacctaagaaccagactcggaccagggatctgaaactcagacccacactgggagtgcgacccaaacacaaatcaagacctgaactcagaccaagactcaagacccgaacacgaatcgaaacacaaacttggacccagatggacacctaggacctggacatagatgggggacc

SEQ ID NO: 157401 - DNA, 663 bp, Cannabis sativa
tgctccttgaggcaaagctcctgcggcttgaaccggattgaggtgaggcaaccggttcttgatccactcgtagagatgtctcaatcggatcaacttttcgatctcgtccttgagatttttgcattcattggtgctgtgcccaatgtcgttgtggtactcgcatcttttattggggtcccttcgggagctgtccttgtacaggggaggcagtctctggtagtgcgtgtttttcctggtagcaaaatacacacgctcttgggagtccgttagctccgtgtactgggtatattagggagtatacccccctttctgtcgcttatcctccatccggttgctgccttttgaggatcttttgctccgagagccttgagaaggaccggctaaacttgcggccggagcggagtgcgacggggcttgtccattcatccccgagggatttctaaagtgagaagatgcgggggccaaggcctagctttgaccatatccgggagtagaaaaaaattgtatgccgctcatcggtggagcggcacttggcaaggttcctgggagctgagctccaggtacgtatcccgctatcctggtgggatggtatcccccataggccactatttgggcctcttccaggttgatatatttttggactctcttctggaaatcttgaag

SEQ ID NO: 157402 - DNA, 704 bp, Cannabis sativa
tgggacctagaatttgattagaactcagataacgatccagactagaactcgaaaagggactaggactcagaccaggacctggaactagactacaacctgaacccatactgtcacctagacttggacccaaacttgggatccaaacccgaacctaaacttggacctagaccgagacctaggatcggaacctagaagggggacctaggccccaaactcgatcctggaacaaaacttggattaaggatccggacctagatgggggactttgacccgaaactgtgccccaaaactaggaccgagatccaaaactcgaccccaaactcgagacacgggacaaaaccatggacccgaaatgcaagacctaagtaccgggacacaaccccaaacctggacctaaatacaatcaaatgacgcggcccaagaccttggacctaaactggaataagaccgagatccgaatctagacttgaggtttcggcgtaacgcgtagtaagtgtttgaatccaagacccggacccggatctgtacccagacccggacctggacccagactgggatccaaacacgatctcgaactcggaatacgaatcaaactaggtctaggactagaacccgaacctgggaagtagcaggacccaaacctaaacccaaactcagactagaacccataccgagactaggacttggatcgggacctgtgactt

SEQ ID NO: 157403 - DNA, 529 bp, Cannabis sativa
  modified_base (88)..(108): a, c, t, g, unknown or other
  modified_base (181)..(182): a, c, t, g, unknown or other
  modified_base (317)..(319): a, c, t, g, unknown or other
tttaaagttaattttaaaaaaacacttagttaattcagatatattctagatagtaatttccaatgactaattatattttctaatattnnnnnnnnnnnnnnnnnnnnnttgaaaattaattatttattaattcgttttgtatcaacttaattaagaatttttttcctagtattaaattagnnttaataattaagtttattttatacttgattatttaattcttgtatttaatgcatttaattaaattaaaaattgaatatttaagttgatctcattcttgatacttaaatattattatttttcagaatatttaattnnntagaaaattattttaagttagaaattttaatttcaggacaacttaaatttgaataattttcaaaaatatattttatttttattttattaatcatttttttacatagattcgaaaattgcattttttttatttaaatgcagaaaattttgaattttttttgaaaaatagattaaagttgaaaattacttattttaattaattttagaccaa

SEQ ID NO: 157404 - DNA, 554 bp, Cannabis sativa
  modified_base (26)..(35): a, c, t, g, unknown or other
acttctggccaacgatgattgaagannnnnnnnnntatgttaagaagtgtgacaaatgccagaaattttcaaaggtacctcaagccccacctaacgagttaactcagatgcagagtccatggcccttttccatttggggaattgacctgatcggacagttacccaaaggtaaaggaggagtgtagtatgcagtggtagcggttgattacttcactaagtggacataagtcgaaccactcgcaaccattacatcaaagaaagttcaacactttattgtgaagaacataatctaccggttcagacttccgtacaagatagtttcagacaatggtaaatatttcgacagcgaatcattcactgacttttgtgcgaaccatggtatcatcaaaagtttctcaacagtggcccatcctccagcgaatgatcaagttgaagcagtcaacaagaccttgaaggatacattgaagaaaaaactcgaagaggccaaaggaaattggccagaagaacgtcctaaagttttatggtcatatctgacaactgagaaaatggcaact

SEQ ID NO: 157405 - DNA, 660 bp, Cannabis sativa
  modified_base (53)..(57): a, c, t, g, unknown or other
aataaaataaaatataaattattttttttttaaaaaaaaataagagatttaannnnnatttattttattataattagtttaatttctttttctttttcttaatatgtaataaataaataaatatgattgtagtacaaaaaaattattatagtcttttaatcaaaatactttttctaaaagttgggtttgagcagcttcagcttttagctgtagcttctccaaaaattcttcaaaaagctattttttaactgtttgccaaacacatttttatcaaagctttttcaaaaaataccttttagcttttccaaaagttgtgccaaacgggcccttagtaggattggcaacactggtcgaatgtataacgactgccatagtaggaggagagacaactaagatattacaagtgacccctaaatgcacctcaccaccaaaagcaggcttagtagtattaacagaatgaaaaaccatgttttgagaaatagagtgtatacctaaggtttaattcatactgatagtaaaaccaagaaattacacaaagcctctagagctatcatcagtgttagatattagatgtatattagctgtaaaagaattagatatttagtagatatttagtagatatttagtctcctaactttgtatataaatatgtattattct

SEQ ID NO: 157406 - DNA, 523 bp, Cannabis sativa
  modified_base (462)..(464): a, c, t, g, unknown or other
ctctctctctctctctctccagccagaaatgaggccaagtcgaagtcctccgccacaatttctccttagccttctccatcaccaaaggccaactcctccgccgcgatttctcctccgaatcggtatgtcatttttctcggtaccgtctgtgatctcggtcagccacgcttcctccgctgccattgttagtgtcgccgctgatgtcagtcataccaacaccagatctcgctaccaatgctgaagaggaaacagaagcccatctcacacaactcagaaagtctcatgcccaacatcacagaacgaaaaggatgaaatggtttagtttatttgttctggattgatttggcctgtagaagaagaaaataagaagaagaaagaaaaagaggggtgggtgggttggtgaatctgggttagcaatagggtttattcatctaggtttagtttcatttacttttcaaattnnnatttagtttttaatcttttatttttttaattaatgtttttgggtgattctacaatacac

SEQ ID NO: 157407 - DNA, 618 bp, Cannabis sativa
  modified_base (43)..(46): a, c, t, g, unknown or other
  modified_base (101)..(110): a, c, t, g, unknown or other
  modified_base (581)..(593): a, c, t, g, unknown or other
agttttgtcataacatttttaaatcagattattattaagtttnnnnttgacaaaaaatcagttcagggtgctatttgtacaattttagaaaatacaaggtnnnnnnnnnnatttaacaaaacagaagatccaataggtaacttgtataaaacacaaggtccaaaatggtatttatccaaataataaacaaccacactatttttcgttcttaaatttatagctattcaaggttatctttttttctcggccattcccatcggccttacctgggtttaaatgttagcttggtcagcgttgtattttgctattgtgattcaatttttacaactgcgattagtcttgtttttgtgacatgattttgagtgttttagtcttgtctctatgacataggtttggagtgttttctgtcttatctgtatgacgtgattttgtttttttttgttgttagtttcttctttgttctttgatagctcgtcattaaatcgttgttagtagttgggaataacaagctctctgcgactgaaagagttgttagtagtgcagttacgtaccttatgttggaatatattttatcaggatcnnnnnnnnnnnnnaagtatgtttttaacatcctaatat

SEQ ID NO: 157408 - DNA, 839 bp, Cannabis sativa
  modified_base (411)..(439): a, c, t, g, unknown or other
tcgaataaatggtaaagtgggcatttttagaccttaaaatcttgttttttggttttttcgaacccagtggccgcgggcaaaatccagtagagagccatccattttctcaattttgttttggccatagcttttgactcgggactccattttggacgttctttatatcgttggaaagatcgttccgagctctgtatgattatctatattttgaataccaattttatattatgtgaaattggaattagagattaaccctatatgtgtaaatcccagaatttgagattaggattaccgacacttggtgaggagcacccggggattcggaatctcttctattgtttaacatcaggtaagacattagttagcatgtagattatgcgcggtggtgcttatattggaaatgatatatgnnnnnnnnnnnnnnnnnnnnnnnnnnnnnttaccctaacatgagcggtttatcagcctaaggttattaccttagtgatataatatgtgtatatgctatgccatattaattatatgaatatgttaagatttagggatatgtgtgcaaggcataacctggttggacttggtaactagaaccgagatgaaccattctaaggccttattgtaattagacgttttagcgtaacaggtaggtctatgccacatagacataaataggcgtgtgagcataacacgcagtctgtgtcatacagacaaatatgaaatggaattattactatgtgatgagttaattataattattaatatattgtactgtcttgttgggcctttgcgcacgggtgctctactgtgcaggaagggtaaatctgtctctgatcagccatgag

SEQ ID NO: 157409 - DNA, 627 bp, Cannabis sativa
  modified_base (393)..(398): a, c, t, g, unknown or other
  modified_base (547)..(547): a, c, t, g, unknown or other
  modified_base (581)..(581): a, c, t, g, unknown or other
agccgttggtggtccagactcctcaaaaagatcaataacctcccttgaaggtctcttttcctttgaagaggacccctcaccacccttagacttcttggctgaaggagaggcactagagcatccgcccattctcttcctcagagcgtcgagcatctgttcagacatgtctgcacaaaacaaaaacagtatggttagaagacagctatcagaaaaacaaagcatgaaaatcaagaagctcaagaaccaaaataaagtaaaatgcaaggtgaccacccgcacaagactcagaagtccatcatcacttgacatcgctcttatctcaggcatgacagccttcccctttccaaacataagaggagatggctgagcaggtgaaatgggctcccttatgcnnnnnncatgttcaacaggcctgggcgaggtcgagagtttcttcttcctctttagtggagtcacctgttcttcctcaacttcatctttaggattcaaaggctcccaagcatattgcttggccctggcactacccttgtaaagcccgcttagttantttggaaattagcagttgtttatgattaattatnaaattatttatagctatttaaattatttattatactgttatttatg

SEQ ID NO: 157410 - DNA, 615 bp, Cannabis sativa
agcttaaagtataagataaattaaaaataaattaatattttcatgaaattaataagatatatttttatgttgaaaatatttaatttagatttaaattattgccttttttatagtaggaaataaaattattgggagttttgaaaagaaatgaagaattgaataaaaaggaatgtttttacaaaaaaaaggatcagattttcgacctcggagaagcccactcacgcgagccccacattccccattcgagccgtccgttccttgataaaagggcccaaacgcgcgcgtgtcgttcaccaccagagagagtcgcatgagcgccttcttcctctaccgccggccagtcccaacagcacgcatgggacccgcctgttccccacactagccatcacatgagcgacaactgtccgctcctccttccatctgagttttgccagcctctccatgcgtgacacttgtctgcacctccttcaagcttctttccagcagcctccccatgtgcgccaagtgtcgtctcctccttccatctgcgagtttgtaaattgttttaaaatgcaatttcaaaatactaacttttgccatttttttacaaaaatactaccaggcggtattttttac

SEQ ID NO: 157411 - DNA, 586 bp, Cannabis sativa
tcaacctcaatttgaaacttggatctggacccgagacaccgatcttggaccctttacaccgacctcggacgcagaccctaatccaagatgcgaaccctaatcccgtctcgggcctaattcggaccttaacctcaaccctggacttggatatctgtacctgtacccagacccagacctggactgggcatcggcccccactccgacacaactccctacctcaaaccatttctaaatagggaaactatcatgtatacatcatttttcatttatacatttttttcagattttttttttcatttttataaaagttgttattttgaggttgtgctgattccatttcaaggttatgctgtttctattctataaaagttatttccattttgaggttatgcttattatattttgaggttatgttgtttccatttttataaatgaataaaaaatcaattataaaaatataaacaaaaaaactacttctaaatattataatacaagctaatacaaaactatattttatgtattaaataatatgatttgtattgtattaaaatttataattataataattagggaaaaaaacaaaaaa

SEQ ID NO: 157412 - DNA, 604 bp, Cannabis sativa
  modified_base (266)..(269): a, c, t, g, unknown or other
ctcgcactcggttccagcaagttccgacatatcaccgccaccccctcactcttgatctctgggataaagctctgaagcttgctcgactgccaggggaagattggagtatcatccagttgacctccgtggataattttgtgaagtacgggctctatccaaaagacttcatgcccaaactagagaaggggaggaagaggaaatctgatgctggactggctgaacgagctaatcagaaggatgaactcattcaacttaagcgtgaagcnnnnttgaagggaggtgcaagggcaaagaagtatgctcgggagcccttgaatcctgaagacgaggatgaggaagagcaggtgactccgctcaagaggagagagaaactttcggccccgccgaggcctgttgaacatgcaatccgcatttgggagcccatctcgcctgctcggccgccctcttccgtgcttggaaaagagaaagctattatgtccgaaagaagaggcatgtcaggtgatgatggacgtttgaggcttgttcgggcaatcacattgtatattacttcatctccttttttagcttcttgactattatgcctcctgtttttaatgtctgtttt

SEQ ID NO: 157413 - DNA, 632 bp, Cannabis sativa
ttttagtgttttattttagtcaagattttaatattatcacgctttttaataattaattattctactagtattaaactaatttataaaatcacacacgcggtgtccctatagatttgggcattacaatggatcactttctttggtagaataatgatctgactccaatatgagtgtatggttagaagcacagaattaacaagtattcctctccctgcaaatgataagtttctggagctccatacctttattcttgctgtcattttatcggctaggatggcacatttcttccttaaaattcttttagagcatatagggattccaaggtaggtgaaaggcaagttatgaactgaaaagccagatgcttttacaatctggttcagctcagttttagacatgttactactgtagataactgatttggagggatttggttgtaggcctgaagttattgagaatagcttgaggccatgtagcatgtagagaacacttttgaaatctccattgcagaagagaagcacatcatctgcaaaagcaagatgattcaatttaattctagcacacttgtgatggaatttaaagtcttgtttctctctcccacttttcccattattcttgagagatattccatgcct

SEQ ID NO: 157414 - DNA, 664 bp, Cannabis sativa
ggcgttacaaaagtccgcttccctcgaacttaaattttgggtttctcattcattgtaagggtgttataacatccaagccccgccttgagcatagcaggttgggcctatgcctagggcctacttagcctagcaacccaaattattttttattaaaattaaacattttttaatggtttcaaaaaaatacacattttattataaataagagtctaaaaatattttttttagattattttataaatacataaaaacaacaaaaaaattacaaaaatatgatttcacaaaattttaaatatttttataatttttttaattttatttacagaaaatacagtttttttatgttgtactcttattaattattgttaattttttgttacgtttacgatattttttgttattattttgatgttacttttatgttttttttttttttggttgttttcgtgttgtttatataaaaaatcgtaaatatatataaaaaaaaaattaaacgtaaaaaaataattttttgacgaaaaataatgtctttatcttatttttatttttttctataaccctctaatatcatgtccgactttggttatatttttctatttatataaatatatatataattgaataaatatgtaaaaaatcaataggtagggtaatttgtttaaat

SEQ ID NO: 157415 - DNA, 639 bp, Cannabis sativa
aggcgaaagctgaacaggagtgaacctgagctcggatggattgtacatgtccaagcagtgcgacctgtaatatgtgtattttggaatattaacttttaaaagtttgaaaacgggaacccgacacttgtaaatattttattatattataaagtttattatttaatataaaatttttaatttgacacgtttttcgagaaaaattctttaattgaaaaagcaattgaaaaagcactgaaaaagcactgtagcaaagcactgtagcatactgtagcatgcctttagcatgccttagcattagggcgttacacaaagattgagacaaaatcgaattctttctatagaaagacaagatggcagcagagttcatgaactaaaccttattactgaagcttttctagacttctataggggtttacttggtactagacttgagcataggaggcaggtggagagttgtatagtaaacacaggtcccaaggtgtccccaagacaagcagaaggcctcttacagaactttttcaaagaagagatcaagcaggctgtcttcagtattcctgtgaacaaatcccctggccctaatggtttctcaagcagctttttccaagataattgggagatgattggagatgatatatgtgg

SEQ ID NO: 157416 - DNA, 562 bp, Cannabis sativa
ccgttgccggggaattgtgtaaagattaatattacacaaaaattatactaacttctactttggtatttttttttcttgctgaatatctaacctttttcttgcaaaactgttcttatttatttcaggtattttaagtgcatgcgccgccaagggcaagcagttgtagtacccgctgaccctgaaatcgagagaacttgtaggaagaaccgaaagaacaagaagcaagaaagagttttagcaactgctgaaacatcagaaatcatggctgccaatgtgaataataacgctggaaataatggaggtaataacggtaataatggaggtgccgttgaagatcaagctaatggccgtagcttgagagattatatcctccctactcttacaggggctctgtcatgtatcaggccaccagccgtggaggctaacaactttgaaatcaagcctgtcatactccaaattgtgcagtcgtcagtctagtttggtggactaccttctgaagaccccaatctgcatctatcaaacttcatagaattgtgctagactttcaaagtaaatggggtta

SEQ ID NO: 157417 - DNA, 590 bp, Cannabis sativa
caacagactctgtcatgcatccaaatgcgccctcagcttgcagtgcgttatccaccatctcagcataggttgttctgtcatcagtagtgatcatcaaatcatgtctgctttttgcatttaacccctccagatacttctcttttttactgaaatcggttggcacaattcttgaagccaaccttgccaaatgatcaaactgagtcgtatattcagtaacactcatattttctttttgagtcatatgagtgaattctttttgttggcacttctgactgcctcattatagtacctggcattgaatctcctgaaatttctcctaagtaatagttgtcacatcatgaatcatggacaccatgtcccaccaaattaaagcgtcttcttaaaattggaaagtggcactgaccactctatcatttctagtgacggccatgaaattcaatatcctggtgatcacagttagccattgctcgactttcataacatcggggcctcccaagaaaactggaggtgcctgcttacaaaacctttcatataggggtttcatccggttcgttgccataaccggttcggcctgcacagtaggggcgggg

SEQ ID NO: 157418 - DNA, 814 bp, Cannabis sativa
aattataaagtttaatgtttattacaaaagttttaatttgacacgttttctgagaaaaatctttgattagcaaagatagcactataattgaaaaagattgtagcgtgccttagcattagggcgttacatttcttatctgcataaaagctcagcaaccttgtgaggtaatccattatcaagacaaagagtaatggggacatagggtctccttgacgaagaccctttttccccttgaaggtatcttggaatctaccattaatcatcagatggtaagtggtaccggtaccccttagacaagtcattatccacatgatgaatctagagggaaaatacagcatcctaagtaaatctttcacaaactcccagtcaaccgtgtcataagccttgctgagatcaactttcatgatgcatcttgcagagacattcttcctggtataaccttttagtagatcctaaaataccatgatgttatgggccagcaatctattcttaatgaatgcaccttggttatcactcacaattgagggaagaacttctgaaagtctagaacagatcatcttcaaaatacacttataaacagtattacaacaggtaataggtatgtaatcgttagctaaagtaggattagcaactttggggaccaaagaaataacagtctcgttcaaggttttaggcaacttgccgttagcaaagaaatccaataccgctctagaaacatcataaccaattttactccataaatccttgtaaaactcagacccaaacccatccaatcctgggctcttagtaaagtgaatgctgaaaagagctttct

SEQ ID NO: 157419 - DNA, 612 bp, Cannabis sativa
  modified_base (58)..(61): a, c, t, g, unknown or other
cggagggccagcggaaacaagatgtcaaggcaaccgacattgcactgttgttcaacannnnggtatgtttctttactgttctgtatttttttttcctaaagaaagctaattttatagttgaatttattgaaaatgtacattcgcgacattgttcacgacatgctcgcaacactatgcgatgtcgtaaatgctttgcttatcgcgacatttgtcgcgacatgctgtcgacatgtcgcgacattgtgctgctgtttgcgatgatcataatttttgacttcttttcatagtttttaattattctgtgttttcttttttgttttgcagttggtggtgaagaagtgcttgtttccccggcccagtggagaggcatacttcaagagtattaatgagggtaaaacccctctttgtttttagatggatgtggaacaaacggtggacgttgatggtacacaggagtctgtgtttgaaactcaagccaagaccatcaatgaggccgtcataaaggcaaatttagttccaccaccaccggcacctgaagtacacgagccatctacttcagtcgctccttctgctccaaccagtacaactgtggacaatgaccttgcaaagagg

SEQ ID NO: 157420 - DNA, 892 bp, Cannabis sativa
cttattcagatcggagaagtcaatacaagttctccaagtttccttaggtttctaaacgagaacaggattggctatccacgagaaataaaatacctcgtgtataaaattattgactaacaacttgtcaacttcctatttcagtgtcccttgcctcttgaaatccaagagcctccttttttgtctcttctccgggtagtttggatcaacatttaagtgatggcagataatcttagggtcgatccctatcatatccccataactccaggcgaattgatcctggttcgccttcaaaaagcttattaattgctatttgagctgctcgtcaaggttcttcccaatgtatatacatttagtgggatttcttgggtcgagaataacctccgccaattcttcaattggttttagcaggtttctttcatcttgaactcgtggatcaagatcttcatctttcttcttgttttctcctgccaagatcgtcatcagctcttgaccgacctttttatgctgcaactctatacgatagcaattgcgagccaacatctggttgccatgcaccactcccaaaccatctggtgcttggaactttgaagacagctgcttgatcgagctaactgcccctagcccgatcagtgctggacgacccatcagtatgttgtaagccgaaggcaggtcgacaaccaagaagtcttgcataacagtggcagttaaaggtacctcgcctacagttaatgcgagctcaattacgccaaggctagcaatgctatccccggtgaatctgcaaagattcacaaaacaaggccttaacttagccttttcgagctccattttctttagagtctccttataaatgatatttaccgagctcccattatctattaacactctcttgatc

SEQ ID NO: 157421 - DNA, 547 bp, Cannabis sativa
atactttttcttatatcagaggccaagtgatccgagccatcagttgcgaacttatccttaattagatgggcaactatcaaaggtgatgcttgacggacttattaccgctcttacggacttaaaggcataacacttaaaataaataattaaaatttaatatgcttcctagcatgctttaataatcatttaaaacactaaacaagtacgagcttagtgaaccgtgaaccgagctttctataatgaagattgtacatgtcttggaaagtttcagtagacaaacctggcggctctgatactaaaattataatgccctaatgctaagccacgctacagtgctttttcaattacagtgaaatctttgctaatcaaagaattttcttgaaaaacttgtcaaattaaaacttttatattaaatattaaactttatattatatcaaaaattttacaagtgtcgggatcccgttttcaaacttctaaaatatcatataccaaaatacatattaatcaggtcgcacagcgactacaaaatacaactcccagatgtccc

SEQ ID NO: 157422 - DNA, 505 bp, Cannabis sativa
ataagccatatttgttgaaacatctatttcaggctaagggtcatattataaattttatggcttttatacaaactaaaaagttgaaaaatatgagaaaattacataaggggtaaccataggagaagtgtatattggcaacagatatttttttctgtggtgatcacaactctgataagttttctagcaggattacaattttgaatttttggagaaatgaattatttaggctatgtaggaaaaaaatgtgtagagaacaaaaaaaaaaaaaaatcaatttttcatatatggtatattttgttaaattggatatataatttttttccacgaaaatttatagtttttctttaattttttttctacatttttcttacttttttttcttttttcaaatataaaggaataatagaactaataactcaggaaaatcctacaatgcacacccttcaaatagatgtattgatgaacccttatcttattttagcacccgaaataattttttagtcaa

SEQ ID NO: 157423 - DNA, 635 bp, Cannabis sativa
gccaggagtaggccttagaaccagctcctcaactcgtcctccaaggccaccaacagcaactcccagtactggcatcaatgataagatcccacctggggagccacgtgtggagatagaagaccctgaggagaccgatcctcatgtagctcagctcagccaaattgtggctcacttacagcaacaactacgagactctcttgataagcaacatgaacggtttccacattagttcgtggaaaatcagaagaacattgagagctaacacgttgagcaagaatagtggagagctaacctgtctcgacagattagagaagcttatcgctctaatcatggaactgcttcccgtagatgtattttcgagttggtgagaaagacaccctgttgaccaactggtcatgtgggaactagtgtccaaggcaaaaccttgaatactcagaacaccaccactacacctggtaactgagtaggaactaggtaaacaccaagagtggagaactcttgtaaggaaagtaccttcgatctaaagctcgaaaggactcaagctcaaggcaccaaccaataggtcctccacctgatgtttaacgacctcgtaacaacgagagaaccaacaagactcctccaccaagtccttctca

SEQ ID NO: 157424 - DNA, 871 bp, Cannabis sativa
cttatccaagttcaatatcgattccatctgatgcatactccatacatccaactaaatcttactttaaccaatgccctggaaaggacatagtacttttccaaggtgcaagaaaattacattgtagattatcatattagttaaatcatatgtactgatagattattggaattcatttaatcacataatcttgattacttttcactttgttgacatcacaataaaaaagaatatcaatgtgataagaatttggatgaatttataaattaaataaatgatcatgaaataagcatgtgaaccaaaatattacattaaacaagtaatgaaataaattttattgataaaggaatattcaagattacatattgaaatagacttttatttagggcacaaaatccaacaccaactgccataggctatttgggatgcgtagaacgcaaaaaaagacccaagttcaacaaaaattacctcaaacgaacaaccagatcaaacgttattcatgtttaaactttttgaaaaactttatgcatagtttggtctttctcttattttatccattcatttcgtatctttacttattttttttattgtattggtcttgaaaatattatatgaaaatgagtggtcacattgcataattggttaagaaataaaaagaattatgccatttcaaacctactaactgccctctactcaatttagttttttcgcacccatagtttaggtcattctcttatttttttttcgttctttttttcatcatttcattgcttctaacttgttttttttattctattaaaactttagtacaaagttcctttttgatgtctcgtatacacatcattatttggtatgaggtatgttcctttataag

SEQ ID NO: 157425 - DNA, 634 bp, Cannabis sativa
  modified_base (311)..(326): a, c, t, g, unknown or other
  modified_base (584)..(588): a, c, t, g, unknown or other
cataatatataacatgtatataagttatatatattatatatatgttgaacatataataatatatatttatgatgaaaatatttatgtatgtaatatatataatatatatcatgtggagataatatatattattatgatgagtatatgttatatgagatgatatagtattataatagtaacatacataatatattacttagcataaaatttgggagttataattttatgcatgagagttatatatattattggtatatgataatatatgagtaactaattatatttagtgtatataataataataataatannnnnnnnnnnnnnnntaataataataataattgtgataataatagaaaagatatattcatcattttttgaatggagtttcggaattatttttccattagtgattttatctcattttatgagatgagaaaatgaactatgagacttactctttttttggtttatcttgccaaagagtaaatagatcaaagtggatccaaacttgtaaaatgaatcataataggaagagcaattttagactcaaatcaaagtgaatcatggtggattcaaaaatnnnnnaaagataacaaaattggagaagcaattttgaatcttaaataatcaa

SEQ ID NO: 157426 - DNA, 835 bp, Cannabis sativa
  modified_base (796)..(798): a, c, t, g, unknown or other
ttgggcttgggccttacttggtagggtttgggtgaaaagaagctcctccccaccatcttcttcttcaaccgtccagcttgtgcggctgtccaagtcttcacgctctgaatctccggcaaaaccaccagcgacctcgtctctctcctctccgtctccggcgaagacctccgcggttggttcggctccgtccccgccagcgacgtgatcggccatggcaccaccagcgacaccaccaacgattcttcttcctccgccgctagcactaaccgcggttcttctttcttctccggcgtcgacttcatcggcgttttcttctttggccgtgtgtcttcttctcctccaacattccgattcatctctaatgccgttcgttgctgttgtgcgagcgaaccccatgggccaacttccagatccggcaccgtctcccacaagtctttctgctcagacgactctaccagcagccgcacctcttccttcctctttttaggcggcgaatctcgttgctgatttttctctagccatttatcttcatctccatcggagatgatcttcgcaacatcgaaaatctcaggtgatgccgccgaaggcagagagtcttcatttaggaactccgattgtattgctgcctgctgtttgtgtttgctgaaactgtcgagtctagcaaaggctcgtttgtgttcccgtattgccatttccatctttttatcacattcaatctccgtctctagtggtgaaggagatccagaaagtagattcggcgcgtagcagttccgtattccttcttgtttgcgaaccnnnacagattgcacagcttggtggatccactcattgagat

SEQ ID NO: 157427 - DNA, 878 bp, Cannabis sativa
agaagtaaggtttaagatcctgtatgcagggatgcagggaatatggagtggtatgagcctcctcaagaatttcgtttctaagatccacactatctggaatacaaaccctggctttaaacaataacatcccactgtctgacactgtaaaatccctggcttgactagctgaaacctcttctctgatctttactaactctggatcagtcatctgagcgactttaattcgttctaacagatcagattgcagcgtcaagttgtgaagttttcctacaacaaactcgatgctagatctgaccatatcctctgctaactgaggtgaaatctgaatcatactagctacctgtccgggacccttcatgctcagggcatcgaccactacattagccttcccaaggcggtaaaggatctcacaattgtaacccttaaccaattccaaccaacgcctttgtctcatattcaaatctttctgggtaaagaaatatttgagacttttatagtcggtataaatttcacatctctctccgtagagataataccgccaaattttcaaagcaaacactaccgcggccaattctaagtcatgagtcggatatcgctgctcataatctttcaactgatgggaggcataagcgatagtccaatcggcttgtgatgttacgcccaaattgtgacttccactagcggtggttgtagtatagatcaggcggtcgattcaacaaggaggtgattatagacaaaaacgttagtagagaaatagaaacaaaagattaataaatagtgataatagtaaccaatgattttgtgatttttgttttggtaataaatattaaaaagaagtaaataaaggtgtaatgaatagtaaaagaaagaaaggcttc

SEQ ID NO: 157428 - DNA, 1027 bp, Cannabis sativa
cacccagattttaagatggtgtaaccgcacgaccctaggaacgtcacctggcttcaatctctcaaaaatcagaggggcatttttgaatgtccatggactccgatcaacaaccctctgaacatctatctcgtgatagaactgaaatataaatttattttcccccaaatccttcacatacatacccattcctggtttccaaagaaccgccattaagttctgcatcgccatgaaatcgaaaggagtttctgttaagaaccggccgacaaggctccatctcgtatcaacctcagtatcctccaccaacagtcgtccatactggactgccgcctcctcctcctcatccaacggaatcatcgaaaagtgatcctgaacataatcaatcgaattgtatgacgtagacattcttccaataaaacaatcgaacaaaaataacaaacatcaactactagttattcaaaaaaaaaaaagcatcaactagatactagttgtagctccaatgctctattctataatctattggttcaggtctttatttattgcactagactcttttgatatctactttgtagtttggtcaattggcaagagaagtgatcctactcatgatttctatttaaacgactttttctcttttgaaagacaagtatttcaagtttaagtccattatattaaatatggattagtttactatcgttatttcacattatctatttcattatatagtgtggtaatagattttattttttgctattttgtaggttattttgtggagggcgcctacaattacagagaatttctgataattctaattctaaccttaatttgtttgatattgtttttcaatatttttatattagggtgctagtttgttgttactagccaaagggtaatacctttggctagttagtcttagaaatctgttgattttttagttttttagaatttgttgatagctagagttataaagtgtgtgttaatttctaaatttatatattattttattttgaagattatcattctaatataa

SEQ ID NO: 157429 - DNA, 774 bp, Cannabis sativa
gacccagcaagctcacagacactggatccgatgttgcaggacccagggagttcaagggttccacccgctgtcaatctcagacaaacgggaagcgtggtgaatggtgggagaaatcctgttactgaaattgcgcctcgtgtgcaagagactggaaacaacggttccgcacacagccaggccgttcataacacaactattccaccaggcatcaacgcccaaacgaccatcggagacgcaaccaaatatcaaaacctccgcgctgcgctcggactcatgcagggtcatagcaataccctgcatcacgatcaggaggaattacgtgccgcagtaaacctcgtgtttgacgaacagaggtgcatgttcgccgagtagagggacaaagagatggaggcattaagggatcaccatgcaaaaatcgaagatcgtagtgggcaagctactgtgctgatacgaagagcctatcagactgtaggccagcaaacgccgagcgtcatccccctgggggaaacaaaggatgacccgatggtgaatgcctcctagacaaccaacggttacccgtccaatccccagtcacgagttccactcgtgggccaaaaggtaggcggacagaccttgtctgggaattcatcaggaggggccatgctcgacggatccacgcagaataattgagccattccatctgtcaaccaagcgaaccaatcgctaaggcagctaggttcttctgtgttcgataggttcggaacaacccatgacctaagggacgatctaaacaga

SEQ ID NO: 157430 - DNA, 598 bp, Cannabis sativa
atacgtacgacaccaaatatattactctacattttttatttatttttgtatataatattggaaatttaaatctttatatttgttttggtagatctttattacctattttaatatttaaaaaaaaatagtttaattatttaatgatcgcttgtagtcagtgacgtactcacgatttttactttgtgagggctaatttatcataaaaaaatatttatagttacattataatcacttttactaaatttatttaattttgtgggggtttttctactattttggcctataattattaaataaaaaaatttacatttaattttttaaaaggcaatattttcattcgtgggggctatagcccccacatcaatcttaatgggtctgtccctgcttgtagttatttaagattatttataaattttaaaaaataattttgaatagtttacagtgctaaaaataaaatttatacagttattatttgaaattttgtattttaatattcccagtttaattatttaattatgtgattaattaaatgtggaattaggggtgaaaatcggtcggttatgatcggtttttacaattttataaccgaccggtcggt

SEQ ID NO: 157431 - DNA, 534 bp, Cannabis sativa
gatttcaaaagggtctttaatgagaaatattataactcagcagtgttagcagcaaaggttgatgaatttactagattaacctaagggagccttattgttactgagtatgcacaaaaatttgatagactgaaaaatttgctccaaatttggtacctactgatagagtgcaagcacatcgatttatggaatgtctaaaaccaatgattgctcgggatgtagaaattgtgtcaaggggtcaattcaattatgcttaattgtccaaatggcttttacagctaagtgaagtgaaaacaaaatttggaaggaaaatgctgctaggagggaatctaagaaaggcggaaccaattttaatgacaataagaaaaaggaacaagatcaggccggacagtcaagtcaagacaagaggtacaaagctgagaatgaccgccgatctaatggaaacaatggacgcaacgttccaaaatgtcctaaatgtaccaaacgtcatctcagagagtgtagggcaaatgcatgttacaaatgtggaaaagaagg

SEQ ID NO: 157432 - DNA, 642 bp, Cannabis sativa
atgaacaccttaggttgcgctcaacaactatcaacacctaaacgatttttatatccaaaaccactggttgttaaggataggtttattcgactacctaatagggccagcgaattcttcgagaaccttccctgtccattcggacattgaaagcccctacagtgcatacttttgcgtattcggatccatactccatactttcgtgtccattccattgttccatataaccaagtagttgaatcaatggttatggtaatctcgtagccgatcaagctagttttttcgcagattttgataaatcatcaatgctttgttaaagtgagcatgaccaccttatgttgcgctcaacaattatctacacctaaacgatttttatatccaaacctagttggtgttaaggatagatttcttccacgagcaagtagggccagcaaattcttaaagaaccttgcatgtccattcggacattgaaagacactacagtgcataattttgcaaattctgatccgtcctccatacttcctcgtccattccattgttccatttagcaaagttgtcgcatcaatggttatagtgatctcgtagccgatcaatctagtacctcgcatattgtgatcaatcatccatgttttgttaaggtgagca

SEQ ID NO: 157433 - DNA, 516 bp, Cannabis sativa
tatttctttcacatatctctttctttcacatatctcttttggtttcacatatctcttttgggcgttattgctttcccctacaatatgtggccctactgaaataaccacgatgtcctctccttcaataaaaagaggttgtaacccctagttgttcgagttactgggcagactgggctggttgtgtccatggccctgtctcttcacgtactgtttaaagtggcctcaagcgatgagaatttctatctcatcttttaattggtgacattcatcggtcgtgtgcccgatatccttatggaatttacattacctgttaggatctctttttttcctcgcgttcctcatgggctcgggcttgccgaaggcaacctttcgctcaagtgcgaggtaaatattttcccgagtttcattatgctcggtataaatagtatacactggcacgtacttatcatgcttcttttgttttttttatcctttgacggtttcttagaaccgtcctttctcttcgagccagaagcc

SEQ ID NO: 157434 - DNA, 509 bp, Cannabis sativa
tgtatgaatccactgtcgtcccaacaagagatggtatgaagtgtctgcttctatcacatggaaccgagtgggtcctctgattggtccaacctctagttcaacagttacatgccccatggttttttcagacttagcagcaaatccagtgagtgtgattaattgcgggatgaaccccctcttacttcttttatagcagaatatattccaagtggcatgagatttattgaagctccattatctaccaaaacatgtttaattttcaggccattgatctttgcctcgacatataacggtcgattgtgaaggaaaggaggcgtttgtttgtcagcattggtgaaaacaattgctccttcagattttttagcaatattatgcattgggcgccccaccatataacaagaagggccgtgttgttgggaaattttacgcgaaacttctgtagcctcagttcttgcatctttcccaaattctaagcaatcaaagaagttacgaaacaatttagtttttaa

SEQ ID NO: 157435 - DNA, 608 bp, Cannabis sativa
aattttaaaatggatatggttaggcaattattattttaagaataaaataataaacagataataaatatcccaattatgtgtcaaaatatctcaaattaagcctttttccaatttttacaaatatcaggttatttaaatattttaaatatcatttataaatgtctgataagtaaaatgaaataaaatatcttttttctaacttctaatttataaacaataaaatatttaataaaataacctatttttgaatttgaaaatattatggttagaatatctataaaaatatctaggttaattttaaattataattatttaatttatcttataagataactttaatataatatttcaaattaaaaggataatgcaatcttttaatttataatatacccaatattaaaatacctaatcttataattaaataatatataaatactaacaaattaataaattttaaaaatctgacgataataaaaaataaaataatcaatttttaaattaaaaccccaaaatataaaaatttaataataatctatttaaaaattaaatattattaatttaaaattttgatattaaattttaaatattaaaaagaatattttatttta

SEQ ID NO: 157436 - DNA, 511 bp, Cannabis sativa
atagatccctattttcttttctaaataagtgctctcatgaaaggactgttcgcatagctgatggttcgtcttctagaattgatggaattggaactataacaatctcacaaagtcttatcttaaattctgtcctttacgttccaaagcttgattgcaatttactttctataagaaaattgagtagtgatcttaattgtgaagttaagtttgctgctaagttttgtgtttttcaggatgtggaattggggaagatgattggctatgctgagttcagtaagggcttgtatctgctaaaaattgacaaccccatgtttaatcatggaaatcgttgttgtttctcccaaggtcaatctctttcctcagtaaatcaatccaataaaatcgatactaccatgttatggcattaccttctaggtcatccaaattttgtatatcttaaacacttgttcccatccctatttgtcaatataaatcctcagtctctcaagtgtgatatttgtcaattttctaa

SEQ ID NO: 157437 - DNA, 650 bp, Cannabis sativa
  modified_base (456)..(458): a, c, t, g, unknown or other
gttcgagttcgggtcggggtttgagtcctagtccgagtttgggtttgggtctggatcgcggtctagttcggattggggtccaggtgtttgttcgagtgctggttttagatctggttctgggttccgcggcctaggtccctggtctaggtcccccatccaagtccggttcctaggtctagtctgggttctgttctaggtctcggtccctttcttggtctaggttcaggttcgggtcctggtcaaggtctggatcctggtctaggtcgcgtgtctcaggtcccggcaagggtttaagaccaggtttggtccaggtcctagtcctggtcgtggtccaggttctggtctgcgtttgggttcagttctagtccaggtccgggtctcaagttcgagacttagttgcagttttgggtctcgatcccaattctgtgtccccgagtcttgttccatgtttgggtnnnagttcaggtttgggttcgggtctcaagtcctagttcaggtttggattaaggtttcgaacccaatctcaaggtgggtctgtgtccttgtcttggtcctcgtccggttacagttttgggtctgggttcaggtcctagtcctagtcctgctcctgggtcccgatttgcttctagtttcggttacagtttcaagtc

SEQ ID NO: 157438 - DNA, 666 bp, Cannabis sativa
agggctcctcctgagcatagcatattgcttgcttggcttggcccctgccctgcacctcctttcaacttagcctcgcgcttcaatttaatcagctcattctctaaatgagcttgttcagcccgtccagcatcagatgtcctcttcctccccttcactggcttgggaatgaaatccttcggatagagcccgtacttcacaaagttatcctcgcaggtcaactggatgatattccggtcttcccccggcagctgagcaagctcttgagctctatccctaagagtaagagtgaggggagagcggtgatatgttggaatctgctagaactgagtataggtgatgcccacgccatccaccatgaagtactcatcaacaaaatgtccaatttcgctgatggccttatcccaagtgcccgtcaaccacttgaagtctggttgagagtaatagaagtaccccgacctaccttacttaggagtggactttaaatcaaagaaccagctaacctcgtggggagaaggcatatcccatttctgggaggcataaaggacgaagaggacacacagatacttaatgcccttaggagtgaactgagtcgggcaaaggcagaagaagtccgtcacattcttgaagtacgggtgcaaaggcagcaatgccccttgctgggcatga

SEQ ID NO: 157439 - DNA, 542 bp, Cannabis sativa
tattcttaaaatattttgttaaatcaacaaaaattattaaataggtacattttatattccaggataagggtgcttctacactacaccccataatggttgtactgatgcaatccttaactttttcggtatctataagaattttttagtctaaattttttcatagtcgtgttaattaagacatcgtgcaaaattttgagaaatttagaaaaattaaatatagaaatcaatgtttaaattgtctatttcgcacacttataaaattaaaaagttacgtgtgcaacagactctttaaacactgtttttgatgggttaaatttttttaaatttctcaaaattttaaaaaatcttaaataactataatgtatacggttataaaaaaatttaataataaaggtacatcaatatacttaattaaagtaagtgtattgtaaaattttcctaaaaatatatcacattttatatatatatatatatgataagactgatggttattattagaaactaaataaagggtattaacaggcccggtcctgggcataggc

SEQ ID NO: 157440 - DNA, 695 bp, Cannabis sativa
ttctatcaaacaaaatatattttttatattgataattgtaattatatatgaacgtatataattttattatgtcagattttttttttcattttttttcattcgatctatatatacaaatgtcaatggctggagcaagggacatacacggtaccatctttgtatggccccctaattttttagtttataaatatataattatatatagtgataatatacatttattgcatcccttacaaaaattatatatattttttaaagcaacatgttcaagttttttttttttttattaaactgtattgttatactatgggttgggcattgaattttattctttttttattttttttaaagaacatttgaattttattcgatcaaaattaaaaattgataatacatatttttttgtttttgagagaaattgataaaatttactgtttaaaatatatatatacattatttattcattatgagtacatgaataaaaactacattgtattgctatattatcaattactttttttttatacattatatatattgtgtctgttattgattttttttttgttaacatatttgttagtttacacacattatttttttctaagaaattttatatatatgttgtacatatatatttatgtgtgttttatgtatatatgttaatattgtcatataattttttttattatttattt

SEQ ID NO: 157441 - DNA, 510 bp, Cannabis sativa
  modified_base (69)..(78): a, c, t, g, unknown or other
tatatgtgtttattatcattttagaagttcatatttaggatgttgaacaacatacttgttagtaaatcnnnnnnnnnngtaaaataaattccaacaaagacaccattggaggacttcaaacagtgttctttattctcatcaatcattataaatttctgtgttcttatttgaattttgttgttttagaatgacttttatgagctaattttcttttaagaattattatgtaaaccacttgagtttatttatggattaatgtagttattcaattttatcttcttctcttatttcaattccatacaatctattttaattttacaattattgactgatcacctataattattatttttgaattcaaatcaaaattaattaaatttgaatacgatatgattgttatggatacaaactgatttaggacaaaagtatctagattatttgtatgattttattgtaagacatttatatgtataatataatatatatgtatgtgtatataacatgcggaat

SEQ ID NO: 157442 - DNA, 586 bp, Cannabis sativa
cccaagctgatgctgcagccagtcgttccgtcgtgacaagtcagcttcttgtaaacaactccttgtatactgtattatttgattcaggagctacatgttcatatgtggcttcgagggtaattggtcttttgggtaggctctgtgatattcttgaaagagggtttggaactctaatgcgtagctgagagttggttatctccaataggcgcattaggtttatgccaattaggatcgaggatagggagttgagtgctgaccttatagaactggaattaacagaatttgatatcatacttgggatggattttctgtcaagtattcggctagtataggttgtaagcagaaaatggtgacttttcagcctgaaggtgaagatccatttgtttatgttgggtcagttcaggggtctcggatcccagttatatctgtactaagggtaagggatctactacacagtggatgtgtaggatttttaggagtggtgattgactccaggagacccgaacatttgggcctgaggtagtcagagtggttaaagattttcttgacgtgtttcccgaggagtttccgggattgccaccgcaac

SEQ ID NO: 157443 - DNA, 633 bp, Cannabis sativa
  modified_base (136)..(157): a, c, t, g, unknown or other
catatttaggatgttaaaaacatatttgttagtaaatctagatcctggtaaaataccatccaacaactggcctccgagccatggtaattgatttacttttcaaaaaatattgatttaaaacgatgtatgtgtgatnnnnnnnnnnnnnnnnnnnnnntatgtgtttattgatgattgattgatgtttgcaaaatttttacataaaataattagaatttcgttctggaattatttttcttggatagtatgaaaaaaaattaagcaattcactttcttacagaacttacttttgattatatttgaattagttatgatttttaaaaaattagaaaaaattaggagatgtgacacctccatgcgtgcgcagatgcccatgaaactcgggtgcacgcggttttagacacgctggtgtccgaggttccacacccatttggacaaattttggctgaaaactgcccctgcgtgcgcggagaggctgcatgcagccttttgcgtcgtgctttctcgtcaagatgcccaatccacgcacatggatggtttgcaatgcataccatccacaccaaaagtaattttttccaattttttcatttttcatagaattaatttcaaattttttgtgtaattttgtatcta

SEQ ID NO: 157444 - DNA, 604 bp, Cannabis sativa
aaccacttgaagtctggctgagaaaaatagaagtatcctgacctgccttgcttgggagtagacttcaaataaaaaaaccagctaaattgatggggagaaggcatatcccacttctacgtggcatagagaatgaacagggcaggcagatacttaatgcccttggtagtgaattgggtcggacaaacacggaagaaatctaccaccttcctaaagtacgggtgcaaaggcatgagcacccgaccaggcagacatccccctataagggtttgtggcccgattgttagaggcaggaacgtaacagtctagctcgcccagatagctgccctggttgagatcccgtaaatgtaccttagtgacattggacggaggactcacccacctaacacccaaagcaccctgcctcctctaaggaaccctggtagtaagttcctcagtgacgaagtccacgccttcaaccaagacatcaccgagggcgtcaactggctccccagcctcattgtatcccccaaagtttatgggtgcagcctcttcctcttcctccacctcggaaggactaccaggacggacatctgcctattcctcaatctcttggacctcagcgtcc

SEQ ID NO: 157445 - DNA, 521 bp, Cannabis sativa
aacatcgttaaatcaagaattgtcattagataggcacttttaatatataaagatatactagaagaaagttacgtgcgaggcacgtatatttagttttatgctaaattttctttactttatttaaaaatgatacaataaataattttaaaaaaaaatattattagttattatttgagattattattatctatattcaaatcattatacaataaaaaatcaatgcatatatattaacaccctacaaatatcttaactgaaattcaaaaatgcatagacgctcaatgacatcttaactgatatcatcatccccataaaaacatattctgacattgctgggatggtaatatttaggtaaaaatactgcaaaacttaacaaatctaccattaacaataataaattaagaagaaaaagaaacatatatacagttgcaacatctgtgcagttatagcttgaatttggaagccaatgctaatctaatgcattagaacaagaattcttcattttagtgaccaaatcaaac

SEQ ID NO: 157446 - DNA, 587 bp, Cannabis sativa
  modified_base (541)..(547): a, c, t, g, unknown or other
attcatgtccatttcagagccttggttggttgtttccctgtttcctagggtattgtagttccaattagtaatagtagaaccttaagtggcaggtttgggtttctcgaattacagttttggagtgttatttagccgattatgttatgtgattagggcatccatccagcacgagattttccattcaggtcggccaactcacttgaattcagaaacgaggtaagaatagtgtagaacatgtgatatatatgtgaatgtatgtatgtgtgatatatatgcatgcttattatgattaattcactaccaacacttgtatggaaatggtacagagtgcattggtatagtgcatattgtttaaagagtacatgacggtgttaccagcacaagtacaggaaagtacagggtatgtgtggtatatcacttagtggtactcaaggtacgaaacaaaccctaccaacactcgtgcaatgttggtgcgtagtgtatgtggtacagtggtcgtaccctagtatagaacgttcttactcatttgttaagccttgtnnnnnnntgtatgggcacctagatacaagtcgatattatgtgatatg

SEQ ID NO: 157447 - DNA, 781 bp, Cannabis sativa
tttcttataataataataagggataattgcggtgaaagtccccaaaaacttgaggttgatgccgattagtcctcaacctcaaaaattggcggtgaaagtccctaaggtcaagttttctgtaagtccgttggtccctcttctaactgatccgttaaacccaaataaaacgccacgtgtcaaatttttatttgtccaaataatattttaaattaaaaaaaaataaaatgatttaaataataaataatttattaaaaaaataaaaacttttaacattattctttttctttttctttttattttcttttttatttatttttctacttcttcttcttcatcgaccaaagacccatgatttggtcagttttttttttttttttttttttttttttttcagaagctctttctttgttccttcttcaccttccacgaccaccatgactccatgagctcgaccaccaccaatttttttcttcttcgtagagcatagaccctccttcttcatagagcacgaacacagacaactcttgcataaaaaaacccagaccatgctttgagcttacgacttcccgtcatcgtcctcgatcccgtccacggcgagccaatcgaccctcaccatcaacgtttatggagcatcttcacaaatcggtccccgaaagtgatagatcgagaccattgaagcccaaatcctctttcatctctctccttatgcagttgaagcttttgaaaagaaacctggacagagaagaagaagatgaagacgaagatttcaattcggggtata

SEQ ID NO: 157448 - DNA, 772 bp, Cannabis sativa
  modified_base (60)..(80): a, c, t, g, unknown or other
  modified_base (515)..(519): a, c, t, g, unknown or other
attaagtatttattaaaatggtaaaatatttagagaatgttaataataataataataatnnnnnnnnnnnnnnnnnnnnnaataataataataataaaaagtaaaagcatactattattattaatatataagaaattatttggtgatacaaatattatttgtattttagcttaataatatatatttatatataactgtcaaactaaaatgaaaaataattagtataggtttgcctaaatttgtgctattttaatagctgaaataagttgatggtgtgtatatatttaatatgttaaaataggttacttgttacttatatagggaaaaagtaagaaaaaaaatattatatgtctatctatatatatgatatgttacttatttagaatgtgagagtatttatatataaaattaatatattaattatgaattatataaaaatataaagagagatgaaaagacgtatatgaattaacaaatcgtttacagtatgattatcttaagaaatttaattaaannnnnataaagaaatatacaatgattaagtaattaaagatataataatttttagaaaaatatatgattttaattatataattaaatttaaaatgtaacatatatatcatatatcaattatttcattttaattattataatagtaataattaaacatccaacttaacatataattacacttttttcttctaaaaataaaaagaaaacataattatacaatataaaaattacacatagaataaaatcacacatacatgat

SEQ ID NO: 157449 - DNA, 866 bp, Cannabis sativa
  modified_base (177)..(178): a, c, t, g, unknown or other
actaggaccgtgaccaggactcggacccagacctagaaccgagcaaagacctagcctcagacccaacctgagactggaactcttgcccagacacagtcatgtacccaaaccagaactgagacgcagacctagacctaaatatgggaccccatcccaaacacaaacttggacctaganngggatccggataggaaactggactcgaactaagacccagactgggatcgagtgctggacctagatctggaccgagatcttgacaaaaattagacacaaagctagaccaagacccgaacccaaactcgaacccagaccaggatcagaactaaggacttagacccataactgaatccaaactcagatcgggataagaatttgggactcagacccaacctagacaaagaccgacgacgcgaacccacaccgggagcctgatttggacctagactaaaatccgtaccagaacccaaactcagaccaggacttgaactacgacccgaactcaaacccaaactcgaataagaatcgcaaatggaactagaactgaactaggactaggactactgcgaggacctaaacgcaaacccgaacccagataaaaaccccaacagagacctaatcccgaaccgagactaggactcgaacctgaaccaagaccgggaccaaaacccacacaataacctggacttggaccaagaatcaggataggaccgggacctgctacccgatccagacccgaacttgaacctaggaaccagctcgtgactcaccaccagaaatggaacaacactaggactcgagattgggattcggatctggacccagggcttggacaaaacccattgtcggtttcatgatttgggacc

SEQ ID NO: 157450 - DNA, 610 bp, Cannabis sativa
aagccactaccatgatgttaggccggtaagttaaattatattgtccttgaaaaaatttatagagctaattaatgaggaaaaaaagagagagctaatgaaatttattttacaaaataaataatttttattgcttatgtcttgaaggttatatttctgtttttataaatttaaaatatttcactaataagtaaagatttataatgtacgcatagcataattgttgagattaatacccttgattataaaaaagttatgagttctaataacaattatgattttccaataaccgattttatcatctaaaggtttggtttttgtttttatataaacctaaaatatgaatttatagtttttttcaatctttttacgaatttaaatattttttttataaagatacggaatgttatttttatgttgtttttacaataatattattttacattacttccaagttactttatatttatattgtactatgttgtttatacgttatttgtgtacgcaaaaacaattaaaaaaatatttaaaaaaagtaacatataattcgtataaattatataaaagatacaattttaaatactttgtataaatatttacaatttacattatg

SEQ ID NO: 157451 - DNA, 507 bp, Cannabis sativa
aaaatgcccctggctcaccaacgtagccttaacatgtcataaatcattataattcacatataataaattatataaacatattattccttaattatacacagttaactagttagggtttgctaatccattctcttaatcttagggtattacaattacctcctccttatagaaattttatcctgaaatttacctgaaccactccgaatatttctgctacatatgcgtcttgagttcccagattacttttttccaccttactgttcttccataatacctttaccagtgaattgtcttatttctcaagactttctcccttctatcaagtacttgcgttaggttttcctcgtatgataaatctggctgaagttccaatgcttcataactcagtatatgggatgaatctgagacatatatctaaccatcgaaacaaggaacacatcatgtacagctgctagcgctgggggcatagccaacttgtaggctacttgccctatcctctcaaggatt

SEQ ID NO: 157452 - DNA, 770 bp, Cannabis sativa
aaaaaaaaaaaaactaccacacttctctcttcttctccttcatctttttctaaaaatttttaaaagttacttatcaaagaacataaactataattaaaactacgaattttgatatatttttttaaaagaaaaatagaggatgagactcaaaaattcttaatggcaaagtcaaagaacaatgcaaaaaaaatttgtacatatctctcctctcaaattatatatatacactaaaaaataatatattttttttgtaaatatgagtatttttgacaaataattataaaaaataactacttaaagaaataaaattaaatatagaaataaaataaacgatgacacctatttaaaaaaaaactctatataaagtcatttttaatacctctactaaagcattatcctggaaaatggttagggagagtcacaaaaaatgttttttttttcattatgtgtcacactcatatttaatattaatatttaattaattccatttatattattcttctttttaataattttgtgatatcaatataaggaaagttacttattctcaaaaaaaaaaaaaaatactaatgaaatatatgatacatccctaataactctaaaaagaatttaaaaaaaataaaataataatagtgcattgtaatttatcctttctaaaaaaaactctaaataaattttttaataataaataaaaaaacaaagataaattacaatgcacaattacattaatagatatatcttacagcttgcaccgagatagtttatcttct

SEQ ID NO: 157453 - DNA, 563 bp, Cannabis sativa
gctaattgcctttactaatccacattagtacagcggtcattacatatacgatgatccaaattttatagcactacgaattttattttattcctctcttttgtacttttatatatatatatataaattctcttttttatagtttacataatgcaataattaatatagattaacaaataatgatgtaagactaaccaccacaaaaattaccaaatcttaaaattttcatttaatacaagaattacttaattataaacataaaaataagaaaaaaaattattttcgtatcttataaaacaaagttaattataatattattatagaaactcaaatttctaaaatttaaactataaaattataagaaaaacatgttattacaatatcggctaaataattgattataattaatattttttttatattgataaattattatgtaatttataatatatgttatgctttttcagaaaaaaaaaataaaatatatgttttagaatggaaatatttgttgtagtgaggtttaaaggtgtaattaatggttattgaagtttttaaattaccataat

SEQ ID NO: 157454 - DNA, 637 bp, Cannabis sativa
  modified_base (580)..(582): a, c, t, g, unknown or other
tcaaaagtttccagctgtacttgaggggtacagtgatgctgactggaacactttatcaaatgattccaaggcaaccagtggccgtatttttagcatagctggtggagctgtttcatggaagtctaagaaatagactattttggcccaatctacaatggagtctgaaatgattgcactagctattgatagtgaagaagcaggttggctgagaagcctgcgagctgagattcctttataggaaaaatctattccacttgtgttgatccattgcgatagtaccgcggctattgaaaaagttcagaagtgttattacaacggtaagagacgacaaatatgtcgtaagcagagcactgttagagagtttctctcaataggagctgttaaagtgtatcatgtacgcactgatgataacatggctgatcctttgacgaaaggttaagctagagggaaagtccttaaaacatccaaaggaatgggactgtttcccttagattgatgaatcactcatagtggcaacccaacctatagactagagatcccaagaaacaggtttaatgggtaataacaagttatgaagtgnnnaaagtgagatcatgctataattatacgaaaagagaagcatgaattcctgaagcga

SEQ ID NO: 157455 - DNA, 781 bp, Cannabis sativa
aaagcttttgatcgagtggaatggcattttctggaaagtgtcatgtaccattttaactttcctgttggctttgttaatctcatcatgaaatgtatagctactaccactctttcttttcttatcaatgggtaggttaaaggctctcttaaaccttctcgtggtcttagacaaggggaccctttatccccttaacttttcattctatgtgctgaggggttgtctgctctcctccgagctagggaagatgctcagtttcttaaaggtatttctatttctagacatgctcccttgatttctcatttattatttgctgatgatagtcttcttttttgctctgcggatagagagtcctgtttagctcttcaagaggtttttaatatctattctagggcctcgggtcaagccattaatttttccaaatcttctattctcttttctcctaatactgttcacgagattcgtactatgttctttgatactcttaatttagaagataagccttttgtttctaaatatttaggtcttcctcaatgtttgtctcgttcaaagtttcattctttttcttttcttaaggataaagttgcctcggtccttagaacttggtcttctaaatgtttttctagagctggcaaagaggttcttttgaaagctgtaattcaggctatccctgcttatgcgatgggttgttttaggcttcctgctaagctttgtaagggaattgagactgcgatggccagattctggtggggttctaatggagagtctaggaaaattcattgga

SEQ ID NO: 157456 - DNA, 1166 bp, Cannabis sativa
attattttaataattatatttgtagtgatgaatagaaacaatttgcaggcatatattataatttaagtataaattgatcaacaattaaagaaaattagtaaaataatttaattgtttttgtattaattatcataacggtaaatagtagcataagtatctaaaattttaggtttgtaagcggcataaacccaatgatttttttagtggcataagtacctaatgtttataaaactgtaattttcttccagtttcatcagtacagactcagttattgtcttaaacatgacacatatacgacccaaattttagattatttggtctggacgaaaaatatgtagtatcagctacttctaaatctttttttaataaatttaaaacggagtctgtacttacgaaaatagagaaaaattacaattttacaaaattattatatgattattagctaatatatgattaaaaattaaaaatatcactcacaaaatttctcacttataaaagtataataattatcaaaataatttaatttatattaaattataaaagattttaatggaaagaaaaaagataagagttaagtaatttaagatgtaaaagcctaaaaattatcaacattttttatatagttatatattatagattattcatatagagtaatttaaagaatattttaataattttttatttttaatggtaatatttttatagataaattataatatatgcatattgtttcatcaacacatatattattataatttatattaatttattatgtaattattaactaatatataattttttatggtaatgtttatagatataaactataatatatacatagatataactataatattttatatcaaattataaataatttttttaaaaaaagacattataaataattttaaaaaaaaaacaaaggttaaataaataatttaatatgtaaagcccaaaaattattcacactttttatttttgtagacttttttatataaacaaatcatatgaaaaactattagtaaaaagaaataaaaatatgtatctctatgctttgtatataaaaagtggagctctttaaattataattattaaattattcacactttttatttttgtagtcttttttagataaacaaatcatatgaaaaactattagtaaaaag

SEQ ID NO: 157457 - DNA, 1046 bp, Cannabis sativa
  modified_base (32)..(33): a, c, t, g, unknown or other
aaaccgtaaatttgaaaaaaaagttaaaaaannagtatatggggtaattctcctattaaaaattgtgtttaagaaagataaacgaaattgtaattaaatgtggccttatgtataaacactatgtttatattattattatgataatatttgtgatgaaatattttttttttttttgaccaagtgtgtgatgatatgttgatataatgtgtttattaaaatttaaatataaatttataaataaaatatatatgtttgttatttatttttaccatatatagtttgtacataaaaattaaaaatatgtttctcataattaataaaatatatgataaattataaataattagagacttttttatttttacactttaaaatagtttttttttgtatttgtacagaattctgtatacaaactcctattgcaactagcgctgcaacctaaattgtaagaaaaaatcgtacaaaaattctttttgtaactagcgctgcaattactttaaaaactcaaactgtaaatttttttaaaaaataatatatgaaataatttgtttaattttttatacacatataatataattaaatattataatgtacataaaattgaaagttcttaaataatgaaatgatcttttcaaaataataataataataataatgaatgaagtggttgtggtaagttcatcaaaagatattttagtaccatcacatcaccacttttcttgcatttatgttgaaatctgtcggtattctctccctcaaataaattataataaatctctctgtcgtttgtttagtggttcatgtcggtctctcactccattaaagatagtggaaatttagtggtccacgcgcacttcatgttcacaaacaataaatataatccttgattcttttctgtcgcagaatataatcaagatctgagtccgaatgttattttttattgattctgaattctaaacagccttcctcattataaatgaggtactacttgatatgtgtaggtactactctatcacttagagggtttcgaaaaacagagaaggtag

SEQ ID NO: 157458 - DNA, 694 bp, Cannabis sativa
cattccaacttatgattttcatggcaaaccgcgagattgcttagcaatctctgctgaaaagtcttgagaattagtcaaatccaccttgtctgtagaaatagactgattgagatcagcttcttcatccagtgaagatacattgtcagaattgttggccctacaccgtttgagtgtttgtctcatggatttagagttgaattatcgtttgaaaacacggttaggttgtacgttttcttgtccatagacatcagattgagttttgttcaaaccagtagtaccaatcaattttgctatagtggtaacagcagtagtcgacagtgacttgtgttgtgttgtagtctgaatttgggtagtgtgtggagggtaagtggcaaaaatcataggaatagatttatgcatatcagtagatggattttccacaatgtctggtgtatagacatttattttaagtgaatcattgctggtacaagaagtaagaattcctttcccttttgaattcgaaccatgttcaacagatggttggtgtattatgtctttatttcggttaatggcagtggacatagtgaaggatgcattgttaagaactggtggagtaaataatggagaagtaacactatgaaccaagtgagaattagcaacagtactaattgtgtgatccgcaacatttgcaatgttttgagtttgattaccctga

SEQ ID NO: 157459 - DNA, 701 bp, Cannabis sativa
  modified_base (243)..(245): a, c, t, g, unknown or other
tgcaaccgtcagccgtggagagaggaaatcggattttgaaatattaattgtcagagcattaattagccgaaaacagaagggaggcctagtgagcttcacatcgggtctcaaacgatcatactcgacacatgtccccatccgaaggaagagccaactcggtagaagtctacacgtaacctcaggggtcccatacagacttagggggcaaatgttatcccaaattttgcactctgacgtggcatnnngagaatggtgacacgtggagcatctgttcggagtgatagaccgagcaggatgcctcactagcacatcctgagtaagatattcagcaatccgtgcagaggactcaacacttagcgaattcagctttcggatcatgagtcatcagctcaatccctatcactgagggatcaacttacgtggatatggcatatacacgatcccactatcagtgtactcagcctcaatcccacgatccttgcattcaacattgatcacacgatcaatctgtttatgcgcattgtaacgagagatgaaactcttcctcctagagtttcccagccctataaataatgaggaaagttcactggggaaggggaccgagagataaaaaagtcgatacgcagctaagctaagactatattattatctaataattatatattcagagatactgttttcagagctataagaaaaggaat

SEQ ID NO: 157460 - DNA, 672 bp, Cannabis sativa
caatctgtaacttttacaaaacacggggtccaaaatggtatttacccatatttttttttacacaaaatagagatctaatacagaataaagataataaatgtatagaaaattcatcatataattttaaaacaactatcatcaccttatctcattagtagtcaccactatatttagagttgatgtcatcgccgtatctcacttataatcatcattgatattctttctaataagttttctttgtacataaaataaattaaacaattattggtaagtacttacttttattatgtgagggaagagagggtaataaatataataagtttagaattttttgatatttttggcatattacttttaatagttttttttgataaattatgttagttaatattaactaatttctctatgaaaaaaaatttatatgtaaattaatttttttaatgcatatatatttatttattagttattatatagaaatttatagttgtttttttaatttttaattgattagtgatctctaattaaataaagtaaaataaaaaatagaaaaatgagagaagtagaacaaaaaaaaaatgagagaattaaagagagaatagatatttaaaaaatttatttttttaattattaattaattatcataaatttaaaaattataaatagatagtttga

SEQ ID NO: 157461 - DNA, 708 bp, Cannabis sativa
tttgataattaattttaattattatataaatagttttgacatttaagggattaaaattggaaaatatagcatttgtgaaagaaaagaatgaatagttgtacaaaatgatgaaaattctaatttagtggggcccactatgtggccggccacttaaggtgatttttgcccatttttatcattttttaatgccatataatttaaatgtaacccaaagtaaaatagtataaaaagaataggatggtctcattatccaactaatgctcataacctagtttacaaattgtcagacaactagagagttttgagaccttcttctttcttcttcttctatttcgaaatctcttgagtgttaatttcgagcctcttagtgattgagtacatgcccacacatagcatgttagtactcaatcatagtgtgtaagactgtgaagaatccaacacctaaaagagaatcaggctcagatcttgataattctctgcgacagaaaggaacaagggttggagatctaagtggaagaaatcacttaattccgctgtaaccaatgtaaggtttcttgaactttatatgtgtttaaattatattgttttagaaattcatatttaggatgataaaaaacatatactgtagttgttgaccgaggttttcggcaaccaataaaataataaaagattaaggagctgtaagaaattaagagaaggatttttacg

SEQ ID NO: 157462 - DNA, 587 bp, Cannabis sativa
  modified_base (371)..(373): a, c, t, g, unknown or other
  modified_base (541)..(545): a, c, t, g, unknown or other
atgtagaggacacatcctcaactcactctcggataggctttatgacctatacaccgacactaaagatgccaaagaaatttgggatcaccttgaaaagaaattcatgactgaggaggaaggtaccaagaaatttttaatttctcaatattttgatttaaaatttcttgatggtaaacctcttttacctcaaattcatgagttgcaagttattgtcaataaattgaaagtgctcaaaattgaatttcccgaggcattccaagttggtgcaatagtggaaaaattaccaccatcttggaagaattataggaagagaatccttcataaaaatgaggattactcttttgaaggaatccaaaaacatattcgaatcnnngaggaatcgatatgtaaggataagcttgtggaggggtttaatgaagagatttccaaagcaaatgcaacttccaaagttccttataagaacaagtgaaagaccaaaatgggtaataccttgggtccaaagtctaaaccaaaccaattcaaaggtggaaaaggtccatgnnnnntgtgtggcaaacttggaaactatgctaaggaatgtaagcata

SEQ ID NO: 157463 - DNA, 709 bp, Cannabis sativa
  modified_base (226)..(228): a, c, t, g, unknown or other
aggatatcgatttcaataacatgcaacacaagagaaagattaagtctccaactagctgagagcttctttaattcccaatgcctctgttatctttggccccaccttccctacaagacatccagaaaacccagccacttgttagaatttatgccctaaaaataagtaattaatagacagtatattacataatatatgaaataaaattataagataaatgagtacattnnntatagaagtataattaataaatatataaaaatgccttattcaaatggagaaggtataatcttgtaaggatatgcaagagaattaagattatatgatatgaacaaaactagtctgtagtgtattaaagtaaatgaatctttaataaagaattactatgtatagtttactatacattatactctagtgtgtgtaattttgattcagatcacatatgtagatagacatgtagtaaaggtattgtgtgtaatttgattatacatgactgcaccgatatgaaataacatctttcattaacgtgtcatttgtcatgaaagagtttttcatatcacaatgacgatcattagtagatcagtttaaatcatgagtataaataaactcttaattatgttcactgagttctttgattcactcgttaaagtttctgagagaagatgatacttaaaacttctattttgggagcttaataacatgagtggctggg

SEQ ID NO: 157464 - DNA, 560 bp, Cannabis sativa
aaaaatgaaaagttttttttttaatttaaattttttgaaagaagttaggatttgtagcttcgtccaaatagttttcaagaatttatttttaaaattaaaataatttatataattcttaatttaccacaattttttttttaataatatctaaacattttatgaaatattttttattaaaaaaatcttcatataataattatacaaatggtaaaaataagtcaaaaagtagaatcttaattaaacaggaacataatattacctgattgactgattcattgatacttgtttagaaatttatttagtctaaaaattctgaagttctttaatccaagtctatgtcaaagaaactttgcctagtctctttaattttagagtacagtttactcaaatatttttaacgagtacactttagtcaaaaaatttccaaaagctatgtttgctagagaggagggaaagtaagataattagagacttggaaggaggaagggtagtgtgattgatggagatatagtaacttttcactaagttatttagtaaggagtgagagaagagaggaaaag

SEQ ID NO: 157465 - DNA, 667 bp, Cannabis sativa
tgggctcttccatttcttcattgcttctttaactaaaaaaaaccttagcccaatattcttctttcttttgatttaaacaaataaagcccattaaacatgagcccagtctaattagaaataaatagagaaaattacactctatatccactttttgttttatattttaatttttaccttcattttactactctttaatttatacccatttttataagttatattcccattatttgcattaggaagtctaattttgataagttttgtgaggttatatttggtactttgattataaaagaaggtatttatcaattaaaatgattttggagttatatttagttaatgtgtaataaaaaaaaggtagttttcaacttatcccttagaaatatgcctaattaaaatagagaaatttacatggtatgttgacttcagctctttttttttacaaaaatactgtcaagcggtatttttactttttactgtgtatttttataagtttcatattgcagtattctatgtttattttttagtttttttgtttgttttaatgttattttagagttgttttccataatttacttttttaacgttgatttcactattcttgctccatcttgctggaattaatgattattttctgggtgttctcgtggtgctgtagtggttctat

SEQ ID NO: 157466 - DNA, 507 bp, Cannabis sativa
attctcattcacatcaaatatatatacaatacaattacacaaaatacacaaatagtatatacacaatatatataaatattcaataataaaacacaaaatatacacatatatataccatacattaagttaaataaacatttaccttataaatgcaatctgaccataaattgagacaaaaatccagccacctatagcacacacacaatataatattaataaaatacaaaatccaaaaaaaattacaaaaataaaataataccaatgtacattaataaaacgaataaaaattatatttatactttaatggacgttgagattcaatgttttctctgctaaaatcggtggtcggggttataccactacctttaattaaaataggttcgggtacattgcaaatgggtgaaaaaacaaacttttttagtgtatgggattagatattaaaaataaaaaaatttaaaacaaaaatgggatgaaatggtgaaaaaatgagggagatagggggttttt

SEQ ID NO: 157467 - DNA, 529 bp, Cannabis sativa
  modified_base (475)..(477): a, c, t, g, unknown or other
ttgggatcatcccacctggaatatacaagttagcatgttacggtgccaacacaaagctagtactagtgtcttgccattaaaatacaaagcacctacaaaagtactacaaatataagttgcttttaagcaatgacttaggcttgttggtatacccgcaaagtgtattttcatagctggtcgtcatacctaccaacaaagtttgataatgtaaaggcacaaattgcccacttttgatgtaataaggcatatttgcccaatttcatataacgacacagcttgtatgattgttattgaatcaaattgcaagcctaaataagatcaatagtgtatgaaattatagtggcaaacccatgacaataacaattcttatgtgaaagccctgattacttaacaagtgatcaagaggtgaacctacttagtcaattggggggcaagcatgctcatacatggactagtaagcataaaacacactcannnaaatagattttacaattttgaaactttcttttcaaattctaaagtgtttgtg

SEQ ID NO: 157468 - DNA, 619 bp, Cannabis sativa
ataataaacaacccgtccaaatgaaattccattcaacatggtcaacatccggaaggcatataattgtgtaactgaaagaagcgtttagcgtggtccaaaagccccaatgtagtttattattttctaccaaattgcacaaaatcatggattacattcctataacctcggatgcaagatcgtatctcacttaataagaaaacaatgtaattgacaattaattccccacgaagacaaggcaagttttgacaattagtaacgcaatgtggtctccaggtcaatactctgaaagtcagacttcaccagataagctcaaaattaatattttattttatttgctagcatttttgtcacaaaaattttgatacttaaatttgaatgtgtattttgtcatttaacaattcagtagttttgggtagaggtgttcatcaaatcgtttaaattgtataaattgttcgcaccgcaccgcaccatacgacataaaaaatgaggtttgaaatcttttgcagtacgattgcgatttgtatttttgccaaaccacacggtgcggtttgcagttttgaatataataattacggttcaaactgcaccgcactatttattacaaagttactaattttta

SEQ ID NO: 157469 - DNA, 576 bp, Cannabis sativa
gatgaaaatatgaaaaatgaagctagaagaggtgagaatcgtttgactgctctctaggtcctatttatagaacatagaaaccctagagatagctacaaaaatgattttccagcaatacaaaactctcttaaaaaattactaatttgtagcatcaaaatcggactctgctgcagcagatcgggaccagaaaggaaactctttaaattttcaaattggaccaagattatagatttgaaattcaaacctgccaaataaagtttatttgatctgctctaatcaaggcaaactgaaatcatcaattagagaaaaggaaagtcaagtttctcaaaaataggcgactttctataaagagaacttcgtctcttgaaagaaaagattcccaaacaaatacaaccagatgagaaaaaaaattttccataaaagaaatgagcaattagaggcacgaatttaacacaataaaatcaatttaattcctcaataaaaatgtgtaggcatgttaaaaagatccatttagttggagcgggttggagctccgatttgacgaatcacctctgattcgaaacattcagatactta

SEQ ID NO: 157470 - DNA, 633 bp, Cannabis sativa
aagtttaaaacaatttgtttcgtaaaggggttttccgaattagaatagttatgaagattctgaccttgtaggattattctctggtagtcatgggactagttccgatgttttcctgctgaaattgaggtgattttagattagaaattgagtttagaactttttatagcttaagtccgaacattagtggtgtttgccaatcaagtgctcgattttattttctattgtgtaagtatggtagtatgtatcgtatatatgtgtcctatgaagtttggggtggtttggacaggttccagtagcgtttcggtgagtgcgtaaacttgataaatcacattttttacctctgaaaaaccggtcaaccggttctggccaaccggtttaccatttcgagttgtctcgggtactctggaatcgtatttttgccataactttttcactcgagtgtccgttttagacgttttatataccgtttcgaagcttgcgacgagctctaccatatggtatatgttttagagaaaaaaatatatgtttaattttagtgtatttgaactacagggtttggtaggaaatcctaggttatcctttgcaactattaagtagtgttttaggataaacacttattggtttatcattgtt

SEQ ID NO: 157471 - DNA, 551 bp, Cannabis sativa
  modified_base (63)..(71): a, c, t, g, unknown or other
  modified_base (101)..(104): a, c, t, g, unknown or other
  modified_base (199)..(199): a, c, t, g, unknown or other
ttgtatactttaaaccataaacatgaaaactacatgtaaccataaatgatttctaatcttctnnnnnnnnnaaatcagattatattgaaatagattttatnnnnggcataaaatcccaacatgacaatcataaaaaatcaagatactgccataacgcttataaagatcattagtatgtatgtatgtatgatgacaaaantgtaccgtcatcgtagtcccagctagcttgtttactaaaactagttgtgtaaatggttacaattctatgagggctagtatcagaaatcattctcctcgtcactctaacatcgttccaaattagtgaaggaagacttttgtcaagcacatatctctttgacacctttaaaactatttttacacgtaaataaatatgcatactttttaataccgagttgtattaacattaaactattgttagagaagttcatgttattagtgttctgagttgttactacctagtcactgttcttaagcatgaatatagtgagtgttagttaaaattagttgtaggtggtaagttatgtgtatac

SEQ ID NO: 157472 - DNA, 540 bp, Cannabis sativa
gagggttgtagctccattctacagaagaaactctctcccaaactcagagatcctaggagtttcaccattccttgtactattgggaaaatataagggataaatgccttgtgtgacttcggagccagcattaacttaatgcctctgtcggttttcagaagattgaagttgggtgaggcaaagccaactatagtctccttgcaattggctgatcgatcagtagctcatccaaggggagtcattgaggatgtgttagtaaaagttgataagttcatcttcccagctgattttattgttcttgacatggaagaagatagcagcgtcccaattattcttgggagaccattcttggcaactggccaagcattgattgatgttcaaaagggtgaattgaagctgcgagtgcaagaggaagaagtggtcttcaatatactaaaggcgatgatttttccaaaggcaagtgataactgtttctttgttgatctgattgatactattgtggaaaagaaaaagttgatagaagatcctttagaattgagctta

SEQ ID NO: 157473 - DNA, 550 bp, Cannabis sativa
attgcttaaagtctcttctctcttgctcttcaatgtgttttctaatctcaaagttgcttatttctatctctccagtcgttcctcaatacgatttacatccttctttatataggccaacaaagatagatcgatcctcttagaattatgattttttttttaaaaaaaaaatgataagtacaccctgtgcaatagcacctaagagaaaaccctgaattcgccacgtgctgaaattatctttttttcctacgcgcaatatttttttttccagtcagatgctatagcgcctaccccctgcgctatagcgcctagcaccatttttttttacttcaaccttgctcagtaaatcatgcataacttttgcgtccggactccaaatgagatgatttaacatgttttggaaagttgggaatgagctttattattttggatttcataagctcttcaagaaaatgatgaaatcattgtcaaacatgggctcaaagatttcagtccaacacaaaatgtcttttcagcacaaacctacacacttggagaaaacacatcaaatcta

SEQ ID NO: 157474 - DNA, 527 bp, Cannabis sativa
  modified_base (32)..(33): a, c, t, g, unknown or other
aaacctaaccgcggtttcaagagtaattactnntaacggtagtaaccgttcccaatccctatgatataacctaggctcaacatacttttaatcagaatcttgataataatcaagatataatcattcaaccgtcaaaaattaaccacatatggtgcttaccacttttcttaccttagttcaaaactcaagcgtgcgagccgacctgagtagaaaacaagctaagcaatcccggctcctatgtcacgacaaggaaattcgataaacaacttatccatattccaaacaaaccctagctccatactcagacaaatttctaactctccactagtttaaaatagcttaaacatcactaaaacaacctattctaagttttgaaaaacaccccgagcaaaaccggtttcgaagccataactagggttttcccccactgctgccaaaaccggtcgaccggtttcactatgcctgtgaaaccggttaaccctgctgcagaaaatggaaactcgagtttttggctccaaaaccaaacc

SEQ ID NO: 157475 - DNA, 612 bp, Cannabis sativa
ttagtcgggaatttagagttttccgaaaatacccttttagtgtcttttaatccttttagtgtgggaggggcaaaatagtcattttgcaccataagattttgtcctttcgtggacttagagttatgaattaattgttttatttaatttatcttggctgaaataaagggttgagttatgcatgttttatcatttattcaaaaaattagaaaaaaattggaaaagaaagcaagttttgtattttctctcaagagctctctctctctctctctccctttcggtttgcttggggctactagggctgggattttgctctgtaattcttgttatttcagctagttggtagtgatctcaagctaagggggtatggctcttgaaaccttcttgttgtgttcttgaattttgaagaaaaatataattgcatggttggtgaaattggtattgtagctgctgttagttgttgttgttgttttctatagtttaaaaatgtttagttgagtgaaataggataggctttgttgcatgctagttgcttttgttcaagtttagaattttgactcaaaatcttgattttaatggtgaaatgttgaaatagcttgagtatgaccagtgtac

SEQ ID NO: 157476 - DNA, 657 bp, Cannabis sativa
gatatttgtagtgtcaaaataaacaacccacaccccaatcctcatctattacatgcctttgcaaatgaactctatagtgtgaaaatgtctcttagtcagagcatcaattcacacctgctcatgatgaacttaaagttctagaaagcaaatctgctgggaattgatatatcaaaagagcaatgggttcaattcactctcaatagccttcaacctgagtataatagatttgttgtatcgtacataattaacaactttaacttatccgacatactcaagctagacgttaaactgcgtgcttatgaacatactttatcacttggaaggaaggctccctccagtattccagataagggcaaaagaaaagctgaagatattgaggatgacacctccaacaatgctgcttcttcgagttcaattttgagagctataattgaaattgaaccagcaatagagacaattaaagaacaactgagtaggcatacttttctacgttctcactgtggagagaagggacatttgaaagcaagatttcccagtcttctgaaccatttgaacgaaggtaacactttttttttaatcatgttttttagagaatgacaaatctatttggattgttgatcctggatctactaaccatgtttgtgttggaaattattt

SEQ ID NO: 157477 - DNA, 1114 bp, Cannabis sativa
  modified_base (560)..(560): a, c, t, g, unknown or other
gatccaatggacatgatttgaagcagaagtgggaaagatggtcatttaattctgatgtaccttgaaaccgcacaactgccaaaatgagagggagtgtgtcttttcaaaaaaaaggaacgtgacggaaataccctttgtaatcattaaaaagctctttttaattaaaaagaactttttaaggggaaattattatacctgaaattcggtaagcacattagaggaagacatgtgtcgaactgggaagaacgaagaactcaaacacacaaacgaaaagtatacttagcatggaacaactcgttggaaatataattcccagggtatgtttataactcgactggctgaatagccttctgcgagataaaaatgtacgaactgctaacttatgtattgatgagaaaccatgtgggtgcacacaccttcatgacgaggtctcaacctcgctgcatgaaagagaaaacgacaacactaaaaatacttagcgtatattatatgatatacatattgagtatagatagtgggacgagtcaagataacagacagcgaggcgtttatctcgctanaagatggtatgcatgcgaggaagatcatctcgactccagaaggtatagttatcagagttaaaacaatattagtctcgagaagccaaaatgacaagcaactgctcactatcaaaactatcttggctccattctcggcgaggcatccctatgagataaggcttaccgtatatttttgattacgcattcatctcggcccaataaaagcgggatactcatagctgtgtaaaaatctcatttatttgacttgatttgtaatcagatcccacgattttaaggataatgactgtaaacatattgtggtcagctttgcaattaattgccactatgcaattataaatagtggcagacaagatcaaaagaaggggggacgaaaaaactcttatgaaagaggccctaacaaaaatactcaaaaatctgaataagattgactcgtggactatgcggaattttaactgcaaaaccacgtaaaaaaccaggtgttcatatttttttttattttctgcagcttttattttttctgtgttgaattatcatcgtgaggctcaaatttggtt

SEQ ID NO: 157478 - DNA, 997 bp, Cannabis sativa
gaaatgccaaaaatttgaatggtccgacgagtgcgaggatgcattcaaaaaactaaaagaacacatggctaaaaccccgatcctatcaaaacatgttctcggagaagacttgttcctatacttggccgtctctgagaatgcggttagcgcggccttagtgcgggaagaggaaaaaactcagcatcccctgtactatgttagcaaacgcatgataggggcggagacatgaacccggtgatccagaaattagttttttgcctcctaatggcctcgagaaagctaagaccttactttcaggctctcccaatcaaagtattaaccaaccacccgctccgacaagtcctgcaaaagtcggaggcgtccgaaacagttctcaaatgggctatagagttaagccaatttgatctacattacataccacacacctctataaaaggacaagcgctagcagacttcataacggagtgccatgaggcagaggctaacgcaagcatgcccataccgcaagtcccagcatggaaaatatttgtagatggcacctccaatgaaaatggatccagagcgggggtagcaatgatatccccaaacggacttcaattctagacagccctacggttcgaattcacagcttctaacaatgaggccgaatatgaggccttgatagcagggctgaggttagcaaaggccgtgggggctagaagagtagaagtcttcagtgattcacaactggtagtgaaccaagtatcgggggaatatcaaacacgcggagaaaaaatggtcgcgtacgtagcaatagtccgcgtacacagattatttagctaagttggcctcagacagcaaaattgagaaactcggggtgatgcccgtgtaacgcctttcggaaccaagcattaaagccaagattactgtggtggaagttgaacaagagctcaacttgatgatccccatcatcgaatacataacaaaaggcgacttgccccaagaaaaggcactgtct

SEQ ID NO: 157479 - DNA, 555 bp, Cannabis sativa
attgcgaggtgttctcgaaccactcacgttctggttttcttctttatcatccgctcgggaagaccttcctcgttctctttatacttgttgaatttttcccttcggatcagctcttcgatttcatcctgcaagacccaacattccaaagtagtgtgaccaatatctttatggtacttacaaaatttcttggggtctctcttgtcgcaatttcccctgatcgggggcggcttcttgaagaatccattcctttcctcaattggatagatgtggtctcgtggcactgcgagttcggtatagttcatgaagcgcgattcacctttccttttcggcaaagactccttctttggaggagatttggccaactttgggcttcgctgtctccgtgggctgcgtcttcttgggcttcgacctctggaatttttccctcagggactgcgagatcgtgatcgtggcactggtggcttacgcttgtccttgcctttttccaattctgctagagaattctcaattctcttatgaggttcggccatagcgaagaactcgactagtgattct

SEQ ID NO: 157480 - DNA, 524 bp, Cannabis sativa
aatggatggattcaaagttattagtagtcacggctcggaaaattattattttagagctataacaatattttattcatttatatcttttgagacgtgattataaatcatcgaattcaatgaaatctaatcgattcaattacaacagaccattaaatattggatatacaattgtgatcggaccggattgaatgttatttttgaataacaattggatcggatcgaatgttggatagagtgtccgaaaattcaatacatttaaaatccaatcaaactaattagtattttatttagtttggatgattaattagatttaatattgttacacgtaaaatatatatgtatatataaaaattaatataaattttactattttttatcttaaattggatggatccaatctaatccaatgtatactgaaattaaaacattagatagatccgattcgatccaaaaaaatactagtctaaaatattgaataaaccaaaattaaactaataaatatatccattggatgttggatcgat

SEQ ID NO: 157481 - DNA, 634 bp, Cannabis sativa
aaatagttcacaagtactaaacacaactccccctggaaaaagggtccagagttggtccaaacaagcagttaaaaatcaaaatattactccccctttttgtttatctaatgaccaaagataacaaacaagaaaaaaaaaaagtaatatgtccaacaaaagcaaagaaagaaaaaacttagtctctgtaaagcttgaccaaggtggacaactgctttgacatctcttgttgcacttcctccatggcagcaagacgattgttcaccagctgaacctcattcttcacctcctggatttctacagaagcagaactcgagcttgcagtagcagcagcaccagctttaggcctcttttgaaacacgccatcaaaatactgcgagggttggaatgttgttccaaagagtgaaggctcaagtgtttcatgagattgggccacatttttctaagaggacaaaaccttaaagattaaatttggaaacacaagcttaaaagttggctttttacctcttccaaatgagacaatttggttcaaaatgtgggaggacaagtaaatagatgctctagaggtgatacggtagaggaatgaggccacatcttgagacaccacagtcttgttggagtttggaacccaattgct

SEQ ID NO: 157482 - DNA, 624 bp, Cannabis sativa
aaaatttcatatctcgaccaaaacaaccccaaaccacatgagactctccagacctgttctaaatatcccaaagaacaattttaaagcaacaaaacaaccttacacacacaaaatcaaaatccaccatgtgagctccaagtttgagcttcaaagctcaaagcttggctaacaccacaaccagcaactacaaccaacttaattcaacctaaaaaacatgaataacatccagaaacaaaactcaaacacaaacaaatgtcacagcagcaaaaacaccattttaccattaaaattcaaagttttgagtttaaagctttacacatggttaaaaccaacaaactaacaacaaaaccaacttgaatccactcaattaaacatatctaaacttcagaaaacaacaacaaacatacacaacaactacaatcatcaaaatcaccaagcatgcaaccattttcttccttaaattacaagaaactaaagagagggtgcaagagccatacctagagcttagatttccctcaaaatctacttgaatccacaaagaaaaaatcaaacccttgctgctcaaagggggccgaaagagagaatgctagagagaaaatgaaattttgcttttcttttcttaat

SEQ ID NO: 157483 - DNA, 709 bp, Cannabis sativa
tggctagctttaggagatcggagcactaaagtcttccacacaacgaccaacttaagaagacgaaggaatagtatctggtctatcaaagataaagatggaagaatatggaaggataagaagaatattgcgagggtcattaattcccattttactgatctttaccctactactactccggtccttgacgatgagttggaaatttagaggtgaagtgcattactccttcacagaacgaagatctggtacaaattcctactgtcgaagagattagtctccaccctctcaaagctccgggccctgatggtttctcggggtgtttcttcagaaaatattgggacattgttggtccgtgtctctgttctactgtccaggaagcttttctttcagggaatattgatccaaggttaaataatacctttgtctgtcttattcctaaagtagaatttgctatgggggtagagcaatatcgaccgatcagcttatgcaatttttcctacaaggtcattgctaagatcctttcgaataggatgagacatctcatggaagagttggtctccccgttccaatcggctttcatccccggtagatggatagccgagtcgtctatcctcactcaagaactaatccataagatcaaaggtaaaaagggtaggggaggccttatggctattaagcttgatatgcataaggcctacgacaagatggaatg

SEQ ID NO: 157484 - DNA, 508 bp, Cannabis sativa
gaaatatgtgtgaaatactatccatgattatgtataaatttattgttaaaaatgaataaaactctaaataattaaccaaaaatagcaaaacacaataaacacaatttttactatttattctatttaaaaatctaattaaatagttaattggtcacaaataattataataaatatctacagtaaccaacaaattataaaactctttttatttcgtatcataaatagtaaatagcattacaaaaatataatttactgttttaacatcagttaactattttttataattattttaagtattaactaaataaatttatgaaaaatacaaaaaatgatcaaaaaccaaatctaataattctaacacagtatatagtatgtactaagccctgaataattaactttcaattttatgaatagtctaggtattttttcataattaaatagaaataacacaaataattcatgaaaaatacaaaattaaatgaaattcaaatctaccaattttgcaaca

SEQ ID NO: 157485 - DNA, 638 bp, Cannabis sativa
aactttggtctttaatggtgttttgagtttcaagtggtgtttctagtttttgttgcatgaattctctctattatgatgttattaggtgatctggaagtttgtctgaagtttggagttgaattgaagtgagtaggtgtgtttttgtttttcctacactaaataagaatttcagttcagggggacctgtaggaaccgatcgatcggttggtacccaggataccctatagaactggaattccagttggggaattggtctaccggttggggcctttttaggaaccctagtttttctcatgtttgcaataattagagtattaccatattatccatcgacaaagaaacttttagtttcaattttaagtccccaaaaagtgatttagcgtgtcacttatcgtcgagcagatgttccactcaagttggccggcacacttgaatttggaaacaaggtaagattagtataatgatatgaatatgtgattacatgtttatcgtgcatgtttatgaattcctgtaagatagcataaataatagcgatattagtgaacatagagatgcattgaatatcgatagtatatgtttggctaagtactgattgatgctatcacatcggtacaactagagtatgactagcgtaccga

SEQ ID NO: 157486 - DNA, 827 bp, Cannabis sativa
actactttgaaggagtatctcaactaactaaatatatataactaatttttaaatttaaatttaaataaatatttatcttttgaataattaattaacccaaaaaaattcagtggcaatattcctacaacagggagcgcttatcactgtgtcctaaatagtataggtggtgccacctatgtcttaacaagacatggtggtgtcttttgtccaaacaacttcttttccccaatttatttaattaataaatttaaaaataaattatttattataaaataaataattaatattttgacaaattaaaattgattttttcgaacttccacatacagattctattcctatccttgacagtgtttcaaggtgattatccggggaccaacctataattctatgctctaattaactagattattcattgaatctcatcaaccaaataatcgtatttattaattttgttattactccactataaatatacaattgaactctaagtaattatagaattatatttactgagtttactgcagtgtctattgatataatcaattccattgattagccctctttgtgtcaattcataattagttttggtcaaattatcattttacctatctaattacttttttattatttagtacaattaattcactactgaaagtaaaatttagatccaatttaaatttgtgcacaactctttagttcaagaattaacacttaaaggaaactaacattcactgagttagaaaatcatgattccataattgtagatcatcccagccatccacaatattagattcccaaaatagaagttgtaagaatcatcttgt

SEQ ID NO: 157487 - DNA, 667 bp, Cannabis sativa
aaaactcaaaacttgactaacccttcaaacagcctctatttcaagcataaatcaacataataaaccatatttaaacctttgaaaacaaaatcaagcaacaacagcaactacagcagcaaaactatcattcatgcaaaaatttcttttcttacaacttaaggaaattaagagaaagttgctcaaaggttaccttagcttggataacacttagaactgttgaaaacttgcagaatttgaagaacaaaagatcaaaccctagcagcctctaggattttcgagagaaagagagagagctttgagagaaatgacttttgcttcttttcataattttttgtaaaatgagaattataaaattggttttattaaaataccttaagccaaatataactgaaaatctgaataactttatctaaagtcacaaaaagacaaagaggctaatggggcaaaatgactattttgcccctcctagactaatacaacataaaaggggtactaagggtattttgggaaattctaaattcccgactaatctcgacattcccaatgtctaacaatatcgcgctgctatactaaaatacaaagatgtgattctactgagccatacaccgcgttccaatgttgccgggcactaaacatgcaaaaatatgaaatttctatatatgacata

SEQ ID NO: 157488 - DNA, 585 bp, Cannabis sativa
  modified_base (287)..(288): a, c, t, g, unknown or other
agtgttcttcacaaaatattttggagccttagtgattgagtgcatacccacccatagcaagttagtcctcaatcatagtgtgtaaggtcgtgaagagtccaaataactgaggagaattgggctcagatcttgataatactctgcgacaaaaaggaacaactctgagtgggaggagtcattatattccgctgcaatcaatgtacgtaaggtttctcaaactttatatgtgtttaagtttcattgttttaaaaatttatacttaagatgttaaaaacatacttgttagnnaatctagatccttgtaaaatattttccaatagttataggaggggttccttgaaaccctcctactacgaggagataccgtgaatttctgtctaggaacattaatggtattggcctcatcggttgcatcaagacaacagagacagtgggaccatcttatatagaataagttgatagaacattttggaattgaacatgaaaaattatctcctctactttacttctttattttcagatttagtcatattcttaaaaaagtagtattcgtttaaacaaacatgtgacagtcagtagtcctgt

SEQ ID NO: 157489 - DNA, 701 bp, Cannabis sativa
tcatgctaaacaaggggcactgctacctttgaacccgtactttaggaaggtggcagacttcttccgtctctgtccgacccaattcactcccaagggcatcaagtatctgtctgccctgttcgttctttatgccacccaaaaaagggatatgccttctccccatgaggttaagttgctttttttatttgaagtctactcccaagcaaggcaggttgggatacttctacttttctcagctagatttcaagtggttaacagggcctggggacaaggccgttagcaaaattgggaattttgttgacgagtattacatggtggattgcatgggctccacctatactcggttccagtagattcctttatatcaccatccacccctcatgctttctctcaaggatagacctcaaagactcactcagttgttgtgctgcccagaatatcactttcttgacctcagaggacaactttgtggagtacaggctctacccaaaggatttgattcctcaacctatgaaggagaaaaagaggaaatccaatgttggccgggctgaggaagctcaccagaagaatgaactcattcaactcaagcgttaagctaagttgaagggaggtgcaggagcaaaacaatatgctcatgagcctcttgagcaagaagatgaggctgaggaagagcaggagaccccactcaaaaggaagaagaa

SEQ ID NO: 157490 - DNA, 510 bp, Cannabis sativa
ttttccacttccaaggatcgaccagttagtggatgcaactgctgggcacgagcttatgtcatttatggatgcatattctggatataacaagatagaaatttatgtctcagatcaagaacatacaagcttcgtaacaaacatgggactatatttttataaagtcatgtcgtttggcctaaagaacactggggcagcgtatcagcgattggtaaacaaaatgttcgcaaaccaaatagggtggaacatggaggtttatgtcgatgatatgttggtaaaatcaataaagagtagggatcatacctcagaccttgcggaatgcttaagatattaaagaagtataacatgaagctaaacctgaaaaagtgctcctttggagtttcctcaggaaattttttgggattcatagttaacgcaagaggtatttaagcaaatcccaaaaaaatcaaggcattaatagacattccatcactgacaaagcctaaagaagtacaagccctgacaggaagaatg

SEQ ID NO: 157491 - DNA, 610 bp, Cannabis sativa
atttaatcaacttctccctttcctaattttaataatgcaagtaaacaaatgtaagggaatgattaccttactattgatttccattacttattagtaaacatgccataaacttaaagaactgaagtgaagtttgatgaagatagaaagatgatacctaagacacacgaggaggagtactggactggatgttagagaggaggcagcagtgcctcgccggactgagccggccgcagggatgagatctcgccggaggagatgatgagattggattcagggaagggatgagagtgggccgtatgtcttcttcttcttctcttccgcttttgttttgggaccaattacatttagggtgcgtttggaaagccacaatctaatttgaatttgtgtgtaattagaggtaattacacaagaaaaaattgattttatatacttaaaaaaactaaaaaaatttattcttaaaccaaaaccttttaaattaaaaaaactatgactttttttatgactttttttcaaaaccccaaaaataccccctcataattcaaactctttctctctccttccctcaaactctctctgcatcatctctctctctatctcgcatcccacaacc

SEQ ID NO: 157492 - DNA, 611 bp, Cannabis sativa
actggagctgaaaacgatggattctagggctgaggagcttccgaccaatccaaactaggggaaccccgtagcctgccatggccaatcctcacaacaaatcccaaaaggtatagatcttgtgagcgatctcaaagatcctcctcaagctgatgaagaattctagaggaagattggcatggtttcaggtggatctgggaaggaagttggcgtggtttctatcagagaatccaaccaacctaagaccctaacctgtgccaagagatctttgcgtcagcctctctccagtgttgagaaatttcttgaggctgggaaagagatctcggcttcaggaaatgggatctgatgatgaggagaatagggtctatgtagagatcaaggctctctatgtgcagacaatctttctcttctatgtgtatccggtctttctccaagctatgtgtagacggtctttctctctcatcctctgcttaggagaatgacttaatggtttgcccctagtggcattttcgtaaaggcaagtttgtaacccgtcttaggtttttcttatcgtaaatgcctactattttcattcgaacttaatacaattgtatttgcttgcgtttttattcaca

SEQ ID NO: 157493 - DNA, 565 bp, Cannabis sativa
  modified_base (55)..(60): a, c, t, g, unknown or other
  modified_base (209)..(221): a, c, t, g, unknown or other
gtctcatgatttgtcagtacactggatttttattgacatgataatcagcgataannnnnncttacaccttggataagtgatatgtcttttcctggacattggcaaagtatgataatattagatgtatagagtatacatcgaactagaccgatattgacattggataagctatcataaatatacggttatatatttctaagtcaatatcnnnnnnnnnnnnntaggtcaatagatcttaatcctaagatggttaggttctggcttaaatgtattattcatgttctttgacttgttcattaaagttgactaagtagatcttcccaatacttacaccttggaaacatggtagtacaattgagtgggagcgccaattaaagatatgaaatctacagcttctataactattagaagtgaaacgatgattttcttcgagcttggcttaacacgataaatgattaaatgcttattttgttcaacatttatttgtataaactgaaacatacatgattatgtataaagtgcggaattaataaatcatatatgcactataattaaggatcgaaat

SEQ ID NO: 157494 - DNA, 590 bp, Cannabis sativa
ataataatgattcgactaaaaccaccacccacaagggacaatacttaccctcaagaatcacttgtgaagattgcctataacgatccacgggattccctcagtttggattggtcggaagctcctcagccttggaatccgcctgcccttgggaacgaatggagaagaaaaattgtttgtgcatcctggtgttatgaatttggggggtgagcctctaaactcagatgggacattttagcaagaaagagacaatccattctcaagatggatctcaccaaaaagcaagaagtttgtgaaatatgacaagcttaagccgcccttttatacacaaagtctagtgacaagaaggccaaagattgggaaatttaacagttgaagtagggcagaatatgaagagacgattcatatttaccctcaaaactgtacaaccgccagaatcaaaggatgcgtctttccaaaaagggattatgacaaaaatgccctcagtaactgtttactaaaaaagaattttttaaggggcaattgctatacccgaaattcggctaccatctcagtgggggacacgtgtcagaataaaaggaatatggatcgat

SEQ ID NO: 157495 - DNA, 1033 bp, Cannabis sativa
  modified_base (919)..(928): a, c, t, g, unknown or other
tttatgtgattttgatgattgattatgttattacgaaattttctataaaaataatttaatttttgatctgatattattttattttaataattggttaaaaattaagcaaattaaccttttacagaactaaattttgattaaaattgaaaaagttatgatattttgaagatttgaaaattttgactagggtccactcttcacgcacccgcggaatgagatgctcacgcatccgactcagacaaaatccccattttagacacacatgttcgagttttcttggacaacatgttgtctgaacaagccccttgaagcgcgcatggacattatgcaatgcatactgtttgattttcaccatttttttaatttttcaaattttgtcattttttcatggaattacaatttcgaatttcggtagatttttatttttaaatttgaaaactaattatgagatttaaattaattgtttttaatttaattaattttagatattagaagactttaaatttgaaaattgcatttctacaaatttgttgttatggttattttttaaatttgattatttattattttatttaaattataaggttagatattttatttttttttatttatttaattaattatatgaaatggacttatttgacattgaaatatgaatataatttaaaaaataatctagatatttttgaaatataaccatatatttatcattttttcaaaatttggttattttaatatattttattaaattaaattatgagattagaaaaatagtagttatttaccattttatcttgttagatatttattttattaaatatatatatatatatattttaaaaaaataacataaattttgaatagtttattgattttttctaagaagatatttagggttattactgttggaaattatttnnnnnnnnnntagatttactaacatgtatgttgcttatataactataatataatattctaaatataaattctctaaaataatgaaataaatacatataaagttatagaaaacctt

SEQ ID NO: 157496 - DNA, 697 bp, Cannabis sativa
  modified_base (400)..(403): a, c, t, g, unknown or other
gaccaacttaaattaaaatatattcttagatattaaattagaattaataattaagttgattttattcaagatgcttaattatttgtttctattttaatattttaattagaataatttttagtacatattttattttattttaataatcatttcccacatagatttcaaaatgcattctttttaaatgtagatatttcaaaaaaaaaaaaaaatcaattttgaaaattagattaaagttaaaaattaatttattaattaactttagatgaacttaaatcaaataattttcattaatgatttaattaaaataaatatactgaaatattttatattttaattacaaaattagtaattagtttatgaattatctagatagatattttctaggtagacttttcgnnnnttttctagatatatttaattaaagaaaaaattaatatttaagttgatttattgtagacacttaaatatttaatatttttcttaagaaattcaattaaataggaaaattatatttattttaaaaattaatttatttaattttagagcaacataaattaaaataatttttccaattttattttattttattttaagtagaatttagaatttttttttaatacattggattttgaattcaattatatatatttgtagaagattaaatttgagatgaaaattaattatttaattaatt

SEQ ID NO: 157497 - DNA, 622 bp, Cannabis sativa
tatatttatatatatatagactagaaaaaagctacgtacaagacacacatacttagttttatattaggtgctatataatttaattataaataatataagaaataattatatataatttaatttatcattatggtctaattgaatttttttaatatgaagtgattaagataataaaaaataatataattattttgtgaagttatttttatttatattcaatacatgtaaataattaattcttggataaaaagcaatataaatattttattattctttataaaaatgtatcttctaatgcatataatatgttgtttgccaagtaattaaatatttactctagtatagtaatgtcttaaatgttctgtctaaaaagaaacacacagtattttataatttgcgcatatacatatatatttgatataaaagttttttattcctaaactttacaaaaatatggtgtgtgaatcggtttaccataactaaaatagaaagtaatcaattccttagtacagccatttcaatttaaaatataaaatagaaaataataaagttaaaaaatatgattaaaaatattttaaatattttaaatttaaatttctttatataaatatttacataattt

SEQ ID NO: 157498 - DNA, 633 bp, Cannabis sativa
tcgccttcccaccgccttcccaccattttctcccccatttctcaaccatttgagcccattttttttttttaaatcttccattttcgatacttaatcacatacacttaaaaagtttttattttttactctctttgagtgtcatccgaacccaaatagaaaagtttgggtttgaaatccggccaccattttttcttgagaaatccttgaatctcaacctcctttaaggtgtaaatatagtttctattcatttttataatgtacattgttttattttttgtttttgtaaattattttttgggttttttcattttattagtaatattgttgtgttgtatgtgtatagtgcccagattttttacggaattcctcgtcggattacgtttattaggtaaaaatttaaacctcaatatatagtatatatatgtatttgtatattttattgaatatgtgtatataatgtgtgtatatattatgtgtatatagtgtgtgtatattttttatgtaaatacaatttttaattgtattgtatatattccttgtaatatatgtatatatatatattcattgtgaatattgagaatgacattggaggtatttaattagtttaggaataaaaattttaaaattgaatta

SEQ ID NO: 157499 - DNA, 753 bp, Cannabis sativa
taatgctgaaccgatgctgtaatacctgggaaaaaacctgactagaaggaattagctattcaagccacttttaccatattacattttttttcttacaagtaatttttctagcaacaatagtaataatttcagcaagtttaattactatcatttttaattttgaatcattgctcaaccattttcatgttatttcctcttactttaagttgtaattagttggttttacttcaaactttgtttgcaatccctatggagacgatcttacttatcactatattacttgtttggctgcgtatacttgcgtatataatttttacaacaagtttttggcgctgttgccggggattgaaactaaaaattatgtattatcaactattttgcaatttattttctggtttgagattttaatcccattttggtgtgctgaatttttctttttcaggtgtaatctagtgcatgaacgagcaagaagaagaccgtaaacttgctcctattgacccctaaattgaacgcattttcagacaaaggataaacgaacaaaaggctaaaaaacactgcaatatggccgatagatttgaagttgggggtgctcataatggtgccaatcctattactttggtcgatgatagagcccgagcaacaagagaataagcagcccctatgttcaatgagcttaattcgggtattgtgagacccaatatccaagcacctcactttgagctcaagcccgtcatgtttcaaatgctccaaacg

SEQ ID NO: 157500 - DNA, 754 bp, Cannabis sativa
gagcacacttgtcgtactgtctttggtgtttaaaaatactcttcttaggaccatatcccccaccaagaatttccgagccttcacttgtttgttgaaataccgagctacttttagctgatgggccatcaggtttaagtttgttgtggttctcttctcttcaatttcatcgagtgattggcctcttgactatatgtcaaccttctgtcatatggtggttcgagttctacgagcagcgtagcttcatatccatatgccatggcaaatgtagtctgtccaattgccattttctcagttgttctgtgcgaccatagaacttcaggaagttcctcccgcctttttcctttagcatcttcaagtcttttctttagtgtatccttcaatgtcttgttgactgcctcaacttgaccgtttgcttagggatgtgccactgcgaagaaacttttgataataccatggtttgcacagaaatcagtgaaggactggctgtcaaactgtttgccattgtccaaaactattttgtacggcaatccaaaccggtagattatgttcttcacaacaaagtcttgcacttttttttggatgtgatggttgttaatggctcatccacttggtgaagtaatcaacttcgaccactgcatattgcatgccacctttaccattggtagctatccgatcaggttaattccccaaatggcaaaaggccaaggacttttcatctgagttaactcgttaggtggtgctcgaggtatcttcg

SEQ ID NO: 157501 - DNA, 611 bp, Cannabis sativa
atttaggtttaactaactacatgatgctgaccctttacgtcgcaatatctaataatttgttatttttcttattttaaaaaaaagtcaccaaataattactcattaacaaagcatatagtcacattttatatagaatagatatatagattaagcatattatacttaaaaattataatttgaactaattgagtgtttagtaagctccaaatccaaccgcagtcaacgacaccaaatttattaacgacaataaatcacaaaaacgataagaaggagtttttaattttttttttcttttgggaaaaaaatacaattttattgtattggaaactgtgaaaaagactttataattatttaaatatcttaaagaaattatattttagaatttagaacatctaatgaaaatactctaactatatcttcttataattcggaaattaaattttattgtgaaaaaaaaaactaaataaaatataggaaaaaaaaagtagaaaataaataaataaaaaaaattctcatgttttcgtagagaaagaaaaattatgagaaaaaaaaaactttattcaacaaaatttttcatgccaaatatcaatttttgttttattattattatt

SEQ ID NO: 157502 - DNA, 614 bp, Cannabis sativa
agccacaacctttctaaaaataaaaggttctttttaaaaaaaaaaaactctactaaataaaaagggaagagtgataaaagtgaagggtgataaattaaaagagtgatcacatgacacgataaatttcttttgcttatttatctatttatttattattattatttttcattttttttaaaaaaaagcataaacgtatatgaattaattttcattatcaaatcctgtcgcttacacatatttattagcttgaagacgatagtgtggtaccccaacattattagtacaatcaagtcttatatgttataaatcttaatttaagaatactactgatgaaaaaatcaatataaatatttagaattataaaaatatataattacgatgaaacatacatataatatattttttttgccgtgtttatttttttattttttattattttatttattttttttttaatttgaggtacttaaaacaaaaagcttaataaaaaacgagctagagtcttgtattcttcttatcaacagcagttacaaaaaaagggggtacttacagcgtttttaaacactattaaaaaagaaaaaaaaaacaactctctttacaaaaaaaaaaaaaaa

SEQ ID NO: 157503 - DNA, 589 bp, Cannabis sativa
gtgtttttgtttatcgttttagaagttcaattttaggttgttaaatcaacatacttgtgagtggatctaagatcctggtaaaattaattccgagatatatatacatcgattttccaattaacataataggatgatttaggcttcttttgtaacaaattaatgtagaacaaaggttgtatgttgtagtagttttgtagaagattatgtaacactctctcatggcaattaatgactattgtacgtgcatatctatgattaattctagacgaattatgatcttccccatatattaaggagtacttcttagttttgtgtgtataattttgactttaatgataactaaaataaaagaaaaatgctaataaaaaggcatgatgttgtcagaaggaatgaaaaatgtattactattcctcaaagaaaggagtacacagtacaaccatatttataataaagagaagactcattgagggacacatgtcaccatacaataaaagcaagaaaataatacaaggaaatagagagaggtatttttattgtttaacatcccccctcaaactcacggggttgggaagcaccgtgagtttggtgc

SEQ ID NO: 157504 - DNA, 579 bp, Cannabis sativa
aacttaaatcaagtaatttttcataaatgatttgtttaaataaataaattaaaatatattatattttatttaaaaaaaatcaataattagtttgtgaaatatctagaattctagatagttattttctgagtagacttttagtatttttctagatatatttaattaaattgaaaattaatatttaaattgatttataaaagatacttaaacattagaattttttaatgaaatttaattaaataagaaaattatattcatattaaaaattaatttcttaattaattttagaccaacatgaattagaataatttttcaacttttattttattttattttaaagcaaaatttaaaaatgtatattaaatacattagatttcgaattcaattagatatatatatttatagaaaattagatttgatttgaaaagtatatttatagaaaattaattatttttggaccaacttaaaactaagcaattttcataatatttattaaaaaataatactaaggatggaaaataaattttatttatttttagatctaccaaagtatttataattttataaatattaaattaa

SEQ ID NO: 157505 - DNA, 527 bp, Cannabis sativa
  modified_base (380)..(395): a, c, t, g, unknown or other
  modified_base (499)..(502): a, c, t, g, unknown or other
ttttctatttttgaaaatattttagttagattccttgtgaaaaattaagcgatttttgtttttacagaactcgattccgataaaaattgaaagagttatgatttttggaaaatcgggttcaatagtgtccccacaaattgcgattttttgggtttttttcccccaaaaatctaatttcttcatggaattgtttcccaaaattcaattttttcaattttagatttttctaatttgaaatatttttaattttaaatatttccattttgaaatatttcctttttttaaatatttctattttggaatatttccaattttaaatattttctattatggtaagatttaaaaatttgttaagttctttaatatttatatattatttnnnnnnnnnnnnnnnnattttgatatttaacatatttttaatcaaaagataactttgtcttttttatttaaaatattatattaaaattatcttgtatgacaaattaaataattaataaannnnaaattaacatagatatttttataga

SEQ ID NO: 157506 - DNA, 902 bp, Cannabis sativa
  modified_base (188)..(192): a, c, t, g, unknown or other
ggaaacttgtttttatttaattaattattttgttggtttcctttttggtggcattttcgaattttgttgggatttttaattcttagattttgtggggatatgttgtttcttttttccatttatggtaatctttgaccaatttttgaaatatcttcttggtttcctattttctctcctcacgtggtgannnnngtaaggaagttactttcctttttattttttggataattttgttcaagtgttatatatgctcaactacccacatttctatgatcaccacgattcactcctctctcttcatttttcaaaagtgtaaccttcttcaagtttgagagtgtgtgctttctagggtttcaaagaaaaatggctaaaacaaaaaatgctcaaccgtccaagaggccctctcgtagctctgcttctgcatctttaatcaccctacttgcgccatctgctccagttaccggagtccttggtttgtcatctgcttcgacaacctctaccagaaagtcgaagacccaagctcgaaagtcgacttacaacctcgtttctcctccaataatttcctctccgattgttactccaattcctaggcttggcgatcatgatgaatctcattcatccaatcactcattgtcaaagtcttcctcttgaaatggtgctccaaatgtcgagaaagtaatagtgcccttgcccacggtgagttccgcaccaggtccaaggtatcaacacctcaaaaacctgaagtggttctgcccaaaagtgtctccaaagggaaaaatgtggtgtcttcatcctctaatgccaaaagtctcaaagaaaatccccctttcgtttcttcatcagattctgaacctgaagaagagaccaaggaggatcatgaatcagaaggtttgtctgattca

SEQ ID NO: 157507 - DNA, 586 bp, Cannabis sativa
  modified_base (192)..(211): a, c, t, g, unknown or other
caagaagtgcgaatttttgctatctcaggtgtccttccttgggcacattgttagcaaagacgggttcaaggtggatccaggaaagatagaatccgtcagggattggccgagtttgaaaatagcgacaaaagttagaagcttcttaggtctggctggatattattgttggttcgtagaagggttctctaaaannnnnnnnnnnnnnnnnnnnctcactaaaaagaatcagcgttttgtatggatagataagtgcaaaacaagctttctggagctaaaatagagattaatcacagctccattgttagccctaccttctgacaaagagaagttcgtggtgtattgtgatgcatccaaacagggtctgaggtgtgtactgatgcaagacgatcgggttattgcctatgcttcccgtcagttgaaagaatatgaatagcggtagccgactcatgacttagaacttgctgcaatagtgtttgttttaaagatttggcggcattatctctacggggagagatgtgaaatttatactgaccataaaagcctcaaatatttctttacttagaaaggtttgaatatgaggcagaga

SEQ ID NO: 157508 - DNA, 535 bp, Cannabis sativa
tctagaaattcccgaaccaccttgatgtcttctagtcgaataaagtcgggccgagtggtatccaataccatggccaaaaatcctagacatccatctcgtaacaattccttagctgttagtaccgaaattattgggattcgagatccctgaaccaatccaacaaaagacaaacagttcttctccttgtagttggaagattatcatcttcctcttacaatcaatactagctgagtacatggacaagaaacccattcccagtataatatcaaaatttactaaactcatttctattaagtcagcactcaactccctatcctcgattctgatcggcagagacctaattcaccttttggagataactaactctccaccaagtaatagggttccaaaccctgattcataactatcatgcggtctatcaaatttactaaaaattctggctgccacataggaattagtggccccagaattaaccagcacagagaaataagaattgttgaccgagagctgacctgttaccactgaagggatggct

SEQ ID NO: 157509 - DNA, 638 bp, Cannabis sativa
tgggatgtgttctgatgcaagctgacaaagttatagcctatgcctcccatcaattgaaggcttatgagcagcgttatccaacgcatgattaagagcttgctattgtggtatttgctctaaaaatatggtgacactacctttatggtgaaaaatacgagatttacactgatcataagagtctcaagtacttttttacccagaaagatttaaatatgaggcagagatggtggctggaattggtcaaagattatgactgcaaaactctgtataatcctgggaaagccaatggtgtggcagatgcactgagtagaagtggtctcgggtaggttttcaccactgtaatgatagctccccaactggcctcagaaatggttaaagctgaaatcgaatttgtaattggaaagttgcataacttgacacttcaatcggatttgttagaaagaatcaataaggcgcagttggaagatcctaagctaatcaagatttgagatgaggtgatggccggttggcctaaggacttttcaatctcgaataacgaaatgctactgtataaagcttaggtttgtgttcctaatatttgtgagcttaagaaggaaatcctcgatgaagcccacaccactgttggaaattattttacc

SEQ ID NO: 157510 - DNA, 1092 bp, Cannabis sativa
taattagcaacgaaacaacaacttcacaataatcaaactttaaaatacaaatcaattaaatattgattctgctataagacaaatgaaaattataaaaagattgcaaaaaaaaatattttataaattctttacaataaatatagaaaattatgaacacataagctaaaaaaatatatttaaaaaatacttagttaataaaaactatactaaaataatactttaaaaaacttaatttaattaacaaaaatatgtttaattaaaaaccaactagataacaatcttaaatatatgaaagcaaacatagatattatttacaatcaacttaaaaaaaatatctatgaaaaattatgcttaaacacaaaatcaacttgataaatttactataatacaattctaaaaagttaacaaatcatttaaaaactaaacatatattcatttttctttaatcaatgacaggctacaaaacaaaataaaaatataaaagtagacaaaactaaacacataaactcaaaatcaatttaaaaaaatcatcaactaaaaaatatatgaaaaataaataaaaaaaatatacataataataaatgcacaaaaattgaaaaatcaactaaaaaataattaaataaaactcaagaatatatttatatgaaaaattgagcttatgtttttcaatctttttaggcaactaaataacaacggaacaacaacaagatattaacacacttgtcgaaagccgcaaaaaaacatgaaaaaatacccaaaaaaaatcctaataaaatttacaaaaataactataaatcacctgtatatttattttttctcttagttgaacaattaaataagaacgaacagtgaactaacaatgataaattaaatagacaaataactcaaaattatgtatataaaaaaaattgcattttgttggacaataaaagtacagctacacaacaacactaaataaatatgcaaattattggacatcatgatattgtcgacaaccttaaagaaacataaccttcatatatgtttgaacaacgaaataacaacaaacaaaaaactttataacaacaccatgttaataggcaaattaaatat

SEQ ID NO: 157511 - DNA, 602 bp, Cannabis sativa
ctagtttatttaaataatttaaatctattaaataactaataagataatataacataatattttaatttaaaatttaaatatttcaaatattatatttcaaatcttataatttcaccaaaaaataaacaaattttgaaaaatatgatatttattgttaggatattatcgtttttttcaaaaataaataaaatatataaccttaattttgaaaattttagggttaaaaaatcctaaaatatcaattcaaacaaaaataaccaactattcaaaaaatttaatgttattttaacaagaatataaattttaattaaaataaatatctttataagataaaatatcaaataattaatatttatctaatcttataatttaaattttttaaaatatatttaaaaataataaatttttgaaaaattgatatctatggttagcaatttaacatcatctaaattacctttaagctttattaatattttaatatgaaaataagatcatttcatatttaattaattaaatatgtgaatatttaatcttataattaaaattaataaattcgataaaaaaaataatcaaattttaaaataaccaaaatagtaagtttt

SEQ ID NO: 157512 - DNA, 525 bp, Cannabis sativa
gtatatgcccaattcctcgttgtatagaggttttgacaggatgggtggttgagctagttgtttttttagctcttggaaagaagcttcacacttctctgtccattcaaattttttatttcctctaagtatgttgaagaaaggtacacatttgtctatggaatttgacacgaatctgcttagtgctgctatgcggccagttaagctttgaacttcttttatctttgtgggcgacttcatgtccaaaagggcttggatcttctctgggtttgcttttattccctgggcattcactatgaagccaagaaacttgcccaagcctactctgtaagaacatttgaggggattgagtttgatgttgtactctcaaaggatcttgaagcactcatttagattctccatatgccccaatcctttttggacttaacaagcatgtcatcaacataaacttccatgttctaaccgatcaggtcgttgaatattttgttttacaagtctttgataagtagcccttgcatttttcaatct

SEQ ID NO: 157513 - DNA, 506 bp, Cannabis sativa
  modified_base (349)..(360): a, c, t, g, unknown or other
aaaactggttaaataaattaagcaaataaaaacagaaactaaagcacatcctacatactaaaaaattatatgcattcatgtatacataattatgaaatcggttattaatgatataaataaaactttatcatgaaatattatatatgaatgtccaaatcaccaaattaattattaccatgaatgcttgattgtatttccctttattacattaatttagttttttattcttttagtcatatttgtatataaataggagttcaccctattagaataaacaactgagaaattatcattcagtttctctttctcttttcatcttcttcttctttttttcttatatattttatannnnnnnnnnnnacgttatcagcacgagtctctacccaagccttacggcaaatattttttacagttcttgaattgtttcaaagtcacgatacactaaatatatatttatatatatactcttctgactgaaacaatttcaagaatcatttggtttcctt

SEQ ID NO: 157514 - DNA, 540 bp, Cannabis sativa
  modified_base (26)..(26): a, c, t, g, unknown or other
ttgaacatataattaagattatattncactgtgctgacaacactataagccatttagaaaacacaagcagtttattgtctttgtaatcaatgtcaaccaccaaccccaccagtgaccctataatcctagcattaattgtgcaaagaattcttggggtatgttatggatctgaatccaaactggaaaacattcttgctaagcgcaggtgtaacgtccccactttaagcctctattgggcccttatgcccaaggaatgatgactcttatacacgagtacatcactctggttgcttcctggaaggaagactgaccctacaaaccaacacgagtatttctagtgtgctttatcctcactcgtatgcttcctgggaaaaacttcccaggaggtcatccatcctgaaattatcccaagtcaagcacacttaactgtagagctcttttgtgatggactaccaaaaaacaagatgcaccttgttattataagttgtaccaattaatccatttaagtcctctttaactgtgtagtcccatacctacaca

SEQ ID NO: 157515 - DNA, 554 bp, Cannabis sativa
cttttacaataaatttaaattctattaaaatagggtacactattataactcttaattattttagttttttaaaaatttattacttaattttttttcataattgtatacattatagttatttaagatatttgtaaaattttaaaaaatttaaataatttacaatatataattcagtaacacgagtataaaataaaaaagtcacaaactaaaaattcatactaattttttcctacaataaaaacaaactaaatataataagtaaccacgtaaattccacctaaaaaggagacaaaacaactcgagggggtatagtactcatatgacgaaaattcaataatagatgccggagagtaggattgtttgcggtgcgggtggtacggtttttgactgttttttcaaactaatccgcacatgcggtttttcaaatttttcaaaccgcactcgcaccgcgaaattcaaaacctgcaaaaatcgccaccgcaaaaaatagtgcggtgcggtacggtttttgtggtttatgcggtttagactattattaaataattaaactatca

SEQ ID NO: 157516 - DNA, 602 bp, Cannabis sativa
gaacatcagaggcctgcacggttattgcagccattgaacataccagagtggatatgggaagatattggtatggatttcgtggtaggtttgcctagaaccagaggatagtttgactctgtgtgggtaagagtggacagctttacaaaatcagtgcacttcctacctgttcggaggaatttctccattgaccagttttctgagttatgtgtcagagaaattgttcgtcttcatggtgtctcaaagtctattatttcagatagagatccgaagtttacatcaagattctaggagactctacatcgagctattatgactccttactaagttcatctagggtcaacaaagatgtatcaagaccaaaatgccatgttttggtggcgaggcatgaagaatgacattgctgagtatgtttctaagtgtcttacctatcagagattaaaggctgaacattagaggtcggcagggttatcgtagacattgaacatactagagtggaaatggaagatatttctatggacttcctggtaggtttgcccagaaccacgagacaatttgactctatgtgggtcatagtggacagggttacaaagtcagcgcacttc

SEQ ID NO: 157517 - DNA, 812 bp, Cannabis sativa
ttatttaatacataacaaatggtcgtattagcttgtattataatatttacaaaggattcggggtcaacaccaatctccaattcggacctgggatctagacacggacccggaccctagacctggaccccgaccccaaactcgggacccagacccggaccctgaccctggacacagacccgggacccaaacccagacccggaccccagacgaaccctagacctgggacccaagaccctggacccgagacccggacccaagacctcggacccagacccaaacccggaccccgacccgaacctagaccccaaactccagacccggactcgaacctggattcggccccagacctggacccggacctggactcgggactcgggactcgggacccaattaaataatactaatataatacaatacaacacaatctattaatacaagtcaataccaaatatagtattgtaaataatactaatacaatataatacaacacaatccaacgtaatacaatacaatacggcgtactaaacgaatccttaaagaatacgacaatacaatcaaaatacttgaaatacgtataaaaatattacatcaaataagaacactcaaaattacataataggcttgaataatatctttttgtcttaaaatttttttcttctctcacatagacggaaaattctaaaaagagtaatttgcagcataaatacataagtttaactctcggctacaaataaatacttaagtttaattttagcggcaataatacctaagttatatttctaaaaatttgtaggtatgtaattattaagtat

SEQ ID NO: 157518 - DNA, 500 bp, Cannabis sativa
ctatcctgattcttggtctgggtctggattcagttatcggtctaagtccgtggttctgatcctggtctgggttctagttttggcccgggtgcggctctagctttgggtctgattctaggtgtgggtgtttgagttcgagtccgagtctgtgtttgggtttatgtctaggtatggaccccgatctgggtctaggttcggttccaggtccagatttagttacagcatttccatcctagtctgggtcttggtccgcgtcgagcttcgtatttggatccctatcaaggtctgggtctgagttccggtctgggtacacgactatgtctgggcccgagttccagtctcagtttgggtatgaggataggcctgtgttcggttctaggtctggctccgggttctggttagggtcctagtcttgttctagggtcctggtttggcgattcttgttcaggttctaattttgtgtccgaggtctaggtctgtgttcgagtttggttcttcgt

SEQ ID NO: 157519 - DNA, 580 bp, Cannabis sativa
  modified_base (149)..(150): a, c, t, g, unknown or other
aatggagaattaatatgcatgttacatgggtttgaatatcttaaatatttatccatagtgaagtaggttctgcgaaataaatgtactgcggttggatgggttgtgatgagtccataattatcttataaatatgatcaatttatatattnntattcgtaaattgattctttaaattattgattagtatgattttaattgtacttggatattttaaagactaatcatacttttagagtcatttggagggatgttagcatattttggtgaaaaatagtggaagtacatcagcgagctcagttttataatgcagagcttaattgaaaattttgacaaccttagaagcagaactgaatttgaagctcagcataaaagttttagatctcgttcttagttttttaaaatatcttgaatcgtttaattttgaattgtattgaaaaagctatggccaaaatactaatcagcagtgctgtacttgtctttttttttaaaaaaaaaaaaaaaagacctaattaattctaaggggattcatctatcttttcaagcactataaatagaaaccttttaggctacgaattttaga

SEQ ID NO: 157520 - DNA, 593 bp, Cannabis sativa
gctatcatcaccacttccattcttatcatcttctcgagcagtatctcgttgaactggtcttgacgagatagcctgcttttagtcaattggaattttttggccatgacgaccatgggatttgactcatcaagagtgtccttgtctccagcactgccttcaacaatcttatcctaattattatcctttgatgtgccttgaggatcatcttttgaggtctcttgaagatcgccatcagaattgttcttttttgaatcgtcatctccaaataaaggagcgtccagatctgtgtcttcgccaacttaacctttgtgacagcccgtagtctcattctaatcttctacatctcctgtcttggcattaggatcaatgaagtgaaaactagatttgttacgggtgagtaccatgattactgaacataatcttcagatggtatcactgctttcttcagctctcaatgaaaacacaaaaatatttacttagatttttgaaaaactaattaagaataattagagctaaagaaataaataattaaaagagaaaaagtaagaacaacacaaacagtttttacatagttggggcgttaacgagcctta

SEQ ID NO: 157521 - DNA, 533 bp, Cannabis sativa
gtccccacactaactgggataatattattttgtagtctcaattaattgatttatttaatcaattatgattctaaataaagactatttcttatttgtgaattttaccaaggatagtcacaattgagaagaaaagaagattcaaagtttatttattaattaagagacattggaaggtctaattaataaatatatttaaatagtaattttatttttataattaattataattattaaataaatagaattaatatttaaataactagagcaaaaaaatagcattattgaagaaaggcaagtttgtttcattaaggacgcaaaataatggcaaaaatctaactcatgggcttcataaggggtttggccatgaaggtccattttaagttattggatctttcaaaatgagcccatttttctctacataagattttcagacaagcgacaagctacaccaaagttgattggaaactacatcaaaccacggttcaccaacataaaaacaactcaaactccacaagacatcaaaggaaaattga

SEQ ID NO: 157522 - DNA, 514 bp, Cannabis sativa
gcctaacttttcttttcacaaatacacagaaataataaaaaattacaaaaatatagttgtacggaattttaaatatttttacaatttttataattttatttacattaaatacagtaaatttttatgtatttttatgttgtactttgttaattttttgttaattgtatattatttttttgttattgttttgatgttgttttaatattatttttctattacttttatgcagtttttcttattgttttgttattatttttatagaataccgtaaaaatataaaaaaaattctttgaacgtaaaaatatataaaaaaaaaataatatattatgtaattatcttttttttaagtgtagggaatgatcttaacaagtaaaactaacataaaatatgaatttttaaaagtactttacttaaatatggcacatttaaatttagctacattttaaggttgtaatgtaaaattactttaaatttgaaaattaagttaatatatgttcatttaaaaaaaaaaaaa

SEQ ID NO: 157523 - DNA, 639 bp, Cannabis sativa
  modified_base (371)..(371): a, c, t, g, unknown or other
atggagcttagaataagcaagatgaaagacaagcattatgcagttcaaaaagcaagcattatgaatggcaaagtcgcattaatcgttacaaaggaaaatcacagagtttctaaacttagggtttttctacatatcttctacagcaaagttaaagttgcattcagaaaataaatgtgcaaagtaaaagaaaacgagaacttactcaaggatcgacatctgggttcagattacgcaaagctaaacgaacaattctcgtgaaatttttttagcaaacttgaagctaaaaacctctcttttcgctctgaacttgattggcaaagaaggttggtgaaaatgagtttgtgaacaaatgctcgatggtatttataggnaaacagcgaaaaggggtaatcatttttgaaacctcatacgcctcggttcccccaaaagcaaatatgggaaatcaaaagcaatcaagtgtaaccgtcaaatgtggtgagagaaaatcgattttcaaagcattaattgcgtcagagcatttattagccaaaaactaaagggacgcctactcagcctcacatcgagtcacgaacagatgcacctgacacgtgtcacccatctaaacataaagacagctcggatgaagtctacacgtaactt

SEQ ID NO: 157524 - DNA, 811 bp, Cannabis sativa
  modified_base (763)..(770): a, c, t, g, unknown or other
gagttttatttaggacataaaacccaacagataggtgacctgaggtggcctcactaaccaatataaagcagcagcctgacaaaacacttaaggcgtacttaagtcgttttagcatggctactgctagggttagaaactttgataacagcatgcaacttacaacccttcaggcagggatctccactgatccattaaccgccggggcgagttgtgggatgatttacaaggacgtccggtaagaaacatcactgagttcaatgatacggctcaggtgtttgtcccgaaggaagaagcccgaaaagaaatgaacttgttaaaatcaagctagagaggtaaacccagcaatgtttcaacagggactgcttccatgagaattgataactcgggggcttctggtccaaaaagaaaggatggaataagggaactgtcgaaggatagaaagaaacaaaaaaagcatgacaaatatgtgccagtgtatactatttataccgagcttaataaaacttgggaaaatatttaccttgcacgtgagcaaaaggtagccttcagcaaacccaagcctatgaggaattcgaggagcaaaagagatcctaacaaatattgtaaatttcataaagatattaggcatacgaccgatgaatgttgccaattgaaagatgagatagagagtctcatcgctcgaggctattttaaatagtatgtgaaaagacagaactagggatacaaccaaccccgtcagcctaataacccaaacaaccagggnnnnnnnnctattcctgtggaaggagaggacatcctggttattttggga

SEQ ID NO: 157525 - DNA, 547 bp, Cannabis sativa
ttgcttctgcgggtagaacacaccaaagtaggggcattgaataccctcttctatatagtttaccttcgatcattgtgtagcgaggcactaaatacaatagcttttgcaccttgtttttgccatttggaagttgctcgttgagtaaataattggtaataggcgtcatccatgttggagacctatctatcatctcgacgtcttcagtttcacatatacttggctcgctcagcatctctaccggaaccaaatttagttcatccaagtcattctgcgaggccagctttgctaatgcattggtgttagagtttcgttctctcgaaatttgttcgattttaaagtaatcgaatctttccaagttcttccaaactttctctaaatactttgccatttttaagcctttggcctggtattccccaaggacctggttcataatcagctataaatcactatgacaaatgagatttttgactttcaaggcatctgctatctttaagccggcaatcaaggcttcatattcagcctcgttattagatgcgtcaaattggaa

SEQ ID NO: 157526 - DNA, 578 bp, Cannabis sativa
atgttatttttgtaatttttactcggcgacaacggaaaatgcaatggatggcaagtttgatcacatgggtaagtttagaaccttatttattagcgggaaattcattggagaaaataaaataccaggtttagacggggttatggaatttgaccattttaccccttattttagaaaatacctaagttgtaggcttaggggcatttttgtaatttgtcaagtggatgacttggtggctgcctagggtgtggacacctggccattttcattcagcaagatatcaaattagtttatctattttcatttgaagaaaatagagaaaaataaggaaaaaagccaaaaattcaagatcagtctctttctttcccttctctctcttcgaaccagccaaaaaaccaggggagttgctgttgatctttggtgttttcagcaagaaattcaagttggattcaagctaaggtaaccctagaatccataaaattttgtttttgaagcttttactgtggtttgattaggtgattttggaaattaggggctgttagggtttagtttttgtgtggttcgaattatagggttcattt

SEQ ID NO: 157527 - DNA, 617 bp, Cannabis sativa
ggttctcggctaataaatgctctgacgcaattaatgctttgaaattcaattttctctcaccacatttgacagttgcacttgattgctttagatatccaatattcgcttttgggggaaccaaggcgtctgaggtttctgaaatgattaccccttttcgctgttttgcttataaataccactaagcatttgttcacaaacattttttcaccaaccttctttgttaagcaagtccagagcaaaaagagaggtttttagcttcaagtttgttgaaaaactttcataagaactattcgttcagctttgcgtaaactgaatccaaacgtcgatccttgagtaagttctcgatttcttttacttttactttgcacatttactttctgaatgcgatcttaactttgctgtagaagatatgtagaaaaccctaggttcagaaactctgtgattttcctttgtaatgattcatgcgacttcaccattcataatgcttgctttttgaactgcacaatgtcgacctttcatcttgcttattcaaagcttcataaaatttttgccctaactctcgaaaatttcaaacttctgagttttgacttttcgtcgaatattttcattctttaatc

SEQ ID NO: 157528 - DNA, 840 bp, Cannabis sativa
agggcataaaacccaacagaacgtgccttagcttcatgatcagatgatctttcgcaagcgatagctcgtatccaaatgaagctacagcactatgataccagaagggttagacagtgtgttcctggaagaccagtttggtttccctttttatttctacacacaaatatggaaataaatgctcccaaaatctcgacataagatcatatcaagataaaggagaaactttctaaataaagatcaagcaattaattcacaattaattgcacataattgtcggatacaatttttaccaattcaactatatttaatcttcctagtcagtagatcatctccttcgtgggttggacttcacaagatagcctaagttatgtaattcaatgtaaactttccaatagaaagaaaaggaaaactaagtgtaattctctgaatactacaaatacccaatgaatccttcagattaagtgttaaattgtctagcaatatttgttcagaaaaacttgagaacttatgctcattgtattcacaaaggcatttttagcttaaagttacttaataacattcactcgtggactaaggatcgttaactctctaaccacttaaaaattatttgtgttgttcttactctttcttttttaattatttatttcttaagttctaattatttataattagtttttcaaaaaattttgtaaacagaattgatttcaaatagaaatcatttttgagggaaaatagtaagtttgcatagttatgtcgattatgaattgaataattaaaatagaatttcaccatttaattttatttgataaaattatattaattatttatatataatattat

SEQ ID NO: 157529 - DNA, 527 bp, Cannabis sativa
tttctgtaacagcagagtgctttgttgtagagacagaaacctgcgaggtagaaacagttcttccagaaacaaaactattagatttaacataagtggtattagaatcagattgatttggaacataacccagacctgcatgattagtttggccagacttttgaattttttcaaaaatggtggaacctggatttagcattttaacattctttttaatgttatcaatttccttggttaaagaaataatcttagactcttttaaagacaatttagattcacaacattttagtttatcctccaactcattaatgttgttgcacaagactttattatctttaaccagggaacgattttcagcacatgtttccaactacttaccaaatattaccttgtaggattcaaccatagaattctcattaatttctgactcatcagattcaaatctagattcttccttgttgtcaacgatcaggatattattcatgcaaatgctcttttctttttcctacaaatttcttgacaaaacactt

SEQ ID NO: 157530 - DNA, 504 bp, Cannabis sativa
aattgattaattaaaaccaattgactgagtctacaagcagtattatctcaactagtttggcgaccatgaccctatgtaatcaatcttacaataagtagatccgaaatttaccaagtaaatttcttaacttattaattccttcttgcgccactatagatttgaaattgaactcttaattacctagaacactctattaccaaaagtagatgtgatttgaattacccattgtttcaatccaaatagtcaaagatcctctataggtgatctacaccgaaaagggacaaatttatcgttctacccttcaatgtattttattcaacacttagatacatataaatgatatttcattaaactaatgtaattattgaaacgagacctcaatcatttatctctattatgccaagctcgaaagattttatcgtttcacttctaaacacttatagaagctatagattccatatctataattagcgctcccactcaattgcactaccatgttctcaa

SEQ ID NO: 157531 - DNA, 725 bp, Cannabis sativa
tctcggagcctcgcctccgcctgggcttccctctgtttggcctcctcctcgagcttcgccttagcaagggcctcccttcgctcagcctcctcctgaatcgcccacctttcagcagacaggtccagcaggatcctcacggcctcgtctatgcccccgaattcgaacatgacgaagccatgattgacgatggtcttgggaaggcggctggtctccgcagtaatctaaaaaaggagataagagtgagatcaaatgccttagacgaaatatcgagaaaagaaataaaccacaagtacttaccgcagccatggcgttgcttatgtcttgaacctggtaggcggagttcaaggaggcacaagcagcgtaccgtttgggcgggaattgagtaagatgggagacatactcgctggtcatctccgaggcaaaaggagccagagtgggcacaaggaaacggttgaaccagtccgtcagtgggtccatgttcaggtcccacggattccgaaaggcctcctcgttgagagtgttttgctgctcctctcgtaaaacactcttcagggcctccacctcagcatgtcctcgagtgtactcgtcgagggcgtagttttatttggctacctgaaggttctgcctctccttgtctccaagaatcgaggtcaacactatgccgtgaggcactgtgtattcctccgcctcgaagggaatctcagagtcatggctcggggccggag

SEQ ID NO: 157532 - DNA, 601 bp, Cannabis sativa
  modified_base (63)..(73): a, c, t, g, unknown or other
  modified_base (568)..(570): a, c, t, g, unknown or other
tgaaccatgcaacattaaatgttacttctgatctaaataagtatatctgattatattgaaatnnnnnnnnnnnagggcataaaacccaacactcttcggatacaatcttcaacctcaggagttctcaggatatatcacatcactcatcccaacctcagttacaaaattcttcgttgtgcgaaaacccacctttgaacagtaagtgattcgtccctttcttcctagtatttctttttcctgatttggtattcttatcttgcaattaatcgcatcattgttcactttgtttggttttagtgattttgatttaatttttgggtaatttctagagttttaataaaaaaaaaaattaggtttatcgtattaataagtttctggtttaaataaattttttccaggaattgggattgttctttttgtaaaaatgtcccaatgtgattttgaagtttatactccagaattcttagaaatagaatgtcataaggaattagcccttctattcaaacccaaaatccagaaaccttaatccaaacttgagataaatgatgcaaaaattagggaccatttnnnaaaaaccaatcaagatgaagttgctagtcgc

SEQ ID NO: 157533 - DNA, 655 bp, Cannabis sativa
ataatttgaaatgactttacacgatgttatctaattcttgggcacaatcaagacaatagatctaaccacacttagatccaagaagataagctctccttgcttccacaaagttgaaattccttcagcagttcagatcgaactctcctcaaacattacagatacgaactccttcttcaacctcttgaagattcaatgaattagcactgcagttaacaaaaaaacacgaaagaaatagtttgccctagcagagcaagaatcaaagacaattctacgaaagatgagagataggaaaaagcaacatgagcacattatatatatactgagttgtagaagaactgactcagctaactaacttcaacaactcaagccagctggcaccgactcacacttgaataaaagatatataaaagctaaaaggctgacatgggaaacaataaaataaaagagactaagcatatgcaactaagaccaacttagatggtcaattcaaaggaccaggacaataaccagggaaaagctaaaaccttaactgtaacgccctaaataattaggcacgctacccgaaatatttatgaagtcctaatcccctaaatgggattaccaattaaaatagcacagaatttaaacttttgtaataaacagaatgaaaataaaa

SEQ ID NO: 157534 - DNA, 575 bp, Cannabis sativa
  modified_base (28)..(29): a, c, t, g, unknown or other
aaataaatattattaatttaaaattganntttaagtttaaatattttaaaaattaatattttattttgattttagggtttgaaaattgaaaattcaaaattcggtgaaaaatcccaaaaaaatcgaatttttgggttgagatgcaccgtgtccgagtgccaaggttccgtgcaacctcattcgcgcgcgcaagaggctgctggcaacctcctccgcgagcgcaggggctgcaatgcagtctcaacttcggacatgagtgcttcggacacgggtaggcattagcttcagacaaaatttgtccccagcgcgcgcgcacgtcaccttgtccgagccctggtgcgtgcgtcgtgcaccaattcgacaccatatgcatctgatttttcaaaccttcataacttcttcattttttatcagaattgagttccgtaaaaatgaaagttgcttaatttttcacaaggaacccaataaagtatttttagattgaaaataaaattattttcatgaaaaaatttcgtaagtcacattcaatcatcatataacacataaaccaccaagaacacatccaaatcaacata

SEQ ID NO: 157535 - DNA, 546 bp, Cannabis sativa
  modified_base (43)..(43): a, c, t, g, unknown or other
ttctggttggaagattacaatcttcctcttacagtcaatactngctgagtatttggataagaaatccattcccagaatggtatcaaaatcttctaagctcatttcaattaggtcagcaattaactccctatcgtctattcttatcggcatagacctaatcaaccttttggagataactaactctctgccaggtaaaagggttccaaaccctgattcataaccatcgtgtggtctatccaatttactaaagattctagttgccacataagaatgagtggccccaaagtcaaacagtacagagtaaaaggagttattgaccgagagctgacctgttaccaccgaaggactggcttctccatcagcccgagaaatggcaaacacccttgctggagtgggttttgctggagccttcggtgcctcaattttaagttgaggccaatccctcttgtaatgccctggcatgccacattgaaagcacccttgacctctacactcccccagatggttccttttacaactggggcactctgggtaagtgtatccggt

SEQ ID NO: 157536 - DNA, 521 bp, Cannabis sativa
tttttaatcttcttaagcatcttattcttcacatccaagtagtctttattacaagtttccatcagcttggtgtacgaaatctttccccacgggtactcgtaaaagaatggaaggttgtcagccattcttatgacaaaaggaggaacactagtcttctcctccttaccagtgaggacgcccataacaaacaaggccatccccaacttgtaaacatcatcaacttctgtgttgctcttaaaaactttgcgcagttagccaaagttgatggaaggattaccgttgaaatattccataatcaaccggtccgaacttcctttctcttcaatttctgcctcagtaggtccgagcaacaagtttaacccggtcaccaaaccaaactccaccctaccaaatctacattgctttcttcccacgtaaaaatgtacctcgttcggcttgtcagatttgattttgtgcaacatcaactgatgaatcaatgctcctgaaaattgtaaagtctctctctcgaaaaactgtttgaa

SEQ ID NO: 157537 - DNA, 926 bp, Cannabis sativa
  modified_base (29)..(29): a, c, t, g, unknown or other
ttatcgtttgctgtatcgggcaacgatantgacatatgtagctcgtggttaacgactggtaagggtactttatgaagtaccgggaattgtgtgattatgaggttgtgagatggattaagcatgttatagtgtgactaaatgaatgttatgttacttataaaattattcaccttccttgttgggtctcagtgactcacgggatgtaagaacatgtgtttatagagatgtaagattgatactttatagagccctaagaatgtggggttatgtattgattagataatcatttagtgtaacgataaagttgttcattgtaaggtgttgtgatttactcataatgcgtagtatgtaggaatgtataaatgttaatactatatagttacgcaagatggatatgtgtgagtcacatatatatgtttatattgagatgtgaatatctacgtttacaatgcttttaatctaataacttttcttgttgagtcattatgactcacgggtgcttcttggtgcaggtaagaagaatggtagatgtgttaagccatgagcctgaggtctcccagcagtgtacatatcaaccgtgttgtcttggctttcgagaagcaggatcaacttttttctaagattggatgtatagcatactcttgtattaacggttttataattggttgtaaaagaattttattagcaggagatccccatattacgacagtattttaaataaaagtctttattttaaatttaattaaaggttttaattaaaccacacttttccaaaatttatagattagtaataataagtttataaaagcacaaacgtggcgctcctgagagtcaggacgttacataagctattcaatattggttgaataggtcattttttcctaaaatattgcataattaaaatgtaatttttcgaaattgattaa

SEQ ID NO: 157538 - DNA, 708 bp, Cannabis sativa
gggaccgagacctggacccgaatcacaagaccgaggacctggggactaaaacaaagactcaggacccaaacccgaacttgaacctggaccagtacctaagaacaagacttggataggggacctagaccagggacctaggccccggaacctagacccaaatctaaatccaggactcgaacccaacccaggacttgacgtagacttgggaatccgaagtcagacctagacctggagccgaaacctgccctaaacccaaacaaggataggaacttagacacgaacccataccacgaccaaacccgaacctggactcatacccaaaattggacccgaacttgggacctgctcccggatctgaacttaaacccaaaccgggatcgaaacccaagacttagacgcagaactaatcccagactcatatcgagatcaaaaattggactcgaacccgaacctagaccaagacccaagaccctaacccacacccggagcccgatccagacctagaacaagatccagatcgaaacccaaactcagaccaggactcaaacgccgacacgaacacgaaccccgatccaaactcgaacccaaacttgagctcagaatcacaagtggaactggagcagactaggactacgaccaggaccaggacaaggaccaggactgagacacgaacccaaacccaaataaaaacccagaccgagacccaaa

SEQ ID NO: 157539 - DNA, 546 bp, Cannabis sativa
tgccgctgctgcggttggttgtggctgcttcaatcttagcagcaatttcttttgttgtgtgtttcttcggcgtcacctttttagtcatgaaaatactttggttctgatctttaatcgtgctgccgatcactattgtccatagttgattcactaatgatccactagttagtattactgctaccaactgatggcttcctcaatcgatgttattatcattaataatttatttttcagtaagaaagaaattagtactggtatgtattcccttaaacatttaatatttgtttgattttatatattaattgtttgatgcttctttagcttcctcaatctatattattactggttttggaattgaataagtgttaatatgcataaaaacaacccattcctgtggatgagtttgttctccaagttggagatatcctttgttagaattcggggataagatgaatggggttccatctcaaaactaattggctatgggagaagtagctcattcatcttatatattacaatttgtttccacgcattagcaatgtggga

SEQ ID NO: 157540 - DNA, 518 bp, Cannabis sativa
  modified_base (69)..(71): a, c, t, g, unknown or other
attttgtaatataaataaaatgataatttataagctttatcttcctacaagggtcaaagtgtgaccttnnnccacccaagttatggatattatatatctgccacaacgtagggctcgggtcgtgacagaaaaatggtatcagagcacccgatttaattatctcggagtgcgtcaccaaatagtttagatttattttaaataataatagtaataagtatcttggtatttatatgtataagatataattagattattagcatccaatcctcgataactgattatcttttggttctcaaacctaagaaaatgcctccaaaaggaaggaagacaaagagaacggttggagaagacgcctctcaagctaatatccaacctccacaagctgaattccctatgaacgccctttttgaagacttaaaagatgttcccgctcaacaaatggatcctgccgctcgacaaagtcatcatttttagatctttcatcgatccaagtgcctgagtttgagggtggacaagat

SEQ ID NO: 157541 - DNA, 555 bp, Cannabis sativa
attaggtgatgcaatatgctaggcattgtaccttattaggtacgggtggtagtgacatatgagtaccaggcataggtacggctcgtctgattatgcaatgcgatatactggtgccatgttgtggcatgggctcagctgattaggtgatgcaattatgtgatatatgggtgcaggtttttggcatggactcacctgattaggtaatgtagttatgtgatatatgggtgccaggctatggcacgagcttgcctgattaggcaacgtgatgtaatgaagaaggttactttatgaggtaacttatatttatttatatgattaaatgaagatgaattctattattggtataatagttttgtattaccaaatatctgtacactgatgtttattcgtggtagatgctagtagtgatttggttttcatcttttgaataatgcgtgatggtttgattatggttttgtatgaatgacggtatccaaataataaactatatgattattattaatattacttttcttgatgagtccttgtgagtcacgggtgctatgtggtgcaggt

SEQ ID NO: 157542 - DNA, 725 bp, Cannabis sativa
taccgcctactttcaggcttgttcattttttactctgcccggagctggggctcgcctagtccggcagaaaatttatatttttatgcacttgtttccatccccaaaaagggagataaacttaaggacggcttttacggtctccgggcctatcctttgaatgagggcccggtcccttttaactaccagaagcatgtgaaggaatatcgtcaccgcttcttcttctcctccggtttccagggcatggaccatccagagcttctcacggagtgggttaggatccccccttacatgcggaccgaacctagtcaaatttttcttcaacgggccaagaccttcgccacatatgacaagaaggccctagatgtcggggagctggtcacaacagagcactgtcggaaggccaagctgatactagggcaccagtcgttggatgactataatctctccaaagtcatctgcccgaacatgagggctccgaccgcgaagaaggtgctccggggtgaaattatcgccatggcagaggacaagtactagaagtacctcttcaagagggaacaggagctggcttacattaaggcccaggggaccgccggaagggcccttcctattagggctccgttggaccgaaggacccccagaccaaagcctgtggtcccagtgccgaatacaggggctcccaatgccagcacttcgggttccggtaagtcccctttaacgatacatta

SEQ ID NO: 157543 - DNA, 566 bp, Cannabis sativa
gctgataatctattcacactcatccaatttctatcaattttgaaacttctaaaaaaataaaactttatttaattatttttttgaatatgtgtagtaaataataagttaaattaattaccacacatatatattagttaaatttatcctaattctagcaaaatttcagtagcataatggctgtgatcagacgttctccaaaattttaaacatgaaaaaataattaataaaatacataaaataatataaaaataacaaaataacattaacaatgtaaaaattatccacccatccgatcacaatatatgtatttgcagaacctgcttcactacggatgaatatttaagatatttaaactcatctaacatgcatatttcacccatccgacagtattacaattaatcacagaacctacttcactaaggatgaatatctaacatattcaaactccactaaataaagagttttaaagttttcatgattatacctttctccaataaaaatagctacttgtacactcttcaatcaacacaaagaacccgatacctataaaatatttaaaatattaa

SEQ ID NO: 157544 - DNA, 561 bp, Cannabis sativa
aattatcctttagtttttctctttgccttttcatttagaaattgcttagatagtatatcgttggataagaaagactataaatcattttcttatgatggatcactttatcattctcctatgaaattgaatggtgcaaatgactatattcttgacattctatcccgaaataatataaatcatcgatcttagaaatctcatacttgtatgtgcttacttaagtcaacttagacttagagttggattagtagtggtggtccaagctagaataattactcattgtatatttagtataaatttaagtctttaactttaaattttagattcaaaatagaaattttaaattttagttttcagaatacattgatcaaaacagcatgactttcacaagttttaataccaattttctatcaattgattcgaattgtatgttaatttatgaatatgaattttatattctatgactagaacccacttgaactattctaagaattctttgttgtaactagacctaagtcatcaaaagacgacaaccacatagtatatatctatggcatttgcatc

SEQ ID NO: 157545 - DNA, 1118 bp, Cannabis sativa
aattttccaatccaatccaatccgtacaagtacgcactttgcggattggattggatcgtgcgaattggattggatcaactatttcatgaacacccctattgcagatcatatcacgttcagttgtatagtttatattaattacacattattgtatgtaaatattaagtttgtataaatttagttaataaaaagaaggttagaaagggtcttgtcttttgacatagtttaaaagtttctctcttttgtgctgtcagtgttcgttgttttcgattgttatggcctctaggtagatcagtgagttggaggcatagtataatggaattgaaattgaaggggaagaagagattgttttgtcatatgagatactatcaaaaattagaataaatgtgaggatgaatgattgtgtcttgtgggcagattcctaacatctcaggcaattgacttcgatgtgatgcggcatatgatgtcctctttatttcaacctgtcaaatggatgtatgttaagaaattggagtataatcattacatattcatgttctaccatgagttacacctgaaacatgtcattgatggtagcccttggacttttaataagattcagttcgtctttgctcgcttgaaaccagtgattgatcctcatagattggtgattaaccattttgatatgtgggtgtaagttcatgggctccaattgaggtttaagtctaatcaggtgcttaaagatttaggaaactatattggttcttttgttgaaattgatcctaaaaattttccggggttatggagagattatttaagagttcgtgtgacagtagatatcgcagttcccctgaaatgttggatgaagattaaatgcactggtagcgagtggtttttggcaaattttaagtacaaatacgttccaacattttgttttgtctgtgggattataggtcactccaaacgtttttgtccgaaggtttttaatatcctattagagtatgtctgtgacataaagatgatgtacatttgttgggctattcactatcatattgatgtcaaaatttaaagtggtgattctgtggctcggcgtctaagtgggttatatggtgaacccaacaaaattttgcgacataaaa

SEQ ID NO: 157546 - DNA, 842 bp, Cannabis sativa
ataattattcaaaataataatttctacaaaattattaccttgcccttaagaattatttcttataaaaattaatttttttatcaaatttattcatcaaattgaacatttctctgtataatgttgtataagggtgatatatgaactatgaacctatattgtgaagctccaataaatacttaattaatattgaactcttcaatagaatcatccagtttattaattatattatcactgcactctttgtcaatatagaattatatttacagaattcttacttgtagtacattgatatagtcaatataagtagtttactctctagttattagttaataattagaatttgtcaaaattactattttacccttctaattatctcttgacttcttatgtaccatttatttaatgttaacagttaatctataatcgaattatagatttggatccaactgttagcactcctaaaattaaacactataagagaactaatgtttgatcctttcagaaagcttggattccattattgtacaacatgttcctagtcactcatgttattaagctcccaaaacagaaattataagaatcgtcttctctaagaaacttttacgagtggctcaaagaacttaataacacatataggagttcatgtatacccaagattcaaactgatctactaatgatcatcgttgtgatatgaataactctctcatggtaaacgacatgttaataaaatatgttatttcattcggtccaatcatgtataatcaaattatacacaacacttttactacatgtttattcacatatgtgatctgaatcaaaattacacacactagagtatagtg

SEQ ID NO: 157547 - DNA, 518 bp, Cannabis sativa
tggctatgcccccagtgctggcagctgtacatgatgtgtttcatgtttcaatgcttcgcaaacatgtctcagattcgtcccatattttgagttgtgaagcattggaacttcaacaagacttgtcacataagatacaaccagtgcagatacatgataaaagaggaaaaattcttgagaagcaagatggttgcactggtgaaagtattgtggagaaacagtaaagtggaagaggcaacctaggaactcgagacagataccagcagaaatatccagagttgttcaggtaaatttcgggacaaaatttctataaggagggggtaattgtaataccctagaattaagtaatggattagcaaaaccctaattggataattttaaataattgatgaattatattattatatagttcaatatatgagattttatttaattaattacacggtaagaccccgttggtgagccaggggtattttagtaattatgacctgagaagggtaaattgatgaaattaatttaat

SEQ ID NO: 157548 - DNA, 578 bp, Cannabis sativa
  modified_base (280)..(290): a, c, t, g, unknown or other
  modified_base (390)..(392): a, c, t, g, unknown or other
gccctggtcggctactgaactggtattcccagtctcttgcacaccaggcgcaatctcatccacaggagttgtcacactgtgacccgcagtcgatggctgtttgttatttacggctagcgaaacccttgtgtttcctagattctacagtacaggatccaccgcctgtggatttgctagatcaaccacgcccctacgagtttgcaccaccatcgtacttgtgattaaatttgaaataaagagcgatccttgattcttcactcaatgaaagcaccaaaatgtnnnnnnnnnnnttagccaacgacagtgagtctaattttgtaagcgacaagtagtttaagacgatcgaaatatagtaaagcaaataaagatacaagaattttatagaggttnnnccccgagcagttcggtaatagcccaatccttgtcatttgtattgactcaagaacaaggacaaaggtcccttttcttacaactcttacagcagtatctttgcatatgaattcttagacaaaatctttcgactctttgctcagtgaatatgcatcactatttatagggctataagcttggagaggaag

SEQ ID NO: 157549 - DNA, 532 bp, Cannabis sativa
  modified_base (49)..(55): a, c, t, g, unknown or other
atcatgtgttttagagaatgacaaatccttttggattgttgattctggnnnnnnnaaccatgtttgttcttcattgcagttgcttgaaacttgggatgttttaaatccaagggagttaaagctcagagttagaaatggcgaattagtatcggtccaagctaagggaaaagctcgcctcaagtttcaaaataaatttttagttttagataatgttttattttttccgaattttagtagaaacttgattagtgtttcatgtacaaacacaattttatcaattgaattttttgagttctatttgcactatttctcgtaatggatttcagttatgtattgcttacatggaacaagggctttatgttttgagaccggatatacaaatcgcacttaataacaaacttttcaatgttgctaaacctagaaaacataaaagaaaagagattgttaataatgatgaaacatatctgtggcacttacgactaggtcatataggctatgacagacttcacaggttaaccaaagatggtccatt

SEQ ID NO: 157550 - DNA, 797 bp, Cannabis sativa
taagggcctccgagaggttttcgcccacttggaggcttgacttttgggagccacttgagaactataccttgcttccagatgccaacacaccttccgaacgttgcatgagtgggcttcaatattaatttttaatccccttttaatagggatttattggacactctcttagacagccaaatattttggtaagaataatgacaataatatactatttatttcggtaaatgttattataattaatattattatttattattttactacaataaatttgttaaaaaaataatatttatgtatttttataactcttggccctcttgtacttgttgttgaacttaattatctaacttttgtctctttatttttcaggagaattaaatttttttgttttgattatttattaaaagttctcacaaatttgttatttaatttttctagagagttcctatctttaacatagatatagattgtatatgtggttccagattttgtatgaaattccataaacatatttattaattgttgtaaatgaaaaaaataaaatgacacataaatttatagggacatgattttgttccgtgattgtactttcacagaatgtattccgtgatgtatacgacagtcgttagatgagcgagttatttgatctgacggctgagattgatttaggggtaattagggttaaaaatagtaacgtgtctgtgactcatctaatgtatcacggaatacattccgtagaagtacgacaaaatcgtgtccctaggctatgtttagtaggaaggagagagagtaggatg

SEQ ID NO: 157551 - DNA, 690 bp, Cannabis sativa
agtttcattcaacctcgtagcttgaacactcaactattatgcaaggtacgtaactgcactatttataactccttcaatcgtaaagagcttgttatttataaccacaaacaacgatttgatggcgaatcatcaaaaaacaaagaaaaagcaacaacgaaacaaaacaaaataaaacaaaaccatatcatctaaacaaaactaaaacactcaaaccaacgtcacagagataagaccgaaacatttaaaactatgtcagttgcgaaaattaaatcgcaatagcaaaatacaacttcgaccaagctacacctaaatctaggcagacctaaacggaatgtagctataaatttaagaaagagaagccctaatttttttccaatttaaaataacattataaaatataaagaaaaaagactttggtatctgcgtgggcatacattacactgccacgtgtgtaagagtgagagagtgtatatatagagagagcgagatagttatgattgtgacaaatcagtaaggtttatttccttcgaacgctttggctttctctgtttcatttcattactgaaaaccctaccaattccaattcaggtttctctctttctttcttttgatcatcatctgattcttcctttgaattcattttttcatttgtttttttttattatgatcatcttatttaaataactattt

SEQ ID NO: 157552 - DNA, 698 bp, Cannabis sativa
  modified_base (438)..(438): a, c, t, g, unknown or other
agtctaagtttcgggtcacatttttgggtagttttttaactttatttctagttttagggatattttatgcttgattcttttgttttaggtccacggatgtttaaaggaagtattcataagaatagaggacaagaaatgaaaaactttaggtaaaatatgtacaaagttcttttctaccaaagcccgtcgcgacgggcagtatcctttgtagcgacggggaataagcttcgtagcgacgggcggaatcctttgtctcgacgggacttggcaaaaagttttcaaatttgatgatgctccagctgctgcgacggggaataagcttcgctgtgacaaagccttcctgatagggctgtgcatgtgttgggttggccgggttgaagctattttagtgggtcaacccaatgagatcggcctattaaattctaacccattcatatnaagttttaattataacccaacccaaaccaacacattattaatcgagttgggttgggttacaacccttaattttttgcaattaaaatttcccaattaaaagaaattgagttgaatgattaaataaatataatgttcaggtaaagttataaaaatttcaaacatcaaaaataaattattacagtcatccaaattcaaaataagtattaaaattagttaaattgtctaaaataattaccaacttaaaataaaatcgatgttct

SEQ ID NO: 157553 - DNA, 683 bp, Cannabis sativa
aaaaatatttataaaatttaaattgatttaagtgaattttatatatatatatatatatatattagatcatttataaatagttagcactatctagaaaagaatattagttattaaatcactatatgttaagccttgtcattgtacatgtttgcttgcggtattggccggcccccctaaaattcaatcctggctccgcccctgggcacctctaccgagactagtatatatatatatatatatgcttagattatcaattcaaagaggaggaggcgggaacaaattgaaggcagaggcggctgctccagggaacacctattgctaaagaaaatgaagaaaaaaatgaaaaagaaaaatagagagagagttttatctaaggttttaatttagcatttttatttttagattgacaaagatcaagaggacgaagaagaagaggattttggcaaagaaagcttggagtattgtgaaaactccaatatgggttttttttttcatcattctcttatttgaaattttgtaatttttgcacaattaagtatgagctaattttctttgggaaatttgattatatatgcctactaatggagaaaattatttccttaaacttatgcatttcaaaattaaaaaaatatgacaactttacattaaatccaaaaatacccttctcatttttcaaacctcaa

SEQ ID NO: 157554 - DNA, 588 bp, Cannabis sativa
cgaacaaacgcttctcatgaagcgcaggatattccgtcttgtttttaaacattttgatgccttttttcttctaaccatgttgcttttattccgtgcatacctgtctcagaagatgctcgatgctctgaagaagagagttggaggaagctcaagttcatctcctccggccaagaaatctaggggcggtgaggcgaccccatcaaaggaaaaggcaccagccggggaggttattgatctttctgaggagctaactgtggcagaccttctgctccaaaaattgcaaagtccaacgattctcaggaggaagctcggacaggcctgaacagtcgaagggcggatccgagctggccaagagcggatctgagcagatgcaggctcctactcaccttcgccaatgcatcgagaggccaagagaggcaaggagatgctcactcactacatgagtcggttggttcctgaggtgagtcatcagctggccgacgctgataccaaatcttccctggagctgctgatgggaggagtcttgagggagtttactagggtgagtctttcttgacagtttcttttaatctttctttacttggctca

SEQ ID NO: 157555 - DNA, 758 bp, Cannabis sativa
  modified_base (649)..(656): a, c, t, g, unknown or other
atctttttgcttagttggttatcttattttttaaaatttgaatattttatcttatttttaaatttaaggtcaaatattttatatttcaaattatttaagtatttttaataaaatgaccttatttgaaatttaaaagaagaatattttaatcaagacattttaatttgaaaaagatattttgctaactttgaaattttgttattttatttgaattaaattatataattagataaatgatatttatttattattttattttattgtatatttaatttaattttaataacatgaaatttgaaagttgttagaatctttttgaaatagatatttaggtttgttgaaaacctaattttttaaatttataggtttaattttaaaattaattatttaatttaaaaaaaaatcgaaaatatttttttttattatttatttatttttttcgaaattatttaattaatttaaagtaaataaatcatatatccaaccatccaacttgttacatgcatgtgtgttttatatattgttcaattattaattttttaaaaaaaacctatgattgtttgatctaaattgctatggttaacttgttgacagatctaatgatttgattttaaccaatggttcaaattgtcaataggtcaaataaatnnnnnnnnacaggtaaattttgcaatcttcttccgttcatctacaaacccaattgtgaaggcccatttgcctcatttgaatgactatactaggttaattaaactagttta

SEQ ID NO: 157556 - DNA, 658 bp, Cannabis sativa
cttgaggatcaacaacaaagcttttctttttataggtatcaattttttgagttactgacaatttttgcatcaaatcttgatatgggagttatatagacagagagaggtttgatttgagattgaatttaaagtgttccttgcaataggggtttttatgtagaattttataaaaatgtaaaaaaaaaatattttaaagtgtaaaaatgaaaaaactcctttattttataatgtttcctacctttttttcattatactttcttaataattattaatgaataatgaaataattagtaatgttttgtttttatatatttatatatatatttttaaaatgacaacggtatttaaagcgagatacggtcatgataattgttttgaatgtagttaaattataagtaagatacgtgctaacaatgattttaaatgtaatggcgattgcaagtaatatacaatacttaattttaaatattctcaataattacatattttaaacttttaaatttaatttattttatcattttatattttttataatatttgttcattaataactcaacatatacaataaaattaataaatactttaaacaaaaaaaaacggcttttttatttttacactttaaaatagttttttcttacatttttacagaattctaaat

SEQ ID NO: 157557 - DNA, 555 bp, Cannabis sativa
  modified_base (54)..(55): a, c, t, g, unknown or other
gtttttggtcttaattttttaatttttggtaagcatcaggttgttgttgttgtnntttttttttttttacttttttgttttggttatgatttgtgttggttttagatagaaacttttagtaactagtagaaaacggtttttaagttgtgttttctttgttgctttaggtagtttcgatttttagggcttttttgtgttctttgtttgtttatttttaggcattttcattatgtgttattttttttatttttcattgaagttttatttgtagactatattcttagtatccttgttttgtccatatttatggtttttattttttagcttgtgttggaaattggttttaatgtttgttattttgtcggtgacggaaaagtcgtcagagttgctgccgacgccaaaaaattcgttgaaattggcattgtcgctggaaaaatcactgaaaaaatcaccaagaaaccaatttctaagaaaccaagaaagcggtttccaagaaaccaatttcttgatgaataaaccactttcttcgtgatttttccattgacaatgccaatt

SEQ ID NO: 157558 - DNA, 885 bp, Cannabis sativa
  modified_base (248)..(276): a, c, t, g, unknown or other
  modified_base (823)..(837): a, c, t, g, unknown or other
taattaaaatttctaatttagaaaaaaaatttataaatataaattttaatttaatattcataaaattatatttagattggtctgaaaataaactaaattatttcaaaaattattcaatttaagttgatccaaaattaattaatttccaactcaaatttaattttctataaacatatattgcaaagttcaaaatttactttatttaaaataaatacatttttcataaatgctttaaaataaaataaaannnnnnnnnnnnnnnnnnnnnnnnnnnnnttggtccaaaattaattaaaaaatgaattttcaacacaaatatagttttcttatttaattaaacattaagaaaattatcatatatttaagtatcatgattaaaatcaaattatatattaattttctatttaattaaatatcactagagaaatacttcaaacaaagagaaaataactatctagactctcactgactaattactctattttcaaataatatatttttgtctatttattttaattaatcattaatgaaaaatttatttgattcaagttgatctaaaattaattaaaataattaattttcaacgaatcaatttttcaaaaaaaaaaatcgaaattatctgcatttaaataatgcaattcggaatttattaaataaaatgattaataaaataaaataaaatatattttgaaaattactcaaatttaagttgttctgaaattaaaatcttcaacctaaaaataattttctatctaattacatattctgaaataatatttaagtattaagaaaaaaattaacttaaatatttaattttcaattnnnnnnnnnnnnnnnaatataagaattaaataatcaagtattaaattaacttaattatttatt

SEQ ID NO: 157559 - DNA, 603 bp, Cannabis sativa
  modified_base (40)..(44): a, c, t, g, unknown or other
aatacatataaaaagaggtatgtttcaaataaatataaannnnnaggtaaatttgattaattgatgaataaaaaaggcatttttcaacttaccccctgtaatttgtggtcacaatagcaaattgattataaaaatgaatagaatctaactgaacgaaaatatttataacgatttgtataattcaagtgaattttttgtaaaaaaaaaattgccaaaacttgttttttatcttctttttgccgaaaaaaattattatttattttttcagttcatggaacaattccatataatataaaaataagatatttttttaattaaattaaaaaaagtaaacataaaaactcaaatttttttaatattacccctttataagtaatacccattaaaagtgcattagatttattgagaaaattagattctataccctttttatattgtcctcttttatctttatctttttttttttaaatctatcatttttacctttttttttaaacactgaaccaatttttctcctgtcacttcaaaatacttttcatgtaacccctttatatcagggtattttggttacagttgtttaacgcccaaatgtgacttccacta

SEQ ID NO: 157560 - DNA, 1224 bp, Cannabis sativa
  modified_base (1097)..(1097): a, c, t, g, unknown or other
tttttagaattatcaagatctgaacttagatcttctctccttcagtttggtcaactaaagtcttccacactatgactgggtatatgacttgatatgagtgggcatggtactctatcactaaatgcttcgaatttaatgaagactaagaagaggaatttgaaattacaaaggcagaaggctctcaattttctagatttgtttgacaaagaatgaaaactaggatattagagatggatgagaataagagcatcttatttattttatagtatttcaactagggtttgggatttaaattatatggattaaaaaagataaaataatagtaaaaaaatcactaagtggacggtccacacaaggtggataccactagttaaaattttgccattttatttcataattcatcttttctttcaataagaccatattttccaatttcaatcctataaatatcaaaactatttgtttaataattataattatttatcaaataaaattacactttatcttatttgttaattaagagactttgtaaggtctaattaactgatttattaactaattaactaagactacaagtagtattatctcaactagtgtggagaccatggccctatgtaatcaagcttacaataagtagttctagaattcaccaagaaaattctctaacatattaattcctcctaactccactatagatttggaaattaactcttaattacatagaacacactattatcaaaaatagatgcgatttgacataacaattgtttcaatccaaatagtcaaagatcctttatagatgatctacatcgagcaaggaaaaatttaccgttctacccttcaatgtattttatctttaaaatacttagctacctataaatgatattttaataaactaatataattactgaaatgaggcatcaatcatttaactatcttaagccaagcttgaaggaaatcatcatttcacttttagaaattatggaagctatagatttcatatcaatgattagcgctccaactcaattaaaataccatgttcccaagatgtaactattaggatgatccattggttagctttcacgaacaactctaanaacataaataacacagttgagatcgaacctaaccttgtaaggattaagatctatcgacctaagatcaacgaactgatattgacttagatagatataacgatatttttatgatatcttatccaagttc

SEQ ID NO: 157561 - DNA, 804 bp, Cannabis sativa
  modified_base (773)..(779): a, c, t, g, unknown or other
ctgatgtcttgaacttggtagacgaagttcaaggatgcacaagcagcgtaccgtttgggcgggaactaagttagatgggagacatactcgctggtcatctccgaggcgaaaggggacaaggtgggcccaaggaagcggtagaaccagtccgtcagcgggtccatgttcaggtcccacggattccggaagtcctccacgttgagaacgttttcctgctcctctcgtaagaccctcttcatggcctccacctcagcatgcccccgggtgtattcttcatcgagggcgcgtagtagttgtgtttagtagctgctatatccgaagattctgcctctcctcgtctccggggatcggagtcaacacaatgccatgaggcactgtgtattcctctgcctcagagggaatcccagagtcatgactcggggccagagtgtccaaccttcgggggcgcttagaaggctcctcttccaccatcttacccttgcgcttgcacacgagggcgacctcttgctcttcttcaccttcctcaagaagtgcctcctcctcgtccactaagacaatagtgcccgaaggggcgctggaggaagccttcccgggagtgaccaattgagaagaaataggaggaggggaaacatcaggactatgggctccagcaagagtggccaagatttcgtccatgggtacggctgctgcaacaagagaaaaggttaagtgttagaacatctatgaatgtaacgtacacttaacaaagagcaatcaagctagtcctaccctgnnnnnnnaattcggccctagcaaagtcccgaa

SEQ ID NO: 157562 - DNA, 563 bp, Cannabis sativa
catttgaatgtcaacttctatctgagagagctgacttgacggaactgtgaatctcattaaaagatgtctggagttgattagtgaaggtaccatgagctcaccttcctatagcgagatggatgccttgctattacttgtttggatttattgtctgtcacacttagtttctaaaatatgtattatacgctaagcaccttaacagtcatcatgtctcgtctgcgtctcttcatgtgtagagaggttgatgcctcgctctgcacatctggtgtcgtatgatttctcgttaatgcacgaggcaacagtttgtatatctttatctcatgtaagagcttacagtcagcctgttgtaaatatactctatcacttccgcatttaatgagttaatcttgttatacacaaaattcagcttaaggacaagtgtcaacgaaaagggaatgtgaatctatgcaatatcttttatggaataactcattaattgcgtgagtatcagagtatagttgtaacccgctcactataaggtcttaggcgaggaatcaatgtacgaactagtacttagtgtatta

SEQ ID NO: 157563 - DNA, 685 bp, Cannabis sativa
ttatttgctaaccatatcatttttttaaaaaaattgttatttttgaaatatattctattaaattaaattattagatttgaaaaatgttagttttgaaatttcatcttattagatattttttttaattaaaattaatttttggcaaaataacatgaaatttttgaaaatttattaatttaggtttgaatataaattttaaggtttctaaccataaaattttcaaacttaggatatttttttaaaataaaattgataatatgctaaccataaaatatcttatatttcaaattgtttatttttgtaatatttaatttattaaattataagattaagaatataatattaggaatatttaaattttaaaattcaagatattatattaaattatcttattagatatttaattaatttaaattatttaaataaacatgaaattttgaaaattggttagatatttgaatttaagttaaaatttaggatatttaggagatttgttagtttttttgattttttttttcaaatattctctaacaacctaaattttaaattctagttaagatattttttgtaaaattttaaatttttaaaatagaagtatcttaacctacttttcatttatctgttacatgttggtttgtaatgtttgattatttatttattcaaaaaaaatttacaaacctattat

SEQ ID NO: 157564 - DNA, 786 bp, Cannabis sativa
ataatgagagtggggcttgaagttttcaagagaaataccagagggcctctttcttttctgaggaagaataggacttggagcgacaatgggtctttttcctttgtccttctttggaattcagcagggacagcaataggttctgtactgacaggatcaacttcaggttcttcactttcagacccagaattatcagcagagggttgatctttgggcacaaactcttcatttgaatcagacaagccctctgattcgtggtcctcctcagttccttcttcaggttcagaatccgaagatgacacagaagggggattctctttgagatttttggcctttgaggatgaagtcatcacctttttccctttggagacatttttgggaagaaccacttcaggtttttgaggagtgggtaccttggaccttgttcgagaactcaccgtgggcaaaatcaccatagctttctcaacatttggagcaccattcgaagaagaagactttgacaatgtgtgatcggatgaatgagattcatcatgatcaccaaacccaggtgttggagtagaaatcggagaagcaatgactggaggagaggtgaggttgtaggtcgattttcgagcttgggtctttgactttttggcagatttcgtcggagcagaagacgaaccaggaactccgatcactggagcagacactgcaggtggggtgatcggagatgtagaagcagagccacgaaagggcttcttggtcggttgagcatttttggtttttgtcatttctctttgaaaccctaga

SEQ ID NO: 157565 - DNA, 519 bp, Cannabis sativa
ggtcagagtttgggattacagccaaggttgtggatcccaaggtccaagttgggattagagtccaaaatattaattaagaaaaaaaaacttttaagaaaaattaaaagtgattttttaaaaaaaaaaaattaaaattttgattttcaattaaaaattaaaaagtaaaaataattttatagaacatattttttcataaaaaaaaaatagttttacttttttcgtaaaaattaaaaaataaaaaattgaataaaaaagtattacaaaagacatcgtgaaaaaaaaattgtcaaatctacataactagacaggaaccacttccctttccctacaatattgaatcaagatctcctgttaaaaaattgtgtattatactgtgttaaactaatttaagtttgacacgttaactaatttttcgtttattaaaaaattaaacatttatacagatttttttttcttaaaatgatcaaattaattgatgtgtgacaataagattctattaattcaaacacaatcttttaa

SEQ ID NO: 157566 - DNA, 685 bp, Cannabis sativa
aaaaaggaataaatgacttaaaatagagaaaatagaaagatatcaccttaaaaatgaatgacacctgttgactcaattttgagggccatagaggacaatgaaaattcctctctataatttcaactttccaagcgagagaataatagtatttctccatatcgtgcttcaatttttggttgcatattcccttatcgatatatttaattataactagaagaagaatgagagtttaattgagagagatagttgtagaaaatattaaaaaatggaggtcttattgaaaacattcttatgattgaataaataccatgttgttatgagaggggaagaccaataggcggaaagatgaaaagaaaaaaaaaatgttaggagtttcatttttaaataataaattagcaattattttaaaaaaataataataaattaacaataaatgatgataaatataatacataaaaaaaataatattttttaattaaaaaaagagaaattaaaatgtttagaaatagtgaaaatgttcacagagactgtcacgttaccatgtgctttccttttatttagatatatagatacattgcttaattaactttattataataaatttcggcgaccatgactgctcggggatgggttcatgtctccgccacgatcattagaatcttcttaatgtaaatttagttggttg

SEQ ID NO: 157567 - DNA, 560 bp, Cannabis sativa
  modified_base (521)..(534): a, c, t, g, unknown or other
tagggtttagtatttagggcttagggcttagggtttaggggtaagtgtaaagagtttagaatttagggtttaaggtttaggatttagagtttaatggcccgcttccagatcgagttctaatttcgtgtcacagggtacgttttaaggttcgggtgtgggctgggtccgagtcctggtttaggtctaggtccgtgttttggtccaggtctgagtcttagtcccaaatccaaacaaaccacatgtcgagtctagttccgagttttggtacggcttcgatttttggtctggggccaggtccgagcctaggtctaattaccagatttagacaccaaatatgggtcgggtccatgcctcgggtcttgggtccagtctcgggtctaaatccagatcctggtccagttctagctcatgtcttgggtcctggtctgggtctaggtttgggtcttgggcttgagtcatgggtctgggtccccgattcaggtcagggtcctagcacccgattgttggaaatattttaccannnnnnnnnnnnnntaccatgtatgtttcattaacatcct

SEQ ID NO: 157568 - DNA, 611 bp, Cannabis sativa
ggcaaacagtttgacagccaatcctttactgatttctgtgcgaactatgatattatcaaaattttctccgccgtggaacatccccaagaaaatggtcaagttgaagcagtcaacaagagattgaaggatacactaaagaaaagacttgacgaagccaaagaaaactggctggaggaacttcctgaagttctatggtcatactgaacaattgagaaaatggcaagcggacagactccattcaccatggcatatggatatgaagctatgttgttcgtagaactcgaaccaccatccgacaaaagattgacgtatagccaagaagccaatgatgtactccttaccgaatcacttgatgaaatcgaagagatgagaaccacagcaaacttaaaactgatgtcccataagaaaaagtagctcggtatttcaacaaacaagtgaaggcttggaaatttttcgttggagatatggtcctaagaagagtatgtataaacaccaaagatagaacgacaggtgtgctttgtaaagaacgcttagtttaatttggaaattagcagttaattaagatttaataatgaaaattatttatagatatttagataattatttatgct

SEQ ID NO: 157569 - DNA, 922 bp, Cannabis sativa
ttcttaagtcaatacaaactaagtagagtaggttattaccaaacagctcggggtcgactcggggtcgaatctcactcttgtgtctttatttatttcaatatattacatataaactatactacaatcaagactcactgtcgttggccaaaagcaaggtcaatattttggtgttatcattgagaggggaatcacaggatcgctctttatatcaaatctaatcataaacacgatggtggtgcagactcgtagaggcatggttgatccagtaaatccacaggcagtggatcctttacttcagaatccaagaaatgcaagggttccaccagccacgaatcctgaacaaccgacaactgtaggtcaaggtgtgacaactcctttgagtggaattgcgcctcgtgtgcaacagactggaaacaccagttcagcagctaatcaggggtttcccaacactatctggtaaatctccgtgctactcttggaatcattcaaggtcataccaacaccctgcatcatgataaagaggaactccgtgctacagtaaatctcgcatttgaagagcaaaggtgcatgtttgttgaatggagggataaagagatagacacgttgagggctcagcaagcagccattgacgaccgaaccaaacaggccattgtgctgatacgaaaagcctatcaggctaccagttaacagcctgcagccgtcattcccctaggcgagacaaacaatgatctagccgtgaacacctctcaaactctgaatggtcagccgtccaatccccggtaacaggttccacctatgggccaagcagtaggctggcagaccttctctagcaattcgtcaagagaagtcacacctaatcactccacccaagttaatggttccggccagctaattggtgaaaccaaccagtcactaagacaac

SEQ ID NO: 157570 - DNA, 606 bp, Cannabis sativa
aaaggaacaaaagattatacatatcaacaacatgtttgttaaacaacacgacacttaatcctttggttagaggatcttctaacatcgacttattggtcttgcaatattctatcataatgtcttattttttgaccaagtctctaacaacaagatgctttatttccatatgtttcgaagcactactaatctcattattctttgaaaagaaaataatagtattatactatgtcaaaaaatcagtactattatcacaatagattagtataggagaggaaatagaatcaactagtcgtatttttaaaatcaaattctttaaccacaaatcttgcaaagatgtcccatatcatgtgacaaactctgcatatatagtagatgatgtgattaaaatctgcttaacacaagaaatatagttgcaccagccaaagtaaaaaaatagtcagaagttgactttaaatcatctacacaaccaccaaaatatgaataaccaacaataactcaaggattgtcgacatgcttatacagaagcataaaattctttgctctttgcaaatatctcatgagtttcttggcttcaacccaataatcatgtccaggattagataaata

SEQ ID NO: 157571 - DNA, 568 bp, Cannabis sativa
gggatcgacctcactcctagtgagtctactacttgaaacgatacgtacacatgcgtgtgctaaatatcgcaacactaggttgactctgggagctccaaaataaatgttcgaattctaataattcgtttctaactcactatctttcagtattttgtaccatgaagacttggagcaaccaagaccaggccccgtgagctgaaaatacacgaatcaacacctcgaaaatcaacatggacacctaatatgtttcaccgagcacctagattgacaaccccaactaggatttcagttttggaaccatcatagggcaaatgggttaaactttacattgggacatgagctaaacttatcatgaacatatttgagacaacagaattagttcagagaactttcaattttgagcacccgaaacacgacacctagcaatcaggttgacaattcgtcaacctgggctacttccaagtattagatcgaaaatatgactcttgcatcttctttgtcttcatcaaaaataaggaaataagtcggggaaaaaacaacccatcctgggtgccattttaagggacca

SEQ ID NO: 157572 - DNA, 641 bp, Cannabis sativa
cataggccgtaggagagtaactgccacgtaaccatttacttattattgagcgagcattgttattgggcactaataaataagaacggagatatatatatacaagtctaaggtgactccggccccatccaaaacacacatgcgatttttcttgattttttgtagggaaatttacatagtaaattaatttttgctatttttttacaaaaatactaccagaaggtattttttactttattactgtattttttgtaagtttcatattccaatatactgtgttaagttttcactggtgttctactagtgttatttagttgttctactgttgttttgagttgttctgtttgtgttttactggtgttttataaatacataatattttttaaaacctttccgtagtattttagtaaaatttaactcaaattgtaatatttttgtaagtttccctatgttaatagtgaaaattacatgaaatatgagattttataaaaaagttagaaaaatatgtcatttataggtttgccactcttctatggcattttttcacattgaagattttttatggtatttgatgatatgccatatttttataaacttattatccaatcccatattttatgtttttgtttttagcttaattagtt

SEQ ID NO: 157573 - DNA, 655 bp, Cannabis sativa
ggactccaaccgtctgaacacttctctttttatctttcttcttttttttatatatgtccggccataaggccttttttaagacatcgcgaccggccaagaggtagtctttgaacttagaattatttttcatttttcagacaacatgctgtccgggcagcttttaatcatggttttacgtgtttttgttatctttaatgaatttcatcctctatttataatcatcgtgcaactgtgtttgttttatctttaccaaatactttgtacatgtataggtgccccctaagtaaccgagcagacttatgactcttggtcacttattttttgcaagtatacttttttgtctgttcggggttttgggttcgaccaaaccttttgtacgcactggatggtaaattaacaacatgctagtgaattcaactcaatttgaattttggaataaacatctttattcatttattgattaaaacaaattgcagaaattaggaattgtactttaaatgatggtcatccggcctgggtactttgaaatttcatccgaacctttgggcgaggtccgtccaaaaggccattcacttaagagtaaatgttctttttgtttagtacttgaggtggtcatccgacctggtacttctattagtagtattttcttaaatgt

SEQ ID NO: 157574 - DNA, 511 bp, Cannabis sativa
  modified_base (444)..(449): a, c, t, g, unknown or other
atttcatttacgtggcatttttttcatattaaaacaatagtaaaataacactacaaaacaataatttgttgttgatttagtaattgtttctctttgcgagattttatagttttttcctggtgtttcaaagattccagtgttgatttgtccgttcccaaccacgaaggagaggtgtcgtttgtgttttgttattgtttacagtataaaagtaaatatattggggctgggaagtataaaagaaataaaaatgggcttggacagtaaaaatgtaaagtttgctgtgtcccagtatttttgaaaatatttgataaaaaaacagtatttttgtaagtttccctttatttatttatgcaattatttcgcaaatacacaaaaacaataaaaaatattataaaaatgcagtttgatgaaattttaaatatttttacaatttttttaattttnnnnnnagaaaatacagtctttttatattgcactcttgttaatgtattgttgattttttattatttgt

SEQ ID NO: 157575 - DNA, 587 bp, Cannabis sativa
ttgatatgccagcgaggcatcctgctcggcctgtcttccaaagcagatgttccaagtggactccacgtgtcaccattcttgtgatgcgacgtcagaatgctaaaattgagataacatttgccccccaagcctgtacgggacttacgaagttgcctgtagactttatccgaactgattctgcctttggatggggacacgtgtcgagcgcgaccgttcgggactcgatgcgaggatgactgggcatcccatcagttttcggctaataaatgtttctgaaaattaatatttcgaaatccgattttctctctccacgggtgacggttgcactcgaatacttttgatttcccatattcgattttaaggcgagaagctgaggcgtctgagattcctttgagacaattacctcttttcctgactttccaataaatacccacaacattggcacgtaaactcatttcatcacccttctttgctaagtaagcttcagagcgaaaagaaaatttcttggcttcaaagtcttcgaagtgccttcatacaagctgcttgttggatagacattgctcaaacccagacatttgaatcttgag

SEQ ID NO: 157576 - DNA, 508 bp, Cannabis sativa
tatactgagctcggagagagggaagacgaagggggaggtggtggtggttcgacgtatgagacggagatgagaggaacatcgacgagaggtgatggtggtagaggagagggagaccgacgggaggaggggtggttggagatcgatggacgagagggacgagaagaaagggagatcgagagagggaggaagacagcgagagaggagggcgatggtgcgaaggcgtgagtggggttttagagagttaagattttcgttttatagggtgtggaaaatggataagaaataggtgataagaaataagtgagcatgtgggaaatagaaagaaaaaaaaaaagtaggtgagcacgtgagaaatgtggcgagaagaatgtgacgattttttaatggccccttatacccgacgtttttaaaccgttgggtataaagatcttttaaaaattagcattttattaaaaaaaaaaatattgcctattttgtttattacgattttaaaccgtcaggaatacta

SEQ ID NO: 157577 - DNA, 907 bp, Cannabis sativa
  modified_base (257)..(258): a, c, t, g, unknown or other
taacataaatgtataattaaaattctttatcacaaaaatacatccgtttaattgttaatgaaaagtatgctagttcagacaaaaatctaatcaactagttagaggtattcatcaaactgcttaaattattcgtgcagtttgaattttttctaaactgcacggtgcgatttacagtttgcagttttgaattgttaatatgcgattcaaatcgaaccccacaccgcacattatataaataccaatttttatatttattnnggtccaatatgtgaatgttcaacttaaagcccactaattattgtattgttaaaacttaattattttttcatatttattttcaaaccttatggtatttttgacaagtgttgctcaagctttattgtatttgtgatagtttaattattcggtgatagttcaaaccgcacaaaaccgcaccgcaccgcaccattttttgcagtgcagtttttgcagttttttagtttcgtggtgccagtgtagtttgagaaattagaaaaaccacatctgcgagttggtttgaaaaaatagtcaaaaactgcaccacccacactgcgaacattcctacaactagttgtgttgaaagagactagtttatgaactgccatctgatctcatgacatccaaataatgcctcgtcccttgcgagaagaagttttctaccagctgcgagccatgagctagtaatactttgagtttttatttctcatgagatggtaattacagtaatagactaagtatcagaaactccaagctctgactttttgggtagttttctgaatgtaaaaaatgagctaagggagctctcattttataggtgaaggaggcccacaaatataggagaaaaatataaataaggtattttctatagttgatgatgatctaatggtga

SEQ ID NO: 157578 - DNA, 575 bp, Cannabis sativa
tattaggctaattatactagtttaacctaattaaaatttaattagcaacataattaattttgaaataaatagaattaattttttattggattatttcaaagttattttagaaaaacaaacttagtttaatgaaatattctagatagtaatttctagtactaatttatattttttaaaatttaattaaatagacaaatatatttaagttgaaaattaatttattaattttagaccaccttaattatgatatttttcttaaaacttaaaattagaattaataattaagttgattttaatcaagatacttaattctttatttctatttcatgaaatttaattaaataagcaaaatttatttaagttgaaaattaatttgtcaattaattttggaccaacttaaattagaatatttttttagatattaaattagatttactaattaagttgattttattctagttacttaattatttttatttgaatgaattcaattaaataaaaaaattatatttaagttggaaattttccaatttcagatcaacttaaattagagtaattttcaaaatatatatttt

SEQ ID NO: 157579 - DNA, 640 bp, Cannabis sativa
gtgacgatctttggaagacaacctggtggctttgataccaaattgtaacacttacttgtttaggcatgttaacgatgctctaggcttaactgtcctaacatgtacaatctccatctgctcgctctcacagctactcaaccttagccttgtccttacctacacatgtaaacaataactatgagtcgacagactcagtaagaaaagtataaacaataacatagctttaacccaaattataatcaggcgcgcatgcaccattcataatcctatccccgagtcaaacacgatgctgagtcaagaacattcgtacgacaatactatcgaccataatgtcagcctatactcagtatgctggtcatactctaaccatactgatgtgacaacatcaatcaatatctgagccaaacatacatctatatatcagtacccaatataactctacgtatattaatactgccatcgatgtaatctaacaagcataataaacatgcacgctaaacatgaaaatacatatgcataatattatactaatcttatctcgtttttgaattcaggtgtgtcggctaacttgagtggaacagttgctcgacgaattacacgcccctcaatcacattattcataaaactggtgagtgacacg

SEQ ID NO: 157580 - DNA, 532 bp, Cannabis sativa
atatgctgggcctctccggggggaacaactggagccaatactcctgctgcaccccctggtgtcccttgtggcaaagctccagtcgcctgacccaggttgagaagaggcaatcggtttttgatccactcgtagaggtgtcccaatcggatcaagttttcaatttcgtccttgagattttcgcattcgttggtgctgtgcccaatgtcgttatggtactcgcatctcttattgggatccctccaggagctgtctttgtacaaaggaggcggtctccggtagtgcgtattttgcctagtagcaaaatacacacgttcttgagagtccgttaactccgtgtactgggtatattggggagtatacccccttttttctcgcttatcctctgtccgggtgctgcctttggaggaccttttactcctcgagccctgggaaggaccggctaaactggctgtcggagcggagtgcgagggggcctgtcaatttatccccgatggatttctaaaatgggacgacgcggggaccaaggcctggc

SEQ ID NO: 157581 - DNA, 716 bp, Cannabis sativa
tattctttttatttttaagtatattctgttaaaccaacgttagatagacacttttaatatataaagatactaggtatttttatatgtatgtttatataaagttgtattagagttgtgattatttaattattaatttaaataataacaataataataaaattaagtggtttttatatttttatattttaaagtagtttttgtttatatttttacagaaatctacgtagcaactcatatggtaactaacggagtaactcaaatcgtaatttttttttttaaaaaaaatttaaaaatagtatatgcttatgtaattcccttaaaattagatctaatacaattcaataatatattttaaatatataaaatctaatctcaaattgatttataaaaaaaatatatctaattaattttattaaataataaaataagtaaataagtttaaatattttaaataatataattaatatatttattataaggtatatggttgattaataatttaaatttaaattaagacttatatataaaaaataattatttaattatgttgatactttaaatttaaatatttaaaaatatttttttcaaattcgttaaaccaataatttttgtttaatatatatataaattcaatagttgttacgtgtcaagtcacgtatgttaattttattttagtttttagttttttaatatcataattttaaaattaataatat

SEQ ID NO: 157582 - DNA, 711 bp, Cannabis sativa
caccagaaatggaaccagactgggacactgaaccagggctttgacaaaacccgtagtcggtgtttggatttgggacccaagcctggaccagaaccttgacaaggatccgaacccacacccggacctgaacccagtcccaatcccaaaagtggacccaaacccgtaccctgtgactcaaaattggaaccaaaaccggaagttgaccgggacaggaactaggtcttcgacttggaatcataatttaaattggacctagatccagaaccgtaacagaaccaggacccggacttcaaatcagacctagacccgaattggaagccgtacccgaatcccaacccaatcctggactcgagacccgaacctgaacttgaactgagagccaaacatggaaccagaccagggacactgaaccagggtaaggacctagaactgcaccccagtctcgatcccgaacctaaactcagaaatgggaccagggacaggaactagagccacaccgagacgcgtgacagtgatccagatcttgactcgagattggggtaacggagcctggaacagaccagtattccgtgtctagatctgggactcacactatgaccagaacctagacgaaaaacaaaactcgaacccagacctagacctgggacccaaaattagaacctgaacaagaattgccgaaccaggaccacagaacaagactaggaccgtgac

SEQ ID NO: 157583 - DNA, 587 bp, Cannabis sativa
attcttttttgtgttaaatttaaaggtaagttttggcttagttggattttgattctctaattcatatattttttttttcttattttatgaagaaatttccttttttttttgttatctaaatttaaataaatacactactatattaataatatcacattattttataaattaacagttaaaattaaaggctatattgtatttttttaggcaagagtatttttctcatttttgcaccaattagctcttatgcatatttacttataaatagcattttcaggttatgcaattgctcaatcacccaagttcaactgtaacatactatattttggcaatttaatggcatgaagcaaaataacaagtattatagatctaaaacaaccaatccaacgatagtttattttgaacgaaccacctcctttggcttgcacaacaacaattcaatcaaataatgaggtaaatgagtagaacttcacaaaatatgtttaagaattccaaagtctatttgataaattatatagtttgattggtgttagtagagctcgaacataaatggtcgagattataattaaaatgttagtataaatctc

SEQ ID NO: 157584 - DNA, 516 bp, Cannabis sativa
tttgtatttgacttttatattaatcaatttatttttagaaggaaagttgtttagcttttctatttatagaaaataaggtaaaaatggtaagtttggtaactcaattcttttccatctatccagctgtgatattttaatcttgtgtgagttttctattttgtttgatttgatttcttgaggagaaaatgggagcaaaactttcctttttttataaaagaaagtcgcacttactgctcacgattctgtaggtacaaaaatagaaattcgtaggctgattgaagatctattttaaggaattttttagtggactgtggtcttgttcaaaccgtgtgtgagctgtcaataaggtgtatattgattataaatataccttatagcagctaggtcatgtacctcttttatatatttgtatttcgctcatatctttagaaaagagagtctttattttataaaaaaaaaagtgtgtttgactcttactctgtttatttgtattttggtattgtcttgagtctgtat

SEQ ID NO: 157585 - DNA, 864 bp, Cannabis sativa
  modified_base (232)..(233): a, c, t, g, unknown or other
  modified_base (510)..(528): a, c, t, g, unknown or other
  modified_base (622)..(630): a, c, t, g, unknown or other
  modified_base (742)..(747): a, c, t, g, unknown or other
gataattcataaactaattattaattttctaattaaaatatattttagtctatttattttaaataaatcattaaagaaaattagtggatttaagttgatccaaaattaattaacaaattaatgttcaactttaatttaattttcaagaaaaaaattttgaaatatctacattgaaaataatgtaattcgaaattttaaacaaataatccttaaaataaaataaaatatattnngaaaattattctaatttaagttgacctgaaattgaaaaatttttgacttaaatatatttttctatttaattaaattcattaaaatagaaataattaagtatctagaatgaaatcaactttattattaattttaatttaatatttaagaaaatattctaatgaaagttggtctaaaataaatttttaacttaaatatattttctaatttaattaaatttcatgaaatataaacaaataattaagtatcttgaacaaaatcaacttaattattaattcnnnnnnnnnnnnnnnnnnnatatcctaatttaagttggtctaaaattaattaaataattaattttccaacttaaatatattttttctgcttaattaaatattagaaaatatannnnnnnnnctagaaatcactatctagaatatttcattaaactaaatgtgtttttctaagataattttaaaataatctaatgaaaaattaatttcttttattttaaaattaattatgttgnnnnnncaattttaattaggttaaactagcataattagtctaatacaattatttaaataaggcaaattgaccttcttaattagggttgttcatgtgagggagggctgagttcagtatgtcgta

SEQ ID NO: 157586 - DNA, 580 bp, Cannabis sativa
atcttccaccaattattgttcaccatcacacggtccaaccgttcatatatcatgttggcagcccttccattgcaccaagtaaattggctaccctcatagtctatttcccgcaatgcacaagtgtcaatggcatgattgaagtttttcatgaggtaccccggcttcccgccacctccaagcttctcatgaatccccctaatctcattaaaatctcccccacaaagccaaggtccgttgtgattccttgctatcctgttaagaagttgccacgaatgttttctttgagaaggatcggggtccccgtagaacccagtaaaatgccaagcaaggtcctcttccttattgatccaagcatcaatatggaaatcgttaaaagaattcaagtgaactgtaaacggctccttccacaagagagccaaccccccactcttgcccttagcatctacacagaaacagccctcataacccaaacggatgcgaatggtctccaggtaattgctttttgaacgggtttcagagagaaacactaaaccaggttgatgttctttcacgatattggccaaagcagtggtagtccaag

SEQ ID NO: 157587 - DNA, 810 bp, Cannabis sativa
cttgagctcttttatgacttttggaaggctaatcctcaggccaactttgactacttgggtgatgctaaggacatgtacctcgagttctgcacttcccaagtagactatggtgaaactgaggtggctacttctacctctggccaaaatgctgctgtacctcccgttcaaacaacagatcctccagcttctactggcccagaagacccgaacaatgagcctaagattccagctgtttaaacacttctccttctatctttttattttttatatatcttattcgaccataaagccttttctaagacatcatgatcggccaagcggtctttaaacttagaattatttttcatttttcagagaacaggctggccgggcagcttttaatcctgatattatatgcttttgttatctttaatgaatttcattctctttttataatcatcgtgcaattgtgattgttttatttttaccaaatgttttgtacaggtataggttccccccatgtgatcgagcagacatatgactattggtcacttgtcttttacaagtatattgtttatctgttcggtgtttttggtttgacaaaaccttttgtacacactggatggtaaattagagacatgctgataatttcggctcaatttgaattttaaaataactatctttattgattttagtgtatttgttaccgtagtaacttacatcacagctatatgatccaatctgatcttttagcttaacatgaaacaaaacaaattgcaaaaataagaaaatgtacgttaaatggtggtcacctgacctgagtactttttt

SEQ ID NO: 157588 - DNA, 675 bp, Cannabis sativa
  modified_base (593)..(603): a, c, t, g, unknown or other
ttggaattggaaaaaaaaaaaatagtgctaaaatagtactcttttagtttgatttaacactaaaattaggttttggcattagagttgccctaagaaaaaaaattattagtaggataattttattgtgatggcatagttgtaataaagtaataatattatgtatagttattaaatacaaataaagtaatctcaaagaatgacatttgtcactaaattatagagagagtgcaaaagagagtataaaagagagtctccttagcactcctcatatatatatatataatataatatggttataatatttatgtattacagaggggcttttgcaaaggagtgttcaaaataatttaataattatagaaaatattatgaatgaaaatataattgtagaaaaatgtgtaaactgtgtttagttgtgtacgataatatgtaattatattcccgttaattgaatcaagtacttgaatcttaaatattattttaaaaaataaaaataaaaatatttttttattacatctatttaatgttaattatacataaatacaaaataattattccttaaagaaaaatatttattaattagtaaatattannnnnnnnnnnattttttattaattaaaatgaacttttctatatattttatcactatattacactacaagaaatatcactttt

SEQ ID NO: 157589 - DNA, 540 bp, Cannabis sativa
atccttgattccacatttcctacgtgaatactatagctctccaatcgggggtcattcgggagagtatcggacttaccttcgccttcggggagatgtttattgggtaggtatgaaagctcaagtggggaactttgtgcgagcttgtgatgtgtgccaacggaacaagcacttggccatgtctcctggggggctcttgcagcctttagatctccccgcccaggtttgggaggatttgactatggatttcattgaggggttgtcgaaatcggaaggagttgacacgatcttagtagttgtggatcgtttgagtaactagagtcacttcatcgccctcaagcatccttttacagcccgcacagttgcaaaagccttccttcatcaggtagtcaagttgcatggggttcctcggactatagtctcggatcgtgaccgcgtatttctcagtcatttttgggctgagctgttccgcttccagggtactgaactccgccatagcaccgcctaccaccctcaaactgatggccaatcggaggtggtcaa

SEQ ID NO: 157590 - DNA, 616 bp, Cannabis sativa
  modified_base (41)..(47): a, c, t, g, unknown or other
  modified_base (566)..(578): a, c, t, g, unknown or other
aaagttcatatttagggtttttaaacaacatacttgtgagnnnnnnnaagatcctggtaaaataaatattcaaacatcctccaacctctttgtgtcactctcaagaaaatcatgtcccctcatttattgcttaagtggttcctaaggtcggccccatgtggccttgcgttttcacttttgtgcttctcctacttgtcgtctaatccccgttggaggttcgtggtggaccagctatcctcagaatgtccaacagctgtcctttcgtcctgattggctataacgccctaatctataggaataccacgtgtgtgattttataaaactagtttaatactaatatattaattaattattaaaaactgtgacgataataaaaacttgactaaaattaaacactaaaaacggacattataacggcagtaaaaaggagttccggggatccctgttataaaatatttatccaaaagacgatgtacaacaacaattcaaaatacagcagacacagccagtctaaaacaactcctagaacctcaatacgcaggctggtggggtcaatatgtacattnnnnnnnnnnnnngccatctcatggttgttctaactttgccttgcccttac

SEQ ID NO: 157591 - DNA, 528 bp, Cannabis sativa
  modified_base (454)..(459): a, c, t, g, unknown or other
accaactggctgctgtggaaggaatgggactaaacctagtgggccaaaggacaaaaagaattgggcttctcattttagggagtgattttggtaccctaggaacaaaacaactaaaaggggaaagaaggaaagtacaccaccatcaacctccattacgtaaggcagctgctgcaattcttttttttttttggaggagtaactacagcagaaagtatagcagagaagaaagaagaggggatcaagccttagtgtttgatttttcttttacccttccttaatagttttctttctctttcttttctattgttgtttgcacttagtattaaaaactttgtgagattgtaaacctgggcagcagccatggatgaatttttctttctttggatattattttctaacttgagtatgagctagacttttgcggcttgaatggctatgaacttctatgttgggnnnnnntaatttttaagcttactttagtatttttgcctttgttcattcaagtgagtttcatttttattagattgt

SEQ ID NO: 157592 - DNA, 642 bp, Cannabis sativa
gaattggtcccaggtgccgcagcacggcttttgcatgctgcggcccgccctcgtgtttctgggcagatttgagtgttaactttgaaaattcataactttctgatttgaacttcgttttgggagttctatattggaaagcttgttccgacctctatatgattatctgtattctaaattccatgtatatactttataaatgtgaaatgaggggttaaccctatttttgtaaatcccagaattgtgactaggattaccggcacttggtggggatttggaatctctgctattgcatgacatcaggtaagacagtagttagcacgtagagttatgcgtggtggcgcttatactggaaatgatatatgtgagtaatttggaacaagaattggggttattaccctaataggagcggtttcacagcctagggttattaccctaatgatatatatgttgtgtaaacgctatgccatgttaaatgtatgagtatattgagattcagggttatgcgttcatggcataaccaggttggaatcggtaactagaactgagatgaaccgttctaaggccttattgtaattagacgtgtgagcacaacacgtaggtctatgttacatagacattaatagggatgtgagcgtaacatgc

SEQ ID NO: 157593 - DNA, 544 bp, Cannabis sativa
  modified_base (373)..(376): a, c, t, g, unknown or other
agcatccattgttgatgctgtaaataatgtccctccatatgttgttttcaagaatgtgtcatctaccacaatcactggtctgcaatgaatccatcctctaattgagtttgacaatgctaagagcacgtacttgaaccggttcttcttgtctgtaatcaattcagttattgtccctggatttgctttttttagcatatgaaggtacattggtagttgctggtatgagtcttctagctttcctcttgccgactctaaagccttttcttttgttctccaagccttttgatatcccatcgaaacgccaaactcatgtagcaagtccttcatgatgtcattcggtgcatgcttcctgtttattgagtcgtatttcttnnnnactatttgagcaatagtattgtatgttgcttccctatgatcttccattatgacatccaatgagcaggtatggttgttgacatattttctaatcttgaatgtttgtgttcgtttcaactttgaagcgtgcagaaaccagttacaattttcgtcaacacatgtaaccatg

SEQ ID NO: 157594 - DNA, 542 bp, Cannabis sativa
attttaggaaacttttaaaattataggaataaatttgtacaaattataaaggggtataaattttgatataggttgtattattagggtcaaaaattgaaatttcccttttagtttaagctgaagtatgggtaatatcattaacagaacaagagcaataaataaaaggacacatcaaatgaaaatatcattaaaattgggtacccaagtagaaattagcagagtcttgcccaaaaatcttattaatcacaacctaacattcagattccaagatcaaatatagagaacccgagggctgagagtcttgagctgtcgaagacgggagataaaagaaagactatttttattttaattatttaaataaaattttggaggacctagtattctaccacttattaacccaagattctagacatttattaaatgtaaataagagagatccaccaaggctaaaatactataggtgaagatataaaagggaaataaatgttttttttttttttttttgccatttgctcttgctcgtctgtgaatttttaaatgaa

SEQ ID NO: 157595 - DNA, 602 bp, Cannabis sativa
cgatgatgacttgtccaaatcaaatgaattattatatccactagtcaatcctctttgcctctcttcttgaacaatagtagcataggccttgttcacacttggaagaggatcatgtattaagatctgagatcttgcaaagctgtaagagtcattcaatccagccaaaattccagcagtctatcttccttctaatattcttgaataattttcattgcaccacatgtacaaacaggttatgttctatactctctaatctaatcccatagagcctacaatcgagtgtaataggtcgttactatgttcgatccttgagtaagactctgcatagtctttttagcctgaaagattcgaggagcattcttctcatttaatcgctcgtgtaactctatcaaaatttcagtagcattaccatgatacattatgctatctgcgattttatcagagatagcatgtagaatccaagaaatgactgtgatattgtatctacaccaactatcatagtcttcatgatcttcatcgggctaaggaagctttccactaacaaatttgaccttatttccagcaatcagagcaatcaacattgctcttctccaggtactgta

SEQ ID NO: 157596 - DNA, 604 bp, Cannabis sativa
tttggaaagatgaatgcatgtttgatttttcttttaaagtctcaactactctagaacttgtttgataatcatttgaggcaaaatttataaattatacacatgattttaagatatgatataggaattttttttttccttggatcgattgagcttttcaagtctaccctatttgttaaatccctagttttacccattttgagcctaaatgttgtcatcttgttttttttaaccctatgcaataacctttgagactaaaaaaattcttattcatcctttttcacaccatagtatattgatgctttatgtatttgtaaaggtgtgagagttttgttgatgagaaaatattcatggttatgtatatgtgatgatgagaaaaaataattattattcccttagaatgaatatttgcaagttgttagtatttcataaaaaaaaaattaataaaaataaatgaatacttgcaacaatttaagtgtgggggaatagtgagttttatgaagaaaaaaaagatataagattgaattgttgaggagagtgataagggaatacaaataggaattatttgagagaatgttgtatgtgtatgctatggtgtgatttgagc

SEQ ID NO: 157597 - DNA, 704 bp, Cannabis sativa
gtctttacttaggccggttttggaagaagaagttagaagtgctctgtttaatatgcatcttgataaatctcttggtcccgatggtatgacccctagcttttttcaaaaatactgggaaatagttaatagcgacgttgtgaaccaggtttgtcaattctttgcgaatggtagtattcctgatggactgaatgatacgaatattgttttgattccgaagaagaaacaacctacttcgatgggtgaccttcggcctatatccttgtgcaacgtcttgtataagatagtatctaaggtgcttgcgagtcgtttaaaagaagtgttgcctcagatcatatcttcaaaccaattggctttcatctcaaatcgccttattactgataatattatgatagcgtttgaggttatggaatatctcaaaagaaagcgtaaaggcaaagaaggatttatggcgctcaaacttgatcttagtaaagcttatgatcgtgtggagtggggctttcttcgagctatgatgagtaagatgggatttgatttgcgtttcattgatcttgttattgctacaattagctctgtgaggtataaaataattcatggcgaacatgagctgggtccaattgttcctgagaggggtattagacaaggtgatcctatatcaccttatttatttcttatttgtgctaagggcttctcatctttgatacgga

SEQ ID NO: 157598 - DNA, 720 bp, Cannabis sativa
cagtgggagtcgaagggacaacttcattcgtcgcaggcggtgggaggccgggaacgtcgcaggcggtgggaggctgggaacgtcgcacgcggtgggaggccgggaacgtcgatctcatgatcgaaagcttttttttgtatgtgtgaatctacagccgtagaaagaaggaatgacagagagagagagagtttgggttttctaattgctgctactagggtttggtgtctttacattctcaataaaaaaaagactttatatttgagagagagagagcgttctattaaaaaattaggatttttgttttttgaaacaagatttttgttcatttaggcgtgaaattagagagaggcatgctgtcttttttttaaaaaaaaaaaaatgccatttattattattagttaagtttgggaacattttccaagtagtaattattttttaaaaaataattaaaaaaataacttttagtgacgcgccagatatgttgggatacatttacccagtcgcaactagcgtgtcactgtaggtcaacaatttttttttttaaaaaaaagaattatataaattatggaattaccctttagtgacacttcatatttttagtgacacacattataggatactaataccgaacatttagagtctaattgtgcatgtcactaaaaattatttctaaatctttagtgacccacacttttctgcgtgtcactaaataatgtcact

SEQ ID NO: 157599 - DNA, 500 bp, Cannabis sativa
gtaaaataaattccaacatgagcacctccacgactgggtccttcatctctcattctaggattttggccctccccatgttgagctctcctcgaacatgtctttcgtgtactaggaccaacctcaggttgggtcctcctggaacgagtggtccgagtgctggggccaccctcaggttaggtcctcctggaacgagtggtctgtttagactgtgagttggaaggcttttggagcccatgggctcttttccaggacggtgatgagtttcttcatgtggtgtgttaacgttctctatgttgtttgccatgaagaagattgttttttatatgtaaggagggttttttctgagctttttcacgaaggctctcaatgaaagcaccaaactgttaacgtagatttttgttaaccagacatgagccttaacggtaataaacttgcacagaaaaataaaaatagtaaagaaaaaagtatgaacacagaggttttttacgtggttttgcagt

SEQ ID NO: 157600 - DNA, 518 bp, Cannabis sativa
attaccatcacgactttgggttgttcatgacctagatctctcttggcctttgagagggtaacgtgttgaacaactcccacgggttcctcttcgttgtggccttgtggcctcctgggctccatacctctcttgccactctctgttgagtctgagagtttcatctaaacgctggcgcaatgcctcattttccatgaacacctcatggacattggtattttgtcgtacaccatgggatggtgatgatgagcctcccgcatcgtggacctgaccttcatcgtcaggcatagattgtttgcctagacgtcgagaggtcccttcgccagcaggctcactgagttgaaactcttcatggtgttccatggtgtttccttcgttcatggggtcatcatggtcctcctcctcatagttcgccagtcttgtactcaccatgatggtaaggggtgattaatacttgtgttcactgctcttaatgaaaacaccaaaccgttgacgcgatttttcatcaacggatctaagaa

SEQ ID NO: 157601 - DNA, 553 bp, Cannabis sativa
cttgcagccactgactttaggattgatcctaagcctataaataccaccttaactttgtcatttgaataggaggagattcaaaactttagagatgagattgagaggtgcagagagagagagagttagagagagagagagagagattgagtttggattttgtaagaagaatcttttgtaaatgaagaagattcttgggtgtaaagtgtgagagtttaaacactttgtgggcactcaatagagaaactcgtctaaattgtattgtacattttcttgctcaatcaataaagaaggcttacagtggtgttccataactggagtagagccatagatcacatcaatctatcggacttgaaccagtatatatattggtgttgttttctttattttctgcatttacagttttctaattttctaatactttgtttgcccctgtttttcatatgattgttgctctcggcttgataatcttgtcattgctaattgtttaattgtttaaagtttagttgatttgattctgcactattagttcgtaattttttcacaatttttaaaa

SEQ ID NO: 157602 - DNA, 634 bp, Cannabis sativa
tattcttgattttaatgcttggcctttgccaaagcgttccacgggcaccacccccaatttttcaatttcgctgtctgaagctgacttagccaaacagtctgcgtgtgcgttcttttctctggggattctttctacttcatagtctatgaactcgtggagtagttcccggactattgctacatatgcagccatcttttctctgcgcgtctgatattcccccgacacctggttaactaccagttgtaaatcattgtagacttacactcttttggcccccacgacttttgctaatctcagtcctgctatgagggcttcatattcagcctcattgttagaagctgtgaattcaaactgtagggctgcctagagtcgaagtgcattcagggatatcattgcaacccctactttgaacctattctcgttagaggcgtcgtccacaaatactttccacgccgagatttgcgatgtgggtatttagcgttagcctctgcttcatgcaactccgtgatgaagtctgctagtgcctgcccttttatggaggtgtaaggaatgtagtgtagatcaaattggcttagctccatagccgatttgagaagtctcccagatgcctctggtttttgtaggacttgtcgga

SEQ ID NO: 157603 - DNA, 900 bp, Cannabis sativa
tctagagaggttattgacctttccgaggagctgaatgctgcaaatccttctactcccaaatctgccaagtctaaggagtctggaccaccaacgactgggtcagaagtggtcaggagggtccctgagcgggtgcaggcaccaacttcacttttgtccgtgctgctagaggccaaaaaggtcaaggagatgctggcccactacatgaaacggatggttcctgaggtcagtgagcaattgactggtgctgatagcgactcatctttggatgtgttggtgggcggagtcttgaaggagctcaccagggttagtcttttttgataattcccttttaacttttcacacttagctccatatgctgactttttcctttgtgcaggccggtttgaagttggcttacacttactcccgcgctaaatctgctacttccaagagtgtggctctgtccgacaccttgagggcggaggcggacttggccaagaaggaagctgaggaggtcagggcggagactggagctcttcggcatgatctgggcgaagccaacaagaagctatttgctaccgagaagaagatctctgtgctaacaaaggacctcgaggctgctgattgctttgaggagaccatcgagatcctatctgctgaagttaacagtcttcaggatgagaggagttctctgcggcaagttcttcttcggctaaaggagaagagggacgccaaggtgattgaggcagaccaattgaaggagaaggtcaatgctttggagaccgccgaccttgagctcttcttcgatttctagaaggctaatcccaaggcaaatttcgacaacttgggcgatactaaggacatgtaccttgagtacttgcgcggcccaagttgcttatggtgggaaagaggtggctgctt

SEQ ID NO: 157604 - DNA, 535 bp, Cannabis sativa
  modified_base (277)..(283): a, c, t, g, unknown or other
gactgggacttggacctgggcctcggaacccagacccagatcagaacttgggagtcggacccgacctagattcgaacccagatctggacccagaccgatatcgtaatctgaacaaggactcgcaccaggacttgaacctcgatcgggtccttgactcggaccctaacctaggacccagttggcacttgggacccgaagtgcgactagactgggacctgagaccatgaaccaaatttggaatcggggcttgggcctaacccatagtcagtgtttgaannnnnnnaacttagacccagactcaaacctagacccggactcagacctagaccctaacctacacccagacctgtaccctagacctgggtccgagtccgagtccgagtctgggtttgagttcgggaactcgaatcttactaagactaagaccccgactgggatgcggacctgaatcaaaactcggatcacgactcgagacctagactcgaacccggacacggacttggacccggacccagacccaagacccggaccggga

SEQ ID NO: 157605 - DNA, 783 bp, Cannabis sativa
tcatacatgaggttgtgacttgtagtacgaagaattaagatcacttagtcatgaataaaataattagcaacatattaaagtttagaaatcattaatcaataattgctactgcgcttaattgatgcccgtcactgggtgcaattaatctcaattcaaattattgatacactatttttattacaagcgtacagtgttgttataacaaagttttaatactaaaaatattttcaaacccacagggattgattattaaattttactaactattatactttttaattttatactttaattagataacacaaagtaaattatattcaagaatcaaataataaagtaaatagaacaataaatagacaagcaacgatttttaatcagaaagtaagaacctagagcattgatttccctatttcaaactatgaatctcaatttaccgattatcccaatttatcttataatttgtagtttcaagaatcctaatgtaacctattaacctctctcaagcgatgataaatttaacttagaataactaacacgatgtctctattcaatgttaaatcaaataagcactcataaagttatatgattctctttaaatgaaactcatagaattagtggaatctctcaatctcacacttttcctatgtcatgcaattttaagtctgattttagattacctctcttaagtgtaaaacccaaaatctctattctaattaatggtgatcaagtattaaaaagatgataattagcacaaaatttcataaacaaataacaagaacaaat

SEQ ID NO: 157606 - DNA, 505 bp, Cannabis sativa
aattaattatataccttaggaggttttggtaaagaagctaattccataaatccatttgatccccatgcatgtctatattgacattcatcgccttctatgcactgtccaaccgtccaaaatttacaaataatatcgatcgaataattagcagaagaataacacattgccatttttgcaattttatggtatatatctgtgattagttctttgtatatattaggattgtaggatttcttgatgtgaaattccaagaatgccctacaccaactcaagcattcaatcaaaacgacagggacaaaaatgtcccagaataaacaatttaaagaaaatgttcaaacgacaaagaaccttgtcgtttctttcctgcacgacagatcgtttacacaaaacgatttgtcgttctttctcgaacaaaaccaagtgcaatcagagctaaccctagctcatttcactcattcgaaccttcgagagtttctcaaactctctctctttctctcctttctct

SEQ ID NO: 157607 - DNA, 511 bp, Cannabis sativa
  modified_base (138)..(139): a, c, t, g, unknown or other
tgcaaagtgtaagtacacttcatcgctgattatcacatctgtataaatccaatgcacgatgaaatagggactttgtctttcaaaacatataatcacaatcacagaaatcactggaattgtaaatgactatatgttctnnacttaacagattttgtatatatatattaaacaataaacatgaaaacaacaagtaaacataaatgacttctaatattttattgataacaaatcagattagattgtaatgggctttaattagggcataaaatccgaacagggcccacatcctatggccggccacatgtgctatattttaccatttatttataatttttttaatgctaaataattcaaacctaaatctagaaggattcctataaatagatagtgattgacacaaattgaaagataatagcagttgatgcacttaagccttttagtcaaaatttgagccttcactcatctctctctattttgaatccttcccctctctttctctcttcaattttcg

SEQ ID NO: 157608 - DNA, 752 bp, Cannabis sativa
  modified_base (27)..(45): a, c, t, g, unknown or other
tcctgattttcagggggtgtctcattnnnnnnnnnnnnnnnnnnntgggccttttcctgtctcctagttcgtgagccacgaggtcttccccatggtcttctcgctccaggttcaggttgattttgagtgttcctcccctacgccgcctaggttgaggcttcctctcgttctaactcagtgattcgacattgcgcctcttccaaacggggtctcaggcgatggctttctgcctcataagttctttttcccacagattgagtacccccaaagttgagctcttcatcccctgcctcgggattccgaccattcccaatcagggttctccttgaacgtgttgtcgtcgtactaggaccaacgtcgggttgagttctctggggacgtgtagtccttctggacgacaaattagttgatcttcaagagcccataggctcttttccagaattacgattagtttcctcatgtggggtgttaatattctctcgattttcagccatgaaagagaaggttttttctttgaaagatgggaaggcttttctgagttttttttttaagaggctctcaatgaaagcacaaaactggtaacgcagattttcgttaaccaaatttgaggctcacaaaaatgattcaacacagaaaaactataaaagtatgaacactggatttttacttggttttgcagttaaaattctccatagtacacgagtcaatcttattcagatttctgagtatgtttttattgggttttgtgccct

SEQ ID NO: 157609 - DNA, 687 bp, Cannabis sativa
  modified_base (60)..(63): a, c, t, g, unknown or other
  modified_base (516)..(519): a, c, t, g, unknown or other
ggtacaactctggaaaatgaaggcgtctcctcctcatcaagtgtgatatggcatctatgnnnngcataaaaataagagaagattaatcaaagtcgtaaataaagtcgcgaaacgtcgagaacaatgtcgtgagaaaaatttgactagtatcgtgacactgtcgtgacaatatcgcgacatgtcgttaaacagaacagaataaataagtccctatgtcgcgataatgtcgtgacaatgtcgcgacatgtcgacaaataaaacagaagcaaaaaattttctgtgtcagccataatgtcgcgaaaatgttgtgacaatgtcgcgacatgtcgacaatataaaacaaaaacaaaaaaatttctgtgtcagcaataatgtcacgataatgtcgtgacattgtcgctaacacatcgacaataaaagacagaatgcagaaaacacatcaaagtactaattaataattaaatacttacaccatcgtccaaccactccccctttagaaacaatgttgtgaagaannnnacatcaccaacaccggtgtgcacattcctaggtcgggcattgggaatgtctccaatcaaccacctcttgaacgtacgcaccaatcgacagtctgctggtctttccggatctacgttctctggaacaactcgcctctttttcttttccgcagtgtagtccttcaagtac

SEQ ID NO: 157610 - DNA, 658 bp, Cannabis sativa
acataaacattatttttattcattaattggtctttgttgctgtgcaacttacataaaatgaatctacaagcttacattacacagatttagcttttagatgtcaagtgactacccttgcttgccttgcatagaagaggccaccgttgaagaatggtgggagaccatgccaaaaaggtcgtgggtactagctcttttgtactctaatgttgagtaggtagaattgctactttggagtagtgttctgtaagttggttaccgatagtatttgcgaaggtgctctccattccaatatcttggtaggtatcaataggaaaacttctagtttttagtttaggtctctgagaatattttagcaagttgtttacccatttatgtgatagtgacatagggcctccgttcagtgcgtgattttccattcaggtcaatcgacacacttgaattcggaaatgaggtaagattagtataaaacatgtatatgtatatgtgtatgtatgtaaattgcatgctatgttatatgattcatatactaccaacactagtacagtaactgtatggagtgcattggtacaatatatgatgttcaaagggtacaaacctgtgataccaacactagtacggttaagtacgtagtgcctgtggtacaacactcaatggtact

SEQ ID NO: 157611 - DNA, 1120 bp, Cannabis sativa
gggcataaaacccaacaaataaaatattatattttttaaataatgttaaaagttttatagcttttaaaaaatattaacattggagatgaatgatgtcccttaataaggggtgggcatcatctaatccaatccaattacaaaagattgaatatccaattacaattggattagatgttaaaagttgaattctaattggaatggatcggttattggatgtcaatctcaaaatctaattaaaaaccgatccaatccaattacatttatatatgttagaaaaatatttatatattaaaaaataatgaaaaatataatatatattaattatatttttattagatttttttatgtgttgaatttgtaatacttggttgttttgtgtatttattttcatgatattttgttctattttattatttagaaatattgttgttttaattaggataaattgcggcataaatacctaatgtttcagattttatacacttaaatacattatttttatttttagaggcaaaaatacttaatgttacaattctcttacactcattactaccatttctgttatctcataaatatggacacgttgagggtatagatgcattacatttatttatttttttttattttaaaacttaatattcttaatatgagaaactaaatgctacttatttcaaaaaaaaaaaaaaaaacaagttctcatgataattttcacatatactgcactggttcactcagttatgttgatttagttttgcatctctctattattattttttttgaaacaagtagcatttagtttttgatatttagaatattaaattataaaataaaataaataaatgtaatgcatatgggccctccacgtatccatatttatgagttaacggaagtggtagtaacagatgtaagagaattgtaatattgagtatttttccctccaaaaatatagataaggtatttaagtgtataaaatttgaaacattgggtatttatgttgcaatttacccttttaataatttaaaacttttgagtacattacacttgtaacgatggtatgtttatgaagtaataaacttatggcatgtttactaataagtaatgggaatcaatggtaaggtaa

SEQ ID NO: 157612 - DNA, 621 bp, Cannabis sativa
attggtgtcatccagtttggggaattatcaatcatttcgatttcttctgtgccaataatgttaggctctttgaggaactagatagggacaaagttcgctttatcatttacattactgctttccaatcgagctaacgtgtctgcagtcgtgttttcttctcctggaatttgaattttaggccagcgatcaaagcttcatactcggcttcgttattggatgccttgaatccaaacttaactgtagcgtgcaggtgttgccccccaagcgtgacaagggcgattcttgcaccggatagttgatctctagccgacccgtccacatgtagtttccaagttggcttgtcttcactgttacttggctaaggtgttagtactggctcgaggtcaccttttgatatgcttttttctttgcctgtgcattctaccacaaagtctgctagggtttggcctttgattgttgttcggggtttgaaggtaatttcgtactaacccagctctactgcccacttgagtaaccatccagaagcgtctgacttttgcaatatttggtgtaatggtcggtcagtatacacccgaacaagatgagtttaaaaatagggccttaactttttgttgctagaat

SEQ ID NO: 157613 - DNA, 831 bp, Cannabis sativa
  modified_base (694)..(700): a, c, t, g, unknown or other
aaaaaaaaaaactattggtttactaatgctttatattttttttatatttattatttatattttttggtatttaaacaaatgatcatattctttatttgataatattttttcattgaaggattgattcgctattgtatttattattagtcggaattgttttattttagatattttttttttattttttctaaaatgtttttgcttcagttcagaaccgaagtaaaaaagcaattagcgttggtgcactaattttttacttcggttatgaaccaaagcaaaaaccttttttctttgcttcatttatgaaccgaagtaaaaaactaattagcgtcggttcataaccgaagtaaaaaaaatagtatttgcgtatacggttataaagtcggttgcaccaaccgaagcaaatacttcatatgtcacttaaaaaccgaagcaaaaagtctttttgtagtagtgtatgcagaattttaactgcaaaatcacgtaaaaaaccttgtgttcatatattttttttctgtgttgaattatcatcgtgagactcaaatttggttaacgaaaatctgagtaaacagtctagtgctttcattgagagcctctgtgaaaaagctcaaaaaatgccttcccttcttttaaagaaaaaccttcttctttatggctaaaaatccatagaatattaacaccccacatgaggaannnnnnnatcgttctggaaaagagcccatgggctctagaagatctaccaatccgcagtcccaaaggaccacccattccaagagggctcaacctgaggatggccccagtgctcggaccacacgtccccggagaactcaa

SEQ ID NO: 157614 - DNA, 561 bp, Cannabis sativa
agtcgggttttaacccgatacccataaagttaaaaaaatcaaaatattttttttattacaataaaaataatattaaaattcatctcaaatcactatcagacaagacaacaatattatatttactattctcctaaaaaggtaaaaaccctaacaaatagaaactcctctctcccaacggcgattgggtgcttcttctttggttggggtctcattccagtgatcggttcagtctgacgaggtactacctcatccctaacatccaaagcttcctctgctctcttctgttttttcgagatctaaccgtccgtaccccgcccgtgcctccgcctgtgtctggccgtgccctgtccgtgtccgcccgtgcctgcttgctgactaccgagtaccgaggtatctctttcactttgttgagtttgtttagttcttattaaattatatatacatagtacactacatgatcataatttatattattgataactctatgaaaatagagttatttatatctttttggacattaaattagttttgttctcaagtatttttaatttattttagtga

SEQ ID NO: 157615 - DNA, 585 bp, Cannabis sativa
  modified_base (66)..(71): a, c, t, g, unknown or other
ataaaaattatttaaatagctataaataatttttccataaataaacataattaactgctaatttcnnnnnnaaactaagcggtctttacatatcatgagcataaccttcccacccgacatatgcatatataaaatgcatatcaaaattacatactgccatgacattctgagttggtaccccttttctaccaacaaagggtacttgatctttaggaggaattacagcattcacatgtacatcgtctattgagccaatacaattctaaaaaaaagaacactaaattataaacatacactctagctagaaaaaaaatgtataatttgaaagaatgaggcaagtatctagaatctttcaatatctcttcaggaacatctttaaagtttgggtgtggtggtgctaatacatctacactcatatgacataaaacatctaaaaccttattgaaatatcgactaactgtctcacctgagtgttgaaatcactcttgtgttaaccggtttccagcaccgtgacctaatgtaaataaaaacatgcctaatatttcaagagcacacattctctttgaacccttaaatccataatta

SEQ ID NO: 157616 - DNA, 860 bp, Cannabis sativa
tattaatcaaaacttaatttaattcaaactttaacatcaataaaatgatatttttgaccactaatcactatgcaagatatgattagacaataaggggaagcagatcccagatttaagaggacaacaagctcgtcttgtatctattcttgtactattgacacttcctattgtaccactggatgtggtgaaatatatgaaccaaacttacaagcagattagtaagtgaaaattaaatgaaccaataattatgggatagaacaaaaggttctaaggtgatcagaatattggtcaaagtgagaagaagaaatgacaaccttattctaagtgttcaagatgcaaaaaggtgccatttgagctaatgtagagtcatatcttattattgcgaggtagtgggtcatctgaaaagaacctgcccacagttatgaaagattgatgttaaagaagaaaaatgtacgggtcctatccaagtattggttacaactctaaaggacttggatatcggttctttgaccgacttaggtaaaaaatttatgggcaatgttatacttgttatttcgatttacattggtattaaacattgtacactcaatgaggggatttcaaaagatcagaatggactatgctggtatgttatttagtggtagttcatttaacaaggtaggcaaattagagaaatggcgatatgagttaaatttgctaatatttctaagtgcaatataggatatgagtagttaatgaagttatccatctaattggtttagggaaaaaaatcttttgatataaattgatctactcttagggtccgtttggtacgcaggactggattggattagacaggctaatttgtccaatccagtgtt

SEQ ID NO: 157617 - DNA, 501 bp, Cannabis sativa
agccaccactgggtctatgcctccctcaaactcgggtgagtgttgttttcgaaatctctctactaacatctcatgtctagcctttgcagcaggatataccacttgaactggcggttccagttgatgtctcagctgacgaagttcttcattttgcctacaaatagtttcttccagtgcagcaaagtgctcttcccatccctatggtggttgtggtggttcattgatcccaccattctgttggcctctatctcagccttggccttggcctcgacccaatctgactaaccttctaggaggcatattcaaactcctaaaccacacaaacctaaaaatattaagaaggcacattttgaccatcacctttagatgagaagaatatcacaacactacatgaacaatttaaagacaaattaatcgtaaataataaccacttacagtacagtgagtcgagctcatctcgtgacaataaactttacatgttagggctaaccacattcttta

SEQ ID NO: 157618 - DNA, 568 bp, Cannabis sativa
agatattttatgacttttggaaggtcaatcccaaggcaaactttgattatctgggcgcttctaaagacatgtttcttgactactgtgctgcttaggcggcctactgggaactcgagacaaccacttccacctctcctatcgatcagaatgttgaggctccttctgcccagaatgacgatcgtctggctccttcaaatccagttaactcataaaaagagcctgggactcctactatttaattgctttccttttactatcttttttttatctgtttggccaattaggccttcttttaagacaaggtgaccgaccaagcggtctttaaacttggaatatattttcattttttgaacaacagcttaccgggcagcctttaatcctgggtttgaatgcttttgttattcttaatgaatttcatcctctatttataatcgtcgtgcaattgtgttcgttttgctttttaatatttaccaaatgtataggtgccccccaagtgaccgagcagacttatgactcttggtcacttgttttttttacaagtatgctttttttgtctgttcggggtttt

SEQ ID NO: 157619 - DNA, 945 bp, Cannabis sativa
  modified_base (26)..(40): a, c, t, g, unknown or other
cccttcaaaacaattttttttttttnnnnnnnnnnnnnnnttacgaaattctacataaaaacatctattgcgacaagagctgcaacctaaattgcaacaaaaaattatatagaaacccatattgcaactatcactgcaaccactttaaaaactcaaactgtaaattaaaaaaaaaaaagttaaaaaaatagtatataaggtaatttacctaataaaaaaccataataaatttttttaaataaaaataatcttattctaaatagcaaagtaaatttataaataattacaaaaaaaaaataataatgtttgtatgactactaaaaatactatttttagtgatattttcactaatagtccaaacaaaattacttgttactaaaacataatatttaaaatacaaattgttattaatttaattttagtcacaatttattattaataaattatgatttatgtgactagagcatcaacaataggaacaatttttagtgttgcctaaatgaacccattattagctcttgccgaattaatttttttttgagattatttcacaaatacacaaaaacaacaaaaaaattacaaaaatacggtttcataaaattttaaatatttttaggatttttttattttatttatagaaaatacagtctttttatattgtactcttggtaattttttgttatctgtatgttattttttgctgttgttttgatgttattttcatgttacttttatgtagttttcatgttgttttcgtgttgtttctatgaaaaattataaaaatgaagaaaaaaaattctctaaacgtaaaaatataattttttttttatatttttgtcttacgtaattatcccaattttttttccttttataaaaagaaaaaaaaaaaagagcaccataactatacaacaacgactcaattacgttaactttacaaatctctct

SEQ ID NO: 157620 - DNA, 505 bp, Cannabis sativa
taatagttatcaatttaacttgtaataagtttaattataaatttgtaaaaacttcagttagaaaagaaaatgtattgttataaatttgttaattttcataatatattgaatattatatattatatatttatatgcaatatatataatatagatgatgttaacacgtacgtacgtagatatataagatgtatatacataccaagtgggtactacgtagtctagtaatgagcaaggctggcatgaatgatacaactgcaccaaccatgcattcgatcttaattatccatagatttatttacttatttttaagggaaaaaaaaagtaattaatatttttcgaaaaagtattaagtgtaagttgacttaaaatttgtcaaaaaaaaaatagtgaattacagcaaaggaatccaagggtgaagagcatatagtattaattattttatttattgtgataataatgctatgcagtatattattattagctagtatgaagaatatcagatctc

SEQ ID NO: 157621 - DNA, 561 bp, Cannabis sativa
tttcagacttggtcattttcttagaaaattagtatttattgtaacaaacactttgttatcttaatgacaataggatggtccactcctaatcatttagaatagctataaaacatgtaaagtttagttaacacttctatcttttcataagatcacgattaggtcaatcatgaatctagtaatggtttacactaagtatacaaccattccatcattctaaaatattcctatcacttgggtattccctagaaggacttaggcaactggtagtaactaatcatagaccttatactatcgtcaatatacaaatcgaatttctggggagataagtttgaatacaattcaaaatttaacttaatgatctttgaactgcatatccaccaaattttctccacccctatcagtttggaagatccctaaccacttaccttaatgtttttcaacattgctagaaattcatgaaatttttcatacatttcaaatttctttgcactaacgtaaaatctagagtgatcgtctaaagaatataacgaaaactcatacccacccctgaatgtacatcca

SEQ ID NO: 157622 - DNA, 651 bp, Cannabis sativa
aaattattaaaatggggtgtacttataaatttttggggtgtaaataaaatttccctttattttataatattttattttatttcgtggtttttttttataagtttgttttttattttttttttaattttttaattttatttttgaaaaatattttttttttatttattattggtaattttaatgtgcttaatgtcttatcgttaatgtgtttagtcctatttttttgtacttttttaaatttgttttaattttttgtactttttttaaaaataatctttttttacttattattggcattatcgttaatgtgtttaatgtcacatcgctgtggtcttatttttttgtacttttttaaatttgttttaattttattttttttaaaataattttttgtacttgctattagtatttttaatgtacttaatgtcatatcggtatgatattcaataagtggtttgtaattttttttgtctcttgtatttttttcatttgttcggatgatctttgtactatttactattattttttggtaaataattattaatgagttagtaattttttatgaatgatttttgtaccatttattattttttttatcttttatgttttttttgttttatttttttaaaatgattttttgtacttgttatt

SEQ ID NO: 157623 - DNA, 689 bp, Cannabis sativa
  modified_base (87)..(114): a, c, t, g, unknown or other
  modified_base (638)..(664): a, c, t, g, unknown or other
tggcccggactatgatgaacaatggagcttctgcaaatattctgttcaaaacaccatatgaaaagatgggactccaactcaaagatnnnnnnnnnnnnnnnnnnnnnnnnnnnngtttctctggccagagcgttgcacatttggggaaaattggcctacctctcactgttggacaagctccgaggagcataactgtgatggcacaattttttataattgatgtcccatcagcctttaatgttatgttaggtcgaccagccttatacgacttgaaggctgtcacatcaattttccatttgtccatcaagttcccaataaagaatggggaagggtgcctaaagggaaatcagcaagttgcacgggaatgctataaccttgccctgactaaggccaaaaaggaagattcctctggccagagttcgaatagggggaaaagcattgccaaatagggaactggccaaggcggggacgaggatgtggatccctgacttggggaatcacatagaaatgttgggcgagtggaagaattggaagagatagatttcgatccaaatgtcccgactagaaaactcaaaattggcaaaggtttgctgcttaaagtaagatcagctttgataaaattgttgggttttatgccnnnnnnnnnnnnnnnnnnnnnnnnnnngatttacttattaataaagataaaa

SEQ ID NO: 157624 - DNA, 512 bp, Cannabis sativa
  modified_base (452)..(481): a, c, t, g, unknown or other
catagtaggcagtttatttacaaacttgaccacactttttacaacaattatcccttgaaatcatgggatctgattacatatcatgctaagtaaatgcaatttttatttaaatttcacaactgtgaatatcccgcttttactgggtcaaaacgaatgtgtattaaatatattgtcagccatatcgtattggaatgcctcgacgggaatagagtagagttaatcatgatagagagctggagctcgtcatatatatttccaagattgataacgcttttattgtaaatctgacaactgcagttactggtggcgagatgatctttttcgcgtgtatgccttcctacattgaggtagacgcctcgccatctctcacttttgctcacccatctgttctacttagtttgtataccgtacattatattctaagtgtctccatttgttggaaattattttannnnnnnnnnnnnnnnnnnnnnnnnnnnnnttattaacatcctaaataagaactttctaaa

SEQ ID NO: 157625 - DNA, 776 bp, Cannabis sativa
  modified_base (190)..(207): a, c, t, g, unknown or other
tctgtagtggctgttattgtttgagttagttttctggagtttaaatatgtttagaaatgttgttttgagcatgatttaggggttgttagtaagtttaactaagttttgagttttagaagtcaaacttggagctctaatggtgaaattcgattctgaggatgggtagttgttttatcacttggaaaatgtnnnnnnnnnnnnnnnnnngcaggtatggaaagtttggttgagtttggaaatgatttgattagcgtttgaaattttttggtttttctaggtaataccggctaaccggttttacaatgcttgtaaaactggttacccggattttgtagcagggaaacttaaaaattcagcttgtcgttttgcatctgttttaggtttctagttggttgattccctgctagtttagggtattgccatattaagttgcagtagataggtttttggttttaaacctaagtcccgattgtgatttagcgagtcacttatgcgagttgttatcgatgtgatttaggagcctataatttgccaagcaattttccactcaggttgaccgacacacctaaattcggaattgaggtaagattattgtaatatcatgcatatgttattacatgtttagtgtacatgttgttatttcctattagatgacattgatagcagtaatagtattcatagagttatgttgattactgataaatgtatgttggctaaaatattgattgatgttgtcacatcaatatggctagagtacgactagcatattgagtata

SEQ ID NO: 157626 - DNA, 635 bp, Cannabis sativa
cctaaaacttgctaacaacataggtgcaaaatccataattaaacaagttcaagttacaaagaaatcacaatcagctccccttttcaaccctcatgcattcaaagcccaaaaacattactctcataaaatttcagcaagggaaaattaaatttaaaacagtaattactacctcaaattacagcaagaacaatcctcaacacctccaaattcgatgctccaaaagttagcaaagattcaagctatttctcaacaaaaatcaaaacttggaaaataagtttagcgagagagagagagagagaggtcttctgggtgttgaaaagcaagaaaataaaatctctcttttacaaataattccatttactacaaataatacatgtaggccaaattaccatattgcccctagggccatataagacacttaaaagcattcatggacaaaatggtcattcacatcacaaagaaactaaaaaaaaattcagattattcacacataaataaaatgccaataatttatcccagaattcgaaatactaagttgtggctatactacgccaacttgtcagaacacacctgaaaaaggacacagcagatatactatataataatatagttcataagcacgtaaataaattaaa

SEQ ID NO: 157627 - DNA, 502 bp, Cannabis sativa
caggattcaagggctgcaagcctgagaaaatgttggaggaggaaggctcttttgagtgaggtatctgacttttgagtaaggaagccataatgcaggaaggataaatgaaaaactcaactgaactaacccagaaaaagaaaagagagttgaaagaattcttagataaaaaagaaggagctcaacgagaagcttatttatacaaaagattgcatgcagattaataaagatgccacaaaacggaaatgaagagtcacctttttgcattaaaacacgtgccaggcaaaacacgtgcacccaaatttcaagaagcggccctaagagtatatatgtctttccactttccaaagcacaccattcaaaaaaaaatcgaaataagtacgtgtaaatgtatgtataaatgataagtaataaatacacttaatagagccgcagctccccaaccttatatgaaacaaacacaaaacataggaagggacatcaagagtaataaatacaaacccat

SEQ ID NO: 157628 - DNA, 564 bp, Cannabis sativa
tcaaaagtcaaagtttttgggtggctcgtgtctttagataaagtgaacgttcatgataagatgcaaaagaggatgccttatctatccatcttacctggttggtgtgtttgctgcaaagctagtggggaagacgttgagcatctgttcttaggctgcagtttcatccgttaattatggatcaggttgataaaagaatttaatctgtcgtgggttatgccaagatgtgtaccacaattgatagttagcaaattaaatggtagcaaaggtaaaacaaagatttggagaacgacaatactagctataatatgggttgtgtggttggaaagggatgctagaatttttgaaggggtcgggagttcagtagaggacacgtgggagaaagttaaaatttagagagctacttgggtttttaaaaccaagttttttcgaggattttgtctttcgtaaatttatgtagagattggaattcattgttgtaaaggaaatccttaaaaaactcttattgttttctcggcaactatggtgtgctaactatcctaagtgtctctttgtaatatggttttc

SEQ ID NO: 157629 - DNA, 568 bp, Cannabis sativa
attattgttattgttatatcattttttcttaaattggcctcactaaaactttatgagtaaactcactaagaaaaatgtcaaaataataaaaaatgtcaaaataatattactaatcaataaaaatgcatctacacataactggagttgtcacataaatagaattacttattgctactaataaatgagtaacactattagtaacacaatcaaaagataaattagtagattggttacaaatagaattataatattatgatgattacattatatgagaaaattttcattatattgaaaaacttatgtaatgaggattatattacaaatgactaaataaattaaagttaagataactataatatcatctctttatataaattttgaaaaataaaataaaaacaattttattaatctatcacttatttcaatatttattccaacaaaaaataaaatataataattaattcatattaccattcttattctattacaatactattattattattatcattaccattatatttcactaaaccaaacacctaaattagtaacaataagagaaattatt

SEQ ID NO: 157630 - DNA, 523 bp, Cannabis sativa
aacaatgaggaatcagcctttgatgtagtaaaaccccagtcaagaagagtagtttttaacttgtcattccaagcccgaggggcttgtttaagaccataaatggccttgtgtaaatgacacacatggtgaggtttagtggggtcttcgaatcctttaggttgcaccatatacacagtctcttcaagtgtaccattaagaaaagcattggatacatctaattgtttgacttcccaattaaaagaaacagcaagagttaacaccatgcgaactgtaaccggctttacaacggggctgaaagtttcagcatagtcaatccccggtgcttgtaagtaacctcttgccacaagtctagatttgtatcgatcaacactgccatcagaatttaatttgatgcgatgtacccatttgttatcaattagatgcatatgaggttgatacggcactagagtccaagtaccatttttcttgagagctgtaacttccttgttcatagccgcattccaagctggatcttgtagagcaa

SEQ ID NO: 157631 - DNA, 601 bp, Cannabis sativa
cggttccatggcacctgttttctcaggtgaccggccgccgctgttggaggcggtccatctctattgcgatggttatcgccgtcggtcagaggctcttggtggatccatccttttgggcagcgtggtggcgttgttggtgggcttctttgagctcccatcatttcgtctttgaggtttttggttggttggggtccttctcaggcgggtgttttggctttggagtgttgtttttcttcctatttttttcaaatctcagtgtttccttatgggtttctattcaggcgtcctggctctggtgcacattggctgttgtttagctttcggagtgttgtagatgtagaggggggattcgggtcttacccaaagggatgtgcttcccttgtcctagcaccttcaccattcagaaccgctatgggagattgagtgtggactttccttgttggaagtttgcagcaactctttgtctttggcatgtttgttttgggctctctggcagcctcctctgcgttttgggagtgttctttgaagttcttcaatgttatttgcttctttgttttgtgtattttagtttaattcgtctttttgatgttgttcacctttt

SEQ ID NO: 157632 - DNA, 508 bp, Cannabis sativa
gcgagaggtattgaggcaaatcctgaaaaaatcaagacattaatagacatgccatcactgccaaagcctaaggaagtacaagcccaaacaggtagaatggctgcagttaacaaattcatttcgaagccaactgataagtgtgtgccgttcttcaacatattgcgaggcaataaaaagttcaagtggaaaaaagagtacgaagaggcctttcagaacataaaagggcatctcgcaacgcctccaattttggcaaaaccaataacgggagagatgttgtttctctatttagtcatctcgaaagatgcgattagtgcaactatagtgcgagaagagggcaagtaccaacaacctatttactatgtaagtaaaaggttactagggacagaatccaaatatccctctctagaaaaacttgcattgtgcctagtccatgcgtctcgtaaactacaaccatacttccaggctcaccctataaaagtgttaaccgatcagcccttgagacaagttt

SEQ ID NO: 157633 - DNA, 615 bp, Cannabis sativa
tatgttgcaataatgtaatatagcgacagaatttattaaacattttatttttattttcacaaaacagcaaaattttacactcaaaacaacttttttaaaaagggaaacttacattatacattttaaaaaaattgtattaaatacgctacaacagataatctaaattttttcttcattttaaattttttttaaaatttactattcttgttatacatttataaaatattcattgctctaaatatattttattaaggatttttttttcagttttaaccaaaaaaaaaaagtaacaatattacaaaaaaaactttcaactggccaaaaaaataaatatacaactcaaataaaaaaaattacacaaataccacttacagacaccctcaacccaggattcatgcttcctgggcaattatcacgcaaccatcgcgcaactacgcagcaacctatcgcaattgaaacgaaaattcaaccacaaagagaaataccattaattctggcaacttcacctgagaagacgagcagaaacaatcaaaacaggggctatttcgaattcataaaaaaaaagtgtagaaaactactatgaaactaaaattcaatcggaaatccagtttaatt

SEQ ID NO: 157634 - DNA, 659 bp, Cannabis sativa
ttggcggggttataattttcacaatcgcgtcaatccagaaagacaaagaccaaatccacccagtggatactataaggtctttcgaaggtaacagggcaccaaaccccgaagcatatatatcacatggtttaggaaaactttcaattactcttcgacacataggaatgagtagctcccgagtcaaacaatacaatatatgaacagtcaataatagattactgacctgtcaccactaacggactagcatctgttgtgataaatctaacacgcaagtatacgtatcgctttaacaagtaatactcaggtaagtgagatcgttcccatgaggactgtagctaagtaccaatcaattgaattattatttctatttggtagataaataattttgatagattttaaaataataaaaaaaacaagaaagttaaagaaaacaataaaggtgtttaatcaaggatgagaaattagggaaacgaatcctgctatttcaattacccaattgttaatgctaattattattcctctttctttatgtgaatgacaaattatgaaaataaactaactctttttcagatcttttaggccctaaatcatatgttatatattgcatctctgagatagactaacatacaatccgcattaagcaataatctcaatgtcac

SEQ ID NO: 157635 - DNA, 719 bp, Cannabis sativa
  modified_base (686)..(687): a, c, t, g, unknown or other
tactatttttaggttaattttagtttgttttttaatttatttttactcttgtttggagaaattttacgcttttttatcttttatttttgcagatttaaaatgaaagaaaagtgaaaaatatcgaaggaataagatgaaaaaaaaaaaaagatatcaagatcaaataaaagataattgtgcacaagatagcggtcatgcctaggcatggaaatcccatgcctaggcccgtgtcaaggcaaacctgaaagacgtgaggatttgcaacacgggccgcgacataggaagtgcatgccgcggcccgcccatctaattcaaggtagattaggattctttagcgtgggttatatttttctatcttttttatcccttattggctataaaagaagcaattgagaagcaattgggttatattctttagcgtgggttatatttgtaggaagcaattgagaagcaatcaagggagtacgaattttggataaggagtttagcaaattccttgaagtatttaaaaattgcatgtcaacattccttttacggaggccttggagcaaatgccaagctacgtcaaattcatgaaggagattcaatcaaagaaaaggaagatggaaaaatttgagatagtagctgtaaagcccgcttagctaatttggaaattatcagttaattgtgattaattatgaaattanntatagctatttaaataatttatgatactgtta

SEQ ID NO: 157636 - DNA, 557 bp, Cannabis sativa
tttaaaaatttgtgccaaacaccattaaattttcaaaatgacaaaaaactattttctattctcacctttaaaaatacaattttaaaaactgaaaactgaaaacacagccaaacaagctctttattttttaaatttttttgttgtttttatgtttttctgaaataatcccaaatattaaaccattaaattttggtccgatagcgaataataaaagagaaatttaaatttctatgcttaattttagctacttaattaaagaaaatataaaaaaatacatctttttatactatatcaaaaatatatttctataaaaaaacatttaagtcgaattcaacttttttttatcacgtcgaaatactttttttattagtttttttttcacctgatggaccaatctcatcccatataatgtaaaaatgaaaaaaatttctaattaaataaaaaaaattactcagaaaaactcaaaattttctaatattactcatttatgaataatactcactaagaacaaacccaaatatatatatatatacatatataaattaggaaaattctat

SEQ ID NO: 157637 - DNA, 1028 bp, Cannabis sativa
  modified_base (241)..(242): a, c, t, g, unknown or other
aggaggagtaggagccccgccaacaaccggagtccttcgagactctaaggtgcactccactacgccctcagctcatagtgccttatccacaatatcaacataggtggtgctatcatcagtagtgatcattaagtcgtgtctgatcttcgcattcaacccatccaggtatttttctttcttgctgaaatcggttggcacaactcccgaggccaaccttgccaagcgatcaaactgagtcatnnatttagtaacactcatgttctctttatgagtcagcttagtgaattcttttcttttatcacttctaattgcctcgttgtaatacttggcattgaatagttcctgaaacttttcccaggtcattgtcgtaacatcgtgaatcatggacaccatgtcccaccaaaccagagcgtcttcttaaaatttgaaagtgccataggccaccctatcattaccagtgacgcctataaagtttaagattctggtgatcacagttagccattgctcgaatttcaggacatcgggacctccaaagaaaactggaggtgcctacttacggaacctttcatacaggggttccatttgattcactacaactacaggttggacctgcacagcaggggcaggtgccactggtatttctagagcagggattgcaggtgcaccctgctgtctcaaccactgaatctcatcatcttgttcattaatcctggcttgcatcgctgcaaacctattttcccaatcttgggcaacttgagcagcttgggcagcttgtggcgggtaaacatcgccctgaccttgtgccctgcccttaggacctctaccacggccgcgaatatttaggggaatatgaggtccctaaccaccacgggatccaaccgaattgccctggctcctggtatatcgcatggcgtccatagtaattagaacagcctgcgtaaccaagagctagtttggtcagatcgtgatcaaaggaaaacttactaatgccgcttaattggaaattaaaaacatgcgcctattctact

SEQ ID NO: 157638 - DNA, 751 bp, Cannabis sativa
gcagccgcagccttcacctcgtcctcctcgacttccccctcctcgtctatcaaaacaatcgtgcccgaaggggcactggacgaggaccttctgggggtcaccaactgggacagagccgtaggcagagaggcatcagggctatatgcctcgacaagagtagccagaagattttccataggcctggctgctgcaacaaagaaataaacaaagtattagaataatcatgagaaaggcgtgcgcccaacaagaaagcaataaaactagtcctaccctgactctgtaactcagccctagcaaagtcttggactacaatgctggcttcatcatccccaagaaagctgtccgaggggagaaaccagctggaggataaatgggctgaatggtccaggggaataggcgccggaggtctagagcccatccaagaccgacctaagaaatggcccaagtgggaaaaataatattccttggcgtgactaccccactgggtggaaggcattctaaacctacagaggcgctcatcgaaccctataggtctaagttgggtatactcgcggacagaagggacatgatgaattactaaaggagacttaccagaacctaaagtactggcgtcgggagcaccagtgttgggaatcggggccacaagcttgggcctagagggcctccactccggaggagcttgcagatgaagaatcctcccggctaccgcctgggcctttatgtaggccagctcctgttccctcttaaagag

SEQ ID NO: 157639 - DNA, 500 bp, Cannabis sativa
gtttttatttttaaatttttttttgaatcaaatgtttcaatcattaacatgcaatcatcagaagtaatgcaataccttgttattgtatgtttggatttgattgggaactccgatcaacaattttcaactcttccttatatgatctgcaataatttaaaaacaagtttatgttttttagtataaatatttgtctgttaatggtgtgtttcattactctattttttcatacctctttcctgaatattttttgatttaatatggagctgtgatcatcaatttgtcaacttatttgtactacgaactgcaacaatcaaacaacaattatatgttttgttatgcgaatgtatttatttcgaattttgtggcttggttgtttaatacctgtttcaatttgaaattgaattttttatagagctccgatcaacaatgtctcgtctatttattgaatgatctgcaacattcaaattgtaatttttgaagaatgagtgatgatacctcag

SEQ ID NO: 157640 - DNA, 543 bp, Cannabis sativa
  modified_base (420)..(439): a, c, t, g, unknown or other
taaaagctgatttaaaaagagattcacatatgtgataattttttttaataataacaatcaaattaaaaaaaaaagagtgataaataagacttaataaatgctatttaaaagtagttgtcacatctgataatttttttttaataataatcaaaattttaaaaaagtgataaataagacctttcttgggtaacaacatagatatgtcatattctagcaaatcaatcaacaacgtgagaaggtatgtgattttgggtttaaatctgtagtatgctttatggtgcccaaattataaggttagttgatatttgtttatttttgttaatattaatggggttatgggcctgaacaaagaaaactcagttctaagcattgtattctcatataatataaatacttaaaaaatagggaaatttacatggnnnnnnnnnnnnnnnnnnnnttttacaaaaatactgccaggcagaatttttaacttttttactgtgttttttcataagtttcatactgcagtatactgtattaagttttcactggtgttctact

SEQ ID NO: 157641 - DNA, 612 bp, Cannabis sativa
ctcggtcggttttgagttttttcagatctgaggttgaagacatcggacctcctattggtccaatgtcgtccgatggtccgatggggtacatggggtagggtccaatgggatccgatgggttatgtggtttggggtccgatggtcgtctcgtggggttatgtgggttggggtccgatgggttatgtggggggtccgatggtccgatgggttatgtgggttgggtccgatgggttatgtgggttggggtccgatgggttatgtggggggtccgatggttcgatgggttatgtgggttggggtccgatgggttatgtgggttgggtctgatggtgttgtgggttgaagtttgagattgaagattgttcggttagtgggtgtctgtgggagtcgtctcggtcagatcggggctatgggtctccgtcagagtcgtctcggtcggaggagggggtcgtctcgtggtcggtgtgggggtgagggggctgggtcggctcgtacgatgaggtgagggtgttgagggttcggttgggttgagagagaagcgagagagatagaggaagagagagagttgggttgtgtgttatgtgagggttattctcgggttttttttttttt

SEQ ID NO: 157642 - DNA, 564 bp, Cannabis sativa
caagggtagatgatccgaacaatgaatcaatacttagcaatttcaagacttacatcgtgaagcagaaaggcaatccctacaatcaagggatcgtatcaaagggatatgacaagctgtctgatccctcaatctatgtattctaaatatgtaatatgttcttaccaattatagatattgtaagcaaaagagaaaccttccctcatgcatttagccttataaatagtgatccatcctcactgtaaaatgggtcgaaagaattactttagagagatctaagagaaaacactcaaagatttcattgtgagagcttcacgagaggaaacactgtattctttgttcttgagttaatacaatctagggggagtaggctattaccgaactaaaggggctgaacctcttcaaaatcttgtgttctttattgtttactggttcttaccttatcttgattacatttcttatcgcttattaattgactcattgtcgttgtctaaaagcgaggtcaacactttcgctccttaattctcttattttttaattttttattagctttataatatataaatg

SEQ ID NO: 157643 - DNA, 560 bp, Cannabis sativa
agaacttgcaagattgagaaaaagaaaaaaatgtgtaactcaatgtcactgaagaaaaaaaaagaaaaaaaaaacaagggaaacacaatcaaaagtaagatgtgtttggaaaaggtttattcaagaaaaaaaatttcagtgatgtgtgagaaaaataaatgtatcttatctcaatcttggtaaatgtgggaacactatggggttttaaaaaaaaaaagtaagaagcttgcgagttctgtttgtgtgcttatgatatcttgagccaaaactatcttttgtcgatttctgaatatctgagccataattcctaaacctcaaaaagacctaattattccaaaggatattgtcaacattagtggagagaggtaagcatgcaagcttatgaattatcgggctgtggaacagtttgaaagagtaaaacttttataacaatgtttcacgtgtgaataaattttgtgattaggcatagtgttatgaattgagcatctgaattaattgttagagttagtaggattgaaattctagtttgtgcaagaaagaaaacagaacatgaggcagta

SEQ ID NO: 157644 - DNA, 618 bp, Cannabis sativa
aaaaaattacaaaaatatcattttacgtatacacaaaagtttatgagtatcatataatataatagtttttttcttatagaaaattatattgtatacttactttactttacatgttttaacttttacctttatttccatattttttaaaatatacatacttttatagatgatgttctaattataccctttaagttaatgtaaattatgtgctaaatttaagtggaagttgagggtatgttgggtaacccacccacaaaagtgggtacattttaatgaagtataatatgagagtatttttgattaatggataaaaaaataggtattcctcaacttattaagcattaaagccctgcccctctcacatatataggggtttttacaaaaatattagatttgggtaaaacttataattttactgtcacacaatttttttttacaaaattactgtatttttataaaataaccgtaaaacaataaaatagaacaattaaaataacaattgaacaactaaaaaataaccgtagaacaactgtgaaaaattaacacaatataaaatttacacagtgcttttgaaaaagaacacaatatttttttaaaaaaattctaccctatagtaaa

SEQ ID NO: 157645 - DNA, 502 bp, Cannabis sativa
aaaagaaaagatgattaataacaagagaaagcaagaaatacatatgttatatttttttacagagatattgatattgacataatgtttaattaattatgcagtagttttagagtacaactattatcaattttttacattttaatatcgttattaatttaattaagtatcaggtcttatatactttagtataatgaataactataatagaatatcgttagttaataataagacgacaagtttagaaagtggtaggcactaatagtgcccaaattttgtaagaaaaataaatcatataaaatttttattttcttcttaatattgagccaaatagtagaatggatataattcatgttattactgggattaatcatgaaagaaaataggagatttttttaccgatatttgttgatgagtaaaaaaaaagggaaatagaaaagattgtgtaaataaataaaataatgacagtagaaggagcaaattagtaaatagatgtatagatgaa

SEQ ID NO: 157646 - DNA, 630 bp, Cannabis sativa
tcaaacaagagcaacatttctctatcagcgtagcttggtcaaaaaattcaaaatataccaaagaaaattttactacgttaattatttattttggatatatcctcttaaaaaaatacatatatatcatataagagcattattttaatttaatcatttagcaaagtaaaatatatatcggtaaaaaatatagatgcatatataatatatataaaaaaatcatcatcaatcaaaagaaactttgctatagtttatttttcgtaaatattagtcacaaaaaaaaatcgttgtttatttctttatcttggctcttggtactgtaatgaaattccgaaagctaacttgtcatttgaatttcaaaatatttttggttagcctatctatgggtcaataattatttacattgtcgtcctaaaaatctttatctatttgagcgtcaattaacatatggctaattagtaatttttcctcccaaactgtgacatgtactaaatcgtgacccctgaacttttttggccgttagaaattcccccgaaagtattaaaattgttaaatttaaggacttttgtctaatttcattcaattttcctgtttcagttattgtttatgtattaaaccatgctccccagactt

SEQ ID NO: 157647 - DNA, 638 bp, Cannabis sativa
acgtagtccaccacatctcttttcctcccataccaccagaagtagggtttcaaatcctgatacattttggtggttcccggatgcagtgaataaggtgtggtgtgcacttcgtcaagtacctctttcttaagctcatcaacaccaggaacacaaactcgagtcttgtacaacaacattccactattcgagactgaaaagtctctaggccgaccaaccattacctcatcttgaaccttaactagctcgggatcttctaattgtgcctttatgattctctctaacagatcatattgtagtgtcaagttgtgcaaccttccaactagaaactcaatcactgcactaaccatttcagaggctagttgaggggctatcaaaaccgtggtacaaacctgcctgggaccccttctactcaaagcatcaaccacaacattggccttcccggggtgatgcagaatctcacagtcgtagtctttaactaattccagccacctcctctgcctcatgtttaaatctttctgggtgaaaaagtaccttagactcttatgatcagtataaatctcacacttttcaccataaagataatcccgccatatctttagagcaaaaaccacagcagcaagctcaaggtcatgagttgg

SEQ ID NO: 157648 - DNA, 518 bp, Cannabis sativa
ggcataaaacccaacaattatttaggtcgatctcggatgggttctggacctccggtgcccattcccttggaccattcagcctatttgtcttctagttggttccatccctcggatagctatcgcagggatgatgaagccagtgctatgatctgggactttgttagggccaaattatggagtcagggtaggactagcttgattgcttttttgttaagtgtacgttgctttcacggatgttctaacacttgacctactttcttgttgcagcagccagacccatggacgaaatcttgaccactcttgctggagcccatagtcctgatgcttccccacctcctgcttcttctcagttggtcacccccgggaggtcttcctacagtgccccttcgagcattattgtcttggtggacgagaaggaggaggttcttgaggaagctgaagaaggtgaagaagagcaagaggccgcccttgtgcgcaagcgcaagggaaagatagtggaggaggagccttctaagcgc

SEQ ID NO: 157649 - DNA, 549 bp, Cannabis sativa
tggacaaaagaatctaatggtctgttttcaaccaagtctgcctaccttattcaagcccttgatcgggctcctttgtgtaacattgctctggcatactatggaacaaactttggaactcaaagattttggagcaacacaaggtccattggtggagtatcctttccaatgttttacccttaagagcccctcttgctaagagaatgggttttgaggaggtttcctgccctatttgtggggaggctgaggagaccacagaacacttgttcctgtattgcaactttgccttccacctttggcgatctctccttggggggttatgcctgttctggattcagaagcccgaatgtgggactgggatacttttctatggaatcttaaatccagatgaattgatactgatgagttgttcctctatgcctcgattgtagtagatacgatttggagggcccacaacaacaaggtacacaataaatcaatgggtaacatttaaacactatattgactctatctcttcttgttacacagactatggctcctgccttctttccc

SEQ ID NO: 157650 - DNA, 633 bp, Cannabis sativa
tttttttttttccaattatataagtgagagggagtactgtccattaaaaaaatcgcataaatgaaaagaactcgtaacacttcatttatattatgggcaggacatgagaacgctccatatattatgtgaaacatattttctggagtaatttttaaatttatggtacacgaacttttgagaaagtccaacatttcaaagtaaaataaaaaataattattagcggcgaaactttttttcggttagggacagtaaattgaaagatagaaggaggggtatacaataaaattcatagtattttaagggcatgtcaaaatgctctataagaattagacagtaaagttataaagtttatagttaaaaaaatatatattttttttattttgtattgattaaattttctgttttattaaagattgtatactatgttttatttaaatataaatttggtgtattatattttcaataatacttatttgataacttgtgttttaaaactatacatatttggaactgtaaattcaataaaattttatcaatacgatcaaactatcttcaattttataaattttaaatttaaatttaattatttaattacatataactaagaaatgtttggtcaaattaataaaatta

SEQ ID NO: 157651 - DNA, 636 bp, Cannabis sativa
  modified_base (364)..(367): a, c, t, g, unknown or other
tattatttttgtatttgtattctgctttctttttcaattttattctggttttaatattgtttttttgttgtttgtttgttcttttaggcattacaattgttatgttgatggtgcgaagaaattttcctcgggttttaggttaggtgttgattatgtggaggataaaacatggttttatcatttggctacctgcaacatgtttatcaatgactctgtaaagtttccattttccattatagtttatgatagttggttttcagttgctttttaaatgtttttaagtttagatactatattaaagtttttaaacagttgttcaaccttttgttttgtgtttctgtcatgtttttgtttcagcatatgnnnnctatattctattaccttaggaaaaaaggtaaatattcttgcgctgttacattgaattttgcgacaattgattgtctctttgatgattccatccaagcgttgtaccacaagttcaacaaagccaaggcaatgaagactaagatgtcgcacattcatgctgcccacccaatagcgcattacatcggaggtttgtgaattctgtgttataagccttggtatgaagccgatcatgtgttattcatcataaatctaaggagggaaagtcattgg

SEQ ID NO: 157652 - DNA, 581 bp, Cannabis sativa
atacatggtagtaaatctagatctaggtaaaataattccaacacacgtcctatcacacttcagtgggcatgactcatttcctcgttgtctatggtcgagaacacccaccattggttcaatttaagcataatactacaactatctctacggttgagcagaacctcaagtctcaagatgccattcttgatttacttaagctgaatctcactcgtgcacaatagaaaatgaaggtgcaagctgatcgaaagtgctgggatgttcagtttgtagttggtgacttagtgtgtgagaagtttcagccttatcgacaacatctagtcgtcagaagccttaatgagaagcttgtgtaacaccccgatttccctaaacgtcacactcgctagtgcatttaaaactatttttaaaagacaaactaatttattgaaaataaccaaagtatgagatctcattattttaaaacaaaaagactcaattcatttataaaatttaaacattaacttttacaaaagtaatcaaatcataatctttaacgaaatatttttaaaccaaaacatcgtgataataccctaacatgtaatcca

SEQ ID NO: 157653 - DNA, 531 bp, Cannabis sativa
acaaataaaatttattatttattttgtaataaataataattaattaattctcattaatttttattttattaggattaaaataaatattatttatactaaaataatattttctctttctctctctttgttattatttaagaataatattatatttaattaattaatatagtttcatcaaataaaactaaacagttaaaataccactttaattattcaattcataattgatataattattcaataaatacttaattattatttaactcttcaataggataatctaatttattaatttttttattacactcactataaatataaaattgcactctttgacaatataaaattgtatttatataattcttacatgtagctcattgatataatcaatataagtagttcattctttatatcaatcttaaaaaattgatttatttttttttattcgacacattctttttcttcactaaaatctaacttctagacatagtcttaatgaattggtattccataaaaaaaaaaaaaaattgt

SEQ ID NO: 157654 - DNA, 540 bp, Cannabis sativa
actcccaatcgattgtaagccctaataacacacccgaaattgtaatccaattcattggtggatgcccatgaagccactcgaacaacaatggcctcttctagaacgtctcagaatcccagtcgattcactcgaacaacaatggcctcttccagaacgtctcaaaatctcatggtatgtcattaagtttattgggttattgggttattgttacaaattcttgtatttatatacatatttaatttttaaggatcagtcgatatataccaaaagtaaaaaaaggggtttaaggttcgtagtgtttggttggcttgtattggttcttcattctcattatggaaaaaagctcactcaccctcacttcagaacgatttggttctttatctaggaaatcaatcgccattgtaattacatttaattttgttacatttaattttaatttcaaggtcaatcgttgtgctctttgttgcgaattagatgcaaatgatacaaactttaatcaaggtcaaactcaaagtcagaaacgaagttgaaaaacgattt

SEQ ID NO: 157655 - DNA, 583 bp, Cannabis sativa
  modified_base (545)..(558): a, c, t, g, unknown or other
aaaagtttgttattttgaatagaaattttagggtttctagccataaaattttcaaatataggatattttattttatttaattatttaaataaaaatgataatatcctaaccatcaaatatcttatttttcaaattgtttatttttgttttatttaattcattaaattataagataagaatataatattagaaatatctaaattttaatttaagatattatattatattatcttattagacacttaattaatttaaattatttaaataaactgaaaatttgaaaattggttagatatttcaatttaagttagaatttaagatatttaggagatttgttagattttaaatatttttaaatattctctaacaacctaaattttaaattctagttaagatatattttaaaatagaaatatcttaacctactttaaagttatctgttacatgtttttattgtttgtttattaatttattccaattttttacaaacatcttatttattttatctaaattgctatgatttacttgttgacagatccaatgannnnnnnnnnnnnntagtccaattgtcaatagatcttat

SEQ ID NO: 157656 - DNA, 545 bp, Cannabis sativa
  modified_base (31)..(52): a, c, t, g, unknown or other
  modified_base (247)..(247): a, c, t, g, unknown or other
taaccatctcaggattaagatcttttgatcnnnnnnnnnnnnnnnnnnnnnnacttagaaagatacaacagtaagtttatgctatcttgtccaagttcagtactggtccagtccgatgtatactctatacattcgatactagtatactttaccaataccttagaaaggacataacacttatctagggtctaagtaagctttatcgttgattatcactgtaacgccctaatgctaaggcacgatacantggtttttcaattacagtgctatctttgctaatcaaagaactttctcaaaaatcatctcaaatttaaacttttatattaaatattaaactttataaaaactttacataatcatttacaagtaccgagatcctgtttctaaactttttataaaatatacaaaatacataatccagatcccataacaactacaaaataacaacctcagatgtcccgagaccgaacactccaagtcacgccgccatgacatgtacaacctcatcccagctcagactcactcatgttcagctttcgcctttc

SEQ ID NO: 157657 - DNA, 735 bp, Cannabis sativa
  modified_base (706)..(710): a, c, t, g, unknown or other
tttccctccttaaaagagaatatgagaaataaaaaataatcaagtgcagccgtcggccattgagagagaaaatcagatttcgaaatattaattgtgagagcattaattagtagaaaactgaaggaacgcctagtcagcctcacatcgagtctcggatggtcgcgcttgacacgtgtccccatccaaaggcagaagcagcttggatgaagtctacacgcctcttcggaagtgccgtacagacttggggggtaaatgttatcccaatttttcaactctgacgtggcatcgcatgaatggtgacacaaggaatccacttggagcatctgctcgggaagcatagtctgagcaggatgcgtcgctggcatgcccagagcaaagcaatcagcaatccgcacagagcaaccaacacttagcgaattcagctttcatattgtgagtcatcaatgaaatccctataactcagggatcaaattacaaggatatggcatacacacgatcccactatcagtatatccagcatcaatcccacgatctttttgtttatacgcatagcgacgagaggggaaactcttcctcgccaagcttaccagccctataaatagtgatgtatgttcactgggcaagaggtcaaagacagtttagctgagactataccgtaaatatattatctaagaattatatatttagagatactattgtaagagcnnnnngaaaaggaatctttctccttgatct

SEQ ID NO: 157658 - DNA, 678 bp, Cannabis sativa
  modified_base (406)..(410): a, c, t, g, unknown or other
  modified_base (622)..(626): a, c, t, g, unknown or other
gaagagtcgcagaagtttctaacactagggtttcctaagcattcttcctacagcatagttgcattcaaagcgtaaacatgcaaagaaaagcataaaggaaatcagaaacttactcaaagattcaaatgtctaagttcaagcaaaccaacaatcgtttgaaggaacttcggcaactctgaagctagaaaactctcttttcgctctggagtttacttaacaatgaagggtgataaaatgggttatgtgccagtacgatgagtatttataggcaaagggggaactctatccaaaggaattttagacgcctcgacttcctgcctcaaaagcgaatatgggaaatcaaaagtaatcaagtgcaaccgtcagctgtggagagagaaatttggattttcaaaatattaattgnnnnngcattaattagccgaaaaccaaagggacgcctagtcagcttcacattgagtctcgaacggtaatgctcgacacgtgtccccattcaaaggcaaagacagctcggaataagtctacacgcaaccttagaggtcccgtacagacttagggggaaaatgttatcccaaatttggcacttttaggtggcatcacgagaatggtgacacgtggactnnnnntggagcatctgctcggaacgataggccgagcaggacgcctcactggcacatc

SEQ ID NO: 157659 - DNA, 708 bp, Cannabis sativa
tttaccaacgaaatgtcctcattgatgcgcaatactgacgaaaacaggggtttttaccaacgaaatttgtcctcagtaatgctcatttttcttgtagtgacatatcaaacatggccaatatactatatacacaattgtaatatttctatacatataaatatatatatatataagtacttaatatatgaatttttacaccacatactgaaatttctaattttcttactttttcactgtggagcgaatttttttttttcaaatatattgtgttttttttttcaaaaatatcgtataagttttatactgtgtactgtgttaaatttttattgctgttccacggttgtttagttgttccactgttgttttaattgttctgttttgttattttaagattgttttgtaaaaatacagtatttttgtaaaaaaattcgtaatgaaattataaatttttgcccaaaatccagtatttttgtaaaaacctctataatatacatactcaccacggataataagactaaacaaaaatcatactactaattaattctctttgatgaatttgcctaccaaaccaaatgttaaaaataaatctaatgctttaaaaaaaataaaacaaaactaattttcgttcaaaacattacatttagatatatgattatttaaattataattaaatattattataccaataaagtaatataattaaatatt

SEQ ID NO: 157660 - DNA, 625 bp, Cannabis sativa
tatctataaaaatatctaggttaattttaaatttattaattatttaatttgtcattataatattgcaaataaaaaagatagagataccttttaatttaaaatatgttaaatatcataatatctaatcttataattaaataatatataaatataaagaaattaacaaatttttaaatataaccataatttaaaaaattaaaataatcaattttaaaatttaaacatcaaaatatcaaaattaataataatctattgaaaaataattattattaatttaaaatatgatatttaagtttaaatatattaaaattaatattttattttaattttaggatttgaaaatatcaaatattcgaaatttggaaaaaaagtccttaaaaaatcagaaattggtgttgggctggtagctaggctgcacgggcagccccaggaggctgcaaatgcctcatcacgcgtgcggaagtggaagggtgcagggtgggacgtgcgggaaacttcggaaggcctggcgtgccgtgtctgaagacaagggatttctgagtgagcgcgtgcatggtgtgccttgtctgaagcttctggtgcatgtgtgcactgtaacaccctaactaccataggcgtattacgt

SEQ ID NO: 157661 - DNA, 752 bp, Cannabis sativa
caacttcatcaagtgactctgcgaggagtacatgattggcctcttggctatatgttaatcttctgtgggatggcattttgagttctacgggaagcataacttcatatccatatgtcatggcagtatgaccatagaactttaggaagttcttccgaccagtttcctttagcatcttcaagtttcttctttagggtgtccttgaatgtcttgttgacagcttcaacttgaccatttgcttagggatgtgccactgcagagaaattttttatgatcccatggttcgcacagaaatcagtgaaggattgactgtcaaattatttgtcattgtccgagactatcttgtatggtaatctgaatcgacaaatcatgttctttacaatgaagtcttgcacttttttggacgtgatggatgccaatggctcgacttccatccacttggtaagataatagtgtgcaaccactacgtactacttgccacctttgcctttgggtaactgtccaatcaggttaattccccaaatggcgaaaggccgaggactttgcatctgagtcagttagttgggcggtgcccaaggtatctttgaaaatctttggcatttatcacatttcttaacctaggccttggagtcttcaatcattattggctagaaataaccttgcctcagaattttcttggataaactctaaccagctgcgtggttgccacaaaatctgtcatgtacttctgtcaaaagtcgtgcagcttcttcttg

SEQ ID NO: 157662 - DNA, 821 bp, Cannabis sativa
  modified_base (54)..(60): a, c, t, g, unknown or other
aatctcaatagttcagggagcattttcaattgccttaaaagttcagggggcatnnnnnnntacatgtcaaagttcaagggacaaaaatcctaattagcattttcactatatataggccaatataatattggttatttttaacattattattattagagtcctccattggtgatatatacttaatcacttaataaaataatggcaaagagaaatgttaaaaaacatcagttactataagaaaatttacttttagtagtaaaaaatttgtgactaattataaattgttatttttacgttgtgactaaaaaatgtcttttttttatagtgagtggtgtctaacaccctcttacgtgtcaatatcactattagcgcaattaagtatcaggtcttatataatttaatataataatttttaaggagtatcgcttactaattgtaaagtgatatgtctagaaagtgataaatatcactagtacccaatagcaattttcaatggtaaatctcacttaataagtcaattttgttaggttaagttagctctaataacgcacttgtagaatatgaggttacaggctacagctctcccccaaaaaatgtacaattttttatatatattaaatatatttttttaaaaaaaattatatatatttatttagacaattgctgaagagtattattagtgttaagtatcttttttagtatcatactactattagtataattaaaggaaaatttgattttctacacttaaaaaaccttaatattttattcttaaaccaatacatttcaaactaaaaaatatatgacacttttatctaaaa

SEQ ID NO: 157663 - DNA, 525 bp, Cannabis sativa
  modified_base (217)..(225): a, c, t, g, unknown or other
  modified_base (338)..(339): a, c, t, g, unknown or other
aagaaagaaattaaaaataagtaaaaaaaaaagataagatttttcctctttttctttgttgattgatttttgaaattctcaaggactaatcaaaagtgttcaaagtcctaatgagaatgcttaaagaacaaatacaagttcctaagaattttaaaattgatgtctatgtggtagtttcgagtgaaatgcgcttggttcatgtaaagaccgcttagtnnnnnnnnnaaattagcagttaattaagatttaattatgaaaattacttaaagatatttaaataattatttatgttgttatatttgaattcagaatgcattttatgtcatatagtgaaattnnataattttgcattttcggtatccggcaacaaggaacgcggtgtatggctcagtataatcacaatttagtatttcagtatgccgcttacaatctccattttatatgtggtccattaccatttatggttaaagatgactaccacattcacaaattgactcttgttgattcactaaacgaagaagagtt

SEQ ID NO: 157664 - DNA, 811 bp, Cannabis sativa
gaagaaggtgggttagaacagagacgaggatggtcctcgtgcaagagttgaagcaagtcctggtcgattcgatgttcgctctcccaaaactctccttagttcttctacaaatgacaacacacaggatgagtgtttggtcagaatatcgaatgtttacacaagcaaatatgccgacagtactcaacagataaaagaataagaatattcaacgaaaagtcaaaactcaagaagtttgaaattttctcgagttagggcaaaaaaaattcatgaagcttagaataagcaagataaaaaacaggcattatgcatttcagaaagcaaaacactacagacggtgaaatcgaacccatgacaaagtaaacatgcaaagtaaacataaaggaaattgagaacttactcaaggatcagatgtctggattcaggtaacgccaagccaaacaagcagttttgatgaaggcacttcagcaaacatgaagccaaaaacctctcttttcgctctgaacttacttagcaaggaaggttagtgaaaatgagtctgtgtacaaacgctcactggtctttataggcaaacaacgaaaaggggtaatcatttcaaaagaacctcaaacgcctaggttccccccataaaagcgaatttgggaaatcaaaaataatcaagtgcagccgtcaaccgtggtgagaaaaaattagatcttgaaatcttacttgtctaagcatttattagccgaaaaccgaagggacacccattcaaatgcaaaggcagctcgaatgaagtctacacgcaactttggaagtcccgtacagacttggg

SEQ ID NO: 157665 - DNA, 772 bp, Cannabis sativa
  modified_base (54)..(70): a, c, t, g, unknown or other
aataaaaactggaaatataaagaacacaagagagtatagtggttcagtcagatnnnnnnnnnnnnnnnnnactgttgcaaggatttctgtcttgtccatttcactttggatcactcctgtatatacaaagcaagtgtcattttatttacacagagattgaatttattatcaatccgtttgtacattgaattacaataaataaactaaaaaatgtaaacataataaatgaagaacagtttctagtttaatttactaaatacagcaacgtatgcgacttctatagtgcgagttggctgtttacattcttgcataagctcacaggtttaagatgcattcgagactagttgagtctaggatgtttgcatcctattcaagtcgcttatgcaaacatcttgtaattgagtcgacaaactaagacatgcgagtccttatcggtttatcgagtctgtttgggtcaactggaccagctcgtagagcaaagaagcaatctctacaattcgcaggaggatctcaggaatactcggatatatcctggtatatgcgagtcttaaaccgttctttggtcctacgttatgcgagccatacatatgcgactagactcggtcatggtcgcatcatctcactgaatctggttcaggcgaggttcatattcgaggggtctctcattgacatctcacctctcctcgaggagggcgaatacatgtgtctttttagtaggagtctggtctcaaatttttatagtgagaaaatctcactataacacatgccccta

SEQ ID NO: 157666 - DNA, 583 bp, Cannabis sativa
tcttctctaactaaaattttgctctaactttcccacaaacctacacatctatctccaaagaacacaatctattatgtttgaaattgtgtcttggttatgtgagggtgtgagtataatttaagtacaaatactcattaaaaaaagtacatttaaattgaattttatttaaatataaatttgattaatgtattaaaataaatggtattcttcaactttttccatataatattgactcaattttagtcaaatttaactcaaattttacatcacttattggagatgatttaagaacataatcatttagttcgaaatcatagtgtatatttcataatttttaaaattttatttggagtattgttgttttaatttaaagtttacaatacataaataataatgaaaaagttactctctaaataatataaagtaaatatcactgttcaatatagtttcataacaaattagcaaatattgtaatgattatgccaaatatcaatatttatatatatatatatatattgggtaatactatggtaggacgtagcaaaagttccctaccggtagaaaacttttttttttaccgttg

SEQ ID NO: 157667 - DNA, 582 bp, Cannabis sativa
ctaaaataatatatttctccctttaatgttatctaagaataatattatatttaattaattaatatatttttatctaataaaattaaatagttaaatactatcgattatacaattcataattagcataattaatcaaaaaaatataatttcgtaaattactactttgcccttaaaaatttatttctcataaaaaataattcttactcgaaattcattcattaaataaaatatttccctgtacagtgttgtatagaggtgactcggggaccagggacttatatttcgaagcttcaataaacccatagttatcatcaatctcatcaatagaataattaagtttattaattccattattactccactataataggattacactctttgacaatatagaattatatttacaaaattcttgtagtctattgacactacaagaatatttgttattgccggcgtattattgccgacggaactgaccccccgctattaatgggggtattaccgccggaaataataatccgccggtaataactatataataaataatatattaaataaataaataataatttattttaaatt

SEQ ID NO: 157668 - DNA, 659 bp, Cannabis sativa
tttgagcctcacggtaataattccacacaaaaaaaataaaagctatagaaaaataatgtatgaacacaaggttttttacgtggttttccagtttaaattttacatactccacgagtcaatcttattcagatttgtgattgtgttttttttttagggcctctcttgtagaagatttttttcgtctcctttttgagcttgtctgcaactatttataattacatagtggatagttaattacaaagttgactagaatatgtttacaacagtcatccttaaaatcatgggatttgaatcatatcatgtagtgtaaatacggtttatgatttgaaaatcgtatagttgtgtttttccccgcttttacagggtcaagaaaatcgtgtattaaatacatctttaattgttgtttctagagatgtctcaacagaaacttggttacaacgatcccaatagtgagctggggtcattctttctttcgaggtcgacagtgtaggtctggtgtcgattgcggttcttacttgcaaagacttcttctgactcgctagggttgtaagctatgttaccgttagttggataaagctacaggaagtcttcccatagcgagacggtcacctcgcttacttgctcttgagccgatctaacttttatacttagtttgttca

SEQ ID NO: 157669 - DNA, 532 bp, Cannabis sativa
acttatgttcagaactttgttatgcgatatatttaaataaatcaaataaaaaatttattttattaattttttaaattaaaatttatttattatatcatatttaattatttgaataaataatataactaaatccggttataaatatttacatctaataaccgattgagaaaatttcttaactacttgaaagaatatttcaactactttttaaattcaaatatttatccatcaaatcaattaattaattaatctaaaaagacaaaagtaatagggacaccccacactatatggggcgcatgcactgtgtctgacacaatgcatgtggggcctcctatgtcttgtttaagacaaggaataagccttttgtcctgacaacttttgtctcgataacttttatcttttccctatttaattaattttaaaagtaaattattattacaaaaaaaaaataattactattttgctaatttaaaatagatttttttgaacttccatatacaacatttcttaccccttgacagtgtttcaaggt

SEQ ID NO: 157670 - DNA, 611 bp, Cannabis sativa
cattacattacattacatcaaagcaaacaccacctaagtgtctcccgaaccttgttcctagacagttgactagccattccctagaaaggagttccagcgcgctaactagttgtcactcctcgaatggtagatccggatagtcgactccaacagactttatcctatccggaagcgtcttcagcgtggtcctccagtctagaagctcgtttatgttcccgggagccctggtacttaagctgacgtggagacttagctaaagaggaattagttaagttagttatttctaactaacttaacaacctcgtttcttgcagccaccgactttgggatcttgatcctaagcctataaaaccaccttcacttatcattttgaagatagatggaataaacgagtttgagaactctgttaaaatgagattgagaatttgagagagaaaatattgagagataaagagagaggtgcagagaaatgagagagattgggtttaggttttataagaagaatcttctgtgaatgaagagatttttgggtgtaagtgtgaagagttgaaacactttgtgagaactcaacagacaatctcgtctcgactatattgtatctattcttgctc

SEQ ID NO: 157671 - DNA, 714 bp, Cannabis sativa
cctttgacagccacctgcttatagttttcaaggaaacagtcgtggcttcccattgcagccaccctttgattttaatcaaacaatctttcgaaaacttgcagcagaaaaatatgtgctctacggtttcactgctgtcattacacagtaggcagaaatcctcctcaattactccaaatctcatcagtctttccttcgtcttcaacttcccaagcatcgccaaccacgcaatgaaaactatgctttgggatgttgaaccgattccaaacaaatttgtcccaaaacactctagccgactgcacatgtaattcttgataaccagcagctaccaaatatttgccttgcgccgtgtttatggaaccaaaactcttcatttgttctttaactataaccacttttttccaataccaacttgcttgagctgtaggtttatatctccaccaatccatccttgatgtagacattatgaacccatttaacccataggttatcttccttcttggcaatggcccaaacatatttaaaaagggccgctttgttccaatccgagatacatctaaatcccaatccacctgaacttttagcttgacaaaccgatgcccaatgaactacaagaactcctattaaagtatattgtccattccataaaaagctacgacaaatagactcaatttcacttacaattttcttaggcagcaacatcacttggcaccaata

SEQ ID NO: 157672 - DNA, 570 bp, Cannabis sativa
ttggcctagtattccccgaggacccggtttacgattaactacgaatcactatgacgaatgagatttttgactttcaatgcctctactatctttaagatggcaatcaaggctttatactaggccttattattggatgcatcaaattggaacctcagagcatagtgaaacttaaaggcttttggcgatattaatattacccatgcactcgaaccttgctcaccatccacgtataacctccatgtttccgcgtctcgctggtcaggtggaacttcttctggagttataccttctatcaagaagtcagccaaagcttggcccttgatggatgttcgaggatggtatgttatgtctaattgccccagttcaaacgaccaatatatcaatcttcctgatatttctaaatttaattatgaaaaatacctaggttgtttagaaaattgaaagttaattatttagggcttactacagattattaactatgttagaatggttagatttggttttcaatcatttttgtatttttcatgaatttatttagttaatacttaaaataattatgaaaaatagtta

SEQ ID NO: 157673 - DNA, 596 bp, Cannabis sativa
tttttaaaaaaaataaaaatcttggaccaatcaggaattgtcacgtgacagtttactttacacttaacagttagtagctacagaagtttcaaaattataacttagcattattaccgtcaaaaatttaaacttaagtatttatttgtaactaaaaattaaactcaaatattgatgctgcaaattactcttttaagttatatcataagacgtcaatttccctatattttatttaccttatttaaatataagattttattaatattttttatgggattttcacaaaaaagttcctaaaatgacaattttttctcttttacatttttagggactatgttttacttttttttttacatatattttcattatatttttttacaaacctcatgaaaacaatatgtaaatataaacgcaatgtaaaaataacatagaaactacataatataatgttattgtgaaaacagcgtaaaaataaacaattaatatttttatttgtaaaacaacaaagtcaaattactaaaaatattgaaagaaattatcactactacaaaattgagctttagaggcagtttttaagacctttcagcgtcggttttggc

SEQ ID NO: 157674 - DNA, 797 bp, Cannabis sativa
atgggaagacattgctatggatttcgtgacggggttaccgaagaatagcaaacaacatgattttttctgggtaattattgacaggctcattaaattaacaaattttctgcctgtgcgcactaactacaacgcaaaacaatatgttgaactgtatgtaaaataaattgtaaggctacatggagtcccaaagaccattgtatctgatagaggttgagttcttacctctaagttttgggaaagtgtgcaaagtgctttgggcacaaaactgaagttgagtacaacattccatcctcaaactgatggccaatcagaatgaagtattcaaatactagaggacatgctacgagcttgtacgttggatttcccaggtaattggagtaactatttgccactgatggagttctcgtacaacaatagttatcaatctacaataaggatggcaccctatgaaatgttgtatgggaggaagtgtcgatcaccactacactgggatgaggttggcgaaaagcgatacttaggcccagacctagtaagagaggccactgaagcggtagaaaagattcgaaataaaatggttactgcacaaagccttcagaaaagttacgtcgactcaaagcgatgaaagctaagtccaagatttctaggtccttttgagatatgggacagagtgggacaagtagcttatcgactggcacggccaccagtattagctgagacgcataatgtgttccatgtttctatgctacgaaaaatatgtgtcggatccatcacatgtgctgaactatgaaagaatggag

SEQ ID NO: 157675 - DNA, 510 bp, Cannabis sativa
gagggatagtgatgatatcaaagttctggggtatggggtgaactatatcgatgctgaagtcactgagaaggatgggaattgttggcgacttacagggctatatggtgagccaaaccgaagtcttcgtcggaatacctgggatcaaattcgcactcttatggctttgtatgcactaccttggtgtattattggggacctcaataatgttatctcacaatcagacaagaggggaggtaatccttatccaacttggttgattgatggttttggtaatatgttggaagactgtaatttggttgatatggatttgtgtggatatccatatacttgggagaagggtcggggtacacaagcttggattgaagtgcgtattgaccgggctttagtctctccaagttggtttcatgtttttccttcagctaagttaattaacttagaggtttcaacatcggaccactgtccaattcaattacttcttgatgttgtgaagaggactgaggttcaaaagaa

SEQ ID NO: 157676 - DNA, 567 bp, Cannabis sativa
  modified_base (26)..(33): a, c, t, g, unknown or other
  modified_base (97)..(107): a, c, t, g, unknown or other
tttatacattaaacataatcatgaannnnnnnntgtgaaccatgcaacatagaatgtgatttatgatcttatgttaattagtaaatctgattatatnnnnnnnnnnnttatttagggcacaaaacctaaaagttatatactgtataacttaatttttctttaatgtttaaattatttaaaatatttatattgttgttatcgttattgatatttttttgaacagtttttatgcttaattttattgtgctcttaatgtaattttttttttattttcagattttgtaggaggggttttaaacttttggcttggataagaaattcacaaattttcatttgtgtaaagtatgttttttatttttttttttataaattatagtaaatattttgaatatatattgtaattgttataaaaatctgaaatatgttagtaaaatgttgttgtgatgtaaatttgaaatacattgtagttatgatattatatatataattagatataatatatatttattttgtagttatgatattatatatataatatatatatttataatatataaatattatata

SEQ ID NO: 157677 - DNA, 650 bp, Cannabis sativa
  modified_base (212)..(221): a, c, t, g, unknown or other
tcttattctatttataggatagcttctaaggttaggtttaaaattaaaaaagataaaaaaaaaatggctttaattaatcctttagtggccgaaccctagtgggccctacaagattttaattttaccatcttttaaaacttatctttttcttttcataaatgccatattttaattctaactctttaaatatcaaatttatttatttaataatnnnnnnnnnntatcaaataaaattatcatttaacttatttattatttagaccttacaaaatctcttaattaataaacaaatcctaaattctcattttcttctaaaataagtcattgcttagtgaaaattcacaaacaagacatagtcttattcagaattctaattgataaattaaaatcaattaattgagtctacaagacctagtgtggggaccatggacctatataatcaaactcccaataagtagttataaaatttaccaagtaaatttcctatctcattaatacctcctaacttcactatagattcagaattgtactcttaattacatagaatgctttattcactaagaaaaaatacactatggatttcgtggttgggttacctagaaccacgggtttattcgattccatctgggttgtggtggatcgattcacga

SEQ ID NO: 157678 - DNA, 525 bp, Cannabis sativa
tgcaccctctttcgtaggaatccaaaaaagttcatttgtcaaaacaatatagctcaacaaacaactttaaagaccaaaacagtaaaaaaaagtgcaatcatcaaaatactcactatacataatcttaatcttatactgtaaataaaagaaagaaaaaattataagaaaaagcttgcaaattcaatgagtgtctcataatcaatgcaaaattatgtaattatgcagaataaaatgactaacctttgaatgctaaaatattacttgatagtgaaagccaaatgcaattagtcctgctctgatttttgctgtatggaaaatgtatttgaattacaatcagctatcattctagacaaaggttaaaaataaattagggaatactacgttgttgattagtaataaaaaaaaaagttcaaaagattaaagaggattagaattactatttttattaaaacttttgtaaaataagtcaaacttctataattttttttttaaaaaaaaactctttgttcaaaaataaaaacatat

SEQ ID NO: 157679 - DNA, 539 bp, Cannabis sativa
  modified_base (45)..(46): a, c, t, g, unknown or other
  modified_base (290)..(290): a, c, t, g, unknown or other
atgaacaatacaaaaaaaaaaaaacaaaaaatgagattaaaaaannatagattgtgtagttttttatttctttttaaaattatcatgttttatctattaataaaatcatgtcaaagaactttgcatttaaaaaatgtcattaaaactctatcaaagaaaatagcttcttttctaattcttttttttttaaaaaaaaaactttgcattttaaaaaaaaaaaaacattaaaactctcccaaagaaaatagttttttttttctaattgcattccatatagggatgatagaagntcttaatctcttatacctaccctatttttttatatatatttttcaaatcattccataactttttttttctctcatctctaaaagttgagaataaaatggaacaaagtcctatagtgtagtgattattatttaaaaattagctgtttgtgaaaaaactgagtttctcatatttcttttaatttgtttatcttccatgagcatttcatttcttatcacatgtagatgtgggtccactaccataataataat

SEQ ID NO: 157680 - DNA, 656 bp, Cannabis sativa
acggagataaggaccaaagttctcaagcaaggagagggggaatatttcaataagttcacctatctcatcagcaatgaattgagccaactgagggcttttgcgaccaaacggaatcctatgggcatggatccaaaaggggacataccgaacagattcgggagttggtgtgggggacacatcaggatgggtgaagaccattaggaacttatcgaaaggccacggctgttcttcaagaacacgacgacggtctccgtcacattgaaaggaagccaggaataatccagagtggtattcagagatttgaacgggaaatcagagagtccaagcttcagtcatggctttctcaatccaagaaggtttcacagatttaggagacagcaacttaaagaacaaacagaaagagttggaattattgggtgagtgtagggaaatgtggtcgaaatcgtgaataagactctcttcatcatcaagagcggtaagaggaatggggtttcgagaagaggacgccattaaaccacagaagaaggaaggacagatttggaaggagaaggaggaaatggttgtggagagagacattgcaagcatatatttaaataagtactagaatgaacaagcaatagaagaagatacctggagaagaaagggcgcctcgaaga

SEQ ID NO: 157681 - DNA, 541 bp, Cannabis sativa
  modified_base (344)..(344): a, c, t, g, unknown or other
aataattcttgtaattgtatcttcaattctttcaattccgctggagcaatttgatacggtgcttttgatactggatctgctctcgaaaccaactaaataacaaactcaatctctcgggtaggaggcgatcccggtaaatcttccggaaagacatcaaggaactcgcataccaatcttgtattcttaggccctgatgtcacaagttgcctggtatccactgtagtgactatgaatcccagacaacctctgctcatcaggtccttagctttcaacaatgttattcttggtaagcgtgccccctgaaccttacccacaaacactgctgggttagcactatcgggctnaaacaccaccatcttccgtttgcagtcaatcgttgccccatacttagacaaaaaatccattcccaagattatgtcaaaatcagacagttgcaattcaattgacggtcaattcacaactgtcaatccagaaggacaaagaccaaatccacctagtggatactataaggtctcccaaaggtaacagggtaccaaacccc

SEQ ID NO: 157682 - DNA, 571 bp, Cannabis sativa
  modified_base (47)..(50): a, c, t, g, unknown or other
tttgatgaggttaatgacctcatttggaatttgatgaggttaatgannnnatttggaattttgaggatttgtgattgtacctaatcttagcaattaggttgcctacatacctaaaatgggatcaaatcgaacgtagttcatatggtaaacttgtattatttgaagaaatgagtattttattttgaataaaaactcatttttaatctcccttgaataagtcgggaaaccacttgaattacaattctattttcgtgagaattgtaaaataattcacatgagaattgtaaaataattcaaattatttgagactttgtgtctttttttttttttaatgatttgaattgtataatttagaattggactcaataatatttaaaacaatactgctttatgtcccaattttctcacattgattgtgtattcattttctttacagtacatgtaaatcttttgacttcacacactaaaattatctgaagctttaactttgggatttaaccttcagatttttatattcatcagatatatgtatatatggaagaagtttcaattgttacatttttattgtaac

SEQ ID NO: 157683 - DNA, 660 bp, Cannabis sativa
  modified_base (268)..(275): a, c, t, g, unknown or other
  modified_base (328)..(348): a, c, t, g, unknown or other
tatatatctacatataaaaaatttgaggtatatatttgagtgagggctttagcctacatatgagctaaagtccctccgtccctggatgacagtgatgatgaagctacggtcatatcaatagcttcatgcaaaaagggaagctatagtacattttcacactaatattttaatatattttaaaataataaagaaaacaaaaagataaaatatagaaaatagattttatttacaaaagtatgacatttaaaaaagagattatttcacaaannnnnnnnaataacaaaaaaaaaattacaaaaatacgattttatagaattttaaatatttnnnnnnnnnnnnnnnnnnnnnttacagaaaatacggtctttatatgttgtactcttgttaatttgttgttcatttttttgtaatctgtatcttattttttgttgttatttagatattattttcatgttacttttatgtaattttttttttgttgtttttgtattgtttctatgaaaaatcgtaaaaatgtaaaataaaaatcaaaatgtaaaaatttaattttatacgaaaaaaaaagagaaatgatagtaaatggccccaaatcataggattatgttagtttatgttctcattttaaaaaaaaaatatagcaaatgaccctaaatcataaga

SEQ ID NO: 157684 - DNA, 529 bp, Cannabis sativa
tttaaatttaaatatatttttatttacaaaaaaaaaaagtgttatattgtttaaatactcttttaggcgtataaataatatttttttaaaatattactacacatacaaacttagagtcccacatggtttagaaatacttaagtttgttatccatgtaggttataaataacacttttattatgctactttctatgtccaataaatatttttctaaatgcgttgattaatgtgttaccaaataagatttaaatttttatttaatatataaagtatatatctatatttctaaatttatataaatataatgaaaagcacaaaagagtctaggtgacatcttagatttttcattgtaattttaaaattttgtgacattttcatatgtttttagaaataaactactacaaatacaaactttatgtaggttatcaataatacttatattatcctattttctatgtccaataaatatttttcttttagggacattgatttatgtcttacaaaataagttttaaatttttatttaata

SEQ ID NO: 157685 - DNA, 745 bp, Cannabis sativa
cctcactgcccttagacttcttggtcggaggagaggcgctagagcttctgcctattctcttcctcaaagcattgagcatctgccgagacatgtcggcacagaacgaaaaatcacgtggttagaaaatagccatcaaaaacataaggtatgatagtcaagaagctcaaaaacaagacaaagcaatatgcaaggtgactgcccaaacaagattcgaaagttcatcatcacctgacatcaatcttattttagacataacagctttcccttttccgaacacgggagggggtgaccgaacaggtgaaatgggctcccttatgcgaatcgcatcttcaacaggcctgggcgaggccgggagtttcttcttcctcttgagtggagtcacctgctcttcctcagcatcatcctcaggattcaagggctcctgagcatactgctcagcccgtgcacctcccttcaacttagctttgcgcttaagttgaatgaattcattctctggataagctcgttcggtccggccagcgcaagatttcctcttcttccccgtcatggacttaggagtaaagtccttgggataaagcccgtacctcacaaagttatccttggaggttaactggataatattccggtcttccccggcagccaagcaagtttttaagctctatccctaagagcaagagtgaggggaggatggtgatatgtcgaaatctgctggaaccgagttcgagtaatgcccgtgccatccacc

SEQ ID NO: 157686 - DNA, 588 bp, Cannabis sativa
ggcagctactccaacgtctttttcggtgccaacagcatactttgatgatttttccgccacaagtgacaatttcgacgatcactgttgtttcatttgttttattttttaaaaaaataaatatgaagagaattttaatattttttatggtaattcaatttttattttttatgaatcttaaattcaaattctttttttaatgttttatatgggtttttttatttttagtttaattggttaaataatgtcatatttagtggcatttactttttatgtcatatttatcataaccttaataattttttccatattttttaaaatagcccatcaaattttgtccccgaatgttaagcggggtgggaacggggatgacactccccgccccgacggggacccgtttaatttattaattattttttagtaatattttatatatgcgtttgtatttttttagtataaaaatatcatttttacaatttttgaagttgtgttttcgtatatgataattactatattgaatagtaaataatatgtaatattttatcttttatgtaatttaataattttatacatttaggtgccgtttggtaa

SEQ ID NO: 157687 - DNA, 524 bp, Cannabis sativa
  modified_base (359)..(370): a, c, t, g, unknown or other
atctacctcaaaaatactcattcattatgttatgtaactggttctattttagttataactggaaaaatcatcgtcaccggaaaagtcaccgttgccgaaaaaatcactgttaaagttaccagaagtaaatgtctcagatataactaaaaatataaccggttctatgaataaaaagtaataactcaaagcggttataattaaaatataaccggttctgcaacataataaataaaaataaataacataaaataactcaaactagttataattaaaatagaaatcggttctataatagtgttataatgaataaaaaccaataacacgaaataactcaaaaccagttataactaaaatagaannnnnnnnnnnncataatgaatacaaacaagtaacacacaataattcaaactgtttacaatcaaaaataaaaagaaaatcagtttctaaaacaatgaaagataaattaaaaacaaaactagttctacaataaaaaaaaccttgtaacacataataccttataaaac

SEQ ID NO: 157688 - DNA, 693 bp, Cannabis sativa
  modified_base (442)..(443): a, c, t, g, unknown or other
  modified_base (498)..(503): a, c, t, g, unknown or other
caaagcctccactccagctgacaggttcatctttccattagcatttaaagtttataaactttagttacaaatttgtttattattacattttttatcttttgtaaattttgtttgaagcaaaatgaactttgtacttagtaggggtgatcataaaatatttaatacaatctaatctatattggtgtagatatttgtattttatgaattgatttagattcaaaattttaaaataattgaatattaattgtcatataaaagtattcaatctacatatatttatatatatttataaaaattatatgtatatttaatattttaatataaaaaataataatttaaaaatataatatatgtgatataaatacatggtgccgtttggtaacatttttgttttctaattttttaatctcaaaatgaaagtaaaatttttgtttttgaaaannaaaaatgcgttctgtaaccattttttttttataattttaaaaacagaaaacaaannnnnnttctgtaaagtttatttttattttcatttagttttattttatttaagtcgggtctaggtccggggtcgaattcagatccgggtcagagattgggttcaacacaacagccgtgagagaggatttgggtccaggtcgtgtcggagtccaacatattgattaagaaaaaaaagtgtttaaaaaaatattgaaa

SEQ ID NO: 157689 - DNA, 613 bp, Cannabis sativa
ccccaaccggtagactggttcccagctggaattccaattttgcagggtttcccggaattctggttcctacacgtccccctgaaccgaaattccggttcagtgcaggaaacgctcaaaatttcataactctctcaaatcaaccccaaatcacaccaaacattccaaacctgttctatacatcctaaggaacatattcaaggcaataaaacatcttaacacaaccagaatcaaaatttgccatcaatgagccaagcttgagttttaaaactcaaagcttgctcattcaacactacaacccgtaaaaccaaccaaatacaacataatcaaacataatttaactacataaaactattccaaatgattacagcagctacaaaactcatctactcaaaattcaagtaaaattcaaacttgaaactaaagaaaactaagagaggagttgctaggagcttacctaaaccttcagattaccaaacacttgcaggaaaaaggttgaattgttaaagaacaaccaaaaccctagctggttctaggtgggtttgaaggagagagagaacttgagaaaaaatttgatttttgcttaactttaatattttgtaaaattaaatgaaat

SEQ ID NO: 157690 - DNA, 584 bp, Cannabis sativa
atagctctccaacatggatgacgcctattgttaactatttactcaacgggcaacttccaaatgacaaaaacgaggcacgaaaacttttgtatacagcgcctcattacacagttatcgaaggaaaactatatagaagagggtgttcaatgcccctatttcggtgtgttcttcccacagaagcaattgaaataattagaaaaattcatgaaggcttctgcgaggatcgtgtgggttgaaaagtctgtctaaaaggatcgttagacaaggatattattggccaacgatcaataaggacacacatgagtttgtcaaaagatgtgataaatgtcagagactttcacatatacctcgcgtaccgcaaatcgaacttagaatgatgaccttgccctacccatttgctatatgggggatcgacttgattggggcattacccactgggcgggaggagctaagtatgcagtagtagaagtcgacttcttcactaaatggacggagagtgagccctctgtatccataacctgcaagaaagtccttgacttcgtcatcaagaacattatctataggtttggaatttccataaagat

SEQ ID NO: 157691 - DNA, 542 bp, Cannabis sativa
ctttgtacaatgccaaagatgtctatttatagtgaacatatgctcccaaatatgataatggtgtatgtgtaatgggagaaacggcttgaaagtctaattgtgtgggacacgtgcttacgtgtttgagtgatgaaattctatcagctttgctcgtcagttgtggggtagtgggagactaaagttggcgaatggatagtatagtataatttcgtattttgctgagatacacgatcccacttgttaaagagcttctcggccgagtgagaccatcacaaatttgggcccatatatttgaattgattagagaaatggtccaccttgagtttaattgaatcaagatatgggtcatcttctagtgggcttggacgttggagagcttggaacttgatgtagttgtgaattgtgattggaaagagaaaggcacggggaaatggttgaactttagccaattttaattggtttgctttatgcaattgagcttgccactaaattttctcttataccattttgctcaattatgaaaaataacataaaaattaaaa

SEQ ID NO: 157692 - DNA, 505 bp, Cannabis sativa
aattcgttttcttctctactctaccgaattcgtcggtctaccccataactaagcagagatcgcttgggaaactacaggcccaatcgaattcgaagattgggaaattgaaatcagtggttcgcagaaattttcgaaatttttattgatattcaaattcaatctttacacaaagtaaaacattaatttaacaaatttcaaagtaaaaaaaaccaaaacaatcttgatttcttctcacgaaggcttcgaattagggctcgaatccgttttgtaaagaaactttgttttttttttttttttcactagaattcgttttgcatgctacaacctaatataccatactataccaagaaatatgttatcccagttttgtttattattgtatgatttatctgatataaatttgtacttgcccaattgttttgatattgcatttgggtttgattgataatgtcttctttgttccatgtataatatgtgggattattaaagttctggttatcttgat

SEQ ID NO: 157693 - DNA, 688 bp, Cannabis sativa
tgattcttgtgggtaggtattatcccttatgaatggtggtttgagtcggattctttatatattttttgttgctctattgaccctttttctttgtctccactggaatagacatatgtcttgtgagcgatcttaaaggtcctcctcaagctgacaaggaatctcggaagaaagttggcgtggtttcgggtgagtccaagagggaatttggtgtggcttctatcagagaatctagccaacccaagacccaaacctataccacaagacctttgcgccaacctctttctggtatcgaggaatttcctaaggatgggaataaggtctcagctgcaggaaaatgggatcttctgatgaggagaatgaggtctgtgcagaggccaaggctctctgcatgtagatggtctttctcgagccacgtgtagccggtctttctccaagctatgtgtagacggtctttttcaagctatatgatgacggtctttctcgagtttatcaaccccccctctcattctttgcttaggaagatgacttaatggttttcccctagtggcatttttgtaaagacaagtttgtaacccaacttgggttttcttatcttaaaggcattgtactcttttcatttgaacttaatacaattgtgtttgcttgtgttttcattcacaatgtaaacaactatattttgatcaaatat

SEQ ID NO: 157694 - DNA, 572 bp, Cannabis sativa
agtaaacatataaaaattacaagttaacataaaaaaataagctacggaagaaaaattcttatacatttcagcatcaatcgtccaagtcttcgtgaattactaccaacaattgttctatccattgtcgctgtaatggtaacaattcagtttttacatcgtatatctttttttccctaaactgtaaaaagaagtaaacatttatattagtatatatatatatattactgttttttaatataataaataagataattaataattaaaatttatagatttttgattgtttaaacaacagttaaggtttgcaggtatgacgatgttattcatgtattttaatacataaaaactaaattcttagtttttaggttctcttggataattttgtagtgaaatttctaaccatgccccaataaacacatttgatccccctaaaatatggtatgctctgttttaaaaattatattaacatatatatatacctaacttagttaattaaaagatttgttacataaaaaataattaaattattaccttttaacattgcacgaatttattgaggaactttgtggcca

SEQ ID NO: 157695 - DNA, 538 bp, Cannabis sativa
ataattgtgttttcaaatgtttcaagtccgataatgctcctgaacttgccttcaaagaccttttcaataaatatggcatattacatgatttcacatgtgttgacacccctgagcaaaatgttgtggctgaaagaaagcaccagcatcttcttaacgttgcccgtgctctgtattttcaggctcatatacctattagattttggacaaaaagcattatgactgcagcttatctcattaatcgcacgcctactccaaatctgaaaaataagactccctatgagcttctatacaatagggagcctaactacacacacttaagagtttttggatgccttgtttttgcatctacccttcctgttaatagaaccaaatttgatccaagagctagaatttgtgttttcttgggatatcctcaaggtgttaagggatatcgtttatatgacatcaacaataaacaagtgttcatctctcaaaatgtcatttttcatgaaagcatttttccttttcataaactaaatgaccaatctactaatattga

SEQ ID NO: 157696 - DNA, 658 bp, Cannabis sativa
  modified_base (43)..(44): a, c, t, g, unknown or other
  modified_base (477)..(492): a, c, t, g, unknown or other
ccggacaaggtctgcctgcctacctcttggcccacgagtgganntcgtgaccggggattggacggctgaccattggttgtctgggaggccttcatggttgggtcatccttcgtttctcccaggggaatgacgctcgacgtttgttggcctacagtctggtatgctcttcgtatcagcaccgtagcttgctgactacgatcttcgatctctgcatggtgagcccttaatgcctccatctctttgtctctccattcaacgaacatatgcctctattcatcaaacacgagatttactgtggcacgcagttcctcctgatcatgatgcagagtattgctatgaccctgcatgagtccaagcgcagcacagagattttgcaattcagtttcgtctccgatggtcgtttgggcattgattcctggtggaatagtcgtgttatgaatgccctagctgtatgcagaactgttattcccagtctcnnnnnnnnnnnnnnnngtttcagtaacaggagttgtcccaccattcaccatgcttcccgtctgtcaaggattgatatctggtggaacccttgaactccttgggtcctgcaatgtcggatcccgcatttgtgagtttgctgggtcagacaggcctataagagtttgcaccatcatgtcgaatg

SEQ ID NO: 157697 - DNA, 599 bp, Cannabis sativa
aaatctaggaaatcggaaaagggcaagaaataatttcaaatgggtaagatttgaataagcagagagagatttttgtgacaaacagagaaaaaaagaggaggttttattttgtttagtgataattagtaaacatcccgcgcttagcggtgaatatataaaatattttaaattatatattaaaaataaattatataaatcaattaatgataattacttaataaaattgtattaaaattttaactttactattaaaaaatttattacataaatacttaaaatattaaatttgttgctaataaatacaaaaattcgaaaaataataaataaattctcatttatggtttagtttttattctgaagtgtttgttaagttttgagttcgaattttattgtgtgtgtttttaatgtttgagttttagtgttttattggagttctaatgtttaagtttgtatttatgagatctgtttttatttatttatttatttttatagattttgagagcttaaaatttaatgttgtttttattgattattaggactggaagtttaatttttcatacgggaattcaagtttgtcttttcgtttcattgattgaaaa

SEQ ID NO: 157698 - DNA, 506 bp, Cannabis sativa
tatattttttgagtattaatttagtattattataattttttgtggtatataattttattaccgcgatatattaattttcagtaatttgatatattaaataatgttgtatatatttaataatctaacatatttaattatttattcatttttattataatataataaatacaatactacaaaaattatataacttaatttaattattatatatattaaaaaaataatgtataataaatatatttttataatttttattagttaatttattatatttagttatttttcaatttttttttaaaagaacattaactaactttaaatttaaagtaattttgtattttatttcaaatttataactaagtcattttgtatctagcccattctcattaagtagtttgtgaggttcttacaaaaattaatggggtaagttgaaaaatgcctcttttatttatcaattaatcaaatttacctctaattttatgtttatttgaaacatacctcttttt

SEQ ID NO: 157699 - DNA, 667 bp, Cannabis sativa
atatataacactcatggccggacccaccaagggacaagaggctgccacctcatcaaaatgaagaatttatatattaattagatataatatattattaaaagtgatattttttttaaaaataatttaaggggtaaatatttgagtataattttttatagtaaataaataattaagtttaattttttacagtaataatagttaagttatatttttaaaactttcgtaggtatttttttttttttttgaaacggtaggtatttgttagttaagtgtcaagtcgttatccacatatcattttcttattagtatatttaaatttatttttagataaaaaataagaatttagttacttgaatcaatcagaggctgtcaaatgtcaatttacttgatacttaagaggttagtacctacaaaaatttcagaattataatttaaatattattactattaaaaattaaaattatatatttatttacaatcaaaaattgaacttaaatatttatatcccaaattactttaattattattaacataatgttatctttggcataataattcggaatgacttgtataagacagataatacaaatatagagttcaaatgactagtaatatttattatttcttacattacaaaaaatagatatctttagtgataattttttag

SEQ ID NO: 157700 - DNA, 538 bp, Cannabis sativa
  modified_base (132)..(135): a, c, t, g, unknown or other
tggttaggtccatgcttagctacttaactctacctacgtccttctggggatatgcaattcagatggcgaccgacattttgaatgttcttccatctaatcagaccctgagacacctttagaactatggaatgnnnntacacctagtttacgccattatataatctgggggtgccctgctcatgtcttaagagagaaagatggcaaacttgaaaagcaaactgaggtttgcatgtttgttggaaattctaaagacactaggggtggactattttatagtcgcaaggatgataaagtgtttgtttctacaaatgccactttccttgaagatgactccgaagagaaggctttccatgaactaaactttccaggggccaacttgaaataccattactgagcggcttccgacagagtagcaagaaaaatactgccgcacacaacccctcgtactccttgcaaatccatttgcatttcgaaatacttgaggtgggagagaggatcttctctccctgtgtacatcttccatgttggcattttaaac

SEQ ID NO: 157701 - DNA, 515 bp, Cannabis sativa
aaaaaaaaaaaaaaaaataagttgcttaagctcttacatatcaagcaataaataaggtcatatgtaggttgatactctagaataatcctcttgattgtaatatttgcgtgtgctgaaatttaatggtagcttatagtagggttttaggaaagactaaagagtaccaaaaaaagaaccttaataataacttaacaaagcacatatagttcaaatataagtcaatatcaattttgatattgctacatgttacaatttttgtgtgtacatattataaaagaatgtaagtatttttttttttttttaaaaaaaattatacatataatataaacagaatttgaaagaaacaaattacaaaaaaataaacaagatacgaaaaagataccatctttatgagtttttgacaaaatataaatattgtttcttgattattgttgtgattagtctccatcttttgtctatattggtaaagatatggtcccaatagggcaagactatggtagaacctagcaaaagtt

SEQ ID NO: 157702 - DNA, 732 bp, Cannabis sativa
gaacacttaatcaggtggtgacatatttttttttttttggatggtatatgaaccttgtatgttatggaacattattttgtgtaaatgaaacttttgtgtacttaaatgtatgctaattttttttttattatttaagcaactaattagtttacgttttcaaatgatgatcaatctaattaaaatggatattttttttcaggtaacaaatcaatatcatcagataatatttttgtatgcaaatcatatgagagggtaataggtatatatattttttttttcaattagtgtgaggattccaataggtatatatatatatttttgaaaaatacatattaattttcattttaagatcgttataacaaaatataaaatctgtaatagatggatatgggtaacttgtttgtttatttcttttttttacaagtttttatttttgtaaaatgagaggaaccattatgttcataatagtctaagacatagtactaatgtagtacttattactgtaagtatcaaatgttgtgaaaaaatactattttttaagtactgatgttctttctctttcgtgatggctttagaactggttcatttttgcacaatcttttgttgtgtgaatttgggttggatgccccacatttgacctgtgtttttgtttccagcacacctttgtacctttgtttttttggccgccctgctggcctcttgtgtgttgggggtagaacaatcatatctttt

SEQ ID NO: 157703 - DNA, 637 bp, Cannabis sativa
  modified_base (73)..(87): a, c, t, g, unknown or other
ctttcaataagtagatctagaatctaccaagtaaattctcaacttattaattccgccttgtgccactatagannnnnnnnnnnnnnncactctcaattatatagaacgatcctttagttattgcgatacaaatagctaatatgacggtggccagggtaatgattgaagatggagcatcatctgtcatcaaacaccttgttcaagcaagccctaatcataatgggtttaacattagaagacctggaaccatgcaagcagcttatgtatggttttagtgaagctgtcattgctccatgtggcaagatcaaactgtcacttaccgttggcactgccctaaagcagaccaccatcatcgttatattcatagtggtggacgtgaagtctccgtacaacgtgatgctcagaaggcctactctctacgaccttcgagccatctcttcagtgtaccatttgtccatcaagttcccaatggcagctggtatcggttgtctccttggtaatcaaagaactacctatgagtgctataacgcttcgttatcactcaccaagaagacctcctttattgctatggcttcatagtggaggaataagacctcctctactgctaaggcacaagagggcgagtaaggcctctccc

SEQ ID NO: 157704 - DNA, 977 bp, Cannabis sativa
tgaatttaatttaatacgtgcttatggactatattattatatagtatgcctgttttgtcctttttcaggtgtgttctgacaactcggcccggtatagtcacaaccgggtatttcgggccgaaccgagttcggggctaaaatataattttgggattatttattggcattttaattaagtgtcattaatttgaaatttaattgggtatatttatgttggaaatgactatgtcatccttggaatgcttttatgtgttatttggccctagggggcatttaggtaaattggccttttggtttaattgcaacaaaaaagaattattttggattttagaaagaaaaattctggtctttttcctctgccctagccgaaccccctctcctactttttctccatattttcaattggctaagtgttggaaaaatcatcttgaaagcttggattctttgtgggttttgtgcttagctttgtttggagcttgaggtagttcttaacccctttatttgttgaaactcttgctgaaatttactgttcaaaatcatgaaaaataggttatgatgtacttggtatgcatgtatgatgatattggtgtaatctttacatcttatgcttgattgagttagaaattgatgtaggatgcttgagtaatgtttttgggatgattttagggattttataagtgtttttaatctgttatgcagctctaattttagtgtggtgcttgagtttatgtttggggatttgagattcaaggagtgagcttgaatttgttgatattgtgcttaagttcggagctttggttttatgttgtttgaatatgaatttctatgcatgtggactgtaattttgagctttataatttttggtttaactccctattgtggttgtttaattgtgtaagaggttatgttggattgaagcatgttttggttggatttaggtgtgtttgggctgattttgtgttgttggtttttggtgt

SEQ ID NO: 157705 - DNA, 707 bp, Cannabis sativa
  modified_base (41)..(48): a, c, t, g, unknown or other
atacgtgtcctctaaataggggtctggtctcgagtttctannnnnnnnaaatctcactataacacatgcccctagtttcgcgatgtgaaaggtgcggtcacaaaagggaaactatattcaagagacaagtgaaaggttgtcacgaggaggtgacctttggttgtaccttcgagggtttcgaaaaatgatggctataatcattacttttattgcatttatgatgccacgtcacaaaactcttcggtttctgtgtaggcgtggcatctttggccgttggattgggtgactctgggccttctaattgccacgtgtcgtgatcccaattaattagggatttgggtatttaaaccccctgattcgaaccaaaaatcccattttccctcattttctttaacttccttaaacttccttgtttcttctcttttagagaaaccaccaaagatacttccataaattgcctagttttttcgcctttctccgtgggtttttccttgattctacagtgctgtcaagggcgaatcgtgggaacaaatttatcagaagcaaaaggttagttctcgaatcttctctatgttttgttttcggtttgagtgagaactgtgtcttctgggttttatttttttgtttttgatatgcatgagagagtttaggaatgaatgtttgtaggggatatatatgaggctacgttttttaggtaaaaaactggg

SEQ ID NO: 157706 - DNA, 822 bp, Cannabis sativa
tttttggtcaattttgtatttttcctgaattatttgtgttatttctaaagttaattataaaaaatacctagactattcagaaaattgaaaattaattattttgggtttagtatacactatacactcagttacaattaatagatttagttttcgatcatttttgtatttttcatgaatttatttagttaatacttaaaataatcatgacaaatatttaagtgatgctaaaacagtaaagtatatttttgtaatgctatttactatctatgatacgaaatagaaaggtttttataatttattggtttctttaggtatttattataattatttgtgactaattaactatttaattagatttttaaatagaataaatagcaaaaaaattgtgtttactgtttggggaacctttaatataatgctaagatataattatagtatctgaaattaatttgagactatgttgagatgttttgctatttttcgttcattatttaggattttattcatttttaacaataaatttatacataaatcatggatagtatttcacacaaatttctaagcagattgaatatgttttatgatctttataaatggttaagaaatatgctaacttctgattttgataaataattacataattgtatatttagtaataaataatgttttagtaaaatttcatgtaaaaagtatttgtatgaatttatatattacattaaaaatattcgtatgggtacttgcaatgtgttggtgtgaattatagtgacaaataattatgtttggtgtgtcatgcaagtgaaattgatttatgtgttatgtatt

SEQ ID NO: 157707 - DNA, 628 bp, Cannabis sativa
ttgaattggaaaatatggtattagggaaagaagaatatgtggttgaaataaagtggctaaattgtaactagagattggtccattatatggccggccttagtctgcaattttacccaatattttacaccttgttaatccatataatgcttccctaagtcatagttgaaacactataataggaaattgatgacaacttaactttttcaacctgccagatctagtttcttactctgtcagacaactagtagatgagagacaccttccatacagttttcaagcctccttcattgtccttcatattcgaacgcttagtgatagcgtgccatgcccacacatagcaagtgtaacaccctaactcttttagggatgttaacggtatttttaacttattgtgcaactcgttgctaatcaacgaggttattaaaaatcgtgattaattaaaattttgcttaattaattataaacattaaaattatacacttataataaactatgatcccgtttacaaaaataactacaaaagtttcattgtgcatatacaaaattttgtcacctagtgactatacaaaataagccttgatgtgccaaagaccgtacgctccaagcctaaccgtcccgacatgtacaa

SEQ ID NO: 157708 - DNA, 504 bp, Cannabis sativa
ttggtggggtcgaggtcgcatactagcacttcctcgacgtcctccataggttctacagttttttcggatcgcacacgaggatccaactcatcttcttctgccaaatttggctcgatacctttacggaccatcattattggtaagtgggtcgcgacattgtaatattgcctggcctcaccttgattgcccctcacggtccctactccagcctcctgggtgggcaattttagacacaagtgccggatagacataactgcgccaaagtctactaggactggtcggccaaggattgcgttgtaagcagttgggcagtctaccaccacgaatgtgcagtacttaaaagtgctctggggtgtgtccggacacagggtaactggcaacctcccttttcccattgggataactgtggttccgttgaatcccgtgagctgggaaccgcttagtgacagatctcggtccgtgaggcctatcgccgtgaaggcgtctttaaacaataaattcacg

SEQ ID NO: 157709 - DNA, 752 bp, Cannabis sativa
tgaaatcagatgcaactaactacagaaaagatgtttagacaaacaaatacagatgcagatatactgaacaaaagtaatatctaatttgccacacaaaacatgactcttacaatatatatatttaaattaattaaaaataaataatatttatatttatatttatttataaaactaactttactaacaccgttaaatttaacgggatattcttatattctaaatattatgttaaacaaaaaaattcttttagataaccacttataatgactgtatgattagaatatagattagtaagacgattagcattaattattgatattttatgattatgtatgattttatttgttgtgggtcccatttttagaatataggcattagagttataatttctcaattctgaaaattttattaagctctaaggatccatttagtacgcatgattggactggattggactaaaaaagattggactgaactggacaagattggattatgctgaaagtaatcctatgtttggtttaagaacagactggactattttatttattttcttttagaaaaaaaaaacttaaattaaaataaacatatataatattaaattaaaattaaaatatataataataaataaataaaaattaatgattggccgtaaaaaaaataaaaataaaaaataattaaattattaaataaaataaaataaaatatcttatataattaagtatatatcatacatataataaaatagtttatca

SEQ ID NO: 157710 - DNA, 608 bp, Cannabis sativa
aatctaataaatgatatatgtataataaatccaatccgggtctatataaatgtttattatataaaatgaacatacttctatggcatatgagacccacttcaataggattttgtatgaaacaaaatcctcaatattagctagttggcaatagtctttctacaccttcaaacaattgaaaaaattctttgaatattctaagttaggatattgttatcgagtattagtggtgcttaatattttttaaagatagcgttttataattgattaacgatatttcttaagatatattatattaaattatataagatttgatacttaattgcaccaataacggtatgagtttgaaggtatatcgctaacatcgaaacggtcataccaattgtgggtaaaaactcacttaaccatattatgagctacaaaattacaagaccgaattatattagaaaaaatataatccacaaataaagaaaatgtacttaaacagtaacttgagtaatttgcaaattttcatctgggctcgagcaattccttttagcatttttaatcattaaaaaatcaaggggtaagttgaaaaataccccttctattaatcaattaattaaatttac

SEQ ID NO: 157711 - DNA, 914 bp, Cannabis sativa
aaagagttataagtttatgtggactgataaatgcgagaataactttcaagaattaaagaagagattgattactgcacccattctaggcttgccagtcagtgatgaaaagtttgtgatatactgtgatgcctcaagacaagttttgggttgtgcgttaatgcagtcagggaaggtcattgcctatgcctctaggcagttgaagaattttgaatagcattaccccactcatgatctagaattggcagctgtgtttttttccttgaaggtttggcgtcactatttatatggtgaaaagcgtgagatttacactgaccataaaagtttgaaatactttttcactcaaaaagatcttaatatgagacaacgacgatggctagagttagtcaaggattatgactgtgaaatcctttaccatcccggtaaagcaaatgtagtggtagatgcacttagccgaaagggcccagggcaggtttatgagttgaaggaaatctctccaagattggctgaggatatggccaaggctgagattgagtttgtagtcttcgggaagttggcaaatattacattgcagtgtgatttactggaaagaataaatattggccaacaaaatgatcctgaattgattgaacttagaaagaaagttgagattggtgctacaaaagatttcattgtgactccaagtggactactaagatataagggtagaatttgtgttctgatagatgatcagatcagaagagaaatccttgatgagttccatagtactccgtattccctacacctggggacaacaaagatgtatcatgatacaaagataatatattggtggccgggaatgaagagtgatattgttgaatacgtttcaaagtgtttaacctgtcagcaggttaaggctgaacatcaaaggccagcag

SEQ ID NO: 157712 - DNA, 587 bp, Cannabis sativa
aacaccaaatgtatatgatattattaatgacaagaagaaaattatatgaagaacaattaagagtattcaacctatagtggcgagtactcgaactgggaatgtgaaatgtttaacagaaaattggaaataccaataagacagaggattattgtggttcagtcagatcacggtctgcttagtccactgtagcaagattttcgtaggtctcatttctcggtggatcacccctttatatacaaagcagttgtccaattagttatacaaagattgcattcattgtcaatccatttttacacattgaattacaataactaaactaaataacattaacatcaataaatgaatagcagttactaaattcagtaacgtatgcgcccttttaacatgcgagctgactgttcatattctaatgttaaactcgcgggcctaacacttaattacgtttaggatgtctgcgttcttaagtagtcgcctttgtggacatcacatgacaaagtgacaaaacctagacatgtgagtctatatcggtttatcaaggctatagggtcattgggaccaactcacattatagagagtcggtctctatg

SEQ ID NO: 157713 - DNA, 672 bp, Cannabis sativa
acctgttattactctctagggattacactaaatcaggaaacaatggaagacccaactaaggcactgaaacgaacgagaattgagaaaatgggacattcggggaaccctacaaaaaccggctaaccggttttatatggtaaaactggctagccggtttatactagttcacccaaaaatcccatattttgctcaaaactccaccaaatgatgcaaccaaaccttccaaagtccctcctaattataggagggtagtatacataatatattccaaccaataattcccagaaaaaccactaaatcacaatatgccattaaagacctaaacttgagtttcaaagctcaagcttgctcaccatagctcaaaactaacatccagaacctaaaatcaacctaaataaagctcacaaattgaattaaacacagaccaaaccctagtagtccttaaaacccaaaattacaattttaagtcaacaccaaagcttggaaaaataagaacaataggtataggagttacctcaacttgatttccccttgaattccctactgaaaacaccaaaaatcagcaaccaattcccctgttctaggctggttcaaagagagaggaaagggaagagagagcttttcttcaatttggtcttttcttgatttttctctaattgactaaaggatttt

SEQ ID NO: 157714 - DNA, 640 bp, Cannabis sativa
  modified_base (113)..(114): a, c, t, g, unknown or other
atttatcccaccctgctggatgggataaataatctcagacaggtgaggttaactggattagttatccagacttctaacacgctcaaagactgaattggacaaattagcctgtnnaatccaatccagtcctgcgtaccaaacgggcccttagtaattctctaacaataataaacttatattggtataattacatcgtaagtcattgattgattcacaatagatgtatgttccaataattttgttgctacctgtgaaaaaattacaactaatgtgtagaataaaaacaactagaacttaatcaacaaacaattagtaatgacaagattgcaaatcacacacaataattgaagactgaaatatggatgaagagagtattaaaaaaaaaattaaagtaacaaaacaataaaatcaacaccaagatatatactggtcctgtagatcaatgtgatctatggctctactctagttttggaataccactgaaatcatcattattgattgagcaagaatagggtacaatatagtcaagatcgattctttgttggattctctcaaattatttatctctcacacccttaaccaagaatcttcttcatctacaaaaaattctttatacaaaattcaaacccaatctctctct

SEQ ID NO: 157715 - DNA, 537 bp, Cannabis sativa
  modified_base (162)..(165): a, c, t, g, unknown or other
tagatggacttcttaagcttgcataccaaatcctgaccttcactagaggagaatccttctggttgtttcatgtatacctcctcctcgagatcaccattcagaaaagtagttcttacatccatctgatctagatctaaatcaaaatgagcaactaatgccaannnnactctaagggaatctttctttgatataggagaaaaattctccgtatagtcaattccttcttcttcagtgaatcttttagcaacaagtctcactttgtatctctcagtgttgcctaatgagtcgtttttaattttatagacccatttacatccaatggctctctccccaataggcaactttacaagttctcagactttgttacacttcataaaatttatttcatcatccatggcattgtaccacaattttaattctctactattcgtagcttgtaaaaacgtttctggatcatttccaattccaatatcagattctaataaatacacaacatagcctttgtaaatctttgacttcaccaacaggctcttggag

SEQ ID NO: 157716 - DNA, 506 bp, Cannabis sativa
ggttttaatttcattggcttcagtaactattcatatcgcttgaaatattattcaagcagtatatatgtacgacttatattatatatgccgttgcttttaattgaattatggtgtctattcacacttttcgtttatgaattatatatatacataagcccaatcgtttcgtaatgaatcatgtcagatagttagatatatatatatatatataaactgataacctattatgcctcttgcggttgaatgcaaccataggttcttatatatatatacaaaattttgtcttctatgttgtatatatatatttcgattgaatgtttctgtaagtgtttttcgtttatttttttttttattttggacttcagttattatatatataatatgttttagtgtgtaatctatattatagtatagtttggtaaatatgtattttggtgcaaacaatttaatttaaattttggtgttggtttaggactaatattttgaataaattaattaaaacaata

SEQ ID NO: 157717 - DNA, 693 bp, Cannabis sativa
ctagatataatcaatattgacgtgtttaaaatacgatcattttgacccagtaaaagcgagaaaatcacatctatatgattttcaaatcataatcgcatatacgctacgtgatacgtaatcaaatcccatgattttagggatgattgttgtaaacatattacaatcaactttgtaattaattgcttactatataattataaatagtagaaaataagattaaaaaagagacaaaaaaactcagacgggagaggccttgaaaaacaatcagaaatctgaaaaagattgactcctggactttgcataattttaactgcaaaaccacgtaaaaaaccctgtgttcatgcttttatttttttacagcttttcttttttctgtgtgaaatcactactatgagtttcaaatttggttaacgaaaatctgcattaacaaaatatatagattaaaataaatgtttaattaaaaatacatcattttaaataatgagctaataatgagctttaatcaaggagatattcgatctccattgttggtcttacaatggttaattgttttcaatataacttcgagacactacactttgtccccatcatggatggttattcgttgaaagcatttaacatcgtaagatctcgtatgataagtattttgtaagttttcgtttctattagactcttccctacggtgactactta

SEQ ID NO: 157718 - DNA, 1120 bp, Cannabis sativa
  modified_base (1083)..(1093): a, c, t, g, unknown or other
ccataaatctcaaagctttatctaagttaaataaattgcatgcttcatgaatttactgcttaggtaaaagaattaattattgagcgtttcaccttaattacatacaatagggagattgggataattgactgcttcagctttatctacgggattaatagtttgattagaaattgaaattacattcattaatagaaattaagaatgattgtcaagggtggagaataacatttaactagtttctcatatcgtagtctcaattttactctttttttatttttatttatcctattttattctaaacctcaaaacccccttttataacttttgtcactaatttttgaataaataaataaacatagtcatcgtgggatcgacccttacttacaattatactaaaaataattagatgtattggaaataaatattaataaatttgttgtggcttacgacacacattaaatttttggtaccgttgccggagactattgttttattttattattcatctttagttttttctttactaacttgttcttctagttgtggttttaattttcagatcttcctttagaagcttgacgatgtacaatcaataatactataatccatattatacctcgccacaagtgtatcaatatgatccatattacgatacttacatatacaatcaacaatagggagattattctagcatttcctacagtgaaatcaatcaatatttctaaccatcttcttactatccttctatagcatcacaagatcaagatcattctcttattgatctactcaacactttagaggcttctactactcggatgcaatagaattaagcacaattttaacaacctactcatgttgcaccatatagtgaaaagccaactaatactgagctgattgaaatgttagcagctaattccttacagtttcagcaaaactgtcataaactatgcagagtcttcaacaatctctgcaaaagtacaatatgcattatttttttttttcatagtgcatctgatctgcactaaaaacaaatttcatattttggatccaattcaatctgcacaatagctcaaatccaattcnnnnnnnnnnncaaaagtacagattggatcgattattt

SEQ ID NO: 157719 - DNA, 687 bp, Cannabis sativa
cccacaattttagggataatagccgtaaatgtatttcggtcaactttgtaattaactaccactatgcaattataaatagtggcagataagatcaaaagggggaggccctgagaaaacatactcagaaatctgaataagattgactcgtggactattcagaattttaactgcaaaactacgtaaaaaacccggtgttcttattttatttttctataacttttattatttctgtgttgaatcataatcgtgaggctcaaattgggttaacaaaaatttgcgttaacagtggtaaatttacatcaaattttaactttgtgctccaatgcacaattgtaaaattttgatgcaaaatttaatatataattaatgtttattaaaaaaaataaaaattaataactttataataaattttattattattttaatatgtaagacaataaaataatatatcttcaaaaaaaaaaataataaaaaaaataatataaatatttcataatttaatgtcatagttaaatatactaataaaataatacaaatgatatataaacgtaaataaaaaaatagtgcatttattgtcgtgtaaattttacatcatagtaatgttgtgccaaatttggcacaaaatttgctatatgccaaatttacattactttttagcacactattggatcatatattttttttttt

SEQ ID NO: 157720 - DNA, 767 bp, Cannabis sativa
  modified_base (706)..(731): a, c, t, g, unknown or other
ccgagggatgaccggaatatcattcacttgacctcttaagacaactttgtgaagtacgggctctatccaaaggatttcattcctaatccagtgaaggggaggaagaggaaatctggtgctggaggggctaagggagctcatgagaagaatgagctgattcaactgaagcgtgaggctaagttgaagggaggtgcaagggccaaatagtatgctcatgagcccttgaatcctgaagatgagattgaggaacagcaggtgactccgcttaagaggaggaagaaacttccggcccagtctaggcccgttgaacatgcaattttcattagggagcctagttcacctgctcggccatcttttcccgtgctgggaaaagggaaggcgttcctggcagaggcgagagacttatcaagtgatggttaactgtcgactcttgttcggacaatcgctttgatggatatttcgtcttgtttttaaactttttgactatcatgtttcatgcagacatgtctcagaagatgcttgatgccctgaagaagagagttggggaaagctcaagctcgtctcctctggccaagaaatctaagggcgatgaggcaaccccttccaaggaaaaacgcaccagtcggagaggttatcaacctttctgaggagctaactattgcggatccttctactccgaaagttgctaatgttggaaattattttnnnnnnnnnnnnnnnnnnnnnnnnnntatgttgtttaacaccctaaataagaactttctaaa

SEQ ID NO: 157721 - DNA, 558 bp, Cannabis sativa
  modified_base (34)..(38): a, c, t, g, unknown or other
  modified_base (66)..(70): a, c, t, g, unknown or other
  modified_base (99)..(103): a, c, t, g, unknown or other
aactcaaatcgtaaatttgaaaaagaaaaaaaannnnntaaatttgaaaaagaaaaaaaaagttannnnnatttgaaaaagaaaaaaaaagttaaaaannnnntatatgggataattctccttcttttcaatgacaatgttcattgtaataattgtgtatttcttgtaagttttttaaaaaattcaaatatttacgaattgtatagaaaacaaacataacaaaaagcacacatgtttcaactttatatttttatactgtaaattattaaatttataggaaacctattattactacaatgaataaaataaattgggattgtattaaaaacgatgagtattaatagacatatatgtatataaactaatattttatttttctaaatcccaaacatgtttagaattagttctgtgcaacataatttattagcttaagtaagatgcatccaaaacttataatgatgtttattagaattaaatccacattgctaatatgtgaaaataaattatcatatataagatgattcggctactcctcctattgtcaactggttttgagat

SEQ ID NO: 157722 - DNA, 628 bp, Cannabis sativa
gcgctacatcaaatcccacatactcctaattaccccaatacttatactatcaacttatcacaatattcctatcaattctattaattaaacttgttatgatattcttcaagacaaggtttgggttgtgttttaatatagtcagggaaggttatcgcttatgcctataggcaattgaaggaatatgagtagcgatatcctactcatgttatagaacaagcagcaatggtttttgctttaaaggtttggcgtcactacttgtatggtgagaagtgtgaaatttatattgatcataagagcttgaaatacatcttcactcagaaggacttgaacatgaggcagcgatgatggttagagttagtcaaggattatgactatgaaattctctaccatcccggcaaagcaaatgtggtggcagatgcacttagtcgaagaggcccagatcaagtgtatgacttgaagtagatttctccaaagttagtagaagacatgaccagagtgaaaattgagttcgtggtcgggaagttatgtaacattacattacaatctaatttattggaaaggataatgattggccaagagagtgatccagaattgattgagcatagaaagaaagttgagacagatgcta

SEQ ID NO: 157723 - DNA, 666 bp, Cannabis sativa
  modified_base (50)..(86): a, c, t, g, unknown or other
atactttatatgtttttatttatacttgttttagaagttcatatttaggnnnnnnnnnnnnnnnnnnnnnnnnnnnnnnnnnnnnntggtaaaataattccaacactttttatcttggttcgtgtggacgtggcataataatttgagactcaccttttgttgttgaaatgaaggtgtgggtcattgaccagcttgagagatttttggtccttccaagtgatcaccagcagctgttcgccattcttgtattgattcataattaaaattggtcaaattataattttaccctcataattatctctttattgtttagtaccattaatttactagtggtcgttaacttatgatcgtatcacaaattcgtgtacaattttctagtactagagttaacacttaaagttaactaatattcaatctattagaaaagtcaagattttatattgtaaattatgttcccaaccatcgacattattaaacacccaaaatagaagttgccaattccctatccgagagattttaacgagtgaatctaagaatgtaataacatgaatagaagttcataaaaactcagggatttaggttgatatactaattgattatctttatgatatgaattagatctttatgataaacggtaagtttgataaagacaaagtaatcacatat

SEQ ID NO: 157724 - DNA, 803 bp, Cannabis sativa
  modified_base (760)..(762): a, c, t, g, unknown or other
atttctgagagcaaacctagacattttttcctggttgcatgaggatatggtcggaattgatccttctataatttcacatgtcctgaatattgattcaaattttcagcctattcaacaaaaacgaagactgttggacaaggagcgggccctatcactaaaataagaggtagagaagctacgtaacaacaatttcataattgaagctttctatctggcttgggtttctaaccccatactggtacccaagacgaacaaaaaatggcaagtttgtattgatttcactgacctcaacaagggatgccccaaagactgctttccacttccaggaatagatcaactcgtggatgcaacagcaaggcatgaaacattaagcttcatggaaacctattcggggtacaatcaaatcaaaatgcatccactagaccaagaacatacaagtttccgaacagatatgggtttgtattgctataatgtcatgccatttggtctcgaaaacgccgaagctacataccaaagattggtaaacaagatgtttaaaaaccagatcagacgaaacatggaagtgtacgtggatgacatgctcgtcaaatctaggaaggctgggggcatatagatgacctagacgaatgtttcaaagtcctcaggaagtacaacatgaaactcaatcctctgaagtgctccttcgaagtcaacttaggtaagtatctaggcttcatcgtcaatgcccgaggaatagaagccaatccagagaagattcaannnctccttgatatgaaatcgccaacaacaaccaaggaagtaca

SEQ ID NO: 157725 - DNA, 673 bp, Cannabis sativa
tttaaaagaggttcaaccccttggttaatggttaacgacctactccccttttagttgtattgattcaagagataatacaactcaaaatcacaagctttgtaatttctaaagtagctctctaggaattacaatagtgagatgtaaggaagatcttaagtgtgtgaaatgaggaagacttaatctttagtacactggagatggcatgtcgaagagagagctagggttttgagagttagaactcaagagcttagggattataacttagctttaagtttagcctagtgctctttatatagatgagagcttacagaagacctaagccaaagtagattaatatctcttaaaatgaggagatataacatttttttcacatattaaatatacataaaataaccaattaattattcttaaggaataggtaaatatttgaagttgaacccctagtttcgtgggttgttggagtgaatttgtaactgagagtgaaccattgtctgtctaaggtgaaagctacagagataccactcactactacaataatggttttttatgacatttttaaatagtcgtttaaagtattctggtcggattctataatcgttgcctatacgaccgtcgcaaaatgagcaaaataggcgacgattaaaaacctttgctaatgtggacttcccgacgg

SEQ ID NO: 157726 - DNA, 513 bp, Cannabis sativa
aaattaattaataattatacttaatttaattttaaaatataattaatcttaattaaagttttaaaaggaaataaattaatatgttaatatcaggttacagatagtggtgctcattggatcacatccaatagatttggacccaaccgatccaatccaattatttattggatattgaattttgtcatctaatccaacctaattaaattgagtcatccgattcgatccgatccaatggatgtattggattggattggttccgaccattggatgcattgactggtttttattgattggattagatccatccaatctattttagctaccatttaagttaatttcattaaaaaaaatatataaatatatatataaaaaaagcataatttaaaacctaataatccaacatatattataaaaattagtttagtccaatctaattctcctgatctcataataaaactgttaaaaaataaactttattcaatacatattgataattttattagcgtttaggaa

SEQ ID NO: 157727 - DNA, 744 bp, Cannabis sativa
tcatccccgccttgggaagttccctacttagaaatgttttttcccttgttcgagctctagctagcggatacttccttcttagccttggctatggcaaggttataacattcccgagcaatctattggtttcctcttagacaccctaccccattctttgttggaaacttcaggcatgaatggaatatcgatataaatgcctttaagtcatacaaagctggtcggcctaacatgacgttaaaggctaatggaacgtccaataccagaaattgtgccattatagttatgcttgttggagccgatccaacagtgaggggtaggcgaatttgccctagaggtgcgactccttggccatagaaaccatatacaggcggaagacaagggcttagatctttgagttggagccccatcttttcatatgttgtcttgaataaggtgttggaagaggctccattatctatcatggttctggcagccatcttgttggctatctggacttccatgaccaacgggtcgttgtgcggaaatctaatcttgacaacatcttcatcattaaatgttatggtgggttcccctacccgtgggatcttcggcttcctctcttctacggccaagactacttcttcttgctcatgttgtactattcgggcatacctctcacgggctttgcctgaatcttcatgtatgtgcgggcctccaataatgacttgcggatgtccatctactggtggtggtagcaagtcttgg

SEQ ID NO: 157728 - DNA, 809 bp, Cannabis sativa
gttcaccctggaggaacaattgagaccggtggcgtagttgacttgcacttgcggcttgttccaaatcatgaagtttccttatcctcatgcatgtgctgccggtcagcaatgaagtactagcatgtatgcactatgctcgccatattacacaacataatattggaggagcacatatgaaggcataattatgccagttggtgacgaggatgattgggaattgcctgatgacataaagaacatgacagttggagtgcctattgagaaaaaattagtagggcgacctaaaaatcaaaaggttggaagaattaagtcaaactgaactgcttgtatcataccacaaaattgtctgaagtgcggtgccaaggagcacaacagaagcacttgcacctaccaaggttaaaaatgaatttttaatttattcgtattgtgatgtgttgtgttattatgtattgttattgaattcatgttggacttttttaaaacattaaaatttgtcgtattttattttttaataattattataatttgtggcatagctggaaggcctaaaattgttatgaaataatacgccaccatcaaacactatcggcctatgtagcatccacaattgtccttttacagaaacatatgtttaaaataaaagaattcataaaatttaagttcaatttttatgaacataaccatacaaataaatgaaactagttacattgttatcttaataaatacatatatgtagatagataaatatatataagaaaagaaacataaaagttcatgctatattttagtaaaacaaatctacacaccac

SEQ ID NO: 157729 - DNA, 621 bp, Cannabis sativa
  modified_base (27)..(64): a, c, t, g, unknown or other
aaaaatagtatttgttgaaacaaacannnnnnnnnnnnnnnnnnnnnnnnnnnnnnnnnnnnnnatcactttagaatagctatcaaatatgtaaacctaagttaacatttctaacttttcttaaagtatatgatcaggacatccatgaatctagtaatggtatacactaagtacataactattccatcattctgaaatttttctttcactagggtatttccttagaaggacttaggcagttgttagtaactaatcatagaccttttattttcatcaatatgcaatctgaatttctgtggaggtaagtttggatacaatttaaaattcaacttaatgatctttgaactgcatatccaccaagtatttctccacccctatcagttcgcaagatctttaatcacttaccttaatattttcaacattgctaaaaattcataaaattgctcaaacatttaaatttctttgcataaggtaaatctagagtgatcgtcttaagaatttaacgataacgcatatccacccctgaatgtacatctatatgttcaaatatagattatcatactttcaagtagatataagcatattttctctttgtagagaatgatcttgtcaaaaccacta

SEQ ID NO: 157730 - DNA, 741 bp, Cannabis sativa
  modified_base (678)..(682): a, c, t, g, unknown or other
gtctaatccctacagccacaaaaaagcaaaaccctacctcaaaaccaactcaaaacttagagtttccaatccaaaaggttgagaacttacctccaaactcttctaggttgacttggggcaggaaccatcttgaaaagaagaagaaaattctaaagaaaaccttctaggtggctggttttaggttgcacgaaggggaagaagagaggaggctgaatttgtttttggtggttacttagcttctaagtaatttatagtaagggttttttttttttttttttatatacaaccagccccctaaaataaaaatagaaagggacaaaacaagtttatttaaagaatgactaatttaccctcaaaagtaaattaaactttaaaataacctagggcattttggtaatttcatgaatccaccaaaccgacattctaaaattctaaactagtccagaatatcctcaaaataatccatcccttaatgtcatgacatttctgaccacatagtcaaatttccacagtcgggcccaaaaatatttttatttcaaaaatagtatccacgatacccacatatctcagtataaagtccgttattaataaattacgctttatataatcattttataaatttcactaatcgatccaagtaagatcataatcttacttcattaccaaaataattacatnnnnnataaaatatgtctaattaaatatcattttattttacgggatattacaactatcccccct

SEQ ID NO: 157731 - DNA, 1574 bp, Cannabis sativa
  modified_base (298)..(299): a, c, t, g, unknown or other
  modified_base (827)..(833): a, c, t, g, unknown or other
  modified_base (1034)..(1056): a, c, t, g, unknown or other
  modified_base (1367)..(1370): a, c, t, g, unknown or other
gcatgcccttaagattgtttttacttcctcagtagatgcaacaacagggcacgaactattaagcttaatggacgcttactcaggctaccaccaaattaaaatgcatccactagaccaagaacatacaagttttcaaacagatatgggtctatattgctacaaagttatgtcgtttggtctaaaaaacgctggagctacataccaaagattggtcaacaaaatttttaaagaccggatcgtgcgaaatatggaagtgtacgtggatgatatgctcttcaaatccagaaaggctgggggnnacatagacgacctggacgaatgcttcgaagtcctcaaaaaatacaacatgaaactaaatcccataaagtgttcctttggagttagctcaacaaagtttctaggcttcatcatcaatgcccgaggaattgaagctaatccagagaggattcaagccctcttggttatgaactcgccaaccaaaacccaaagaagtgcaaggcttaactggtcagatcgccgcgctcagcagattcgttttaaaatcaacagacaagtgtgtcccattcttcaacatcctacgaggaaacaagcagttcgagtggacagaggagtgtgaaaaagctttccaagagataaaagcacaccttgcaaaaactcccgtactctcaaaacctttggacgatgaggaactaggaatatacttaggtgtcacggaacatgccttgagtgtcgtgttacatcagtaaaagactcattgaggccgaaggccgatacctgttaatagaaaaactttcttactgcattattctagcaacaaggaagttgannnnnnnttttcaagctcatcctgttcgggtatacaccgaccagccactacgtcaaatactgcaaaagccggacgcttctggacggctactcaagtgggcggtagagttgggccagtatgaaatcactttccaacccagaacagcaatgaaagtctaagccttagcagactttgtggtagaatgtgcacaggcaaaaaagaaagcatnnnnnnnnnnnnnnnnnnnnnnntacaaacacctcagccaagtcacaatgaagagaagccgacttggaaactacatgtagatgggtcggctatagatcaacaatctggtgcacgaatttcccttgtcacgcctgagggccaacacctgcacgctgcagtcaagtttggattcaaagcatctaacaacgaagccgagtacaaagctgtaatcgttgggctaagactagcccaggagatgaaggtcgaacacattgaaatctgtagtgattcacaaatggtggtaactcatgtatccggtgaatatgagggtcggggagaaaagatgatagcatannnnagcaaaatacatgatctgctcgtacatttcaaaagctacggtctcacacaaattccaagagaataaaatacaactacagacgcgttagaacgattggcaaggagcaatgtaagtgacaaggcaaacttggttcctatccagttcctcgaagagcctagcatcactggcacggaagaaataaaaattattgatacatccccaaac

SEQ ID NO: 157732 - DNA, 717 bp, Cannabis sativa
atacatgaatgcccgatacgcgatgcatttagtcgcaggcattccatgaattaagaaccccgagaggttcatacatgaatgctcgatacgcgacccatttagtcgaaggcatttcacgagttaagaaccacgagaggttcatacatgaatgcccgatacacaacgcgtttagtcacaggcattccatgaattaagaaccccgagaggttcgtgtgtttatttgaaccccaagaggttcatacaacaaagaaaaccctgagaggctcctccatttattcaaacttcgtaaggttcataagaaccccaacaggttcatgtagcgataaaaatcctacggggtccgtgcatcaatgcgaaccccgagaagttcccacatccaaaagaacctcgcgaggttcacatttttattatgtcatgatcttatacgaaacctgcgactttagataatcaattgaaaatgtgacgcacaacatgaataaggcatcatgatcatcaaaaaacgcgggctcagactattttaagttctccagcacagaacgagttatactgaagaactaggggcatgtgttataggcataaatctaccctccgctcgagaaagacttgtctatagagaactcactgtattgaaggtggctcgcaatattatagtactcgcaataccgaaagaaaggatctcgcaatattaacttaaagagacctcgctatattaagaaa

SEQ ID NO: 157733 - DNA, 727 bp, Cannabis sativa
  modified_base (301)..(305): a, c, t, g, unknown or other
aaaaaaaaagaagtaaaacgagattagaggacgtggagcacatatctctcaataaaaaaaagaaaaagaagacaaatggtaatttcagagggcatggagcttgaatccgaactctgttgactcattcttcgctagaaaaaggtcgctagcttgagatgatgcgcgaagataaaagagtaaggaaggactaaagctgagagatacaccatggtagaacccatttgatcacttttgccatttttttacaaaaatactgcgagacggtattttttacttttttactatgtttttttataagttnnnnnctgcagtatactgtgttaagttcttactagtattttttagttattttactagtgttttgagttgttctgttttttgttctactggtgttttataaaaacacagtatttttgtaaacttttccttgtgacagtatttttgtaaagttacctcaaattctagtatttttgtaagtttcccaaagttaattgttcattttatatgtgtagccggcccaacaattaaaaggcccagatatatggggaccttttatcccagtttttaaaaatcgggataaaaagtaccacttaaaatattaagttgtgtttgacaaatgcataaaaatagccttttcaacactgttgtttgtctattttccaaacaagattcttattccaattatttatttaaggctccaaatgtataagcggcatcaaaatttttt

SEQ ID NO: 157734 - DNA, 508 bp, Cannabis sativa
  modified_base (82)..(89): a, c, t, g, unknown or other
  modified_base (462)..(467): a, c, t, g, unknown or other
ctatttttaccatattggaaaatacaaggtccatcttgtcatttaacaaaatagagaatccaatcggtaacttttacaaaannnnnnnnccaaaatagtatttacccttattaaaaactaatgaaaaatttaactgtagctagttgaatagagaaatagatttgtggcatagatgtaggagattatatcgaaatgaaaattcacataaagttaggttgggacaattgaaactctaatttctaaatttttttatataaaggagaaaggtgggtcaagcggttgttgcaaaataataattagatgtaatttttaaaaattaattaattattcaaaaatttatttcagaagggtggaagtctaaattttgtaaaaaaaatagaattttattgtaaatattatagttaaataaattaaatgttaaaaatattataatagggacttaaatataaaaataaaattatnnnnnnatattaattgctaaaaggggtcttattaaatatttaaatta

SEQ ID NO: 157735 - DNA, 545 bp, Cannabis sativa
  modified_base (311)..(337): a, c, t, g, unknown or other
ggatttaattagtttaaaaataaagtttttaaaattatgttagtgtgatatataattgattgtatatgtatatgtatatgttattttttaaaaaaattagctatagaatttaataactagtaagtaattttataattaaaattctaatttggttgtatattgtattatattataggttgtgagctaatatttcaagttcgacatatttcgatattgatcgaattttaacgtgcaataggtatatagattcactaactttttgttattataattaattatcaattcatgcttagtggagtttgaatatcttnnnnnnnnnnnnnnnnnnnnnnnnnnnctgcgaatacatgtactgcggtcggatggatggacaaattttatattgtttatgttattttgtttgttctgtattattatatttgttttgtttgttactttaggaacttttaaaatttttaggaacgcccaattacagtcgttatgctaccgaaatttcggtagaattagaataaattttactaaaaaaaaatataaatattaaagga

SEQ ID NO: 157736 - DNA, 504 bp, Cannabis sativa
tagacaatcactgagattagtgctcctagtgtggtcgtccaaagatcattaaaacttgttctagatttgagcatttgtctcaagttcatgttttcttatgtcaacccataaagttacttacattttattcgtattttattcattttaagaatattgtatgaataactttatgaagttttatgaaacttaatgtgctaaataaaatattcaacatatcttaatgtttgaatatttctaaatatatctagcactatatatagaatttatgtatggcatttaaatcatacaaatcctaattaattgtaatgataataaattttctgaataaatataaattaatacaattatcgtatgataataaattaaatgtaaattctataataagtagttaattatgcatttataaccatataatatcttaaatatttaataataaatttgtataaataaggtaaatatataaattagtacaatttaataatatgaaaataaattaaatgcaaa

SEQ ID NO: 157737 - DNA, 700 bp, Cannabis sativa
attttgcccctcccacactaaaagtcataaaaggtcacctaggggtattttggtcaactctaaaatctctactattctcgacattccaaatgtctaactatactgcactgctatactaataatactcatatgtgattctaatagccaaacaccgtgttccaatgttgtcgggcacaaattatgcaaaattatgaaattttatatatgacatctaaaatgcattctgaattcaaataaatcatcataaataagtaattcaagattaataaacaagtttcataattaagcccttattatctgctaattttcaaattaaagctaagtggtctttacaaaggatgtcgtcatggcatcaagccctagtgtgggtggtagtgtcattaaggggaccgacagtggcaaccctgaccacaagtggaaagctgaagcttccgaaatagctggaagtaatagaaggtttagtgggaacaaggtggtcgttaaggttgcgggtcttcattcaaaacttacctggagtgtcctaaatgcaaaaatcaccatcagggtgagtgtcgagctaaaacatgtttccaatgtggtatagtgggccagtttatcagagactgtccacaatccaagaaagaagaaccaaagaagaacaacaagcagaacccagggagcttgttcactatgacttaggctgacgttgatgctagtccat

SEQ ID NO: 157738 - DNA, 589 bp, Cannabis sativa
gttagtactagacctgaccttgcttatgcaatcagtgtgctaagcaggttcatgtctagtcctggaaaagagcattggaaagccatgaaatggcttatgatatacttaaatggtacatctaagttgggattggtctatcagggtcaccaaacacatcagaaccttaaagggttcacagatgcagattatgtgggggacagggacactagaagatctacttctgcctattttctcttaacaaggggaaatcgtactagttggaaagtacaattacagtcagtagtggtgttgtccactactgaatctaaatatatggctactacagaagctattaaagaggctctatggttaaaagggcttatggaggagctgaagttaatgaaaaggtgcctataatctactccgatagtcagagcagcatctatttgtgcaaaaaccaagtttttcatgagaggacaaaacacatagagataaaatatcactttatcagggataaagtttcacaaggacagatcgagatagacgaagtgcccactgaagtgaatccagcatacatgggcacaaaggttgtgtccctcaataagtttaa

SEQ ID NO: 157739 - DNA, 586 bp, Cannabis sativa
tgtgcacactagtgaaattaacttaatagaccatcttacttaataatgtcaaaaagatcattacaaacataccattagcatttggtgagttgaggaataagtgatacaaaatgatgaagtttggggccttaaaacaaaaaaggattgatttaccaaagaccacttattagggctacacgtgggttgggttgggcggtttttttatgtggtagttttttaaaattacaactcatacctgccccataaaagtttgggttgggcgattttttaggaggcggttttatgtgattttttgagcggtttgagttgcttaaaatcaaaacttccaaagtacattgttactagaaaaaaaaaatattcaaccaaaaatttgtatctgttaataacaatgcataaaagtccttaaaatattcatatcaatctttataaactccataacaaggcataataatagtttatgaaaatttcataacaattcttataaagtctatactccataacaatgtaaaaaaggtgcttaaaaagtccacacaagttcataattaaattaattttagactatgataaaataaacttcatacacaaa

SEQ ID NO: 157740 - DNA, 616 bp, Cannabis sativa
tcttgttgattttttgttgtttcgtattattttttggaaaaccgtaaaaatataaaaaaaaacattctttgaacgtaaaattgtaattattttacaaaaaagggtgtcttatgtaattatttcttaaaaattcctcatcaactagtgagattgttagatttaaaattttttgtctaatttcattcaattttgctaatgtagcaattgtaccatatcatatcgtaaaactttaacatgtaccaaattgtgtctcttaaatttttatctacgtcagaatttttcagtaaaattgaataaaaactcttaaatctatcaatatcaataatttgagagaaatttttagcgacttaaaaaatttaggacatgatgatttagtatatgttaaaattcaagaagaaaaaaatctaaattagcttaaaaaaaataatacttgccgttacatatacatatatagatacattaatgtattatggaccatttaaaaaaataacattgctacgagatactagcacccctataaaggggcggacccacattgtagcgagggggggcagtcgcccccctgaaaaaaaaaatcgagaaaaaaatgtatatgtattttaattagttacaacat

SEQ ID NO: 157741 - DNA, 664 bp, Cannabis sativa
tcttttcatgaataagcaaaaaaactaattgatttaatatatacacatatttagttagagagaaatttgagaacaatttaagagaatgaaaaaataaataaaaaacatgatttttttaaagaatgatacgaaacaaaaaaataataataataataaaaaaaaattggtgcaaaatttatgaaaagaaatattttttcatttcttataaagtaaatagccaatatttattataaaataaattaaaagaatgatttattgtggtacatattatctattaaaaaataaaattttaataaataaataaaatataatttaattaagtttttttactgtttgaaaaataaataagcaagtaaatagaatcacacattttaattatcagtaaaataaataattattagttttaaaaaataaaaaataataagtaaatgaaatgactcattttaattatcattaataaaaactaactgagggtataattgtaactgtttttaaacataatttaaaaggttacacatgtcactcaataaaaaagagagtgtaaaagagagtgcaaaagagagtttcactagcactccttttttagtttttcaccacttatttacactttcattggaaatgctctgataatatatattagttgtcatctttttataacatttgg

SEQ ID NO: 157742 - DNA, 556 bp, Cannabis sativa
tatatatataaatttattatatataatctatatattatatacataatatatatatttataaaaaataaaaagttcaaactactatatttttttttacgatagatgatttgaactttaaattcaatctttatatttatctcattatcacaataactaaaatataacaattgaatggtgaaaaaaaaataaacattagtgctcggtttggacgggttaactcgactaaaccgaccaattcattgggcgggttgaaactttttttttcttaattgggcgggttgcacgtagattattgtaacccgatctttacattgggttaaataaaatataacgtaaaccgaccaaaccgaccgacatacacccctattgattacgtcccacataaaataaatgcagttattatttaaaaattatacagctgtgatttatctgcttttaccgggtcaattctgacgtgcttcaaagtgtatcccaaagagcacctcgctgagatagtaacaataaccctgacagcgagctagagcttttcccatgtctttccgaggttgataatgta

SEQ ID NO: 157743 - DNA, 510 bp, Cannabis sativa
gaaaagctcgggatacaactcccgcatctgcgactctaactcccaagtcgcttcttcaaccttgctattctgccacaacagtttaactagcggaataatcttattccgcagcaccttttctttcctgtccaaaatctacaccagttgttcttcatatgacaggtcagtttgaagctcaatgtcttcataacttaagacatgagttgtattagatacatatttctgaagcatcgagacatggaatacgttatgaaccccaaataaagtaggaggtagagccaaccgataagctacctgacctactttctcaagaatctcaaacgaaccaataaacgtgggactcaattttcctttcttcccgaaccttcgaattcctttcattggggatacatgaaggaaaacaaaatcccggatctggaattcaacatctctacgctttggatctgcgtagcttttctgtctactttgtgaagcaagcatattagctcgaatcttttcaatggcctcact

SEQ ID NO: 157744 - DNA, 529 bp, Cannabis sativa
  modified_base (482)..(493): a, c, t, g, unknown or other
atatggatgattcttgaagccttcgtttctttaactattgactacacctttatttacttctttttaatatttattatcaaatcaaaaatcacaaactcattagtcagtatcatcgttattttttaaccttttgtttctatttttctactaacgtttttgtccataatctcctccttgtggaatcgactgcccgatctatactacagctatcgctagtagaagtcacattttgggcgtacaattaaatttaaacgtcttaaagaaagtgatattaactcaaccagaatttttatcggtaattcgttccagtttcattatttttaatttcggtctaacaaaacaaatatttttaaaactatgatgtatttctttgcaatgcatttcaaagtaaatttcagtcggtcagatttatatttttaaataatatattcattacaaaaaacaaaagaaaaaaaaagtatatgttataaaataatataaannnnnnnnnnnnagatgagaagaaagaagaagatgaagagagaaagag

SEQ ID NO: 157745 - DNA, 635 bp, Cannabis sativa
ttcctacccacgaatgcccaactctgcccattcatttctaccaaacctgtctctcttttgggttttgcttactctactgtttttttgatcatgtagttatatattatcggaatgagatgaatgtaagattgcgcttcattgggatgaaaacatagaaatttaaattagaatagaaataagaatattaatggaatgaaataaaatttttaaaatgtataaaaaaaattgataaaagaattattaaattttttcttttctaatattgaaatagtcttttcttctatttcaaaatggaataattattctactaaaatagtggaaagactatttcattagaataatattctaatactttaaaatacaactaatcaaaaaaatgagatgaaatttgtttcctttctattctattctatttcattatctctaactaaacgttacctaactaaagtgacgtttcgttgagagtggaatgaaaatatagaaatatgaataagaatgaaaataggaataggaattaaattaaatttaaaatgaataaaaaaaaaattgatgaaaaagttattaaattttttctcatgttgtattggaatagttttttcttctatttcaaaatagaatagtcatttcaccaaaat

SEQ ID NO: 157746 - DNA, 522 bp, Cannabis sativa
  modified_base (385)..(402): a, c, t, g, unknown or other
  modified_base (471)..(477): a, c, t, g, unknown or other
atgataatattattggtatttaattttatttattaattcaaaaattctattcaaattaatataatagaaggtaatgattcaatcctacattttttaaagtatcaacatcaccctcctcaaggtagttataatactaaggggctgtttggaataggttaatgctagtaagggaatggtaatgtgaaacattaccttgtttgtttgaagtgtttaatcttggaatgttattcccctagtaatataactacccttgaggaaggtaatgttcatactttaaaaaatggtaggattgaattattacattccattatattaatttgaataatatttttgaattaataaataaatttaagggactttttcatttttacactttaaaatagtnnnnnnnnnnnnnnnnnnatttttacgaaattctacatacaacccctattgcaactagcgcaacaacctaaattgcaacaaaaaatnnnnnnnaaacccctattgcaactagcgttacaaccactttagaaacccaaa

SEQ ID NO: 157747 - DNA, 539 bp, Cannabis sativa
aattacgaagatttatttgaaatgcgtaaatataatatgagttatttgtgaaataaaaatattttcaggttcggcgaccctggagatccgattggaggccaaaaatatcacaacggttttatttaaaaatgttgataaaattattgcgataagtttattttagaaataccgggatattttggggtactcaaagttagccaaataccctaaaagaagaagtttcttaatggctaagaaataataagataactattaataataaagattttattaatattattattattattatattaaattattattaatattatgtaattatattattattattatatataaagaaaatttatcagcttcgtttaagattatatatatattaagttttatatataacagtacgaacgaactctcttctccctcttttaataaaattttctttctttttatctattttcttcgattttcaactcgaaacttagcgatctaagctctggtagtagcaggatagcaaatccttgaagatggaaagcttaagg

SEQ ID NO: 157748 - DNA, 522 bp, Cannabis sativa
ttatttaaaaaccaatctttcttagacagagcaaactcgatttgtgtcatatgtattattacattgttgtaaaaaatactaggtgttttatgatttttataatttatttttttgtatttataatttgtttttgagatgctaaaatctaagagagctaaaataaagaaaaaaaatttaactaaacaaaaaaataataaacaaaaaaaaataaaaagtaatataaactaaaacactataacaagtactaaagtacaaaagaaaagtaaaaaaatactaaaaaatagctattatgaaattaagcaattttttttttttggaaaagcaaataaaaaataattatataaatatatatatatatgtgttttttttaaaaaaaataaagaaattatttctgataaggaagatcggataaaaccgcaaccttagagcatattttaaattccttgataattttttcttttcttcacaaatatttacacaacataagccaatattcacaagaaaataaaatgtaacaaaaaa

SEQ ID NO: 157749 - DNA, 982 bp, Cannabis sativa
  modified_base (294)..(295): a, c, t, g, unknown or other
  modified_base (852)..(854): a, c, t, g, unknown or other
ccaggggtttatgatgccgcatagggattctgtgtttgaacgatttgtgaagctgcaacctccaacttttctgggaggtactgacataattaaggctgaccaatggatgagtacgaccacccgtacccttgataatatgggagtgacaagaacagagagagtgaattatgcagctttcatgttacaagatcatgcccgcgcctggtggatattgtgggacagactcgtgacgtcagtgtaatgacttgggatgagtttaagaatttgtttgaagaaaaattttataacatcacnntgaggacttcacatatggaagattttgtgaaactaactcaggggaagatgtctgaggctgagtacactctggagtttgatcggctgtccaagtttgctggtgatctggtgctcacatatttcaccaagaaacagaaatatgtgagaggactgaataccacaatcagtcgggacttgaagattaccactactcatgacactttgtacaagaaagtggtagatctagccttaattgttgaggaggctgagcaacaagtaataaaggagcagactgcaaaggatgccgtcacggcatcgaaccctgctgctagtggtaatatcagtatggggaccgacagtggtaacccttatcacaaacggaaggctgatgcttccggaacatcagggggtaacaggaagtttcagggaaacagaggtggctgccagggccgcggatcttcattccgatcttatcctgagtgtacaaaatgcaagaaacaccatcagggtgaatgtcgggccaagacttgtttctagtgttgcatggtgggccgcttcatcagagattgtcctcagacnnngaaagaggagcctaagaagaatgttacacagaacccgggacaacattttaccatgactcaggctgacgatgatgctagtccgtcagtggtgacaggtcagttgcctataaatggttgttcttatactg

SEQ ID NO: 157750 - DNA, 777 bp, Cannabis sativa
ataagtttagaatattagatttaaaagtaaactttggctgaatagcgttggcatctatttttatttttaaaagcttgaaaattaagaaataaagcaaagaaaatgaagcttttattcctctttccttcgagcaacctaggagctgagcaaaattaggagtttttcatcaattctctgtggtttctagcaggtttcttccattcaagttcaacctaggaagattaaggtaagtccttgccatgtgaattaagaattttcaagttttaagatgattttgagttagggtttttgagattaattttgtggttgtgggattaaagtttagcacaacatttcatcatcagacagatggacagtctgagagtactatttagatcttaaaagacatgcttcgggcatgtgtgcttgactttgaaggatcatgggtaaagtaccttcccttgatcgagttctcgtacaataacagctatcaagcaacaatcgggatggctccttatgagcttttatatggaagaaaatgcagatcacctattcactgggatgaggtgggtgaaaggaagttgtcaggccctgaacctgttcagagaacaagtgaggcagttgatgaaataagagcgcaaatgctcgcggctcaaagcagacaaaagagttatgcagatcccaagtgaagggacgttgatttcagatcggggacatggtatttctctaggtatcacctatgaaagccattaaacactttggtaagaagggaaagcttagcccgaggttcattggacc

SEQ ID NO: 157751 - DNA, 582 bp, Cannabis sativa
ggaaccgacggcatagggtttccctaaaaaaccctataaagagtcttcttcttccccacttcttcttctccaccataaccatccactatacagcagagaaaacccacgaaaaccctcgccaaccacctctaaaaacccacatatctctctcatttcttcaccatttcatcccatttttgtcttaaaattttctattttcaatatctaatcccatacactaaaaaagttttgttttttcacccatttacactgtacccgaacctatttttaaaaaaaggtggtggtataactccgaccaccgattttagcggagaaaacgtttaatctcaacgttcattaaggtataaatatgatttctattcattttattaatgtacattggcattatttttttttgtaaattttttttgggattttttcattttattaatattatattgtgtgttttataggtgaccggattattggtcccaatttgtcgccggattgcgtttataaggtaaatatttatttacttgatacataatatatatgtatatattttgtattttattattggatatgtgtttatatatatgttgt

SEQ ID NO: 157752 - DNA, 538 bp, Cannabis sativa
agatgtagttttcaagcgcccaacgagagtccttcccattgatagcattgataaccacactcgagtcgttctccacaatcacaaatttagaaccaatatctgaggctaccgagacagtcaagcaacaagccgcagcttctccacagaggacatccgagaagtcttctcgagccgtctgaattctaatgactctgccaaaatgatcccttgcaacaacagcaatacacatactattaaatcccaccttgacatcacaatttagtttaatccaatcctgaggatgaggggaccaagcttcctttagatataaaatgtagaaatggataatcatctaatctgttgagaaatatttattaaaagacatcttaaaatgcttaacatcacaaagtagatattatatgactagtagtgcaatttaattatggattgagtcttgtatatatactagtcggaggcacacgtgctccgcacgcgtattcaacacgactttttattttgaggggactcatttattataaaaatatgaaaaattttattt

SEQ ID NO: 157753 - DNA, 512 bp, Cannabis sativa
aacatctagcaccattatcactcatgaaatcaagaatattcaaagcttagaaaaacataattttcaatttctactacagctacaaattacaaattaaggctatgaaaagttatcgcaaattcaatctcaaaacaaagaaccaagatccacaactatcaagcttcacatcaagcaatttctcaccaaaactcaccaattttgaaataggttttgagagaaagaggtcaagagagggggaatcgggtttgaggtggaaaaaccagaaaatgaatcctttaatttgcaaataatcccatttactaccattaacataaataagccaatttaccataatgcccttagggccataacacacataagcaccaatacaagggcaaaatggtcatttacaacataaatcttctcaaataaaaattcagattattcacatataattataatgccaataaataatcccataattgtattttggccccgatcccaattcggcccgaaatacccggttgtgacta

SEQ ID NO: 157754 - DNA, 652 bp, Cannabis sativa
  modified_base (594)..(595): a, c, t, g, unknown or other
tggttctggtagaaatgctgagcgagccaagtatatgtgaaatagaagatgtcgagatgatagatagctctccaagatggatgacatacactgttaactatttactcgatgggcaacttccaaatgaaaaaaacgaggcacaaaaacttttgtatacagtgactcgttacataatgattgaaggcaaattatatagaagagggtatttaatgcccctacttcagtgtgttcttcctgcagaagcaaacgaaatcattagagaaattcatgaaggaatctgcggggatgatgcaggttggcaaagtctatctaaaaaaatcattagacagggatattactggccaacgatcaataaggacacacatgagtttttcaagagatgtgataaatgttagagattttcacatatacctcgcataccgccaatcgaacttagaatgatgacctcgccctacccattcgctatatgagggattgacctgattggggcattacccactgggcgagggaaagctaagtatgcgatggtagcagtcgacttcttcattaaatggatggaggtgttggaatatgttttacaaggatctagatttnntaccatgtatgttatttaacatccgaatatgaatttctaaaacaatgaaagtaaaca

SEQ ID NO: 157755 - DNA, 562 bp, Cannabis sativa
gtactcaaagagggtgagcgctcttactgatcttcttaaaaaggatcaaaaatggtgttggtccgaggaatgcaatgaggcatttgagaagctgaaagtggctgtatcttcagaaccaatactaaagctgcctgattttgatttactattcgaagtccaaactgatggatcagatcgtgccttagggggagtactggtgcaagatggtcatccaatagcttttgaaagtgagaagttaaaggatgctgagcaaaggtactcggccctctttattctaatttgaggagattgcttcaacaaagcatgggcactcctccacacaaatcataatccctctcaaatgaggtgccaccatcgcctttgctgcactcaaaaattccacaccaagaatcatgtcaaaatcatccaacgggaccaccatgagtttggattgagactcccacgccccaaccttcaacattacagtaggagacccttgaatcggttttgcctctgatttcactgccttcaaccgagttgaactcccaatcacttccaaaccaagtctggttgcttccttctg

SEQ ID NO: 157756 - DNA, 806 bp, Cannabis sativa
  modified_base (300)..(302): a, c, t, g, unknown or other
  modified_base (779)..(780): a, c, t, g, unknown or other
ttcatatttcaaatctaattatcataattaaattaattaatattttttatttaatttaagatattagtgatattttaaccttgaaaatatgtcaaaatctatctttttttgttatcttatttttaaaattttattattttatcttatttttaaatttaagatcagatattttattttttaaattatttaattaattttaattaaaagaccttatttgaaatttaaattaagattattttaatcaggaaattttaaattgaaataagatatttttgctaacttttaatttttttttatttnnnttaaattaaattataaaatttaaaaaaaaaacgatatttatttatcattttattttattcaatatttaattttattttaattaacattaaatttgaaaagttgttagcatctttttgaaatagatatttaggttagttaaaaatctaatttttcaaatttataggtttaatttttgaaattaattatttgatttaatttgaaatttttgaaattttttttttatttaatattttcgaaattaattaattatttaatttgattaaattaaataaatcctacaaccaactatccaatgtgttgcatgtgtgtgttttatattgtttattattaaaacaagttttataaaacttattattgtttgatctaaattgtcatggttaacttgattgcagatctaatgatctaattttaaccaatggttcaattgtcaataggtcaaataaataatttctaacaggtaaattttgcaatcttcnntcatctgtgtataaacctagtaacat

SEQ ID NO: 157757 - DNA, 557 bp, Cannabis sativa
tcctctgtgggaataatcgctggattagtaaaggaaagatgcgccctctgggtaggtttaggtcgcaaagaagcaagtcgcaacaggtttagtcttgtaaaggttgtgaggtccgatttggtgaccctcgagaccaagtccttgcatgagaaggcatcgttcagctgagtgttgtccaccgaatcagtcccactcccttctgcctcttcttcttcctcgcctgactctcaagatggggctgcccaatcatcatccatctcctcgacctcaacgtcaggggcatgcctggagtggatgagataatcgcgtgctgacaccatagactcgctgtctcgaatttcaatggcccctggttcaacgagctcttgcaccattctctcgatgtctgcagaagacatcggacctaattctatacctacagtaggtgcgatctcctcttttgagatcgaagtcgggataaagctatcttccctttagtccttgtcaccatcaaatgcattgcctcccgagccaagcagttgactatccgacaggtcactcatctgaaagatagaaga

SEQ ID NO: 157758 - DNA, 825 bp, Cannabis sativa
  modified_base (28)..(32): a, c, t, g, unknown or other
tgttggatttaaagacttttgtctaatnnnnntcaattttactatttcaatgattgtttatgtactaaatcattgtaacacccgtatttttaatttactaaattcaaaagatgattttaatatattataactttataaacatataggtcgggattccgagtatcaaaatatgatttaaaagtatcttactagcatatacatatatatatatatataaatttacaaattcgtgaaccggcaactcaaaacacggactcaaaatagtgaaagaccgaaaccctctaggttgcactgccgcgatatgtacaatcactgtcgagctccatctcactgttcctccagcttcgcttttcccttacctatacaaggtagcaaactgatgagtcaacatactcagtaagataagcaggacataaacataggttatgcgagttcggctttgagcttaagctgccctgagctcagtagttgagcttgccatatggataagaacgttcttaagggaagtacgacctctgtaccaaatgcactacagttgtactcgtgttggtagagtcattattgtactcccaggaattactaagggttgtaccacatgcacgacgtaccctctggtactgttgtcagtaacactgtaaccctacaaataatctacactgtactaacactctttaaaacgcatacaaattagtgttagtagtgcaaacatccaaaacatgcattcattcacacatatataataatcatgttatcttacctcgctccgtgctcaggtgtgccggtcagcctgagtggaagtgcaactcgacgctttacagggcccta

SEQ ID NO: 157759 - DNA, 596 bp, Cannabis sativa
cctcacttgcgtgagtatactacttgattgcgtgcacttgcgtagtaattaataattttcgcaacagatctccatgtttttggagattttttttttcctaacagtctataatatataatatggctataggactcctttataagtattctattttattgtattatattaaattaaataaaaattaataacacatataattttacataaaagtattgtgtaaaatacaatttaatataatactatgcattataatacagaaatttatatataattatttattttcttaaatagtaagtacttttttattttcttagatagaaaattaaaaattattttaattttttgattgagaattaaaattttaaaaataaaacaaaattattttcaattttttttaaatagttttttttcttaatatatttttagaaaatatttttacttttttaataaattaattaagaaaatattacaacacacttgtttgaaaacatatggaatattgacaatattgtaagttattttaatatttttttgaaaacatatggaatatttgttataattacagatatatatatttgacattttgctataatatt

SEQ ID NO: 157760 - DNA, 805 bp, Cannabis sativa
ttaatattttggttttatttgtagctactattttctcttttattaaaatataagttttatggtcacactcatttagtcagtcccaaattctaataggatcaattctaaatgcaatttattttcattctttgattatctatttgtgaaattattagaatttgagataagataaatgtggtcccattttaaaattaattggcaataagaggagcagcccactcttattatatattctattattatttttacacattagcaatgtgtgactctctaacatccccaagatgatagctattttatatactcatcatcttaaatcataagtggcttttttttagctcactatcgctgatcacaagtaactttttgctctactttttagatcggtatttttagatttttggtggctcttttttttttcgctcactatccccgaattataaatggcattttttgacttttggctcttggatcagtttttttggatttttggtgactttttttttttggctctacttcgatcggggttctttttggggttagatagtcgctagagatttttttttggggttagatagtcgctagagattttttttttgctctgataccatgttagaatttgggataaggtgaatgacgttccatctcaaaaccaattgacaagaggaggagtagcaaaattacattacatgtttacattaaggggtattggcggctgttgacccaggttttcggcaactaataaaataataataacttagagagctgtaagaaattaggagagagattttttacgtggttgggg

SEQ ID NO: 157761 - DNA, 584 bp, Cannabis sativa
  modified_base (52)..(70): a, c, t, g, unknown or other
  modified_base (519)..(539): a, c, t, g, unknown or other
aaaaaaaaataagaacataaagcttttttacatggttttgcagttaaaattnnnnnnnnnnnnnnnnnnnatcttattagatttctgatacaattcgagggctttttctttaaaagattttgtatccctttttcagtgtatcctgctcttatttatagttacactggagggcagttacttacaaatcaggctgatatcttacaacaataatcccctaaaattgtgggatttaatcacgtcccacgtaaaataaatggggttattatttaaaaatcacacagctgttatattgttccgcttttaccaggttaatgcatacctgtattaaatacgttgcaaagcatatcattctgggacatctcgctgggaacatagcaacaataactctggtagcgagctagagcttttcccatgtcttttcgaggttgataatataaatctcgttgtttatgcgattgaagacatagcgccccatttgactattgggaatattttatcaagatctagatttactaacannnnnnnnnnnnnnnnnnnnnaatatgaattctctaaaataataaaaataaacacataagggttta

SEQ ID NO: 157762 - DNA, 575 bp, Cannabis sativa
  modified_base (404)..(404): a, c, t, g, unknown or other
aggtctcaggtcccagtcctagtcaaggtctccgtccaggttttggtctgagtttgagttatggtttgggtttggttatcgtcttaggtctgtgtcctagtcacaattccacttctgatcctgggtccgggattggttccgggtctgggtctgggtccaagttggagtcagggtactgagtcttagtttgagtttggttacgggtttttcgaatctcgggctggatccaggtctgagtcaaggtccacgttcgggtcttggttgtgggtccctagttcgtgtctgggtctgcgtctgcgtctgggtctaggtcccgtgtttcaatcccggtctaggtctgggtcggtatttgggtccgtgtatgagtctgtgtccatgtctacgtctgaattccaatttaggtnaggggcttggtctgggtctgggctagactcccgagttcgtgttcaggttctggttcaaggctctgtcctagtcttggtctgggactgggtctgagcccgagttctggggctaggttcggtctagttttgggtccgggtcaaggtccaggtcacggtcccggtcctgttcca

SEQ ID NO: 157763 - DNA, 533 bp, Cannabis sativa
taaattcttagtcgaggatcagggaatgaattcgtaacacccaaaaatagtggtattttggtgcctagagaggatagtaacaatttttatggcgtactcaaacaagtgtacaagttcacttacttgaaggattgtagtgttattatttttaggtgcaagtggtgggacacaagcggtaataggatagaaagtgatgatttttttactagtgtttgcgttgcccgtgaatagtatcaaaatgaaccattcatacttgcatcccaagcaaatttaatatattacattcctgacttacagaatggagataattggaagcttatcaatttttacacccctcgcaatgtctgggacttttcagatgaggatgatgatgagaccacgactatacaagaaagaaactcttcaagattctctttagtcgttcaacttgcacagttggatgatgttgaatatgttcgtgatgatgttgacccaattcaagtgaccaacatgggtcatgagcagtctaaccgtgaagatttagatggattcat

SEQ ID NO: 157764 - DNA, 527 bp, Cannabis sativa
ggatatcggccttcagcttcaataagtcttttattgatgtaatagatcgggtgttggatattgttttcttctctaatcagtacgacacttgcagcatgttccgtgacagctaggtttattccaagttctttttcgtccagaggttttgagagcacaggaggttttgcgagttgcgtttttagctcctgaaaagccttttcacattccttcgtctactccaattgcttatttcctcatagaatgttgaagaatggaacacacttgtctgtgtattttgaaacaaatctgctatgtgcggctatccgaccaatcaaactttgaagttccttggtttttgttggcgatttcatatcctgaagggcttgaatcttctctggattggcttcaattcctcaggcattgacgataaatcctagaaacttacctgagctgactccaaagttgcactttaggggattaagtttcatgttgtatttcttgaggaccttgaagcattcatccaagtcatctatatgccccccaacctt

SEQ ID NO: 157765 - DNA, 832 bp, Cannabis sativa
caaaatggtcattttgtcccattagtctttttgtctttagtgaataaatttattagtaatgatctgatttttaattaagtattttggctgaagtggattttagtaagctaagttatttcatttatttccaaaaaaaaaaaaaaaactaagaaagactcccttccaaccctctttccttctctctctctcgaaatccctagattaagctacggtttggtgttctttgtagatttcaagctagtttcagcaagaatttggtggttccaagttctaggtatgcttcttgtaacttttcctttagtttcttgaagtgtagaagaatagttcatgcatgattttatggttttgttgttgtagctattgttagagtttgttatagttttcagaggttgttatatgttagattcagttgttttaagcatgaattggtagttgtttgaaggtttaaccatgttttgagttttagaactcaaacttggagctttaatggtgaaattcaaatttgagctttaattgttgttttgttggttggaaaatgtttattggggtataatatgcatgtctggagagtttgattgagtttgggaatgatttggttaggggttgaattttttttggttttttaggaaaaaccagttaccagattttgcagcagggaaaactagtttttcagcttgtcgtttcgtgctagtttcaggtttttagttggttgattccctgctaatttgggatattaccatatttagttgcagtagatagggttttggttgtaaaccttagtccctgttgtgatttaccgagtcacttatgtgtgttgttatcgatgtgattt

SEQ ID NO: 157766 - DNA, 558 bp, Cannabis sativa
  modified_base (48)..(58): a, c, t, g, unknown or other
  modified_base (506)..(524): a, c, t, g, unknown or other
tctgagtccgattctccttcaagtattggattcttcatagtcttacannnnnnnnnnnagtacttgacttgctatgggtggacatgtactctttcactataaagctaaaaaataatgaagaaagagagagagagggagattcgaattctatagaaggagactctcaaattttctagttctctaacagagttagaaaactaggataataggttggatgagaatgagagccatcttatttcttatataggatttctcctagggttagatttaaattatatggctttaaaaaacaataaataaatggctaaaaataagtagtgttcaaaagtaaaaggccaataggccatataacacatgaaatcaacatgtctatgcaaataaaatcatctttgaagtactaataaagtgaagcttcttgtgtgcaggggcaggggctggtgcagctgagtcagaagctgcagtgtctagatgttgggttttgtgacctaaataaaacccatttcaannnnnnnnnnnnnnnnnnntaataaagatcagaaatcgcattttatgttgcat

SEQ ID NO: 157767 - DNA, 617 bp, Cannabis sativa
ttagatagcatcattgttgaggttacaagcttcggtaagcttcctagttcatttttctatggtttttttagtttaagatagattctcttgcatgaattttgagatgggttctgagtttttagagttgttggattttgtattttaatgatatattatggttgtttgaattgatttgaagttaattgatggtttaatttggtgtttagacaaggtttgagttttagaactcaaactttagtctttaatggtgaatcttgattctgtacatgttgaggtgttttcttgccttggatgcattctttggggtatattaagaaggtttggaagattttgtatggtttggattcgaattgatttaggtttcgaattttttgggttacctggtgtaaatcggttaactagttttacaggccctgtaaaacccgttaaccagatcagcagctgggttgtcgaatttttcgtgctagttttagagccttgattggtagactcgtttgttatttagggtattgccatgttgtttatcgatgagggaaattttaagttttaagtttaagtcctcggaaagtgagatttagcgtgtcacttatcagttgcgaataatgtgatttaggggc

SEQ ID NO: 157768 - DNA, 570 bp, Cannabis sativa
agagatgactttcctaaagtccgcacctgtccttaaccacaagccaaaaacaggaacagtgacaacattgcctgtcgttcctcagaagaggaaaagcgatgttgtggtccctcctaccgcggattcttccaagaagctggctaaggttccacatgacaaggggaagaaagtcatgatcgatccagctgtccgaactcgcgacttcttgattctgcaggaaaagtttgtgggcgaggagtttatggccaaggcagagaggactccttctgaagagcttattccgcattctgtggagttggcttcgcaatccatgaccatgttcatgaaagtcgttgatgctggctctaaggaagttgaactgctgaagacgcagaatgctcagctacaggagagcgttaaaagaaattataaaaaacaggaagcggctgacaaggacaaggagcttgaagaacttcgcaagtctaaggagaaggtcaagcttgaagccaagaactctcagatgaaggtcgaggagatatctcgcgacttggtggtcgagaaggagaatgggaagaagcagtatgaccaggc

SEQ ID NO: 157769 - DNA, 577 bp, Cannabis sativa
attaagaaacaagattacaactaagcctaactacccactaactaattagtttgttagttatcatctccctcaaacgaaaggagagtagataccactttgagtttggcctttaagtagtaaagattttcttaggcaaggacttggttaacacatttgcaacttgatcaacataagggacatatcgaatgaaaagagccacgacttctacacctttattgccaacccaaataacaagaatatcaactaaggtagcaaggagctcaataaactaagactaaagccacttaatttcagcagcagtattaactaaggccctgaatttagactcagttaatgatttagcaactacttgttgcttctttgcagatcaagaaattaaatttggccctaagaacacttcataacctcttggggatagtgatgacaatttatgtttgcaggtcgtgtttgtgtcgtgtcgatgttagaattatttatttgtgggctaatataataccataatcacaatcattaattatgtgcctaatatttctcatacaaccataatgagatagttaacaactattaattatttaga

SEQ ID NO: 157770 - DNA, 603 bp, Cannabis sativa
tacttcccctccggacatcccttcctcctcctctccttcgccttggtggagaaccctttggcacctttctatccccgccaaggtgaaacactttgccttctgagccacaaacttgaccctccctactgcccaaaatctagcctttaggaaaataatacaatccctgggatgtaaccgttgtggaaaccaggaagaatcagtgtcacacgcgttgttctactgtcagagtgtctgaaaaatttggaaaggaacgcaattttatccttatattttttcgtgctcttcagagattttgtttcatgatttggctcatatggttcatacatcttttcccaagaaagatgtagaacattttttgtgtattgcttggtttatttggtttaacaggaacaaagctctcaaaggtctctctagcgaccagacccatgcaatcattagcctggctcagagcttcttggcagattacaatgcgtcttcatcagttccaaacttcatcggtcgtcctagttccgcttctgccccttcaaattggattccccctgcccacggtcttctcaaactcaatgtcgatgcagcagttcctaagaatggtggaaaagtggg

SEQ ID NO: 157771 - DNA, 929 bp, Cannabis sativa
  modified_base (507)..(507): a, c, t, g, unknown or other
  modified_base (586)..(591): a, c, t, g, unknown or other
  modified_base (644)..(665): a, c, t, g, unknown or other
  modified_base (899)..(901): a, c, t, g, unknown or other
aaatatatttaagtttaaaattaaaataatttaattaattttagaccaactttaaattagaatagtttttttagaacttaaaaatagaattaattaagttaaatttactcaagatacttaattatttatttatatttaattaaatttaattaaataagaaaatatatttaagttgaaaattaatttaattaattttagaccaacttaaaattagaatattttcttagatatttaattagaattaataattaagtttaatttattctagatacttaattatttctatgaattcaattaaatagaaaattatatttaagtcggaaatttttcaatttcagatcaatttaaattagaataattttcagattatattttattttatttaaataataattttttatacaatttcgaaatacatttttttaaatgtagacatattgaaatttttcaattttgaaaattagattagattgaaaattaattttattaattaattttagatcaacntaaatcaagtaattttcattaatgttttaattaaaataaatagactaaaatatattattagaaaattagtaattagttnnnnnnttatctagatagatattttctaggtagaccttttggtatttttctagatatannnnnnnnnnnnnnnnnnnnnntatttaagttgattttattctaaacacttaaatatttgatatttttcttatgaaatttaattaaataggaaaattatatttatgttaaaaattaatttatttaattttagaccaacataaattagcaaaaaatttttcagttttattttgttttatttttgatgaatttcaaaaaatgtattatttttataatacattggatttcgaattctgtcatatatatttatagaaaannnaatttgagttgaaaattaatttaattaa

SEQ ID NO: 157772 - DNA, 551 bp, Cannabis sativa
tcatctctttcttactagaatgtctcttctgggttcagaagttcatcctcccgaactcatcttacccagacgcactaaccaatttccatttgttcccaaagacttcaagcctcgactggagtcagaaataatggattccaaggctgagcagcttccgaccaatccaaaccaggggaaccccgtaacccgccatgggagatcctcacaagtgatccctaagggtatagatcttgtgagcgatcttaaaagtcctcctcaagctgataaagaattccaggggaaggttggcatggttgcagatgaacctgggaagaaacttagcgcggtttcttttagagaatatagccaacccaagacccaaacctacgccagaagacctttgcaccatcctctttctggtaatgaggaatttcctgaggctgggaaagagatcttagcttcagggaatgggatcctccgatgatgaggataatgaggtatgtgcagagattaaggctctctacatgtagccggtctttctcaagcaatgtgtagtcggtctttcttcgagc

SEQ ID NO: 157773 - DNA, 532 bp, Cannabis sativa
caatagtgtaatttttatattttaaacttttcattctagtcgagtccgcatataattgagttgtccattttttctttgataaattgaatatggtagtgtcgagtcacgtaaatattagttttatttaagttcagtaagtttttcattttataatttggtaactaattttgaattattatttgaactacttgataagtataccatgtagatatgcacattgttattaataataaataataagctaatcttaatatattcatactcatatagtaagttaatctatcaatttgaaaacatatgtatgataacataagatgaacattatttaactgaaactatattataggaaatatgtatctatctttcttatcacttttagacacaaataaaaagaataaaatgtaataccttaccaattttgtattgttctaagaacatctaaaaatacaattaaaacttttaactttttatagaatgacaaaagtaattaaaattcatgatacaatcaacttgttttggaataatttagtgc

SEQ ID NO: 157774 - DNA, 541 bp, Cannabis sativa
tagatttttcttaattaattaatatttattaattgaataaataaataagaaaaagagaaaattaaggagagaagagatagtgagattaaaataatttaaaagtgtcacgttaccgtttcatacttttcctttatgtggacacatattttttagaccacgatgcatatataaatattcattgatcatattatttaataattattggtccttcgtgatataaaattaaaataatggtaataataatatattcttattttctattagtaattatttggtcctaattttgtttcggtgcttaattatggtggtaatctttcgaagaattcgaatgaacgctagcttggaattggtaagctagttaaactttgtttctttatattttataaattttaaaagagtttgaatatcctagatattcattcatagtaaagtaagttctgggattgcatgactgcagtgaaagtacaatatgcatgttagaagagtttgaatattttagatattcatccgtagtgaagtaggttctgccaataaaagtact

SEQ ID NO: 157775 - DNA, 633 bp, Cannabis sativa
  modified_base (594)..(594): a, c, t, g, unknown or other
tccaatcaacaaaacccaaaaaaacatacaaactcaaattatgccatggatgaaccaagcttgagttttcaaactcaaacttgtacatccatcaccccacaatcctaaaccagctgctagaacttctaacaaactaaaatcatacatagaaactgaattacaaatagctctaaccctaacagccattaatactcaaaatcacacatccaaccaaaaccaaagcttgaaaaataaagagtaagtggtcgaataaagaaagagaataaggaaacggtttgtcccccaaattttgcttttccttttgtttttcctaattttctcaaaattaataaactataggctgaaaataaatcaaatggacagctgccattcatccaagctgccacctaaccctcttgaccaattacaaaaatacctgtggtgcttaacttaaagccaattcaagtctaagggtaaaatggtcaaaaaccacaaccccgctcaaacttggtattctattttctccaatatgcatccaactaagaaataaggttctagacttacccatgtgattaaaatagtcatccatggcattttccgttgtcgccgagcaanaattacaaaaataacataattcaaatataactcaaataa

SEQ ID NO: 157776 - DNA, 712 bp, Cannabis sativa
  modified_base (148)..(155): a, c, t, g, unknown or other
  modified_base (426)..(434): a, c, t, g, unknown or other
cttgataatgctctgctacataaatgaatccagggctagatatttgaatggaaggagccattatatttcactgcactcactgtaagatttcccaacctttatatgtgtttatttcaatattttagagaattcatattaggatgttaannnnnnnnacttgttagtaaatctaaatcctagtaaaaaatattccaacaactggcctcagagcggtaatgatttaatttcatgaaatatgaattaaaatgatgatttgtgttgatttggaaggcttcatgtggtttatgtgcttatgtgatgatagtttagaaatcgcaatgtatgttactgaaatattttttaatttgatctggaattattttttctagaaagtagacaaaaaattaataaaatttggctttacagaacctaatttggattttttannnnnnnnntatgattttttgaatttgaacaaaaatattagggtttgaatgcacactcgcgcgagcgcatggggagaagtgcggctcgctcggacaaaaccgcttcagacaagaggcatgtgcgaagcttgcccctgtcccgcccatgtttcttggccctggaggctgcatgcagcctcctgtctcgatcagatgtgcctttccgcgcgcgtaggggtatgcatttcatacccctgtgcctcaaacttgttttcttcatatcttttgattcaaaaatcgtttttcat

SEQ ID NO: 157777 - DNA, 588 bp, Cannabis sativa
gacttacaagaagcagaagagggaggaggtgggttgtgggggtgttggggaaagggacgggcatggttgggaccaagcttggggtagagagcggaggaagaggtgggaggaggaggaggagcgtacatagggtggttgggttggggagaggaagagtgttgagggtacatggggatttgggcttccaaactcctgaattcgcagtccatacaaaacaccaacaccaccacgccgatgatcccttaattaattcttcactttcctttttttctttttcttttttcaataaatattaaaatccacgttttggaactttcttgtacttttcgcgggtgtttctcaccaaaaaaacaattattattatgcaaaatatagtttattttctcaaaattttactttatattgtgttatatcttaggactagtttaatatgtcgtattatattaggactagtttgatatgtcctattatattatgttagattgtgttatattgtattgtattttatattgtttggaacgtcgtattaggtcgtattgtattatattgtattatattgaattggattatatatattatatttttata

SEQ ID NO: 157778 - DNA, 650 bp, Cannabis sativa
atactcattacaatttttcttccagtgtcccattacaccataatagattatttaggttgatttgagttggttttatggtctatgttgttgatttggcaaggttggggtctaagaactcaaaccttgatctttaatggtggattgagtttttatgtgttattctgagttttaatgcttgattatggtttattatagtatttacaggcattctgaaagttattggagagtttgggtgaaatttgaggtcatggggacattttttgggttcccaacgctgaacctgtcgactggttcagggggacctgtagaaccggtcgaccggttggtccccaggtaccggacttctggttgggaaccggtctgccgattgggccattttccaaaactctagttttcctcgtttttgtgttatttggggtgttagcatcctatttatcgataaggttattcttagttttgattttaaatccccgataagtattttagtgtgtctcttatcggttttcgtatattgtgatttagggccttataacacgtcgagcagcgattccactcaggctgaccggcacacctgagcacggaaatgaggtaagatagcataaataatatatatgtgaatgtatgctttgtattaattgtttacactacta

SEQ ID NO: 157779 - DNA, 519 bp, Cannabis sativa
  modified_base (349)..(350): a, c, t, g, unknown or other
aataaaatttaatgtaagcccaaataaaagtctaacaatttgaagtaatttttgtattgcaatgtaataattagtattttgttcctttccaattttaattttattgtcggtattaatttatcaattttttcattttaattttgattgcatggtattaaatttaatataatttaagtaactcctttatttcttagactttacatagagatttattttaattcaaattaaatagctattaaatgcttttattattatttattttttaatttaatatctataatcaaataaattacatttcaaaaagcatattttattaccattttatataattatattaattgtattaatnnttttattctcattaatgattttgtttactagtaattatgttgccttaaaatattttattgatcttttttttattaataatatagaatacttttttgagtatttatttcatttattattgattgtatatattcttgtatatagtaattctatattaaataattttatttt

SEQ ID NO: 157780 - DNA, 513 bp, Cannabis sativa
agttgtcactgcaaatggtttcatcgagaataaagttgatcaatgtatatatgagaaggtcagtaggagcaacttcatgttcctggtactgtatgttgatgatattttgcttgcttctaatgataaaaatctattgtccgagacaaagcaattgttatttgaccattttgatatgaaagaccttggtgaggcttcgtatgtacttgggatacagatccttcgggatagaactaaaggtattctttgtttgtctcaaagaacttacattgattggattttgaaaagattaaatatgcatacttgttcacctggaaaggcaccaatagtaaaaggtgataaattctcaaagggccaatgtccacaaaaacgataaagagagagataaaatgaaagtggttccttatgcgtcatttatgggtagcctgatgtacgttcaagtatgcacacgccctgatatcgcttttgttgttggcgtgttgggtagatacttgagtgatcctggacttagccatt

SEQ ID NO: 157781 - DNA, 509 bp, Cannabis sativa
gaaactctttcctgactaagtttcagtcgtgccacttctttgttctttccttgtagatttttgcattttcataggcctcatttctaaattcttccagctcattcgattacatcaatcttttctttcctgtagctactaactccatgtttagggtcttcatagcccaataggccttatactctaattataccggcagatgataggcttttttgtaaaccaacctatacggtgacatactgataggtgttttaaaagctattttgtatgcccacagtgcatcatctaactttcgtgaccaatctttccttgatctctacactgttttctacagtatcatcttaatctctcggttggaaatttctgcttggccattgctctgtgggtggtagggtagagcagtcctatggcaaaggccatatcttgataggagtgtttgaaatattttaccaggatctagatttacaaccatgtatgttgtttaacaacctaatatgaattctctaaaataa

SEQ ID NO: 157782 - DNA, 743 bp, Cannabis sativa
aaaaggaaatacctctaagtttttttcttcttctaagaaaaatccagagagagaaacattataaaaagaatcagggttctttaagttgtaaatctcatatgtagtacatttaaagcctcacaaggccaaaacatcgactcatgaactagggttcattatacccaaaccacgtaaaaatctccatctttcttttacttaaatggtcatttaatttcttaagctctcatttaatttggttttcgaaaatctcggtaaataagtaaaaacaataaaccattttttggttactttatagttataatatagttgtcatgaggttattttttttattatttttggttgttttatagataatttatagctatcgtgaggttgatttcttattattttttagttagttttttaactttttactgagcaaagtattgttaggttatttttagtctattatttctgttatttttagagttaatttaaatatttttagtatcttttaggtaactttgttagcctatataaatatattatttttagtattttttgtaggttttcagagataaaaaatcaaaaactcttaattagcagagaactttgggagtacaaaaattagaggcagaaggcggctctgaagactttcaatattattttttcacgagttctttcttttactttattttttatatttttaattagttgttatcaattgtttacaatgactatgagtagctagatagttattaggg

SEQ ID NO: 157783 - DNA, 713 bp, Cannabis sativa
ttattgaagacataaaataactataatttattttattttgttgctagttaggtggaaaaaaaaatcataaatattaaataatttaatattaagaagtaaccaatcaaaaataattgatccaatccccacttttgcggattgaattggactagatttgaattattgtgcggattggattagatccaaaaaataaaatccgcacttagtgcagatcagatgcactatgagcaaaatagtatggattggattggatgaacactcataatttcctatttgtatttagtagttttccatttaatctcctagctttgtatataaatatgtactattctataaaatacatacaaaattcaattcactattttctacaataattatatccaacaatgtaaaaagttctctaatcttttattcgggagaattttaagtgtacatacaaaaattcctgattatatttgtatacttttctattattgtgtatatacacataataggaaaattgtaatgtacaagtcggtaaagtgcaagtaaactctatgctatgttacacaagttagcaaaagactatacacacactataattttctgaggtgaaacaaaacaatttagcactataatttgtgtttgaatatctatttctcattgtttgagttggccagtaaaaaatagcagaatcatattgtgagattttcctgaatagcaataaatgagcc

SEQ ID NO: 157784 - DNA, 644 bp, Cannabis sativa
cttccttaggctttgttggtgatggcatatctatcaaagccttgattttttcagggtttgcttcaatacccctcgcgttgactatgaattttagaaattttcctgaggaaactccaaaggaacactttttcgtgtttagcttcatattgtacttctttaatatttcgaagcattttgcaaggtctgtggtatgactcccacttttcacagactttaccaacatatcatcgacgtaaacctcaatgttttctccgatctgatttgcaaacatcttgttcaccaatcgttgatatgtcaccccagcattcttcagcccaaatggcatgaccttgtagcagtaaagttccatattggttacgaagctcgtatgttcctgatctgccacatgcatttttatctggttatatctagaatatgcatccataaatgacataagatcgtgcccgggagttgcatccactaactggtcgatcctgggtagtggaaaataatcttttgggcatgctttattcagattagagaagtcaatgcaagttttccaagttccattaggttttgggacgagaacaggattagctatccacgaggggtaaaacatctcgtgtatgaagtcattgactaacaacatatccacttcctgtttt

SEQ ID NO: 157785 - DNA, 534 bp, Cannabis sativa
  modified_base (27)..(30): a, c, t, g, unknown or other
  modified_base (459)..(493): a, c, t, g, unknown or other
cagcaaattccatctaaagagagttgnnnnagcgaggaagcccgaactccaataccgaagctattgtagggattgaagctcaaaggtcaaacgctggaggtatttcgatctttcattgcatatatatttcgatatgcttatagtgttttctgcattaaatattgtttatatatatgttgtattttatatactatattatagtctaatacccatcgcccacttatccgttccaagcacagaaacattaggggtaaccacgattgatcattcaacttcttggatagctccaattcaaaagtttttggaatctggaacgctcctggatgacggagtagctgcatagaagatccagctttaaacccaaaaatatgtgctcatggatggaaaattgtacagaatagggttatcaataccatatctaaaatgcatagttggaacttgttggaaattattttaccnnnnnnnnnnnnnnnnnnnnnnnnnnnnnnnnnnncaccctaaatatgaacttctaaaatgattacgaaataaaca

SEQ ID NO: 157786 - DNA, 568 bp, Cannabis sativa
atagttttttaatagtgtaaacactttctgtatgtatctttttaatatgttttttgtctagttgtttcctgtccatttttatatgggggtttttcaagcatatacgtaaattataaaaaaattacacaattctggtcagatattttaatcaatctcataccgtaccgtacaaaataatatcacctctttccttttcattttcttaagtccgcacttatcactttttttcctttctctatctttattgcatttgcatggcagctttttgtttgttttttttttttattattatttattatttttgtctacatctgtgtctttctctttgataattgtaaaagaagaatttagcttcatcattaactgtattaactcaagattggtaccaactcaacctactttttaaggtgattattttaatacatatggtaaatatatattttttttctcccttacaataaaatacttagaattaaaagtaatttttaagcttcttttacatattttattttatttttttcaaaaaaaaaaaaaacacaacaattaactcaattttaaactcaaacaa

SEQ ID NO: 157787 - DNA, 525 bp, Cannabis sativa
atggaatacatcatgtccttcctcatgggtctatccgatctgtattcacaagtgagaggtaatatacttgttatggatcctttacctgagattataaatagggtgtttcatttagtcacacaggaagaaaatcaaagaggaggacaaagtgtcaccatgggtccaaactccaacatggcctttgcttttcaaggagaaagaagttcgggaaaaccagaaccttccaagaatccaggacaaaaatgtggcaggcccttttgtacgcattgcaatatgcatggacacacaattgagaagtgctacaagatatatgggtatcctcctggatacaacaagaatggaaaatccgaagaggcggctgctaaccagtttcaaacttcagatgaaaccagtaccagcaataacaacaccattgctgcctcagctgacaccaaaccagtaccagcaactcctcaatctccttgctgctcaaacaacgaatcagcctgctgccgatcctggaacctcaacaaataattcaggtat

SEQ ID NO: 157788 - DNA, 715 bp, Cannabis sativa
gaacacaaactcgagctttatacataaacattccattattcgagattgaaaagtgtttaggccgaccagccatcacctcatctcgaatcttcactagcttataatcctataactgtgcctttctgattctttctagcaagtcagaccggagtgttaagttgtgcaactttctaactaccaactcaattcccgcactaaccatctcagtagctagttgaggagctatcacaacagtggtgaaaacatgccagagacctcttctactcaatgcattagcaacaacattggctttaccggggtgatacagaatctcgcagtcataatccttaaccagttcctgccagctcctctgcctcatgtttaagtctttctgggtgaaaaagtacttgagaattttatgatcagtaaaaatctcacatttctcaccataaagatagttccgccatatctttaaagcaaaagccacagctgtaagctctaaatcatgcattggtagcgctgctcataatccttcaattgacgagaggcacaagctatcactttgttagcttgcatcagaatacatcccaaaccctgtctagatccatcgcaataaacaacgaacgtttcttaatctgatgggaaagctaacaccggagctgttatcaaccgttgcttcaactcttgaaaacttgcttcacatttgtctgaccatataaattgttgatttttctta

SEQ ID NO: 157789 - DNA, 617 bp, Cannabis sativa
gtggaaactgcatcggcttaaaaaggtttaggaactttcatttgaaacaagagggcacgtgcagtttcaagaagatgtctgtttttacgttccgagacaccattttaaggtgtagtatcaacacaagaagtttcattaagcatgccattagaggtcatgtaagattgaaattgagcagatgtgtactctttggcattattacttctcaaagtacgaacagatgcattaaatgtattttgaatctcagcacaaaaagcataaaatataataaacagcttagaatgatttttcattaaatataactaagttacacgagaataatcatccacaaaagtaacaaaatacctgaattcaggttgagacaaaataggagaaggaccccaaacatcagaatggcctaactcaaaaggaacactagcacgtttattgactcgaggactcaaactaacacgatgatatttggcaaactgacatgactcacaatctaatgaagacagattactatattagggataaagtttcttgagcaaaggaatggatggatgacccaaaccgcaatgagtctcagaagcggaagcaacactcgaacaagcaatagaggttggtggaagtgggtc

SEQ ID NO: 157790 - DNA, 575 bp, Cannabis sativa
tgattggtggttaggttagataatgccatacatatttaatttagtggtagtggtatttactttttatgccatatttatcataaccttaataatttttcccatatttttgaaaatagccctaaatattaccttatatgccacttaacaaaaaaaaaatattaccttatgccatttcaagaaacattaccttatgtcaagactaattttttatgtattaataaaaaatatataaataggtaaatattattttggactttgtattttgcaaaagttattgattggaatttcttttttgttaaatgataaaataaatcttgtattttacaaaattgtaaaaataagaccttaagtttaatttttgataactttttttttttaaatataaccaacttaaagataatttttaacacaaacagataaagaaaatataaatagttttttcatagcacatttagatcggattattattaaattttattttgacaaaaattcagtttatggttctattcgtactattttaaaaaatacaaaatctattttatcatttaacaaaacagatgagataaatataaaaa

SEQ ID NO: 157791 - DNA, 509 bp, Cannabis sativa
gcgaaaagagagatttttggcttcaagtttgctgaagtgctttcatcaaaactgctcctttggcttgacgtaacttgaacccagacgcttgattctcaagtaagttctcgatttcctttatgtttactttggacatttgctttctgaatgcactttcgatttcgctgtagaagatatgtaggaaaccctaagttttgaaactcaacgattttcctttgtcacggttcatgcgatttcattgtccataatgcttgcttgttgaactgcacaatgcctatctttcatcttgattattttaagcttcatgaaaatcttttgccctaactcgcaaaaattccaaacttccagagttttgaaatattttcccgttttaacgttcgatatcccattttaacgttcgatatcccgacttaacattcatcttgtgtgttgtcttttgtagatgaacccaggtgagttttggggaagcaaacaccaaatcgataggatctgcttcaactcttgcacga

SEQ ID NO: 157792 - DNA, 658 bp, Cannabis sativa
aattaattcataaataattataaaataacataaattagtgctaattgcctttacatttatatgagattttttatgccatatttttgtaaaaaaaagagatgaaaatcccatatttttaaaataatgataagtttcgccgaaaagtcatcggtgccggaaagtcactggagctggaaaagtcaccaaaaaagttagtgtcaccggaaagccatcggtaaagtcaccgttgccggaaaagtcaccgtcgccagagaaagtcactggaaaagtcaccagaagtagatatctcggatataaataaaaataatcggtttaataacataatgaataacaataaataatacaaaataactcaaaccgattataattgaaatataatcgattctgtaacataatgaataaaaacaaataatacaaaataactcaaaccatttataattaaaatagaaccggttttataacaatgttataatgaataaaataaataatatgaaataactcaaactggttataactaaaatagaaccggttatataacataataaatgagatttttgggggtatatatggtatgtgtgtaattatttgatgggttggagcatgttgaataaatatttttgtttgagttattttatttaactggtttttgtgtgtgagt

SEQ ID NO: 157793 - DNA, 599 bp, Cannabis sativa
gttgtggtatttatttagttttcatattttgtgtatttaattttcacatttttgtattaattattttatatatagaagaaaagttatctagcttttctatttctaaaaaataaggtataaaatgtaagtttgatgactcatagctaaccagttgtatcaatctaattatgtgtgagtttcttaatatgtttgatcagatttcttgtagagaaagcaagacttttcttttttacaaaaagaaagttgcacttactgctcacgattctgtaggtacaaaaataaatttttttgggctgattgaagatctattttaaagaattgtctagtgagttgtggtcttgttcagaccgtgtgtgagctgacaaggtgtatattgattataaatacaccttataacagctaggtcatgtatctctttcatacactttgaattgtattcatatcttaagaaaatagtttttttattttgtagagaagagagtgtttgtctcttactctgtttatatgtattttgtattgtcttgagtcagcattcaagtctgcaatgttagataaattaacaattaacacaagatctatttgtatataacatagaacac

SEQ ID NO: 157794 - DNA, 755 bp, Cannabis sativa
gatagtagaaggcaaattgtatagaaagggctattcaatgcctcttctacagtgtgttcttcccgcagaagcaaacgagatcatcaaagaaatctatggagacttttgtggggaccatgaaggttggcaaagcttgtaaaaaaagattattagacagggatattactggccaaccataaacaaggacacacacgaatttgtcaagaagtgtgataaatgtcagagattcttgcatatacctcgcgtaccactaacaaaactgagaatgatgacctcgctttacccatttgcaatatgggggattgatttgattggtgcattacccacaaggcgaggaggagcaaagtacacagtggtggttgtcgacttctttgcaaaatggatggaggttgaacctctggtgtccataacatggaaaaacgtttttgactttgtagtcaaaaatataatttgtagttttggaatacccattaagatagtatcagataacgggactcagtttgatggtgaattattcactgagttctgcgaaaggaacaagattatcaaaagcttctcgtcagtattcaggcctcaaggaaatgggtgagtagaagctattaataagaccttgaaggatactatcaaaaaaaaagctagacgatgccaaaggtagatgggttgatgaactacctcaagtactttgggctcataggacaactaagaagacagcaatgggacatactccattatcgctagcatttggctcggaggca

SEQ ID NO: 157795 - DNA, 530 bp, Cannabis sativa
taatggatcagtaaagatccccgcttgaagggctgtaagttgcgtgctgtcatccagattcctaaccttagtcccagccgtgctaaaatgacttaagtacaccttaagtgtctcaccgggctgctgttttatattggttagcgagcctgcttcgagtcatctatccctagtagcctgaaactgtttcttgaaatccctgggcagctgatcccaagaatttattgaatgatgagtaaacttgtgaaaccatctgctcgctgctccaacaagcgagtggggaacaaaatacaacataaattgttcatcacattactcactcgtattattgtgttaaagttattcatatgcgagacaggatcagtagttccgtcatatgacgagacatgcaggtttttgaatccaaaaggaaaaggggtattcattatatcttgatgatacaactcgatttcctcgttagagttgtatctagattgtctccctaattcccccacttgatatctcctgaacttatcctccagctcgtttatccg

SEQ ID NO: 157796 - DNA, 757 bp, Cannabis sativa
gtgagatattctatcagtatatgtatcacattaattgtcagaatcttttgacaattaatttagaaatcaaatcgggtaatcaatattgaaatctgaccatatatagaatgtcacgcaattaatattgtccagatttaatgaatataaaatattcatttatctcaataataattcatttattctatttcataaatacaaatattctaatattctcccacttggttagtatttagactaaaacattcaaatccaatatttctcattatataataaacacatcctcattatcagtcgagtattatcttccatgtattacaatatatttactatataacaatatactttatgtgacaatgtacttaagcgaataaaccttaaaccttatgtttattcaggtgctctaaaattttctcaaatgtaaaattaagatacgcataattatgagaaaatatcaaaaataaaaatttcattaataataactttatttgtaataaattacataagggaaccaagttccatgttcactacatgatccttgaatttatgaggtggcaagccttttgtcataggatcggcaatcactaattcagtgctaatgtgttaaatggccattttattttctttaacacgatctctaatagctatatatgtacttaatatcgatgtgcttgcttcgacttccatttttgttgttcttagccatgaaaacaacagttgaattatcacagaacatttttaacggctttgctatggaatc

SEQ ID NO: 157797 - DNA, 613 bp, Cannabis sativa
tttttttttgaaaagaatacaaaatatatttttgtatttttcaatatttgtcaagtttaaaataattataagaaaagctctttaattatttattaatataaaaagtattttacttattttttatatgggtaattggtgaacttaatcttacccattataattttttttttaaagtgaatgcagaatataattttgcatttttcaatttttattaagtttaaaataattataaaaaactatttaattattttttcatataaaaaattattttcttataattctttattttaattttatttaaataattaaaattatattgatttattaatatatgatgtttattagaataataagacaccttaaatatatatatttttatatatacttctttgataagagactattatggatgttaaattttaaagttatatatatttaaatatgtgaatgatagatattatttatttacacatatttttgtatttttcaatttttgcaaaatatttaaataaaaaaagtcaattttcaacaaataaatcaatatgtatatctatatataaatataaaagaaaacactaaagaaaagaatagcacaagaagagtttatgtgtca

SEQ ID NO: 157798 - DNA, 809 bp, Cannabis sativa
  modified_base (50)..(52): a, c, t, g, unknown or other
aaatcaattaacttagtctgcaatctgtatcatctcaactagtgaggggnnnatgagcctatataaccgagctttcaataagcagatctagaattcaccaagtaaattctctaacttcttcattccgccttgtgctattatagatttggaattgaaatacactctaagttatatagaacactctatatgtaccccaatatagatacgttatgattatccatagttacaatcctaatagtcaaagatcctatattgatgatctaccctaaatagggacaaatttactgttctacctttcaatgtatattatccttaaaacacttagccacctataaataacacttcagtatactataataattactaaaatgaggtctcaatctttatctctattcagcaaagctcgaaggaaattatcgttttacttctaaatacttataaaagctataaattccatatctatgatcagcgctcccactcagttgaactaccatgttcccaagatgtaaatatcttccagaaccattggttagcatccacgaacaacttgaagaacataaataatttaaataagttgaacctaaccatatcaggattaagattcatagacctaagatcaaccaattcacttagaaagatataacggtaagtttatgatatcttatcgaagaccaatatcggtcccttcgaatgccttggaaagtgttgggttttgtgccctaaataaaccctttacaatctgattagttatcaatataagaaatttgaagtgagttatgtttgcatgaattttacaagctaatggttta

SEQ ID NO: 157799 - DNA, 637 bp, Cannabis sativa
gaacaaggtattacacctttgtccaaaagcttatttccccctatctctaagcactaagaaaaatcatcacttcattcatcttcatcttattattcttataataaattattagaggactgtagagggctgaaatgatcaaataaaactgatgcttcttccaatttgtattgttgatttgataactttattatctgttgttcttactaatttaagatcataattataaacctcaaattattatatatatatatttatatttcctagaattttgtttttccctttcatttattcttttgcaatttaccaagtaaccctaatatgataataataagcaccattttgtcttaatttttttgtttatgttttgattgaacattgtatattctaatttcctgcatattttctaattttcagcattaaaatagatatggatgttgatatagatcacgatactattcttggcctaccaactggtgaggatggtgctaataagcttacagatattaaaggtgtatacgtgtaacgagataaattacctgataagttttgtattagtcattgttctgatataaaactttcattacttgcactacattattaattttaatcaaaatggactctgcattatgttatcttg

SEQ ID NO: 157800 - DNA, 762 bp, Cannabis sativa
taaaacgtaccattttggtatacaacaatagaaaaaaaaatgtttttgaaaattgaaaacaacatttttatattttctgttttctagatttttaaagctcaattttaaaaaactgtttttaaaaatttttgtcaaacgacccttattagtttttaaaaaaatgttttcagttttaaaaaatagaaaacaatttttaagctatgaagtcaaacagcctcttagtttgtttgtgtggtttggttttccattaaaataggaaaaatatgaagaaaaatttataaaatgacacataaactcttcttgtgctttccttttctttagtgttttttcttttatatttatatatgatatacatattgatttatttgttcaaaattgattttcttttaatttttaaatattttgcaaatattagaaaatgtaaaaatatgggtaaataaatgttgaccgaggttttcggcaaccgatttaaaaatatatctgagaaatctgtaggaagtttaatgcatgagatttttacgtggttggtgcattaatgagccttagtccacgagtctttttttatttatgagagtatttattacagagaatgtttttggtagtttttctctctttgattcttataaacccagaattctcgacccctgtcttaatgtgtttgggggatatttatagtgtgtttctgggatgatccctagaatcatacttctagactttttgtgtatttttagtaggggcacactgttggaatttattttacca

SEQ ID NO: 157801 - DNA, 649 bp, Cannabis sativa
catgtggccatggtagccataaggggtcgaatcatagtggaggaagagactgcccagcctcctgtcgacgctgagcaaggtggactcagagactaggagctcttatgtagaatcaaagttggaggaggctactccagtgagggggaggaaatgtaggacatgttctatcctccctaaccgtcccttgggccattatgacgcctgaggcaatccgctaaatggtcttgtcgcgccttcagtaataggactagatcatgtcctagaacagtctcctgtgccggagatattggattcgaagccacctaagacgaggtgggtttctccagcttccgttctttctagtgaggcttttgacaaggtcattactagtggccttgttgggggtgttcgttgtgagaattcttgtaagaactgtaggacgcacagtccccctacgggctagctagcatggtcagagcgccatatagagcatggggcggtgttgccgcttcatcattacttcttagacgttacagcctatttcaggatgtgcccaacacaactcatgccgaagagcacttaatatccttcggcgatgttcgttttgtacagggagcttggttggccttcgcctaccccttatgagattgggtacttttttgagttgaag

SEQ ID NO: 157802 - DNA, 688 bp, Cannabis sativa
  modified_base (224)..(238): a, c, t, g, unknown or other
taattacacccataccatatataccccaaaaatactcattcattatgttatataatcggttttattttagtaataatcgttttgagttattttgtattatttatttttattcattataacactgttatagcaccggttctattttaattataatttgtttcagttattttgtgttatttatttttattcattatgttatagaaccggttatatttcaattatannnnnnnnnnnnnnntttgtattatttatttttattcattatgttatgaaaccggttatttttgtttatatctgagacatctacattttcataacttttttagtgacttttccggtgactttctccagtgacggtgacttttgttgtgacttttccggcgacaatgactttttcggtgacactaacttttccaacaactttttcagtaacttttccggagaaattattattgttttaaaaatataagatttctggcataaaaaagttctatataaaaattaaaaaaaatcataacctcacggtattatttatttatattgtgtaatttctacaaagaaaaaagggaaaattacatgttgacacatttttttccatttcattccaataataatgttagtttttaaatttttgaatataccgttagttataccgttttttcattttaaaccatgtctttatttttgg

SEQ ID NO: 157803 - DNA, 544 bp, Cannabis sativa
agatctaatgtaatttatgaagttgttttcatgtctatttaacttgcatattatagtaagttgttatgcagttatttatttgttgttatttagttattgaaccaaataaaaattaatatatacacatgtttattttattttatacattagtgatgttttttacttttttagagttatttttatgcttatgtaatttgcatattgtagtggagtttatgcagttattttttttgttattatttagttgtttaactaagagaaataaatttatatatatatatatttttatttgagtgttgtttttatttttttttaagttggcgtaagtgttgatgctcaattaatttttatattaaaataaaattgttatcgtgttgtttatttgttgttattaagttatttcagtattgtattttttgaaatttttgtcttataaatttattttttttttgcataatatgataaactttaattgatttatatgctatggttgagttgttttctagttgtttttgtgttgttgtttagttgttttgcactgaga

SEQ ID NO: 157804 - DNA, 587 bp, Cannabis sativa
  modified_base (370)..(379): a, c, t, g, unknown or other
  modified_base (515)..(529): a, c, t, g, unknown or other
acccaacaaagtgctctagaggaatagtagggtggaggaaaccaactgggaactagagtccagcatgaggattcaatatctagagttattcaggttagattttgagaacgaaatccttttaatggggggataattgtaatgaccgcatgattagattatgaattagtaaaggcaattagcattaattatcgatatttgatgattatgcataagtttatatttattgtgggtcccatttttgaaaaataggcattagagttgtaatttttcaattctggagattttattaaactctagggtggtgtttggttggaggtaatgaaatggaatgtaatggaaaggaaataatttttattccattcctttgttnnnnnnnnnnttaaagtattggaatatcattccaatggaatggcctttccaccaaatttggtagaatgactattccattttgaaatggaaggaaagacctttcaaatgcaagtcttaaaaaaatttaataatttttttttatcaannnnnnnnnnnnnnntaaattttattctattccattccttttccaattctcattcctattcttattcatatat

SEQ ID NO: 157805 - DNA, 660 bp, Cannabis sativa
attttatataaaaataaaatatatttttcatcttattttttaatttttgtgagaatttcatattatttttcacatgatttctatatctatataataatataaagtaaagtacacaaaagtgtaggtgctttctataaatttttcctttatattttctaactttttgagaaaactatgttaatgtactaagaaaatataattattcaatttacattttgtaataatctcatattatttagaaagtatagtgggacattacatatacattataaataaatattttctcatgccatttaatttgtcccaaaacatgtatttgaacttacaatgtattttctttttgagtgtaagtgtagtatcactaacctatgtctatgactacttttaaatgataatttagactttatgttttgcaacatgaaatataacaatatcatgagtccaatattactgaaaataattatagttaagatggattcagatcataattgttaatgaaggttaggaagagaaagtattaaggttagtaaaatttttttgattataattagacttagtatatcgttatatatttttcttttttgacgcggtgatccaaatcacacatgattaacaaagcagcaatccacaatcggcggcggcacctcctcgaaccaggat

SEQ ID NO: 157806 - DNA, 652 bp, Cannabis sativa
gtcctgtaaatctagggcataacttgcctcttgtcccgaattaattgatccccttcataggagacacctgtaggaacacatgatcccctacttgaaactctacattgctgcgtttcagatctgcataactcttttgcctactctgagaggcaaggattcttgttttaatcttttcaatagcttcattaattcgttgaacagattccagacctaagtacttactttcccccgtctcatcccaatgaatgagagatctacattttctgtcatacaacagttcatagggagccatccctatcgtactctgataattgttattgtacgagaactctatcaatggtaggtacttactccaggagccctcaaaatccataacacaggctcataacatatcttccagtatctgattcgtccttttggactgtccatccgtccaaggatgaaaagctatactgaactttggtttggtacccatagcccgttgcaaactctgccaaaatttgaagtaaacttcagatctctatctgaagtaatggagtttggcacaccatgcagcgttactatctctttaacataaaaatctgcatactgatccagtgaaaaggttgtcttaactggtagaaaatgagcagatttcgtgaattgatccacc

SEQ ID NO: 157807 - DNA, 618 bp, Cannabis sativa
tgatgatgtgttattgaaaacatccgttgcattatttgaagattcgatgaactcgaaattatgtagtcatatggacccttctacggaagatagtgaatttttgaaattggtagaagatattgtaggatttagcagtagtgatcattatgtttcgattatacctaatgtgaaagatgaaaaaatattggtaaataaggtagttgaaaatagtttgaatgttagttgtggtaaaaagtattgcattggtgatgacaatgttcagtttgaagacagtgggaagaataaagaagtgtcatttgaaaaggaatcaccaataatggatgaatggaattgtttcgcgacgaatgatggagactatatggaaggggggttgttcaaatctaaggtgttagtatcaacaaaagataaggagtcaatatcaaataaatgtaactaaagttgcgtagaatcctcaaagaggaaccatagctcaattccagacccgagatttgcgtgaggatatggatgctctgatccatatattaaggaagagaaatagttagtagctattcatggtggttctggatttgatttaaacttatatgatattactcagtttgagttgtctgcattggtaag

SEQ ID NO: 157808 - DNA, 547 bp, Cannabis sativa
tctgtctttcaccttgcttattcaaagcttcgtgaaatttttgccctaactctagaaaatttcaaacttctgagttttgatttatcgtcgactatttctattcgttaatctgttgagtactcctagtcgcaatatttgcctatttattgttcgatatcccgacgaaacactcatcttgcatgttgacttttgtagatgaaacctggtgagttttggggaagcacacactgaattgatcaggatttgcttcaacccttgtaagaggatcaccatcatctttgttttagtccgccttcttcaagcaatggacatttcaatttaatcttcccgtatagccacaggatgatggctcgcactaaatagacaatgcgtcaagtcaacgcgtctgaccatcacgtggcccagcacgccaccttacccagagtcgaacaagatctgctcatttaggaggagggggatcacgaaggggatgctcaagtctaggagatagaggaacagcccagtgtccatcctggtagtcctttcgaggcggaggaagaggaggagg

SEQ ID NO: 157809 - DNA, 590 bp, Cannabis sativa
tggggaattgacttaattggggcactaaccactgggtaaagaggagctaagtatgtggtaatagtggtcgatttcttaacaaaatggatggaggccgaacctctcatttccataacttccaagaaagtcctcgactttgtagtcaagaacattgactgtaggtttggaattccaatgaggatagtatccgataatggaaccaaattcgacggcaacttgttcattaagttctgcaagaggaacaaaattatcaagagcttctcgttagtatcaaagcctcaggggaatgtacaagtggaagctgttaataaaaccctaaaggatactatctcgaagaaattagacgctgccaaatgaaggtgggtcgatgagctacctcgatactctgggctcacagaaccaccgagaagacggcaacgggacacaatcctttctcgctagcatttggctcagaagtaatgctgcctgttgaagtaaacatataaccacatagaagagagttttataatcaagaagaaaaccaggaacttctaaaattgtccttggatctacttgatgaaaaacgagctgagtcgcaaatcaccaacgca

SEQ ID NO: 157810 - DNA, 676 bp, Cannabis sativa
  modified_base (611)..(616): a, c, t, g, unknown or other
tgcgtgcacttgcgtagtatttaataattttcgcaacattagtactagggcaagaacctaaaacatttgggttagtagcaatgcatggatattttcatcgaacattacatctctactattaatagttttaaaacccttttctcttacccaaaggctgtacccttttgttccttctggatatcccaaaaatacacactttagaactctaggctctatcttttcatcaccttcgtgtgcatgtgctgcacacccaaaaacttttaagtgggataaatctggtggtttgccataccatctctcttcaggggtctttaactccacatcacttgatggacttcagtttatcaaataagttgctgtgagaactgcctccccacaaaatccagtagctaaccctgcttggaatagcatgcacttggctttatttaaaatagtactattcatcctctcagctactctgttttgttgtgggtttaatcttacagtcctatgcctttgaatgccattattcctgcaatacatgttaaacatatcgttgcagaactctagaccgttattggtcctaagagtcttaagtcttttgttagttaaatttgttgggttttatgccnnnnnnaaaactctatttcaatgtaatccagattattcaatataaataaagtaacagaagtatttt

SEQ ID NO: 157811 - DNA, 592 bp, Cannabis sativa
attattgtgggtgatatacttttaaattaaatatatcaatattcttttattttagtttgtcacaaagttagtataatttattttgggtgattgatgaacttaatcttatacaagtagttatgatttttttttaaaaaaaattgaattcaaagttagtataataaggcttctctttttcaaaaattttattattcaatataactaactttaagacaatttctaacacgaacacgaacagatacagaaaatgtaactatttttgtcataatatcactagattagattattgttaagttttattttgacaaaaaaatcagtttagggtcttatttgtataattttagaaaatacaaggtccattttgtcatttaacaaaacatatagtccaattagtaatttttgcaaaatacaggatccaaaatgatatttatccatatatatatataaagaaaagtactaaagaaaatgaggtcacatcctataatattttaatccattttaaaagaaatttagtaaatttaattcattttacatatttgtagatgttgagatatatgacttagtaagttttttttattatgtgtaaaaatcc

SEQ ID NO: 157812 - DNA, 563 bp, Cannabis sativa
  modified_base (381)..(383): a, c, t, g, unknown or other
aaaaaaaattattgaaaattgagcttacggtcctatttttactattttagaatatatataaggtttattttgtcatttaacaaaataaaggatttgattgataacttttgcaaaacatatgacccaaaatgatatttacccatttagatcacaatacaacatgatgcaaaatttattaaacgattataactcattcatttgcaacatttaatatatataaaaaaaaaatatgtacattacataaattaagcaaagaaaataaaaaattttacatcaaaaatacaaaatagtttttttattacatatatactcccacgcggcagtagttacatttgtacactttaagttttttttatttacaattttactacttacacacannntacacataatgtcactctttaaatgaaactgaggtgtctacacatgtcagctgattgacacctatcaatctatgttttccctatctttttttccttctttttttcattatcttttcagtttttttttaaaaaaaaaaataaaaaattctccataactgatcttctttcctaaccacaatc

SEQ ID NO: 157813 - DNA, 543 bp, Cannabis sativa
gaatcaatccactatgtgttaagattaacattagccatattagattcataacatactaagaaaattggaatacctttgtcgtccacccatttcttgaaatggctgcactccttttttgtatgtcccttttgtttacaaaagaaacatttggtggaatctttctttatggcagcctggggagccatgggctttttccccttgttcttcttgaatggtttgcgtttcttgggttgagtggttaggtgagaactttctcctgatcctataagagcctagcttcctcttgagcacacatggtcataaattttcattgatgctccatttatccttatgtgtgttgtaggaaattttgaaaggcccatattgtggaggaagattgtgaagattgtggtcaagaatgataacatcgagcttcttcaaatgagcagtgatatccctcatctttgagataagttctcaaactcctttaacaccggtgagttttgtggatgagaactcttggataaggttatatttatctgatgtgtcaaactgctcatccat

SEQ ID NO: 157814 - DNA, 522 bp, Cannabis sativa
aaataccatctatttatagctacaggaacaagcacaagtttcacagttacaagcttagtagcaggttcaaaagtatctgtgtaatccaccccttcttgttgattgtaacccttagccacgagtcttcctttgaacctctcaatagacccatcagcattattgattttgtaaacccatcgacaaccaatagcatgatgttctgcaggtagggaaacaatgatccaagtgtgatttttctcaagagcatcaatctcacaatccatggcattatcccaaactggtatgcctctggcttgactaaaaaattcagtttcataataactagaaatggccaaaacaattgctcgaaaagtggaagacaacctgctataattcagaacttgagaaatagaataaggtgtgacctttggggattcctacaatatcttggcagggttagtttgctctaaaaaacagtgataatcttgcaaatatgagggcttatgtgatgttctaatgagtctgctactgtgcagattattc

SEQ ID NO: 157815 - DNA, 596 bp, Cannabis sativa
catcccatatgttcaaaaagagaactgaaattgacatactcaagggctttgagatcacattgcttaccatttagaatatctctttgtgagaagtcctcattgaatcttcttgcatacttttcatgggagaagaggtcattccttgctttggacctttgttccctttgttgcattgagaatctttgcctttttggtcttgaagatgaagcatccatggaggtagagggttaaagagaatgggaaagttaggtctggagagagaaaaattgagagaagagggttggaggcttctatttagggttaaaaaatctgagtggggaatagaaactctgtggtaggatttttatagggaaaaattcgagtttgaaaggactaaaaagaccttggaatcgccacttgctgcgaaccggttaactggttcgtcaggtatgcagaaccggttaaccggttcctgcagcaggcagattccccaaaaatggctttaaaatgcgccattaggtgcatatgggtgattacaattaaatttaatccagatggaacaattgcttgcataaagaccagtcttgttgccaagggttatgctcaaacctatggag

SEQ ID NO: 157816 - DNA, 575 bp, Cannabis sativa
tattcaacataagcgccaccgcgcatactctatgtgcaaactactgtcttacttgttgtcccgcaataacatagattccgaacctctgggtgctcgcgatcaagttccggtaatcctagtcacactatctgggatttcacaaatcgggttaatccctaatttcactttcacataatataaacatggtattcaaagcacagataatcaagtagagctcggaccgagctttccaacaatataaagaatgtcccaaacggagtcccgagcaaaagttatggccaaaacaaaatcgggaaaaacatattttctcactgccaaacccagtcgcgacgaccaaaaatcccgtcgcgactattgggtttagaacacccaaaaactccatttttaaggccaaaacatgccaacttttcctagatttgaaccccaacaaaacatagggtaaaaccacaaaattcatgcatcaaatccaaccgtgaaacacactgaaattcagattacaaatccatgaacatcatgcttcattcaagaacataaatcaacacaacttcatccttgcaacattaaatccctaggca

SEQ ID NO: 157817 - DNA, 721 bp, Cannabis sativa
  modified_base (439)..(443): a, c, t, g, unknown or other
tagaattcatattaggatattaatgaaacatacttggtagtaaatcttgatcctggtaaactattttcaacacatttgtcatatccttttatgagtgttctaatatgttttcccccatgccgcattaaatgtgaaatgactgttcgaacaggttctccttctcccgaagatgctttgttgtatctctagctcccggagagtagagacatggtttatgctcctttctgggggctcactccctgaagtgcatttgcttgtctattatataacttagttaattttgtgggtgaggtgtccttgaaatccatgtgccacacgcaaccgttgccacgtattttgggaaaaatccaaggcaacatggatattaagacaatggattgattgaaatgtacttctagttttatgttagtgcaagtgagagtttgttgggattttatgnnnnnaataaaacccatttcaatataaccttatttgcattcaataaaagactagaaatcatttaagttttcatattattttcatggttatggtttgatatacagtttctaataaattcagaacatattgtcattcaaaattatagtgatgtcatcaaaatggaaagtaattgtgatttaatgcttcaaagtttagtcccatgatttatcagtacactgaatttacactgacgtgataatcaacaataaagtttacttacacttagataagtggtatgtccttt

SEQ ID NO: 157818 - DNA, 755 bp, Cannabis sativa
  modified_base (27)..(30): a, c, t, g, unknown or other
  modified_base (564)..(564): a, c, t, g, unknown or other
aaaatagattacattgaaatggagttnnnnttagggcataaaacctaacacacgtcactcgcagcatgctcggtgacagctaagtctatcccgagctcttctccatccaaaggtttcgagagtacgggaggctttgcaagttgcgtttgtagctcctgaaaagctttttcacattcttgtgtccactcgaattgcttatttcctcccaggatgttgaaaaatggaacacacttgtctgttgattttgaaacaaatcttttgagtggggctatccaaccagtcaaactttgtacttccttggttcttgttggcgacttcatatccaagagggcttgaatcttctctggattggcttcaattcctcgtgcattgacaataaaacccaaaaaatttcccgagctgactccaaaggagcactttaagggatttagtttcatgttgtacttcctcaggactttgaagaattcgtcctggtcatctatgtgccccccagcattcctggatttgacgagcatgtcatccacatatacttccatgtttcgtccaatctggtctttaaacatnttgtttaccaatctttggtatgtggctcaagcatttttgagaccaaatgggatgactttgtagaaatatggacccatatatgttcgaaaaattgtatgttctttgtctagtggatgcattttgatttgattgtaccccgaataagtgtccatgaagcttaatatttcatgcccagctgttgcgtccacaag

SEQ ID NO: 157819 - DNA, 657 bp, Cannabis sativa
aacaataggacctagctcatgaccgccgtgaactatggagtaagaaaccgagcaaacaaactgcatgatcaaattcacccatctcccatcgaagcccatacgcagaagaacagctcgcagatacccccactcaagtctatcgtaagctttactcatatccaatttaagagccatgaagccattcttaccctttgtctttcgtttaagataatgcataatctcaaacgaaacaaggatgttgtctgagatcaatcttccaggaaggaatgcactttgagtatccgagatgacaatagggagaaccactttaagacgattagccaaaaccttcgaaaccaccttgtaaataacattacacaacgagataggacggaggtcacccatggcagttggttgtttcttcttagggatgaaaacaatattagtgtgattgtgacccgttggaagagaacccgtaagaaagaaatcttgcactaatcgaacaatatcaatcttaacagcattccaacatttttgaaagaaacctagagtcatcccataaggaccgggagacttatgggggtgcatttggaagagagcagacttcacttcctcctctgaaactagccgaagcaactcaatgttctgaagagtagtaatactaggttgtatgcagct

SEQ ID NO: 157820 - DNA, 519 bp, Cannabis sativa
  modified_base (46)..(46): a, c, t, g, unknown or other
tggaggagaatgtcgaatctcctccacaggagccatgagaggcatngcttggaactatagagggttggggcaaacctctgcagttctggaactgaagtccctaatcacatcgcgctctccggattttgtttttctgtccaagctaaaagtggatgctaagcctctggtacgtactcttaagaccctccacttttactttaatatttgtgtgtcgccgactggttctgctggtgatattattttggcttggaagtctggttttagttttgaatgtttatcttgctcgcgcaatcatatctctggtttagtgtattcggatcccccttcccacccgtggttactcttttgtgtttatggccctccctatttgcatgcaaagaaaaatttttggactgaatttttgaaattgggagatagatttggcagtccttggcttattttgggagattttaattttgttctctgtgattctgaaagagaagggtcctcgggtagggacccctttatcccgataatctc

SEQ ID NO: 157821 - DNA, 500 bp, Cannabis sativa
gaccctagaccttgacttgaacctaggacccaactcgtgacacgacaccaaaaatggaatcaggtcgggacccgagatcgggatatagatctggaaccggggcttggaccgaacccgtagttggtgtccagatctgggaccagcctcggacccaaacccagacgcggaccgaaacccagcaccatacaaaaacctggacacaaacacgtaccctgtgacctaaaattggaaccgaaactggaagtagaccaggacctgggaacgggactagaacgaggacttggatttggacttggaaccgtaaccagacctggagcatgacccggaaccgtagtcggaccatgaccaagactccaacctagacgtagactcgaactgggaaccagccccggctcctcacccagacctggactcagcacccaaacctggacctgaactctgacccaaacattgaaccaaactcgggacacaaaacttgggtcgggacctagaaccgcacc

SEQ ID NO: 157822 - DNA, 712 bp, Cannabis sativa
acgaatgtagggttatctcgtgggaggacaaacttggtctgcaaaaagttacacattaataaattaattacaatttaataagaatttagtaatttaaaaattaagaaatttataacaaaataccttaagtctgtcccacagtgcattgatttcagctctactaacatcttcccatttgaatttattcatggggatagacatgcgaaccatccatttacacatattgttgaatttttttccgtttttgccgacgggggtgcccgtctctgcatgcaactcaatatgtaacttggcagatggtgttttggagagctcttcctcaacatttttgcctttctttttcgaactgttgccacttggtgtagacatactacatatacaacacatattttttatttaaaataaacaaccatattcaaaacatattaaacaagatcggttttaatttttattcctattaaaatactattacaattacaattcatcatcctcatcatcagttacatatacaacattatcatcactatcactctctaattctaaggagttgtcttcttcggtatttagacccttgttatcatcatcgacaataaaatcatctaattgttgaggctgtgaattcacacgatggatgtttgaagttgaacatagtcaacatcatccaactgtggaagttgaataacgaactcggtttcagctgaattgttttcct

SEQ ID NO: 157823 - DNA, 571 bp, Cannabis sativa
gccatggatgagtactcccgggggcatgctgaagtggaggccttgaggaggattttacgaactgagatgcaaaattcccttaatgataagaattaccagaacccgtgggatctaaacctggaccccctgagggactagttcaatcgtttcctcgggcctaccttgggtccttttgccgcagagatgaccggtgagttcgtctcccagctaacccggtgcgcgcctaaacggttcgctgtttgtgcatccttgaactctgtctttgaagttcaggatctcagccattccctgactgtggtaagtgttccgtggtttaccaattttctcattatttttcttaaggcctttactcactcttgcctctttttcagcttgctgcagaggccggccgcctttccaggaacctggtcaatcacggctttgtcttgtccgaatttggggacatagacgaagtcgtgaagaccctgcaggacatgtctgctaaaaggcgagcattccaagaggaggctgcgcggcgggaggcccttgctaaggccaagtttgaggaagaggctaagcaaagggaagccca

SEQ ID NO: 157824 - DNA, 754 bp, Cannabis sativa
  modified_base (326)..(328): a, c, t, g, unknown or other
gatcccggtctgtgttcgagtttgggtcttggtgcaggactaggtttgggtcttattctgggtctgggtcttagtttgggtccagcatttaggtctgggttttggttttgtcttggtatgggttcgtgtctaggttcctgtcctggtgtgggtcctgtgcaggtttcgcgtacagggttgggtccgacttcagatttcgggtctaggttaggtcctggttatggttcgattcccggatttacatctgggtctgggttctaggacctaggtcctggtctaggtcccccatccaagtcaagttcgtaggtcctagtctgggcctaggnnngggttcggttattgagtcttggttttagtccagatcccagtctgggttcctgtctaggtctcgatcctagtcttggttcgggttcaggtttgggtccttatgagggtctggatcctggtctgggtcgcgggtctaaggtctcagtgcgggtttaggaccacatcatgtcaaggtcacgattcgggtgctagtctaggttcgtgtcccaagtctcaagtcccagtcgtagtcaaggtctcggccaaggttctggtatgagtttgggttatggtttcggttcggttttggtctcaggaatgggtcctagtcacagttcccgttctaattccgggttttggtttggttctaggtccgggtctgggtccaggttgcggttggggtccgagtcttagtctgagtctcggtatgggtttttcgaatcccgat

SEQ ID NO: 157825 - DNA, 511 bp, Cannabis sativa
  modified_base (86)..(89): a, c, t, g, unknown or other
ttcaaactttgaatggattttccgctcacctccagtttccgtttgacaagacgttttcaccactaaactcagctcgtcgaggagannnncctacactaaaccatttttcccagttccctaattttttcgatgacatttttgtagctctgcccctttccgatgactttccagtgacatcgtgtaccgttttgacaaacagttggcatgggtgtgatttactcgttgaggtggtcattttgatatacactacccctattttcggtgacgtttccggtacaccaatttttaccgccatcgattgttaatgtgcaccgcttaggtgaggtttcagaaccccaaattttaaatgtagtcatattatatgtcgttggactcgatttttaatgtagaatgcgatgatgataattatttaaccatttgatggtatatgtgagagtaatatgtaggattggactaaaacaactggagctagtgacttaagagcttaagattgtcttttggaaaaagttta

SEQ ID NO: 157826 - DNA, 671 bp, Cannabis sativa
gggtgatgctaacccgccacaggtgcccaagttgcccaagagtgggaaaaccggtttgcagaaatgcaagccagaattaatgaacaagacgaagagatctagcgcttgagacagtgggctgctcctgcaatccctgctccataaataccagtagctcctgcccctgctgtgcaggccgaaccggtagttgcagtgaactggatggaacccttgtatgagaggttccgtaagcaggcacctccagttttcttgggaggtcctgatgtcatgaaagccaagcaatggctaactgtgatcactagaatcttgaattttatgggtgttaccggtaatgatagggtggcttgtgccactttccaatttcaagaagatgctctggtttggtggaacatggtgtccatgaatcacgatgttacgacaatgacctaggaaaatttccaggaactgttcaatgccaagtattacaacggggcagtcggaatttctaaaagaaaagaattcactcagctgactcagaaagaaaacatgagtgttactgaatacaggactcaatttgatcgcttagcaaggttggcttcaggaatcgtgctaaccgattttagcaagaaagaaaaatacctggacgggttgaatgtgaagatcagacacgacttaatgatcactactgatga

SEQ ID NO: 157827 - DNA, 661 bp, Cannabis sativa
tacgatggcaagaagaaagatggtaatggtgggaataaccagaaaggatcacaaccgaatgctaagaaaggtgtggggtgtttcatctgcaatggtcctcacatggcgaggagggagaagttaaatgtcctgatcgcacaagacggaagaagcggcagcgagcaagaaacaacttctaggatgaatcctttacaacttctaaatgcaatcactacggagaagtcgagtttgttcaaaggcttgatgtatgtgaaagcattatgggagagaagtcacagccatggttgactcgggggcaacaaataattttgcggcacagaaggaagcaaccagactttgtttggaagtgattgggagttcaacttggttgaaggcagtgaactcagaggcaaaaccgattcaagggtctgctacggtaatgttgaaggttggggtgtgggagtctcaatccaaactcatggtggtcccgttggatgattttgacatgattcttggtgtggaatctttgagtgcagccaaggcgatggttgcaccccatttgagagggattatgatttgtgtggaggagtgcccatgctttgttaaagaaatctcctcaaatcagaataaagagaagggcgttgtgctggaatcagcgacccaatttggaaactctattaag

SEQ ID NO: 157828 - DNA, 681 bp, Cannabis sativa
tatgtggatgaggcttcaaatgagaatgccttgggagcaggagtgataatgatgtcgcctgataacttcaaattccactatgaattaagattccaatttgatacttcaaacaacggagcggaatatgaagctttgttggctggcttgagaatagtcgaagccttaaaagttaagaatcttatatgttatagtgactcgcaattgattgtcaatcgagatctaggtgaatacaaggcgaaaggattaaagatggcaaaatatttagagaaggttcggaagaacttggaaaagtttgattactttaagattgaacaaattcaaagacaacataactcaaatgttgatgctctggcaaaattggcctcgcaaaatgaactcgataagttaaatcaggtactggtcaaaattttgagcgacccaagtatatgtgaaaaggaagaagttgagatgatagacgcctcaccaacatggatgacacccatagtcaaatatctacttaacaaagaacttcctacagacaaaatcaaggcatgaaaactcttgtattcaatacctcgctatacaatagtcaaaggaaaattatacaggagaggatattcaatgcctctcttacgatgtgtgttaccaacagaagctactaaaataatcaaagaaatccatgagggcttttgtagagatcat

SEQ ID NO: 157829 - DNA, 757 bp, Cannabis sativa
  modified_base (447)..(452): a, c, t, g, unknown or other
gggatcgaagttagatttttctcaaggttttcctcggaagggtaccgtatagggcttggttccctggtcttgggcttctaagtgcttggtgaagattctttttgcatggcgaccattatctcttgcatcctctgttctttttgggcggcaagttcagcttcatgatcaactgccttttgcctcaggaccagcagttcattatagctaacttcgtcgtatgtgtcgtacccttcgaagttttcttcatattcctcatcgttcacctcatctcgttcctcagagcccacatttactcgtgaggtcacttctacgccttctgggatttgagcatcctgaggaggacgaggctgacgtgtgttgtttcgagtttccaccattgttattttgattctttgactgttgtctccttaacgacgcttttgacagttctcaatgaaagcaccaaannnnnnaccgaggtttttggcaaccaattaaatgatataatgagaagagctttggaataattaatgcaggtagttttaacattgttcgggcattaatgagtcgtagtccacgagtctttgttattgatgagagttcttatacaaataatgttcttggtgaattctctctctctcttctttactcttttccattgatcccctttttcattttgttcaggggtatttatagagttttgtaaggatcactaaaaagggatgacttgtctttgagtgccagccatctaggtgcacaagttcctaagagatataaa

SEQ ID NO: 157830 - DNA, 1142 bp, Cannabis sativa
  modified_base (1104)..(1114): a, c, t, g, unknown or other
gggctaacactggagctgtgattaacctctgtttcagctcctgaaaacttgtttcacacttatccgtccatacaaaaccctgattctttttggtgacctcggttaagggtgttgaaattttagagagcccttctacaaaccgacgataataaccagcgagacccaagaagcttctaacttctgtcactatttttggtctcagccaatctctgacggattctatctttcccagatccaccttgatcccatctttgctaacaatgtgcccaaggaaggacacctaagatagcaaaaaatttcacttcttgaatttggtatataacttgtgctctcgaagtcattgtagaaccatccgaagatgttgttcatgctccctcttctgattgtgagtacacaaggatgtcgtcgataaatacaataacacaaatatcgaggaaatccttaaataccctattcatcagatccatgaaagctgcgggagcattggtcagtccaaaagcacaaccaaaaattcataatgtccatacctagtgcggaaagctatctttagaatgtcttcctctcagattctcaactaatgatagcccgatcagagatccatctttgaaaagactgttttccccctgaggttgaattctcaattctttaagttctgctggagccattctaaaaggggccttagaaactagttctgctccagatgccaaatcattaacaaaatcaattttcctatgcagtggtaaacccagaagttcttcaggaaaaacatctaagaattcccgaaccaccttgatgtcctttagccgaacagacacaggccgagtggtatccaatgccacggtcaaaaactatagacattgatctcataataattccttagctattaatactgaaattactgagatctgagatccccgaagcaatccgacaaagacaaacggttcctcaccttctagttggaggattaccatcttcctcttacaatcaatactggctgagtacttggataagaaatccattccaagtataatatcaaattctgctaaattcatctctattaagtcatcactcaattctctatcctctattctgatcggcatagannnnnnnnnnnttttggagataactaactctccgccagg

SEQ ID NO: 157831 - DNA, 711 bp, Cannabis sativa
aattaatttcataaataattataaaaatatcagaaattagtgctaattgcctttactgatccaaattactaaagcggtcattacagatttcaacccaaagcacccgaacatcttcatctggactaaacttagacaccaaatagtgagtaagttttcaatcttcttctctttttactttgcatgtttaatttcttggtttgatacatgcgttttcgacttgttgtagaagatacatggaaaatttaggtttaaaactttatgattttctctgtaataatttgtataccttcatagtttaccacgtttgcctttgatcgcacattgttcgtccttcaccttactcattcgaagcttcgtgacatataaccctaaacccaaaaatttcaaaattttgggttttggcttatttctgaacattcttcattcttttaatctattgagtactcctggtcggcatgtttgcctatttactgttcaatatcccggccaaatactcatctcgtgtgttttcttttatatatgaaccctggtcagttttggggaagcgaacaccgaattgaccagaacttgcttcaacttctgtacgaggatcaccctcgtcttcgtgtcggtccgtcctcttcaagtgtcggactttccaattcgagctttgaagattgggaggtgagtagtgattgttctcctactccagaacccatagtgcaacaccat

SEQ ID NO: 157832 - DNA, 586 bp, Cannabis sativa
  modified_base (559)..(560): a, c, t, g, unknown or other
caaccctagagatagccacaaaaaataattttccagttgtacaaaacattcttaaaaaatttcctaatttgcaacatcagaatcgggctctgcagtagcaaattaaaagcagaaggaaaactttccaaaatggaccaagatcacgaatttggacttcaaacttgccaaataaaatttatttgatctgctctaatcaaggaaaaaccgaaatcatcaattagaaaaagagaaagtcaagtttctcaaagttagacaactttccattaagagaattctttctcttccaagaaatttcctaaaccaaaagagactagctaagaaggaatctttctgtaaaagaaatggagcaattagagtacgaatttgtcataataaaatcaatttaattgctcaataaaaatacattaattaaaaaatattttgtcaattaattggtcaaaaaggacttaacaatatttataaatattaaattactaaaattatcttattaagaattacaccaaaaatctaaaatgataaatttattacataaatacctattgtaaagcccgcttagttnntttggaaattagcagttatttatgtt

SEQ ID NO: 157833 - DNA, 776 bp, Cannabis sativa
tcctacttggctagaatatagcattagtaaaattctgcgttttgtctatattgctatatttttaaaccaaacaatggaaaacaaggtggcggtcaaacatttgttagtaaagatttttcaaattggaaggatagaaaaatatttattgttcatgtaggagatcacaatagtgatcattatcaaagttataagaagtgtgaagatttgatgaatgaaaaataacaaattcaacatatatttttgaagaagaataacaatgatcgaaatagctactatgttcgatatactgcatcggttgacagtattcgatttcttctacgacaacgtcttgcattttgtggtcatgatgagtctcgaaattctactaatcaaggtaactttcttgaacttttaacttttttggctgatcataataaagaaattagagttgttgctttgaagaatgctcctgaaaatcttaaattgacttcaccaaagattcaaaaggatattgtaaatgcatgtgctgttgaaacaatcaatgttattattgaagacattggagatgctatattttctgtgttagttgatgaatcccgtgatgtagctataaaagagcaaatggtcgtaatgtgtcgttatgtggacaagaaatggtatgtaattgaaagattcattgggattgaacatgttccaaatactacatctatctcactaaaaatagcaattgataagctatattcaaagcatgggttgagcatatctagattacgtggtcaagggtatgatggagctag

SEQ ID NO: 157834 - DNA, 502 bp, Cannabis sativa
  modified_base (309)..(317): a, c, t, g, unknown or other
  modified_base (346)..(347): a, c, t, g, unknown or other
gtaagaggtctcaggtatgctttaaaatgcattagaccagacacctgttgttgagcaggagtaatgagtaggtatcagattaatctaggaatataacattggaagacaatcaagtgaatcttaagatcagccagaggaactatatgttagtccataagggtggtattttaatgctcttagactacaccaaatcaggtttctagacttgcattagtgctagaaagtctaatgatcaaatggtaattattctggggtggagcagtgattttggagaagtgtaaaaaccaatctgaagtctctaactctacnnnnnnnnntgaatgttaaagttgcaagaaagatactnnttcagtctatggaaagttctatatagtttttggcgctgtacaattattttattaactactagtgtaacttactgactaacacaaatgtagttgccaaaaagtaaagaatccagtattcctagaggagtaggcatattgagaggaatttcacaata

SEQ ID NO: 157835 - DNA, 522 bp, Cannabis sativa
ggcccaccatcacacccatcaggccatatacaattttatttttttacacaggcattgggcccatcgggccaaccatcggacccatcgggcctttgtcttccttaatttttctgtgacaccatgggaccggtgtcaggctgcatcgggctccatcgggactgcaatcgggccccaccgcgccataccccattctgggtcacccatcggccctacaatcgtgtcctatcgggcctaacccaattatccggcctccatcagggccaccatcggggctaatcgggccatcttccccaaccttaaaaaactaaagaaccatcgggcctcattgggctagacgaaaaaagtgtgtagtcgaagccataaatatcattaatctatataagaactcgaggaacatcaagaaatcctacaacagacattgttttcatccccttcgtctgctctctctttctctctagtgatctaagaactcgagcgtcttctctctctctctctctagtgatctaagaactcaaagatata

SEQ ID NO: 157836 - DNA, 665 bp, Cannabis sativa
ttaacgagaaatcaaatgttgctagaacggaatagcgaggcaccagagaagaataacacatacctcggctcacaaataagcagactaagtataaaagttgaaccagctcggagtacaataatacgagacgatcatctcgctacgagaaaacttcctatagtttcatccaactaacagaagcgagactcataaccctggcaagtaagtagatttccctatatccgcgatcgccgtatgttgtcaatctcggatagaagaatggttccagctcgccattgggatcactacaataaagtttctattgagacatctccagaatcaacaattaaagacttgtttaatacatgatatttctgacccactaaaagcgggaaaatcacagctgtatgacttttaaaattatgcaccgcgtttacattttgtaatatgtaatcatatcccataatttaagggatgataactgtaattacattttggtcagccttgtaattaactgtcactatgcaattataaatagtggcagagaatctcaaagaagaggggacgaaaaaaaaactcttacgcgagaggccctgaaaaaaagaacatactcagaaatataaataagattgactcgtggactatgcagaattttaactgtcaaaccacgtaagaaaacctggtgt

SEQ ID NO: 157837 - DNA, 754 bp, Cannabis sativa
tatgccccaggtgctagatcaattataaaatttatcttttactatggcaataatcccagtaactcctcaggaaaaacattaagaaattcttttacaactctgacattttcaggcccaaatgttttaggtctactggagttaatgataaccgctaaaaatcctacacatcaattttgtaataaattattagcctttaaaattgagattattgggatccaagaaccttgaggcgatccaacataaacaaatggatcttcaccctccgactagaaagttatcatctttcgtttgcagtcaatactggctgaatacttggacaaaaatccatcccaagtataatatcaaactctgttaattccaactctactaggtcaacactcaactccctattttcaatcctaactgacatagacctaatccaccttttagagatagccaattctctgctaggcaatagggttccaaaccctattccaaaccctatttcaatgaaatcacaaggcctacccaattggttaattactctcaacgccatatatgaatatatagccccaaagtcaaacaaaacagaaaaacaagagtcgttgaaaaaaaaaagctgacctgttaccacagaagggctggctgcaacatcagcttaagtaatgacaaagacccgagtaggtctgggctttactttttgcttttgttcttctctttttgttagagggcagtctttcttaaaatgcccaaccatgccacattgaaaacatac

SEQ ID NO: 157838 - DNA, 531 bp, Cannabis sativa
caagcagtgaacacaatttttaatatttattctatttaaaacctaattaaatagttaattagtcacaattcattataataaatacctacagcaaccaataaattataaaaatctttttgttttgtaccatagatagtaaatagcattacaaaaatatattttactgttttagaatcaattaactatttttcataattattttaagtattaattaaataaattcatgaaaaatacaaaaatgatcaaaaaccaaatctaaccattctaacacagttaatagtctataccaagccctaaataattaactttcaattttttgaacaacctaagtattttttataattaagtttagaaataacacaaataattcatgaaaaatacaaaattaactaaaattcaaatatatcaattttatagcagtttacatctcataaaaaaatcatataaaataaacttagatttttctgagtaatctaagtatttttctaatttaatttaacaaataaatcaaataattcataataaatcaaa

SEQ ID NO: 157839 - DNA, 571 bp, Cannabis sativa
cttgcccccaagagtgtcgagcaatccaacttaaagtttctttaatgctaatgacctctgcaatctcaggtgtaacacaaccaaacttaccaatggtataggtttcaaccatccttccataataatatcgagccacacaaccaaccccaaagtaaaaagtaaaaatgaaacaaaataaataattatatttacacttatatttttattgttgttgctttcttactttactctaattagtatttaatattttaataatattttataatttaaatttgttaaacataaattaattttataaaataatgaaaatgtaatagtaattttgttaaaaaactattaaaacagtttataaaaaaaaaaataagagctctctacccatcaaatccttatttgtaatgattagaccgttggtaaaatttatatttagtgttaaatttataccaaaaagatactattttatattttaaaaaaaggttactattttagaacaatttttttttttaattccaactataatactaaaaattacactaaaaaatatattttttattattatattattttattaata

SEQ ID NO: 157840 - DNA, 535 bp, Cannabis sativa
acttaaagctgatggcccatcagcaaaaagtagctcgacatttcaacaaacaagtgaagggtcagaaattctttgtgggagatatggtcctaaaaagagtatttttaaacaccaaatacggtacgacagtgtactcagacctaactgggaaggaccatatcaggtggtcgaagttctcgaatcaagagcatacaaactgggtaagtatgattaaaaaatgcaactcgttctggtacaaatgtattggaatggagaacatttaagaaaatactaccaatagaagtaccaggttagattaccatatcaagtactaaacaaaaagaatatttactcttaagtgaatggccttttgggcggaccacgcccaaaggtttggatgaaattacaaagtactcacgtcggatgaccaccatctaaagtacaatgtttaatttctgcaaattgttttatttcatgttaagctaaacatcagattagatcaaattaatagctttgatgtaagttactacaataacaaacacactttcgatcaata

SEQ ID NO: 157841 - DNA, 550 bp, Cannabis sativa
gatgttggatgagacatccgatccaatggataaccaaaccgatccaatccaatatcatccaatgtcacccagatccaatcatatttaatatttataatttttatatatttaattattttgtttttaaaaaatatattaattattaataggttttacagtgcatctgcacacatatgattaaataaaaaaaccataaatctaaaatatcaaatctcaattttcctaaacagccgctgcccatcttgagagtgattgatttaatattttatataatatttgcattcgatgtattggacttttttattaagagtttggcttattaagttatatttgtgttatatttttattatgagatcatgaaaattaggttgaatttggattcaactattgtttattatctatgttgaactattaggttttaaattatgttttttcatatattttttaatgaaatcagcttaagtagtggctaaaaatagattggattcatccattggatggatccaatccaatccaataaaaaactagttaaaacattcaatggatggaa

SEQ ID NO: 157842 - DNA, 668 bp, Cannabis sativa
ctcaataaagttgaatgaattaattgcagcctccccgcaaaagaaaggtgtttgttagcccaagagatcaacttagtcttcattttttttcagaataataccacaatcttcaagcttccacttagttggtctaagaggaatgccaagatatttgaaaggaaaactccctacctgtaagttgaagtgttgagccaaattacctggttgagagacacctccaaaataaatatgagactttccaagattaatagagagacccgaagtgttcctgaaatcttccaaagcctccctaatcacttggatagattcttcattccccttacaaaaagcaactaaatcatcagcaaagcataagttagtcaatttcagatttttacacataggatgatacctaaatctcttatcagtaaccgcaagttggaatctatgagataagtactccataatcagaacaaataacaaaggagatattggatctccttgtctcaaaccctgctctcctttaaaagatccatgtaatcttccattcataactagagtataattagtgtttctcacacaaatcataatccaagttatgaatttagcaggaaaacaatagagattcagcaacttctcaagaaaatcccaattaaccgtgtcataagccttgcttatatcaatcttga

SEQ ID NO: 157843 - DNA, 502 bp, Cannabis sativa
ggacttaattgtattttataatctgattttatggttatctttagctgatattaagtctagtaaaaccattttataattcttattttacaaaacttagaaaagaagcaaaaatctcattttataattctttgtgattttcaagctggttttagcaaggttttagtgatctcaagttattggtaagcttcttgtaacttgttcttgatttcttgagatgtaaggaaagtaatttttgcatgcttggtgattttgatttgtgactgctgtttatgttttatgtttatttctaaagcttaaaaatgtttagatatgaagatttaagaaggttcttatggttgttagttggttttattcaagtttggagtttgaactcaaaactttcggttttaatggtgaaaaggtgttttaactacagtggttattgtttgtgtttgggtttgttttctgaggttgttttatgcttatttaggttatttttagttgatttgggggcttgtggtga

SEQ ID NO: 157844 - DNA, 650 bp, Cannabis sativa
aaattcaacttttttttaccacttttttgccaattttttttattattttttttttcagatgatagactaatcccagcccatatataatgtaaaaaataagaaatttttctaattaaatataaaaattaatcataaaaactcaaatttttctaatattatccattcatgagtaatacacaccaatatatatattttaatatatattatatatctaaaaacaaaaaaaatattgtttcctttccattagaatgacatttcaatactttaatatacaaccaaacaaaaaaatggaataaaaaatattgtttcatttccattacatttcatttcattacctccaaccaaacgccacctaaattcaaaaacacaccaccagaatccggattcagatttggtggagctaatgaacaaccattaagttactatttatttatttaccaaataagtcttatatatttgccattttcttttttcttttttttttgtttttttttaaaggtttttatttatttatttagccttgaaatgttattctcctagtaatataattaccattcaggaaggtaatgttcatacctcaaaaaagtgtaggattgaattattataccttccattatattaatttgaatagtatttttgaattaataaat

SEQ ID NO: 157845 - DNA, 522 bp, Cannabis sativa
aatcacaaattttgttgtgattaaaaggttgtcaataaaagtaacaattttttgtagtgattatgaacaaaatcagtgtacttacataaatctattcaacaatatataatcttattaattattcattataatattgttaggccttaggttaataaataatgagggtaaatgagtaattgtaatggggtattggggtagtatatataagagtgtattagaaaaggttagggtgtgaatgatttagttaagtgagcttttagctcttgggagagagctgggtctctcgaatacccaacaacctgttattctcttcttttatatcaatatacaactcactatttcactataactgctactgttgtactaaaatgataggaaattcctatcaattacttttacagtttcaataaaaaaaatcgagcttgggaccaatataatacatttatagtttcaacaaaaaattatttagtggatgtaaaaacaaatttaaagctatacttagccaagactgctttattgcac

SEQ ID NO: 157846 - DNA, 631 bp, Cannabis sativa
actaaactaaagtaaccttacattatacatacattgcaacacatgtagtatacatatagcagttttgttataagttaccagtacctaataccacttaaataacgtcttgtatagttaattagggatattttattattggataacattatcacacataaattaaatgtaaaaatattgaatcatatataaaaacatgaactatttactcatcactaactaattttaagatagaacttcattattcttgttaactatatttcgttattttgttggttatttttaaatatttaattatttaatatttattaaaaaaaatattgagtatttttatttttatactttataacagtttttttttttttaacttttataaaaatccacatagaaactcatataacaactaatggagcaacctaaaccgcaatcaaaatccctatagcaactcacctagaaactaccagagcaactaaaaaaaaaaatagtatatggggttattcaccaaaaatatttcttttacacataaccaatgataaaagaaaacaaaaaattacaaattgaaaggatgaagaaaaagttgtatatataaaaaaatatttaattttggtttaaattatattttttttataaataa

SEQ ID NO: 157847 - DNA, 693 bp, Cannabis sativa
tttatacaacaacattccattattaaagattgaaaagtctttaggccaactagccatcacctcatctcgaaccttgactagctcggaatcctctaactgtacctttctgattctttctagcaagtcagactggagtgtcaaattatgcaattttccaactaaaaactcaattcctacactaaccatatcagaagctagttgaggggctatcgaaaccgtggtaaaaaccagcctaggatcccttctacttagtgcatcagccacaatattagctttcctagggtgatacaaaatctcacagtcgtaatctttaactagttctagcgaccttctttgcctcatgtttaagtctttctgggtgaaaaagtaattgagacttttatgatcagtataaatctcacaattttcaccataaagataatgtcgccatttctttagagaaaaaaacacagcaacaagctctaggtcatgagttgggtaacgctgctcataatccttcagttgacgaaaggcataggctatgcctttgtcaacttgcatcagaacatatcccagaccctctctggatgcatcataataaacaatgacttctcttgatctgatggcaaagctaacaccgaagttgttatcaaacgttgcttcaactccaaaaaacttgcttcacatttgtctgaccacacgaatcgctgattt

SEQ ID NO: 157848 - DNA, 501 bp, Cannabis sativa
cttctaatgttgaagaatcagatcgttgctcatctgatggtgacttgtacatggtttcagatcaaagaatcacaaatgaatggattcttgattctggatacacataccatgtgtgtcctattctggaaaattttattgactataggaaagtaaattctggtactgtactaatgggaaatgacaattcttgcattgtaattggcattggaaaggttgctattaggcactttgatggtactgttcgaatgctgcatgaagtgaggcacataccagaagttagaaggatcttgatatcccttggtactcttgaggatgaaggctatagttacaagtctagcaatggtcagatgagaattgcaaaggggtctcttaccatcatgaaaggtgagaagaagaatggtttgtgcattctgcaaggagaaacagtgatggcttgtgaagctagtgttgtgcaacaccaagaaactgagatggaactgtggcataaaaggatgggtcaca

SEQ ID NO: 157849 - DNA, 649 bp, Cannabis sativa
taacacttttatggggtgagcctggaactatggccgtagtttgcgagacgcatggactaggcataacgcaagtttttctagagggggaaattagaattcttcccctagtaacctattacttatatagtaaatatgttgaagaacgacacacacttattagttgacttcaaattgaatctgttaagtgcagccattcttcttgtcagggcttgtacttccttaggcttcgttggtgatggcatgtcattaaagccttgattttttcaagatttgcctcaatacccctcgcgttaactatgaatcccaaaaattttcttgagaaaactccaaaggaacattttttcagttttaacttcatgttatatttctttaatatgttaaagcattccgtgaggtctgaagtatgatccttacttttgatcgattttaccaacatatcatcgacgtaaacctccatgtttcgccctatttggcttgcgaacatttcttttaccaatcgctgatatgttgccccagcgttcttcaatctgaacgacacgactttctaacaatagagtcccatgttggttatgaagcttgtatgttctcagtatggaatgtacatttttatctggttatatccagaatatgcatccataaatgacataag

SEQ ID NO: 157850 - DNA, 861 bp, Cannabis sativa
cctcaatactggagaactcccaaataatcgaaatgaagctcgaaagatgaggagggctacacggtatatcatagtagagggaattatttacaaacgagggctctccatgccattgctaagatgtgttaccgaagaagaagctgcacaacttttgtctgaagtgcacgagattatttctggccgctgggcagagtttgtccaagaaaattctaaggcaaggttatttctggccgacaatgatcgaggattcaaaggcctatgttaaaaaaatgtgacaaatgccagagattttcaaagatacctcgagctctgcccaatgagttaactcagatgcaaagtctgtggccttttgccatttggggaattgacctgatcggacaattacccaaaggtaaaggtggagtgcagtatgcagttgttgcgaatgattacttcacaaagtggatggaagccgaaccactggcaaccattatatccaaaaatttcaagacttccttgtgaagaacataatctgtcggttcagattgccatacaaaatagttccgaacaatggcaaacagtttgacagccagtcgtttactgatttctgtgcaaaccatggtattatcaaaagtttcttcgtagtggcacaccccaagaaaatggtcaagttgaagcagtcaacaagacattgaatgatacactaaagaaaagacttgaggatgctaaaggaaactggccagaggaacttcctgaagttctatggtcgtaccaaactactgagaaaacggcaatcggacagactccattcaccatggcatatggatatgaagctatgctacccgtagaactcgaaccaccatcccacagaagattgacata

SEQ ID NO: 157851 - DNA, 625 bp, Cannabis sativa
ctccttcaggttgttggattcttcacagtcttacaaactgtgattgagtattagacttgctatgcgtgggcatgcactcattcactatagacttgacattgttgaagaacaatcaaggagattttgaaatagaacaaggaagaaggtctaaaaaaactctagttgtctgacagaatgtaaactaggttataaaagtttgatgagaatgagaccatcctattccttttatactatttcacctagggttaggatttaaattatatggaataaaaaatgataaaataatagtaaaattagcattaagtggtcggccatatagatgggccccagtagttataattttactatttttttaactatttatcttttattttacaaagtcatattttttaattttaatcctataaatgtcaaaaatatttatttgataattatcaaataaaattatcatttatattatttattaattagactccacaaagtctcttaattcacaaataaccctaaaacctcttttattcataattaagccattgcttaataaagattcataaataagacatagtttaattttaaaattataattgattaattaaaattaattaactagagtcttacaagcagt

SEQ ID NO: 157852 - DNA, 526 bp, Cannabis sativa
gtggccgtcaaggtcacggatcctctttcaagtcatatcttgaatgtccgaaatgcaagaatcaccatcagggtgaatgatgggccaagaatacatagtatatttgatatggattatatgaatcggacgttccaggattacctgaatagatgtgtgatcgtgtttatcaatgacatcttggtgtaatctgaatcagataaagaacatgagttgcatctcagatcagttttgcgacgattacgagaccataagttttatgctaaattcaaaagtgtgaattctggttatctcgtgtcttcttcttggggcacatagtggataaagatgggatcatgatggatccggccaaaatttaagctgttcgggattagccaacaccaaaatcggctactgaggttagaagttttttgggtttagcagggtattattgttgatttgttgagggtttttcaaagattgcagtacccttaacggagctgactcgaaagaacctgaagtttgtttggactgatcagtgtgagaaaag

SEQ ID NO: 157853 - DNA, 686 bp, Cannabis sativa
  modified_base (498)..(499): a, c, t, g, unknown or other
ctcatacatagtaaacctagagaaacaaaactcgcaactgtcagaaatttgaatttgatgaaatgccttgctcacatctaatggttgtataaagctcaacacgcatcttcttcccagtaaactttgaaccagattcatatccattcaactcctttctcataccatgcacaaaaagctcaacacacaccttcttccgaacaatattcatagggaaatttcattttaaatgcttaaaaaatatcatttaataaaatttagactcctaattaatttatacaattaaatgctattatttttaatttctacccaaaatactctcccttttattttccttctctctctgtctctttctcttcctaactctctcttcctctttctcgcaccaccaagacacccaaatccaagcaccgagaccacctaccaccaccactgaacctcctttcctccaccaccgaatctcctcatttaccaaaaacttaatccaacaacccccaaatnnacctacccaaatctttctctcttcctcctcctcgacttctctcaaccaccatcgccatttaccaccgcccacctaactctcccccaactagaagctcattgaattcgtatttgtttgagacattagatggtggtggagggtatgattttctggccaaaatggaattatcgatgggttatcgatactt

SEQ ID NO: 157854 - DNA, 541 bp, Cannabis sativa
  modified_base (347)..(353): a, c, t, g, unknown or other
tgtaaattctaaataaacacttcatttacttaccgtaatttgtaatcaaatcccataatttgaggaaataattgctttcaagatcacagtcaacttttgtaatttactgcccactatatacttataaataatgacagacaagatcaaaaggggggacgaaaaaactcatacaagagaggccctgaaaaataatcagaaatctgaataagatggactcgtggactatgcataattttaactgcaaaactacgtaaaaaaccctgtgttcatacttttatttctataacttttatttttctgtgcgaaatcaccactgtgaggttcaaatttagttaacgaaaatctgnnnnnnnagtttggtgccttcattgagagcctctgtgaaaaagctcagaaaaagcctcctgacataaaagtaatggatgacaccaaagataacaatcctcaagaacgaatcagtcatcgccttggaaaagaaccattgagtcctcagggatctattgagtcatcgcatgaacagactgcaagccccgagaaaacc

SEQ ID NO: 157855 - DNA, 597 bp, Cannabis sativa
atcatgtatgatacaacaaatccattatactcaggtggaagactgttgagaatgaattgaacccattgctcttttgataaatcaatttccaatagattggctttctggaactttagattcatcatgattaagtgtaacttaatgctcttaccagaagacattttcatactatagagtcatttgcaaaggcatgtaaaaggtgaggattggggtgtgggttattcattttaacactacaaaaatcaataaacagaaataaatcatttggttcaattaaattcatacacaagttcagaaaataacaagtaagtaaacatgtttgcaaaaataccaaaatgaaacacattcaattattttccaaagttttcaacaaactgatacagtgcttcgttctagtcgagagtcaaagatatcatccattgaatagagtagtcaactcatctaaaatggaaaccattttagcgacctttttttcgatcgaaaatgaaaaccgacgttgcttcgttttagtcgagagtcaaggtcattcctatttcatgagctttcaccattgtttcataccttgtaagtcctactcttagcagccactattcagat

SEQ ID NO: 157856 - DNA, 637 bp, Cannabis sativa
cctttgggtaattgtccgatgaggtcaatcccccaaatggcaaagggccacggactttgcatctatgttaactttttgggtggagctcttgaatctttgaaaatctctagcatttgccatacctcttaatataggctgtctaatcttcagtcattgtcggccagaagtaaccttgccttagacctttctttgataagctttgtccggcggcatgatttccacagaatccgtcgtgtacttcggataggagtcgtgtagcttcttcttgagtgacacatctgagcaatggcatcgagaatcctcttctgtacatgagtccctctactatgatataccgtgcagctttccttctcattttccgagctgcatttcggttatctgggagtttcccagactcaaggtaggccgatattggtgtcatccagtttggggatgtatcaatcatattgatttcttccattccagtgatgctaggctcttcgaggaactggataggaacaaagtttgcctttcacttacattgtcgcttgccaatcaagctaacacgcgcgtctacaattgtattttcttctcttggaatttgtctaagatcgtagcttttgaattgtgcgagaagatcatgtattttgctcagata

SEQ ID NO: 157857 - DNA, 527 bp, Cannabis sativa
taattattaattaattttttgtaatttgtaactaaataattatcatttagcaattaattttttacacttaaattattgaaatacttatagtaaaatctcttataattttaattataacacatatgacctcataatttaaaattttattatacatataaccttaattgaagattattacacttatttatttattttatttaacaaatttaaaaataaaaattcatttggaatcattgaatgcatttttccagaaaaaaaaacgagttgaatgagaaatgagtttcttaggcagagccctcatgtgtctgcccctctcgattaagatatatgtggatttagttttgatgaaaagtattttctgttattcatcttcattactgcttgtttttaaattaagatatctatgaaagtctaatttttgtaaaaaaaaatgagttttattgtaaacattataattaaataatttaattgttaaaaaattataataagttgtatataaaaaccaaattatttataaatattaattg

SEQ ID NO: 157858 - DNA, 620 bp, Cannabis sativa
tggaggcttgaagcggggacgttacaatctaatgaagtactacgctaattttcaaaaaaaaaaatgtccattctttaaattatgttactttaactgttaaatattaatatttttatgaatgaactttaattaatactaaattttgttctttttatcaaaaaaaattaatttcaaaaattataatttttattaaatctaaaacaaattaaaaaaagtcatttaaaaataaaatattagattaacaaaaaaatattaagtttgcttaaaaaacttaaattattcctaaaaaaatattttcaaactttattttatttataaatacatatcttaacaaattaaactaaaattattaaaaatctaataaataatttaaaaataattggctaaggttttcttggttcgatttttctctcttccatggcgaagaagaaaagagcaactaagaagccagcacttcgattgatttcaccatatcctgtttcgaactctgatgtgagggaggaacaagatacaaatactgagatgaacgaattaggcaagaaaatgacaagtgcgatcaatgaaggagaagagaaggtggatcacgatatgatgcacgaagggaattgctctgaaattca

SEQ ID NO: 157859 - DNA, 589 bp, Cannabis sativa
agggagatgggcagatgagttactgggggtactgtggtcttaccgaacaacaacaaagaccttgattggagagactccatttgcattgacatatggaactgaagcggtcattccagtagaaatcgaaataccattcatcatatatgaacaatcgacggatgatctaaatcgatagaccatgaacacagaacttgatttgttagacgaaaagagagaactagcgcttatcaaaatagcaacatattagcaaaaggtggcccaacatttcaataagaacattagagtccgacaattaaaggaagtagaatggatactacgacaagtgttccaaaacacgaaggaagaaggagcaggcaaattaggacccaattgggaggggctttataagattagaaagatagttggccaaggagcatacaaactccgagcagtagatggaagaaaaataggaaatagctggaacgccgtacaccttaagaaatacaatttctaatcacatgtatggcaagacaatgcccccacgtaaatacctgtgtcaattattttaagtgtttgttatattttagagctcaaaaatgtaaagtaaaag

SEQ ID NO: 157860 - DNA, 528 bp, Cannabis sativa
aaaaataacaaattttaaaaaaatgatatggttagcaaattttaaattttaattagattatttctaaattttattaatattttaatatcaaaataagatgattacaaatttaataattaaataagtaatatctgatcttataattaaaataaacaaaataattaaaattttcaaaattaactattaaggctagtttgtggaaacattaaattttcaaattcaaaggctactaatatctacaactaattttaattaattaaaaaaactaataaaaattaatttgattatgataattagatttttaattgaaaattcagattctatacaaaattctaccaaaatttgaattttgtttcaataaaaaatgatttttgaatcaaaagatatcacaaaaacaagattgtactaggaaagtatgcaatgcatactccccgcccgcacaacaggctgcaaatgggcgagggaagggctgctagtagcctcttgggggcgcaaacctcagtcaggaggggcttaggacagcccttg

SEQ ID NO: 157861 - DNA, 974 bp, Cannabis sativa
tacttggaaggtgccctgattgacatattgtcaaccttggcgctgggtgttcggggctctaggtgctcaaaaaacaaattgctctgatttttattttgatgcctcaaatatgtccgtgttatgtctagttgatgtcccaatctaagttttgaccttttagcactaagacaaccccaaaaactgaaaccctagttgggaatgttaacttgggcgccggatgaaaccctaggtgcccatgttggcttctagattgcaggtttgtgtaattttagctctcgcggtttgtattaggttgcaccatgtcttcatggtacataatactaaaagatagtgagttgaatttaagttattaaagtctaaacttccatcttggagttcccaaagtcaacctagacgcagggctagggacccctctcaggtcgacttactatgactcgggactactcaacctcgagatttcatctttcttgccacatgtcaaaagtttatgtccatgtcattagggctactcttggtgtaaacatttacccccaagttaactttacacttgtgtgaggttgacttaatgacatgaaggtgggcatcaattttgacaatcttggataattgtctctgttcttcaagcattcccagtgaaattaggattttgaatccccattcactgttggatactggatttcaaaattttaagttgatgactccttgagtgatttcctttgatttgagatacttccgaaatgtgtcaatacttgactgtcaacacttactctgatctttggttattttcttaacattgaatctcttctcacactttttatttatgtgaatatagatgtagtctttatcttctcttaagttgtagtcttgttcatctccttagtttgatagtagaggaggcctttgtcaactacttagctttacagcataggaggccttcaacatcccctctactttgcagcagaggaggtctttgt

SEQ ID NO: 157862 - DNA, 648 bp, Cannabis sativa
accttcgggttcgggttaccttggatattaagaagccgttgagaagaaggctaaagttaacgcacgagaatggtagctggttttgggttcatttcaagtaagaaagagttcctactttttgcttcatctgtggtgttatggggcattcggacaagttctgtagcagattgtttcaacaacccttggatcaaattgcgaaaccttatggtgagtttatgattcctcagccacaaagatcgtacaagaacctcagagcgcggtggttgaggaataaagggtggaagccggttggaagctccgatcacaatgtacctggacaaactccaagtcagccaaatatggaaacaaatcgtccagttggcgtggccacaaatcatggtaagggatatttgctgaataatgatgaggatcatgatatgcttaatggtaggatggagagtgatcaggaggaggttattttgagaagtaaaaaaggaaatgtcaatatatctatacatgaaaagaataaggaaaaggatatattgagtgaagggaatgctgaggtggttctttatgataataaaaaatgaaaagttggtgaagaggaggtgctgggtcacgtgggacaggcccaaggtgatattggacttccaaaaaactcttttgtgg

SEQ ID NO: 157863 - DNA, 618 bp, Cannabis sativa
gtatttgttacctgagggttatctgagcgtgtggttggtactcgtggaggacgtcgagtcctggtccttctattgatctcagcctgcagagcctgcatttgacttgtaatgcagtatattgggttgtggtcaactggatattaccttcagatttcacgacaggtgtgataggcgggaacttccccagtgtggtcgtcggtgtagacgtttctacaacatgacggcggtttcagggaatagattgagaggagtaatggttgttcgtcctactcgtccattgatggtatcgacgggagctgttccatttcctgggagtggaacgttcattgttctaatattgatcgatctaatgttgttatctcctgtcgtctgatttccaggcataatgattttcctctgaaatcaacaaagtatttcttttccacagacggcgccaaatgtgattggaggaatttagacaacaccaaaataaataggtaacaaagatatgaacagagaatgtgcgagtagtcgacctagaatagcgagtattcaaggtaggaacacatagacgtactggaaataaaaagacacaaaggaatatagtagtttagtcagatcacggactgcttagtccac

SEQ ID NO: 157864 - DNA, 542 bp, Cannabis sativa
tcgcgtaaataagtaggcggtttttttgttatgctggatctcctgggccctgtattttcgttttctgcagcaggttgtgatctctgtgctttgagaggcattggcaggttcttcaataacctgttcagcttcttagttaggagggctgtgatttcgatcacctgctgtactaggagggtagtcactaacgggagaattagtaacagtggatgagggaagaactaactcagaaaaaggatcaacattagtaatactttcattaattttgtgaaaaggaaaaatattttcatgaaaaactacatttcttgatatgaaaatttgtttagtgttaatatcataaagcataccctttaacgccttgaggataacctatgaaaacacaaggtctagcacgaggatcaaacttggttctgtgcacgggtagagtggaagcaaaaaccaggcagccttaaattctcatatgagtgtaatctggtacccttttgtatagcagttcatagggagttttgttctttaattttggtgtaggagtacgatttatt

SEQ ID NO: 157865 - DNA, 502 bp, Cannabis sativa
tcttttaagtttaattgcttaatgacaatgatattttattggcttaattttttaagcatctttttctagttaactgaaacctttgatgagcaggcccagtccaacttggattatatagctaagtcccctccctaactctataaatatatattgttccatcataattgtatacctttcgataatcggataaattaaaactgcttctgatttaaagatctagagagaaagacttagttgatagtattgcactatcaaagtgtgctaattgctatggatcaatcaggtacgcatacctaattagggtaaataccattttggaccctgtcttttacaaaagttatcaattggaccccctattttgttaaatgacaaaatggaccctatatttttcaaaatggtaaaaataaaattctgagcttaattttcaaccattctattttttaaaataaccaactttaagacaatttctaacactaatagatacaaaaaaaaaatgtaacca

SEQ ID NO: 157866 - DNA, 502 bp, Cannabis sativa
gagatcaaacgtaatcgttaaatttaacagaatattcttctattttttaagtatattctgttaaaccaagaaatgtcgttagataggcacttttaatatataaagatataatattgataatattgtgaactaaatatattttaaaatacattaatatacaaactaaatagtatacaaaataaaaataataattactaaagtttttagaataatataattttgttaatataaccttaataatttgcaaacattattttttattattacttgatattagtttttaagatattaagaatactcttaaagtaattgattagttgataatagcatgccttaaaatttcaatattttttattgctttcatatcaagtgttagatgttcaccattaataacattttttaaaactgatatgtttacaattattaatggtatttataattttctttttattttcaaactaaatattgaatatattcatgatattggtttacaaaactgata

SEQ ID NO: 157867 - DNA, 1053 bp, Cannabis sativa
atgagctgatcgatccttggaagtggaaaacagtctttggggcatgctttgttgaggtctgtgaaatcaatagagactcgccatttcttgttcatcttgggcaccaatacgggattcacgacccaagctgggtagaaagcttcaattataaaattgttgttgcgtagttgtctataaatggctgttcttatactgttttgttagactcgagagctactcactcttatgtgtcgagtagaataattgaaagtttccataaaccatgtgatatttatgcttcggggtttggtaccctgttaccttcaggagaccttatagtatccactaggtggattcggtctttgtcaatcaggactgacgattgtgaattaaccgccaatcaagtagaattgtaactatctgattttgatataatcctaggaaaggattttctatctaagatggggcaacgatcgactgcaagtggaagatggtggtgtttgaacccgatagtgctaacccagcggtgttcgtgggtaaagtttaggggacgcgcataccgacaataacacttttaaaagctaaggacctgatgagcagaggttgtctgggattcatagttactccagtggataccagccaacctgtgacatctggacctgggaatagaagattggtgtgcgagttccttgacatctttctagaagatttatcgagattgccacctacttgagagattgaatttgttattgagtcggttctgagagccgatccggtatcaaaggcaccgtatcgaatggctccagcagaattgaaagaattgaaaatacaattgcaagagtcattgaatcttggattcattagaccgagctacgcaccttggggtgctctggtattatttgtgaagaagaaagaaggatcccagggaatatgtattgattactgggagttgaacaagcttaccatcaagaacaagtatctcttaccgcgaatcgattatctttttgatcaattgaaggggaagacagtcttttccaagatcgatcttcgctcaggctatcatcagctgagaat

SEQ ID NO: 157868 - DNA, 583 bp, Cannabis sativa
tttttaaagtataattttttaatttttaattttttaaaatgtgatgaagaaaaacaaaaaataattattattttaaaaaaaaaaagaaaaaattatgggaaaaataaataaaaatatgtatttttatattaattaatatttatgaaattaataagaatttaaaaattaagagaatgaaggagagaacaattaatgctaattaatatttatgtattttatagaacattgctattagacatcagtggtgtctagcactttgtcgatatgtcgcgttgcgattgactagcggtaaaccctaaaagttattatattaaactctataagaccagatacttagctggaccaatagcaatattgatacagccactactagtgccctttagtattttttctctattttatagatatatagatgtatataaaagacacttcaatttcaatccccaaaaaaatcaactatgcagggaggaatttcatatcgtaacatatctttcacgagtaattatttttttttttggaagaacgactaattaatttttttttttttgaaacagaattcaatcaaagattttttttttttttt

SEQ ID NO: 157869 - DNA, 512 bp, Cannabis sativa
  modified_base (178)..(184): a, c, t, g, unknown or other
aagaagactatagaattcgaattagaaaagagaaaataagaagaagaagaagtctcaaagtactagttgtctgacaagatgaaaactaggtttgaaagaaattgttggataatgagactattattttctttttatactaattcacttagggttaagattgaattatttggaataaaannnnnnnaaaataatagcaaaaataggagcacagtggccgaccatatgtgggcccaacactaattagatttttgctatttttcttaaccatttatctattatttcacaaaggccatattttgcaactctaatcctataaatgccaaaagtaactataataattaaaattaattatcaaataaaattgtcatttgtattatttattaattagactccacaaaatatcttaattaacaaataaatgctaaaattctagttcttcacaatcaagccataacttagtgaaaaattcataaactagacatagtctaatttcagaattataattgattatt

SEQ ID NO: 157870 - DNA, 970 bp, Cannabis sativa
aaaattgttaccaaacactacctaaattaattataattattaattaatttttcttaatttattattaaataataatcttttagcaattttttgttgcccttaaattattaaaatttttatagcaaaattctttataatttaaaattatacacatataatttcatcattaaaattttattatacttataactttaatttaaaattattacacttaactatttagtttatttatttaaatatttaaaaagtaaaaattagaataagttgaatgtatttttcggaaaaaaaaatggctaaactcctccatatttttttataaggagttatttactcaaaaaaccaaaccaaaatcaaaaaacaaagtcaagctcccccaaaaacgaagcaacctcaaactcgaatagaaaaactcatactttgttcttctagttataaaaaaataatttaatatcatttaaaaatttattatacaagaaaaaaattctaatttgtgtaaaaagaagtctaatttatcataatttaatttattatcatttaatctttcttggtttagattttattgttttttccctgtgcagactgttctgaagatggcttacacttattctcgagctaagtcagctgcctccaagaacactgccatgtacaacaccatgagggcagaagtggacttggccaggaaggacgttgatgaagccaaggttcaactcggagctgtccggatggaactgggtgaagtcaacaaaaagcttcctcctgccgagaagaaggtggccgagctgaccaaggatttagaggcttccgatcaacttgaggctgccatgacctccttgtcccaagaagtgaacaaccttcaagaagaaagggaggtttttcgaactgtcttccgcaggttaaaagcagagtagaagtccaaggaggaagagcttaacgctgaagtagagaggctcaaagggaaggtgaatgcctt

SEQ ID NO: 157871 - DNA, 782 bp, Cannabis sativa
aaagtgtgggtcactaaaaaattaggagtaggttttagtgacacacaccattagactctaaatattcggtgttcatcacccgaaatgtgagtcaataaaaatatggagtgtcactaaatactaaaacccaaaatttataattttataaaaataaaaaaaccatggccgatagagacgtgccacacgtgtgagcaaatctgtttgccaacgcgttatgcgtgtgactaaagaggatttctcataatttatattaatttttttcttaataaaatattgatctacagtgacccaccaagtgtgactcggtaaatgtttccctacttgcttagcgtgtcactatagcataactttaaatttatatttaaaataataataaaaaaagtacacagtgctcaagaaaaatattttaaataatgttttttaatctgataaaataagtaatactttttctttattttatttgaaataaagtaattaaatatttttcttttactgaaaaataaattgaatgtgatttttttttttcattaaaataatataaatagtcaaagattcctttataataaccctaacatcccctttcatcaaccaaaccctgagccgtttctcattctctctctaccgcatctgatttaaaaaaaaaaaaaaaaaagatcttgccatcccttcgtctcccactggaacgacaaacacaaaccatcgaaggaaggccctcgtcttcgccctgggacaacgaacgaaggaccctcgtcttcgccccaaacgccttcggtctccgtccc

SEQ ID NO: 157872 - DNA, 528 bp, Cannabis sativa
catatcatcctaatagttacaaaaaaagggaagagacgaaagatatgtaaaaataatacatacaaggccatacatgtacatgtataaaaaatttgattcaagatgtatatacagtttgtatgaacaaatgggaagattgtaatcactcacctaaattgcggtatattaccacaacaaccgagaagtcttcggaaaaagaaagagaaaacagaatgctggcaaaagtccaacccttgagtatactcaaagaaaattgatcaacatgaagtaaaaaaaaaatataatattattgaagaattcaatttttttttaaggatgcttcagtgggcagcaataaagtttatatggagatatatatctaagcaatagatcatatctcaaatttaaaaattacgatttttaaatttaaatggaaggtgttaaaaaaagataattaatttaattatttctttttctaattttggaaattatattaaattaattaaaatatcagccaaataatctttttatttataaaatataataaaa

SEQ ID NO: 157873 - DNA, 546 bp, Cannabis sativa
  modified_base (44)..(46): a, c, t, g, unknown or other
aaaatgtaaaaaaaaaaaatattctttgaacgtaaaaatataannnttttacaaaaaatggtgccttatataattatttctaaaaattattagatcatatatattaaaaaatgtaatttttgaaaattattgaaaaatatgtatattttaaaggaaaaatatatatttttacccttagattaggtaggtcctaagcgtgggcctagtttgttttagcccaatcccagccctgcaaccataggaatgagaaaggatctcctccgttccaaaaaacttagtagaaattacacaatatatgagaaaattataagagtttaattttttatggcataaataaataataccatgatgttatggattttttttttattatttttttttacattaatatagaattttttatgtcatatttttgcaaaaaaagatggaaccggtgccggaaaagtcaccgtcgccgaagaaaatcactaaaaaagtcactagaagtagatgtctcagatataaacaaaaatagaaccagttctataatataatgaataaaaataa

SEQ ID NO: 157874 - DNA, 600 bp, Cannabis sativa
gaagcgaatcattgcctgcaaaaggaaataaatgttaatgatggctatcataaatgcagctcacgcgcccaaagcacgtgccatgtaatcgattagtcaaccggaggcatcaaacaagcctcgtttactcaacaccaaacaaggcttggggggtatatgttacccttaattttgcccaaaatacgttgaccggtataaagatgacacgtggagctgagaggttcagctcctaaggaaatcatctaagtcttggatgtaagaagagtgtctctgggaagatgactcccggagaagatatgagaatgacctctatgctcccggaggccagggccatattaaggcagctccgggaggtactgaaccctattgagaaatcacctcgcatttaatgctgcatgggggagaacgtattggaaccaccataaacaatatgaatgacgacgtaacccctctgttgcagctgttacgctgtgattaatgagactagtaacggctacttaatgaaggatcacatcaatcaagaagggataaaggattatatccacctaacccctaagatacctacggcataggtcatgtatttcctattttgtatctgct

SEQ ID NO: 157875 - DNA, 514 bp, Cannabis sativa
actacctcattctgattcacaaaaaatatatatacaatatacaattacacaaaatacacaaatagtatacacaatatatatacacacaatatatataaacacatattccataataaaacacaaaatatgtagatatatataatatatcaagttaataaatatttaccttataaacgcaatccggcaataaattgcaataaaaatccagcaacctatagcacacactcaatacaatattaataaaatggaaaatttttaaaaaaacaaaatttacaaaaacaaaatatacgtaccaatgtacattaataaaatgaatagaaagtatatttatacctttaatggacgttgagattcaacgttttctccactaaaatcgttggtaggagttataccacgacattttttttcaaaataggttcgggtacagtgtaaatgggtaaaaaaataaaacttttttagtgtatgggattagatattgaaaatagaaaagtttaagacaaaaatgggataaaat

SEQ ID NO: 157876 - DNA, 617 bp, Cannabis sativa
aaatccaacgctagtaactttttcaatgaaacttattattacaatttttatcaaatttatttattgttttacaaatataagattttcattttttttttacaaaaatatggcataaaaaacctcatagaaatgtaaaaaaaaaataaaaaaactcataaccccatggtattatttatttatgctataaaaataaactcttataattttctcatatattgtgtaatttcctcaaaaaaaaaaaaattaaaggcattaaagaaaaaatatattgggtcctttatttatttatttttgggataattagtaattacataagccactatttttttgtaaaaaaaattacatttttacgtttaatgaattttttttttttttacatttttacggtttttcgtaaaaataacactaaaataacaagaaaactacgtaaaaggaacatgataataatatctaaataacatcaaaacaacagcaaaaaatagcatacagattacaaaaatttaacaataaattaatatgaatttaacataaaaagaccggatttctgtaaataaaattaaaaatttgtaaaaatgtttaaaatctcgtgaaacagtatttttgtaattttttttatt

SEQ ID NO: 157877 - DNA, 536 bp, Cannabis sativa
cataatttgtcggcacctacaaaccaacttgtataaaaatatgtatatatatatatatataaatatatatataataacaataagttagacatataattttaataaaaaaaagtaacaataaaaattatttatcttataattttgttataatcgtattttttttagccattaaatgttaattcaaaaacacagcaacatattattagattatatattaaataagttaaaaaaatatgtcgctgcgtgtttttgagctcacacttaaaagacttaattgatactaaataaccaaaaattaatacgattacaacaaaattataaaataatgtacttttactatcacttttttaagtaggatcatatatgtaacaattataaatgttaaaaaggtttcgtttcaaatatcattatattatatcatgaatacagtacatatatatatatttatgaaaaatttacatgtgaaatttttttaaaaattacaaaatacattaacacaatttttttttttcatatttttactctttgaatttttt

SEQ ID NO: 157878 - DNA, 644 bp, Cannabis sativa
gagcgactggtgccaatgctccggacgcaccccctggtgctccttggggcaaacgtcctgttgccttaaccgggttgagatgaggcaaccggttcttaatccactcataaagatgacccaattgaatcaagttttcgatctcatctttaaggtttttgcattcattggtgttgtgtccaatgttgttatggtactcacaccttttgttgggatcccttcgggagctgtctctgtacagaggaggaggtctccggtagtgtgtatttttcctggtggcgaagtatacatgctcctaggagtccgtcagttctgtgtattgggtgtattggggagtgtacccccttttctgccgcttgtcctccgtccggttgctaccttttgaggacctcttgctccgagagccttgagaaggacctgctaggcttgcagcaggagcggagtgagacgagacttgcccacttaccccagaaggattcccataatgagaagatgcaggagccaatgcctgattctgattatatcttgaggtagcggaaaattgtatgccgctcattggtggagtagctgctggtagggtttctaggagctgggctccgtgtacataccctgctattccgatcggatagtatcgcccataagccact

SEQ ID NO: 157879 - DNA, 515 bp, Cannabis sativa
gaaatagagttttatttagggcttaaaacccaacaccatcaagggccaagctttggctgacttattgatagaaggtataactacagaagaaattccacctgactagcgagacgcaaaaatctggaagttatacgtggatggtgcatccaacaaatagggttggggtgcagggttaatattaatattgccagaaggctttaagttccactatgctttgatgttccaatttgacgcatccaatattgaggttgagtatgaagccttgatcatcggcttaaagatagcagaggcattgaaagtcaaaaatctcatttgtcatagtgattcgcagctgatcgtgaatcagctcctcggggaatacaaggccaaaggcttagaaatggcgaagtatttagagaaattttggaagagcatagaaagattcgattactttaaaatcaaacaaattctgagagaacaaaactccaacatcgatgccttagcaaaactgccctcgcagaatgacttggatgaat

SEQ ID NO: 157880 - DNA, 762 bp, Cannabis sativa
  modified_base (722)..(725): a, c, t, g, unknown or other
atcaaatatatatatatacacagtgaacatatatacccaaataaatcaataaatacccaaatcaaatatatatatataaacagttaacatttatatacaaataaaataataaatacccatatcaaatatatatatacacagattatattatataaatacccaaatcttatatatatacacaaaataatatatatacccaaataaaatatatatctataaatacacataatattatatatataccaaaatcaacaatatatatactaatctaacacaaaacaaaaaaaaaaccaatctaaatatacatatatacacagattatacatgccacaataaacaatatatatggatataacttagacatttttcagttttagatgaaaataaatcacaaacaacccaaaaaaaattcaaacacaaataaaaatgagaaagtgtagattcaatacctgtgttggagggcgccgtgcgattgtcaccaaaatcggaggcggaggcggttgggggaggcggaggcggtttgggaacgcagaggcggttgggggaggctgagggttcggagtggagtttgaaatggggattggtattagggtttcgtttttttgagaagagaggaaaaataggaaagttgggtctgatggggtttatatagggctattagcagcggggtattagcgacggaccccgctgctaatagtaattaattaattttttattttttnnnnaaaaacaaaatactattagcggcgggcattagcggcg

SEQ ID NO: 157881 - DNA, 504 bp, Cannabis sativa
tattttattaacttcatcaatattacaattgctctagctgcaatttcatatatggtgtaataatttagaagtgagcatcagattgaatttaatttttttttcattatctgatccaatttatttagtaattggatttgaaaatttattatccgatccaatctaattagacctcaaaatttaattcaggatctgtttttaaattagatatccaattacacacttaaattttaatattaaattaaaaatatataaaaaaaaacgtaaaaactaagtatcaccctttatttaaatttaatattttataaatatactattgttacaagtgtaacgtagatacaaattgtaaataattaaaataataatatttttaagtaataaaatagaacaaaatatttttaaaataaatatacaaaacaaattacaaattcaatacacaaaaaaatctaataaaatataattaatatatatattatatttttcaatatttttattatataaataatt

SEQ ID NO: 157882 - DNA, 806 bp, Cannabis sativa
tgtcttgctttgctcttgtattgattgttcaaaagattgaatttccactgtttgtatagctatctcttctatagttgtgatgcatagtggagaattagttactctagcatgtgtttttcttagctcaatgtagaacttgagagaattgccagtcagtagcttcattggtgttgttcccggtgatatctggtaggatatgtctatgttgcttctgttgcaatttatttctgtttttatcagctccatcaagtttgctagtgaagaattggttagaattagaattttagtcattgtgtagtcgtcataatttgttttttctctccattgacactcatatttgatcacacacatgatttgttccatacctgcaattttagaggaaaagtaatattagaatcttattttaattttttacttggaaccggtttaatttaaattatgtgtattattttttttttttgtagtttttaactgatttttttttcttttatgtttttttgtcatttatgtctttgattaatttttgtatttttaaaggtaaagtattattaaaatctaaatatatttttttatttgaaactggtttcttgttttttttgaaatgtaactggtttcttattaattttatgcttgtttgttttgtttaagtttttaattggttttttaactggtttttttctgttatgttttgtcagttatgactttcattactttttttacttttaaaggaaaagtaaaattagaatcttattataatttttatttggaactagttctgtttaaattttatgtatcaatattttatg

SEQ ID NO: 157883 - DNA, 524 bp, Cannabis sativa
  modified_base (486)..(497): a, c, t, g, unknown or other
tcatgatatactaatgaacataaagacaatgtttcctagtgaaatatactatacctcaaacttaaactaatattccatatcttttaatttctgtatttcgttcattatttaccataacacattaaaataatataccattatcttaaactaatatactacctttcagttttttttaatatactattgcacataaaaatgatatactattgtacaaaataactataccaaatacttaattattcaaggttataattataatttcatcatcaaacttttaacagaatggacattctgttaattttttataaaacgaaacatttattaacttaattgttagatttagggccatttatatcttggcctttgaattaccataaaacttctatgatagaagcccattaaaaaaaacgtaatgtataaaaggtttgacattttaatacaacttactttctttttttttttaataaataaataaataaaatggtnnnnnnnnnnnnttttttttttaattttttttacattta

SEQ ID NO: 157884 - DNA, 557 bp, Cannabis sativa
  modified_base (256)..(263): a, c, t, g, unknown or other
tctcgaatctgctccccttgctgcctaattatctcttgcatggcagcaaacagttgttcccaatcttgagggggtggaggatgctcttccccaccaccaactctgagcccagatggctcgctaatcagactattcaattgcccttacacttattgcataacttatcacacatttagtctacatcttcgaagcatttagaactcagacagatatcgacatcaataaacatataccatacacatattcttatcataannnnnnnnatactactttttccaacatactttctaatagtctaggcaggtaattcaataacaaataatataaacacttcctataccatgagtcgacctttcttcacagaaaatgtacatattcaactagcttcaggacctttaaaactatggttgctctgatacaaagttgtaacgtcttaatctatagggatgccactaatattcggacttaagctataaaaagttcaaaacttaatttctaatccaaaatcacctcaatttcagtaagaatacatcgaaactagtcccatgactacccga

SEQ ID NO: 157885 - DNA, 588 bp, Cannabis sativa
tatattatagattgatcattgtgtgatgcaaatcaactctgtgacaattaacaccgatcaaagtccaccaaaaatacaatatatatacacataggtatattcccatcaacccattcaaaagaaatatatatatatatatatatatgattgtatctaaaaaaaaatgcggcagcagtattattcaaaaaagaaaaatcaaaaacttaattttttttaaaatctccaaatttcatgaacaataaaatcatcaaattttcaatcaattcagtaaaagtgaatctaataccacttgttaagatttataaaacactcaagaaatataaatatcagagatctaaatatattcctaaaagtgctttaatatagaaaatcctgaatcataaatttatataacctttgcttaattaaagaagacgatgatgataaaagatgagcggaagcactaacctaaagccattgttggagatttcagaaaaggttttgatcttaagagaatacactattttcttaggtattttctctgatggggaaggagagaatacagaaactcttagtgtcttgggtaccactacctatttataggctcat

SEQ ID NO: 157886 - DNA, 632 bp, Cannabis sativa
ttaacaacttttttccttactccttcactcgttagtttttagttaaaatctcacccaacacatctccaaaagtcgtgaaatttcatggggacaaggccaagaccattgtccatcactattctattggacacgttgagagaaaaaatagttttcatgcactaacgagaattttaatagaaacagtgaaaatctcgaaacactgatagtggtaaccctttctgaaatgtggcctggaccaatctcagaatattttttgccactaggcacaatgaattcgtactactaagacgtgaatatgaagattggtttcgggtaaaaattggttgaaatggcccccaaattaaaaaatagaaaatattcttcttttcaggggtaattttaacaatttttttccttactactacactcgttatttttctgttaaaatctcaccctacacatctccaaaagtcgtgaaatttcacgggcatgaagccaagaccgttgtgcatcacttttttattggacatgttaagagaaaattactttttatgcactaacgagaattttaatcgaaacagtgaaaatctcaaaatactgatagtggtaaccctttgtgaaatgtggctggaccaatctcataatattttttg

SEQ ID NO: 157887 - DNA, 521 bp, Cannabis sativa
  modified_base (149)..(149): a, c, t, g, unknown or other
tcataacagggtgggtaccttaaaatcttccactacgacaaggtaccgtgactttctatctaggaaaataaatggtattgtcctcatctgttgtgtcaatacaatagaggtagtgggaccatcttatatagaataagatgatagaatanttttggaatcaagaaaaaaatattgcatctactttgctatcagatttagttatattcttagaaaagtagtatttgttgaaacaaaccatttcttatcttaatgaccacaggatggtcaacccctaatcactttagaatagctatcaaacatgtaaacctttgttaatagttctagcttttcttaagttcacgatcaggacatccctgaatctagtaatggtgtagactaagtatacaaccattcaatcattttgaaattttcctattacttgggtatttccctagaaggacttaggcagctgctagtcactaatcatagaccttatactatcatcagtatacaaaccaaacttctgggaggtaagtttggat

SEQ ID NO: 157888 - DNA, 565 bp, Cannabis sativa
attaatgttataaagttagacaattttatatgtatacacaatatattattttaaatcgtattttataaatattacaaattaaactatctatttgttaaatgataattaatccatgtatttttttaaaattaataataaataatactctgagtttaatttttgtcaaaataaaacttaataataatctgatttagaggttcatgaccagattgatggttaagttttttatctattcgtgctagaaatcgacttcaaattggttatatatatatatatatattttttttttttaaatgacgaaaattgtggttagggtattattttatatcattttggaaaatacaaagtcatttatcgtttaacaaaataaatgatcaaatcagtaatttttgtaaaacaaaaggtctataaaaaatcttacttttagttacaaaaaatttgtaactaaaaataagaaagttgtgactaaatataaatcaacattcatgttgtgactaaaaggtctttgactaaagataatagtcacaaaaatcacaatttaagtacattaaaaattcttgaaaaa

SEQ ID NO: 157889 - DNA, 1037 bp, Cannabis sativa
gttcctactagagttctttttaatttataaatttattgaaatttggctcatataaagagaccttataacttctcttatggtacaaaatataaattgaatcatgagaattctattatactttggtataagtattaagattatatctctcaaaagagaataaaaaacttatttttgataaaattcttgaccccttgatttaataaattttaaattttgtaaaagggtaacaaacaaacataaagaaatcaagtgaccaaataaagtttcattgtttaagaatttaggctatattttggtagatctttcctcatgttttcatgggaatgatcaataatagtgtcttgtcttcagactaatgaaacttattttgttcataagggcattaatcttcagacatcgtttcttttaaattttcaaaactatagttgacaaatcaactaggcaagaaaattaaagttgttgaaactaactatgatggttaacactaccatgggaggtatgacgaatcaagtgagtaacgtctaagattatttttcacaactactaaagaaatgtaattttgtctttaaatacaaaatgttaggcaaacctaatacgaagggtattctagagatgtaattaacatttatctaaggacatggctagaagtgtgattagtcattcttcttaatgaaactcattttgggaagaaacacttaagactgaaacataaatcatgaactgtgtattaagtaaagtataagataaaaccctttacaaactaagggtgtggttagactagtagtctaatatatagatatattctatttgtggatgctcgactaagatgaagtcttataagcctcataaaaggaatatggactccaaaaatagtaaggaactatactttactatatactctagtaattaaaaagctacaaattttgtgatcctacactataaagttaagtttgaaacgagaaaatttattattattttgaggatgttgagttttggggagaaataagattattatagatattgttcttgagaaggaa

SEQ ID NO: 157890 - DNA, 878 bp, Cannabis sativa
agattatactcacgcaaactccgaaaacccatcccaccagagttcttatttttacataatttcctccaactaaaccagctcacccctttcctactacccggactccatcaatacttagacataaggctttccaaatgtgaacaagttttcaaaggcaataagaacattgacatagcaaagcttggcaaagcttgtgctacagtttttattaggacttcatgcccagcggttgacaaaatacgaccctcccagccttgaatgcgcttctgcattttgtccttcaaaaaccccaaaatggcatccttatttcttcccatgacacaagggaggccaagataagtactatgttcatccgcaagtctcattctaaggatcccacacaatcggtcccgagtagcattaggcacattagtactgaagaagacagaggacttactgaaattaacctgttgaccagaagcgatctcaaataactgaagcagatgtaatatattcgaagcctctctattatttgcacgacaatagacataactatcatcggcaaaaaacatatgagatataaccgtagcaccattagcaaccttacaacctttaagcctcccatcctgctcaaaattatattttagttttaaaatgaattgtgaaataatttttttttttttataatttttaaataataatattgtgtattattataaatatcttttgtatataagagtgtacactaattttactacaaaaatttgagcttaaaaaattatacttaagtataagtaaaattcattttagtatttttttttttgagtgtagcgtaatggtattcttacaatcaactaatagcttataacttaaaagtcttgggttcgaacccatgacct

SEQ ID NO: 157891 - DNA, 799 bp, Cannabis sativa
gaggcgtgagtcacatagggatgccgcccagctgtgttgcaaggactggtgcgtgctgagatggttgaggcgattggggtaaaagaagctcttagctggttgaaggatcatcttgagattcatgccgatgtagaaacgattgcaccaatgttgttaaggctatctatagttctattgaaatattttttgcatatggtattattattcatgactgtcgccatcttttggcttctcttagaaatgtgtctatttgttatgtaaaacggtctgctaacgtagtcgctcattggcttgcaagagcgtcttgttatctccttgaccgtattattagagaggacaattgtccctcttatttgttgtcgttattggttggtgattgtctcttttaataaaagtttcaaaaaaaaaaaaattctaaaacaattagttcaatgtttaaaatcattaagtaagatgatcttcaaactgcataaattagataatctcttgaatcaaactaaattattgaatttattctgcagaacttacggtgtttataaaattaccgatccaattcaatttgcacaatccaatccattccgcaaagtgcagatatccgaacttctgcggattagattggattgaaaaatttaaaatttgtacttgtgcgaattggatgttaattaacatgtaaaagtaacccgttcaatccaatccacacatattgataaaaaaaattaaaaaaaaattatatatacaattaaaattttaatgtaaaaaaaatagtaatttaaagatctaatacatatatttcaaaact

SEQ ID NO: 157892 - DNA, 528 bp, Cannabis sativa
  modified_base (182)..(182): a, c, t, g, unknown or other
tacactcaaggttgtaagtgagtatatatatatatatatatattcttctcttgctatatatatttatattatattacatgtgttgtaatcttctcttatatctttcatatatagatacaatatatatagtgtatatatgtatattgtgtaacatatatttaatcaatctcttttattgtccntttattatttttacaattgagttgtatatatcttgattttcttccattgtaataatatctctaataatcaaaagcttatcccatttcaatggaagatgagataaatcaaggttgtgagaatacaaggataagagatttgtgaaaaccattcatgggtgagcatgatggtgtataatgtgatttactattttatatgatagtaatatatatgatatatatgagttatatatatgacatatatgtgattattataagaatattacataattgattctgtccagattcaatgaatataaaatattcatttatcagaaattcaataaattttcaaaaaaaaataaataaa

SEQ ID NO: 157893 - DNA, 558 bp, Cannabis sativa
ttaaatttaaattaattttaaattgaaataaattggactcactactaaattgtagtagtgacgattatggcaatgcttttaataaagagaaatgcaagtaaatagctttatttctaactttactgatagttaatgtatttttttaaaataataaagcaaatttcttttttttactttttaatacctaaaatatctttcattatataaaaagtattataaaaataccttagagtaatatgaatataacatacaaatactataccttagagtaatatgagtattatgtccttttttacttttactgataggtattcttttaattttatttttatttctttccttcatgatatataatataacatacagataatatgaatttgccacaataattctatagtcaaataaatatataaaaataaacttaaataaatttccacaagtttttttttttctttctttcattataaagatataccgtacaaaataaagaaatactaaaaatttaaattaatgtttaatatttttttttctttctttccttcacgatataccatatca

SEQ ID NO: 157894 - DNA, 550 bp, Cannabis sativa
cccgagtatcaaaatacaatttaaaagtattttactaacatgtacatataatattattttttttttaaaaaaaaactcgctagtatgcaaccccataatacagactccaaaatagtaaaagaccgaaaccctctaggctgcactgccgcgatatgtacaatcactgccgagccctatctcactgtacctccagctatgcttttcctttactacataaggtagcaactgatgagtcaacagactcagtaagatatgcaagataaataaatatatagacaatgcgatgccgactttatgattaagccgtcctgagcttcataattaacctcatcaaatggataagaacgttcttaagggaagtacgactactgtatcaatgcgctaaagtactaaccctgtactcgtgttggtagagccttaattgtactcccagaaactactaagtgttgtaccagaggcacaacgtaccccctgatactcgtgttggtaacactttagccataaaaatatgtcacactatactaacactcttaaatcacattcattttag

SEQ ID NO: 157895 - DNA, 811 bp, Cannabis sativa
agttctttaaaaactaagcaaacagtacaagagaagattcaagcagcaattccaaccaataaaccaaacgaacaccaatgaaaactaaaaaaattgatgatttttaaaacacttgtgtagggtattgggaaacaagcctttagactatggagactaagaaaatacaaaaaaaattgaagagaggtttttttttttgctcttggtttccttttcttttgtttttaattttttttctttgtttttcaagaatttcaaaattctagctcactaatgacacaaataaaatgggaaacaaagagacgagctttgtgaaaaaatttgggaaatgaatgagaaacaaaaataaggaaacagatttgtgacacaaataaggaaactagaattcagtaataacaaattagaattattttttttttgaaaaaattgggatttttttaagaagaaaataaaaaaaatacgggaaactgatgacagcaaatacacgatgtttgacacaagaaaattatcagaatgtggttctaacagtttcgtatttcacaaagaaaaacagaagagatgaaacacgaattgacaggaatatagaacacaagttaaagaagattatagaacatgagtggaatagaaaaaaaaaacaaaagatagataggccaaacttgatgatcctaagctctgataccaaatgatacgaaacacaccaacagttgtgatgacacccgacaccaagtatggcagactctaagaattctcaaaatttggatgtggaaccgcgacctaatgtttagttaagcatgaaccttggtatgaaagaaga

SEQ ID NO: 157896 - DNA, 725 bp, Cannabis sativa
  modified_base (170)..(177): a, c, t, g, unknown or other
atcggattggatgttatttttaaatatccaattgggtcggatcaaatgttaggtggggtgtctaaaaatcgaatacatcaaacatccaatcaaactaattagtattatcatttaatttgaatgagtaattagattttatattgttataagtaatatatttatatatatannnnnnnnaattaacattaaaattttatttttttttcttagattggatggatctaattcaatctaatacatactggacttaaaatattagatagatccgatccgatctaaaaaatattaggtctaaaaaatattgaataaactcaaattaaaccaataaacatatatgaaatgtatcaaatggatagaactgatccaatctaacatccaattggatgattgaaattaattggatcagattagatggtaaaatctaacatttaatatataattggatcggatctgaatagacttaaaaacattagatgtggttcaatgaacactcctaactataatttacatgactataaaaaaaaaattactaaagaattatttcaccttctaaaacaaataaacatggatagatgcctttttttttttattatttaaacgtttatatattacaaccatattttatctaggactcgaatctagatctccaacacacccacatatggccacttgtgcattataaaatggataaataccattttggaccctttgttttgcaaaagtta

SEQ ID NO: 157897 - DNA, 697 bp, Cannabis sativa
acaagctgaatagattaaggggcataatagtatagtgtcataagtacagggggtaaaaaagataattattcaaatataaaaggaaagggaagaaaaatgcaaacaaaataaagcttgtatccttctcttcttttgcacttgggtcccccttctcctttcttctctttgtacttcctgcaattaaagctctcttcaaaaaatggcagctgcacgttatggtaaagatgatgatgtacttcctttttcctcttttttgttgttgggtttttagggtacaaaaattcataccctaaaatagaagcccaatctttttccactttgaccaactaggtttactctcctttcttccaaagcagccagctggtgcattttaagtgacttggatgaatttgctgatgtggataaatgaaagtcgtttttagactttttccacgtcattacccaaactgcccagaatgctatagcattgcttcaacatttctgcccaattttcagcttttgctcaaacttctcctttgcatcacttcctttttcctagcaaattgattcttctttcccacaacaaataagcaacatttaattgaaacaaacaaatttaacaccataatttttacaagactcaaatgttagcttcctaactagaaatcaaactaaaactactcaaaattaagcaactaaacacatttcattactctcc

SEQ ID NO: 157898 - DNA, 570 bp, Cannabis sativa
tagaagaacctttgtgaaaccaattgtctcaactgaattaaagttataagaaaatataattacaatggcataaagaagctcaaacactttatattgtggaatcaaatgatttaaaacataatatcaatatagatggaaacgaagaatattcataattgctaaacctgttattaaaccatttaaacaaaaaaaaatctcagctgaaagtacaataatactgaaagcatggtgagaagagaaaaaaaattataaaaactaaccaagtcaaatgatatgttgttgtgtatcaaagaaggacaaaaatgacctgcaatggtaaagaaaggcataaccataagcaaggctggaacatttccatgctagaaatcctgtaaagaaattagaccaactaattactttgaataaatagaaaaaaagtgaatgctgtagttaaaaacatcaagaaaaaagtttaagagagcaaccttaaaataaataaaaaatacaaacatgatcaaagtcagaaaggaaagcaagaaagtagggctgaacattttcagcgagtttgatccgaacccgagcaacccgccc

SEQ ID NO: 157899 - DNA, 642 bp, Cannabis sativa
aaggccccggctaatggaccagccatcacattcacagaagaggacgctaagacagtgcactttcctcaccatgaccctttggtcatagagactcccattcccaataagatcgtggcgagagtcttgatcgacaacgggagttctgtgaatctgttattcaaaggggccttcactgcaataggcctaacggaccgagaacttttcccaagtggttcccaactcacagggtttaatggaacaacacttatcccgatgggaaaagtgaggctcccagtcaccttgtgcctggacacaccccaaagcactttcaaatactgcacgtttgtggtggtggactgcccaacagcgtataatacaatcctcggccgaccggccctggtagattttggtgcagtcacgtcaatacggcacttgtgcctgaaattccctactcaagaagctggggtagggaccgtgagaggaaaccaaggggaggctaggcagtgttacaacgttgcttcccacctacccgtcttgatggtccgagaaattatatagccagaaatggcagaagaagacgagttggatccccgcgtgggatctgaaaaaattgtagaaccaatggaggacgtcgaggaagtgtcggtgtgcgacctcgactcc

SEQ ID NO: 157900 - DNA, 508 bp, Cannabis sativa
cctggacaaaagtcgggtgcaaaggtttcacagatagtgacattgcgcataaaagaaaaggaaagaggagggacagaaaatcaagaaagaaaaagtcttctctataccctcgaaggtcatcacagagagaataagtgagccttcacaaaaaataacaataatgtgtaacaagagtgaccctaacaccagagaagggaaatctagacttattacataaaaactcaaggtgaaacattcccagaaacttcaaacaccaagcccagaaaaaaaaataataaggcatgccatgaacacaaacagtaaagtgagggatgcgagaaacttacatgaagtgttggaactgggggttgctgttgatcgacgaaaaaaagtggactgacagtaacgaacaagggttagcgaaaaaatctgtaaagtgtttgaaggtttttagatctgaggatttctttctctctggaaaactcgaagaaagttggcgaaaaaaggaaagtaaccaaatgaaggaaag

SEQ ID NO: 157901 - DNA, 501 bp, Cannabis sativa
ttgaatcattctcatttttattttaaagggtacgatttgatagttgtcaaaatttgaggagtaaagttgctaatttacaaagacactcgaacatttaaacgtaataatagaacagttcttaatagaaagactaaatttctataaatgttaaagtttagaagattcttaagaagtcatatattttaaaagacaaaatcaatattgttaaaagttcagaagataaaattgctaattattgaaaaacaaataataaaaatatctacgctatgtaagttattacaatttaaacttttaagcattgaacaaatcaaattgttgattttaccaaattgttcccctagatgcctttaaaaattctactaaattattaaaattattagatttaaaaactttcttccaatatgatactgtagcccataggaaaccggattatatctttttatgtgaaactttgtgtcgtaaggatgtgttggagcgagttcgagctaagttgaagtttga

SEQ ID NO: 157902 - DNA, 551 bp, Cannabis sativa
tcaaggaaagactggttaagaaagttagatgatgcactgtgggcgtatagaacagcatttaagacaccgatcgggatgtcaccatatcggttagtatttggaaaggcttgtcatcttccagtagaattagaacataaggcctattgggctatgaagactctcaacatggatttgaaggttgcaggagagaaaagattactacaattggatgaattggaggagtttcggaatgaggcttatgagaatgccaagatttacaaggagagaactaaaaagtggcatgaccgaagcttagtcaggaaggagtttcaacctgggcagcaagtcttactttttaattcaaggttgaaattgtttcctggtaaggtaaagtcaaggtggtcagggccatttacagtggtcaaagtgtttccttttggagctgtggaactgaaaggtgaaagtctcgagactttcaaagttaacaggcagcggttaaagctctacttgggaggtcaatttgagcaagccaagtccgccatgattccggcaccactatgaagaactcggtc

SEQ ID NO: 157903 - DNA, 646 bp, Cannabis sativa
tgactcaactaataggtgaaaaatgaagggcaagtggaccatgacttggatttccagttagggtaaactttagtaccctaattggggagcaaaagagaagggggataaatagaaaaaggtggttgcactttgaaaagagaaggctagtattaaatttcagagaaaaaaatctaagtacagaaaaaagagaaagaagagaagaagaagactaaaagaaggagaggaaggcaacctacaaagaaaagatttgagcttccaactcatttctcttgctctcctcttccattttgtatcattttctactctttaatactctcttaaactccatgagcatgtcattttctggttctgagtttttagtttcagctatgaactagaatctttgagatttgggtggttatgaacccttgtatggactagtactttgattttgcaatgattaagtaatcttgtcttttttcaattagttgtgatgaaatatttattgaatgttaatttttggccagctttaacatttagcaagctagatcttacttggaaaagcaagaccctcattgaacccctctaattgatgcatgatttttaccttttttttaggtattaattagtagtgaaataggcatattttgctaccatgcataactaa

SEQ ID NO: 157904 - DNA, 528 bp, Cannabis sativa
gtctgggtcccgggtctgggtctgagtccgagtcctagtctcggtccgacaacggggcccaagtctgagtcgggtcccaggtccaggttcgggtttggatctggggtgggttcagtctaggtctgggtcctaggtcccaaggggtccgagtctggatcttaagtcccaggtcccagtctgagtcacaagtctcaatctaggtcttgggtcccgtgtccgagttcgggtttagatcctgggtttggatcccgagcgagtttggtctgggtccgagttccaggtcccaaggggtccggatctaagttcagggttcgagtcttgaattaagattttcttaatatattgaaatcggattggatcaaatctgattcagaaaaaaattaggcgggacgaagtgaatttgattcaagatccaataagtatccaaacgttttgaattagaagtgatccgtcgaatcgaaattcccgacccgctccaactaaatggatctttttgacatccttaaataaaataaataataataaagt

SEQ ID NO: 157905 - DNA, 546 bp, Cannabis sativa
attaagcgatttaaaaattatttagatattaaaaatttaattttgtaaaaactaaattttaagggaacaaacttgagtctattttgtttttctcaaaaaatgaagatttgtttaagtaagcataatattttttgagtttaatttctatttttttttaaataatattatatttttattgaatttttaataaatttttctttatttgtgaagatatgagtttataaatataaataagtttgatttttcttcaaaaaatcttagtttgtttaaattatttattggattctcattaattttaatttgattttttaaaatacgtgtttataaataaaataaagtttgaaaatatttttttaggaataatttaggtttttttttacgtaaagttaatatttgtattattttttttagaattaatagaatattataatttttaaaattatttatttttaaggggacaaaattttgtattggtgaaagtttacggggtaaaaatgttaatttttaacgttaaaagaaataaaatctaacagaatgggcataatt

SEQ ID NO: 157906 - DNA, 615 bp, Cannabis sativa
ttccaatttcttaaaattaacaattcttattttcattttaaattctccaattagtttaaattaacaatattatttatcatttcaagtttcgaatttgttgaaataatatttttttttttatcattctaaagtttccaattagttaaaattaatttccaatttaatttttaacattttaaatttactaacttattcaatttaccattttttttttaatttttttaattaaagtctatattaaaatgttactaatttaccaagttactatttttttttataattaaactctaaactaaaatgttaccaatttaccaagttactatgaaagtcaccttttggccgaccagattatgcctagattctggccggccatacaagttcacccttgctggcctataggcttctcttggctggccaaacatgttggtacaactccttgatgactcacttcactcctttcggttgatgcttgacggttttaccatatcttgtatggagaccttatcttgctactggcaaagatgtattccatacgtagtcttggctcatgtggacatgccacgtcaggcagacaaaatttagaagggtatataccattttagaccatatgttttg

SEQ ID NO: 157907 - DNA, 540 bp, Cannabis sativa
ccaaaaataaactcaaaaaataaaatggcgaaccttggttgcagaagatcagtaaacgtcagattgagtagaggtagcgcaaagcaataaacgataccacccagatcgacgccggaaaacaaagaacgtccctgaaaaactagatcaacaatggtagtaccagtctttcgaaaaggcggtggctttaaacctttctccgaaagcatagcgtttctcatcaaggatttcttggtaatccacatcaggcttaacaaggcctcgctggtgcacggacgaacccgtacgattcgtacctgaagcgtatttgtttcggtacacgaagatggagatagcaggatatatgatgaagaagacgaagattatgatgatgagtcttcgatccgaagaggttgaaccctcataatagtagaagcgtaagtgtctcaatatttgattacattaatggcacgtttactatacagtaatcagaatcggaataaattaatggagaaatgtaacggaataaatgaaaaataatcggaatcaatatttgtaatatgt

SEQ ID NO: 157908 - DNA, 513 bp, Cannabis sativa
aggtcttaggcgaggaatcaatgtatgaactgatacttagtgtacaacgagaaaacatatatcgctaaaggagaatagcgaggcaccagagaaaagtaatacataccctaacttgtaataagcaaactaagtgtaaaagtcaaatcaactcgaagagcaaggatgcgagatgactatctcgctacgaggaagctccctatagtccatccaactaacaggagtgaggctcataaccctggcaagtaagaagatttccatatacccccaatcgacgtaaagcatatcaagtcgacctcaaaaagaaggatggttctagctcgccattggaatctcttcagtctagtttctatcgagacatctctagattcaactattaaagacgtgtttaaaacacgatctttctgacccagtaaaagcgggaaaattacaggtaaatgattttcaacatcatacaccgcatttacatttcataatatgtaatcagatcccacgatttaagagataatgactgta

SEQ ID NO: 157909 - DNA, 704 bp, Cannabis sativa
atccaatgtttttagacctatccagatccgatccaattttatattggatgttagattttatcatctaatctgattcaattaattttaatcatccaattggatgttggattgatagatgttggattggatcggttttatccgttggatacattttatatatatttattggtttaatttgggtttattcaatattttagacatagtattttttggatcggatcggatccatccaatattttaggttcaatatatattggattggattggattggatccatctaatccaagaaaaaaagagtaaaattttaatattaattttttttatatatacatatatatctaacgtataacaatataaaatttaattactcatcaaactaaatgaaaatactaataagttcgattcgatgttggatgtattagatttttggacacctcatccaacatctaatccaatccaattggatattcaaaaatatcatctgatctgatcacaattggatattcaaaaatatcatctgatccgatcacaattggatatccaatgtttagcggtctgttgtaattggatcggtcggttgtcattggattggatcgatttatgcacacccctaacctaaactgtaaaataaaaaaattaaaaaattaaaatcaccacaaccaccacaataacctaatatcacaaactaatattttcctcctca

SEQ ID NO: 157910 - DNA, 851 bp, Cannabis sativa
  modified_base (55)..(57): a, c, t, g, unknown or other
atttttcttagaacttaaaaatagaattaataattaagttgattttattcaagannnttaattatttatttctatttcaagaaatttaattaaatagtggaatatatttaagttgaaagatagtttattaattaattttagatcaacctaaattcgaatatttttcttagatatttaattaaaattcatatttaagttgattttattcaatatgcttaattatttatttctattttgataaattaattaaatagaaaattatatttaagttaaaaatttgttaatttcaaaccagcttaaattagaataattttcagaatatatatttattttattttaataatcaattttttctcacataaattttgaaatacatttattttaaatgtagatattttgaaaattttcaattttgaaaaatagattaaagttaaaaattaatttaattaattttagatcaacttaaatcaagtaattttcataatgttttattaaaataaataaaataaaaatatattatattagaaaattaataattagtttatgaatatctagatagatattttctaggacttttgatatatttctagttatatttaattaaataaaaaaatttaatgtttcagttgattagttcaagacacttaaatatttgattttttttaattaaatatgaatattatatttatgttaaaaattaatttaattattaattttagattaacatcaattagaataattttttccagatttattttaatttattttaatgtataatttcaaaaatgtattattttttaaatacagtggattttaaatttaaattagatatatatatttatagaaaatta

SEQ ID NO: 157911 - DNA, 557 bp, Cannabis sativa
  modified_base (486)..(506): a, c, t, g, unknown or other
cgattttatcgtccagccactattgccttgctcgagttattatatctctaaagacggtagaagtgtgggactcacttgctgatgaaaaatctccagttcaacaatctaataagattaaaaaaatagtaagtattgaattcattgtatggaaaatgacagatttataattttattacttaatttatgtattgtaaacaattttgcagctgcgcaatctagatttggcaatggcgaaccagattaaaaaaagaccgtcaacttttagcttcgctagtttttgcatctgtcgtgctcaaaacgttccaagacaaccgaattcgtttgattgtggagtgtttgttgcattgtttatgatacataggtgtagacttgataaaagatctttcgaggtagttgatatctttaattaatagtgtaaatttaattatattttattacatatcgtattgaccaaatttctttctgttatcccaaaattggcactcnnnnnnnnnnnnnnnnnnnnngtgacacgtggactctacttagagcatctggtcggatcaacatgccgagca

SEQ ID NO: 157912 - DNA, 525 bp, Cannabis sativa
tacaaacacctcagccaagtaacaatgaaaataagccgacctagaagctacatgtagatgggtcacctacagatcaactatctggtgtaggaattcccttgtcacgacttgggggcaacacctgcacgctgtagtcaagtttggatttaaagcatctaataacaaagctgagtacgaaactctaatttccggactaaaactagcacgaaagatgaaagccgaacacattgaaatctgtagtgattcacatcttgtggtaaatcacgtaaccggagaatacgaggcttggggagaaaagatgatagaatatctgagcaaaatacatgatctactcgcacaattcaatagccacggtctctaacaaattccaagggaagaaaacacaactgtagacacgttagctcgattgttaagcagcaaggtaagtgacaaggcaaacttggttcttatccagttcctccaagagcctagcatcactggcacagaagaaatcaaaatgattgacacttccccaaactggatgac

SEQ ID NO: 157913 - DNA, 688 bp, Cannabis sativa
tttatgaaaccgaaaagctattttgtgtgaaagctgaattgattttaacgtaagtattattacaatgtgatttattaattactcatatgttccatgattttttttcctttggttccgcatttttgtggtagtattagttagaaaaagttataagggcaaaattatttgcgtagttataagcttttttttcctgaaaacttagggagatcaatacaaggtttttgccaaaaaattgcgtagaagaataaagtaacttccaagcaagctcaaaaaattgtatgtgtacttgaacttttctctgtttttgttttttgtttttttctgttttttttaaatgatatttgaatttgagctccaatggttgggtcatgggtgtgggagtttgagagtaatgtaagattcaaataatggtctatagttttcagtattggagtaagattataattcattaaagggattacctcttgggttgattaaagagattcaggtcatgaaaggtgataatagtacaattagaaatgacctgctatctatcctttggtacttttaactttatttcattttgtgccccagtgtaccattatctttgcttccttgaaattgcacatgcccattttattgataaatgattcttatattgagaaaattattgtgcagatttttattttgttagagacaagacaatgat

SEQ ID NO: 157914 - DNA, 1629 bp, Cannabis sativa
atagatttatttcttcaagtacttacagataaatccattcttgaacattaagtgtgtaactagctggcggtttttttcatttcccattttggtcttcatacaactatgttgactcaaaaatctagactagacttttaagccacacccgcttgctagattgacaagaataaaaagtagttaagtaattataagagagacgcaacaaatttatagtagttcactccctgtgttgtgacagtaatggagctacatctacttcgagtttttatttctcacaagatggtattacagaaaaagactaagtgtcagaagctccaatatctagagagagaaactagagagagaagctctgaccttctgggtagttttctgaaagtgaaaatgagctaagggaactctttttttataggtaaaggaggcccacaaaaaaaggaaaaaaatacaaattagatatttttaaccgtaaatgatgatctaacagtaagaattagcttctggtggtgatggccattttttggagcctagtgtgactcgctgcgggtaacctggaccttatttttataactcctttaggggtaaaatttggtgttgatagctttagaattgcaattggagtacgagacatgacttgataaagaattgaattagcttcagaatgcaagtttaatagcgtaaatcagatcaatattaagtgagttatgactattttactgaaggcagtacatgacccattgcccaggttgacatatgacatcaacctagatgttgggtaagtgtaaaaacgtctaggagatgtactttaagatgcctatttgatattttgacattatttagtctgtttctatgttcaggcgaagctggttaccagttctcgaagatgttgctgttctacagaattgagagactcgaacctcttcatttccgagtgagtttcccatgttggacatgagaaatgcaaggtattaattttgacttctctaacttcatggatcttagttattgtgagaaactcagtgaacggtcgaaacaaaatcagaattagataagcagaacccagcgcaccaggatatttttcaatctgggcattgggtactcattcccaagctcctggaatcttgttttaatacttccaaggttcttgaacttgaggacgaggtctcctaccccatttttgaccatattttgtattcattggtctaatcaaatttggcattgagcaatcaaaagtagcacaccaagttgattgtcaacctggacactaggcccaacaccacgtcaacctgggtgctgggccctatttctaggggatcgggtttgtggttttcttcctaagtttgcttgaatcttcattatttttgataatggaaaaaaaatcctggaacactttttcatgaatttgattggaaacagcccaagttgacaatatgtcaacttgggcattgggcctagtgtgaaatgttaacctgggttgggccagtgccaggtgtcaatctgggtgttgggtcccaattatggcacttcagaagttctgtttggtcctcataaatagttgaatctcaattttttttgaagatagaagatgctcgaaagagttcttgaaaaatatcatcgaaatcggcccaggttgac

SEQ ID NO: 157915 - DNA, 728 bp, Cannabis sativa
gaattcaaataaatcatcacaaattaataatttagaattaataaataaattccataattaaaccctaattaactgctaatgtccaaatttaagctaagcgttctttacaactatcccccacttaaaaggatttcttcctcaaaatcgaacctgaataactttggatattgagctctcatgtctgattctaactcccaggtggcttcctccaccttgttatttctccagagcactttgactagagctatggtcttgttccgaagaaccttatcttttttgtcaaggatctgaactggttgttcttcataagacatatctgattgcagcttaagactctcataactaagtacatgagctgggtctgaaacgtattttctcagcatagagacatgaaatacgttgtgaattactgaaagagctggaggcaaagctaattgatacgccacttgtccaaccttctggagaatctcggaaggtcctataaatctagggcattacttgcctcttttcccgaaacgtttgatccccttcattggagaaactcgtaagaacacatgatcccctacttggaactcaacatttctgcgtttcgcatctgcataactcttttgccttgtttgagaagcaagcattatagctttaatcttctcaattgcctcattggtctgttgcacagattcaggacctaggtatttcttttcccctgtctcatcccaatggatgggaga

SEQ ID NO: 157916 - DNA, 701 bp, Cannabis sativa
gtgatttatcaacatttcctcttcaataatcatgagatagtaaaaactcagacgctcataccaagctcggggtgcttgtttcaagccatacaatgccttgtttaacttataaacatgatcaagaaggtagggatcctcaaccactctatttcgttaaggagttttaggagcagaaaaattcatgaaaaatactataagatttacaaaattcatcatacatagtattttcagaatcttttctatgatcactcttaaaacgaactatcttaccaatgctgcaatctttttgaactttcaatttcaagcaaagaaacttaaaagtatcaaaagtatcaaatttttctctacaaaattcaacccataaaaaccaagagaaatcatctacacacagaaaaatatcttttcccattcaaactttcaacctgaattggacccatcagatccatgtgaagaatttcaagaactctaaaagtattcacatcaggtacacttctgtgagatatttttggttgattgtcaaactgacacgttccacatttgcctacatcttctttacccaatttaggtaatcctcgaacaatcactacattggataattcttttagatttttgtaatgaatgtgtccaagtttttcatgccataaatcagtagttttatcaatagcagagtgacaagtagcataggtagtgatggtgtaata

SEQ ID NO: 157917 - DNA, 522 bp, Cannabis sativa
ggctttctaagctttcatggtatcggagctctcttgactcacgtccatggcttcttccggcgacaactcgtccccagtcggtgttactgatcctcagcccactccgcactcaaatgctgctgctcctgctcaatggaatccgttttcaaactccttgacttcatctctcaccatcaagctcgatcgagccaactacctcgcctggaaatcccaggttgtccctacggtcattggtcatgaccttgacgacatcttgttcaccaacgttgctccccctcgcactctcgtcaatcgcaaccccaatccgatgtatcttcaatggcgcaagaaagaccaactgcttctctcttgccttcggtcctctatgactgaagcaattcttggtactgtgtcgaattatacttcatccaattctgtatgggttgctcttgaacaaaagtttgcaagtcagtccaaagctagattacttcaactcaagagtcaattatccaatctttacaaaggtaatctcagcatctctga

SEQ ID NO: 157918 - DNA, 554 bp, Cannabis sativa
attactaaaacaaatattttgattacttattatattttttaatatatactaatttatatttttctattttatttatttaaattaaatattataaagtttaaaatttaaaatattttttcatacttttgacattttatgatacatattatttaataaatttttatttaatttatttaaattaaaaattacattatttaactatctaccaaaatttgggcatcataacggcttaaaaagtgtaaacccaaaattttcaaaatctatgaatatagcacaaacaaattttccataacaacatatgaaaaacaataaatcacaccaccgatcagactgcaatattttatcgcagaacctacttcactaacatgtataggcatactaacttataacaaaactattaaatttacaatactaatatataaagaagaaaaaaaacaaacctggagcaatccaaaagtgacaacaacaagcaggaagcggtgcttcgggccggtaaacgggaccgaatttcataaaaataaaatccaattaaatatcaacatacatatacacac

SEQ ID NO: 157919 - DNA, 541 bp, Cannabis sativa
ttttttttattgtctaaatttccaagtaatatgagtcagtataaaagcaaccacacaatttaaaaattatggccatgcataaatatttatttttctcataaatatattatatatatagcttcctctatttttttgtaaaaaaattttgatttctcatctactaatataggtttattttttttaagtggatcaatatttttgtttaataatttttctctgtcaacgaaattcgtagtagtactctttttttttttttaataattgttcttatttttatcataacttttgtctaaaaataaaatttttgtaatatttattaacacgacaattaattatctctgtttataattaaataagaaagttaaaattttagattttagtaaaaccaacataattgtctcattttgttttgagtaaattacagcataaataactaatgttttagattttatacacttaaataccttatctttatttttggaggaaaaaatgcctaatgttacaattttcttacactcattactactacttccgttaactc

SEQ ID NO: 157920 - DNA, 643 bp, Cannabis sativa
tgggtaagtttagaaccttatttcctagtggaatatatattagagaaaataaaataccggcattatgcggggttatggaattcaaccattttacccctagtcttggaaaatacctaagttataacgtaaagggcattttagtcaattgattaggggaaatgttttgtggctgccctaggaagtgacacatggccatttaatttcagcaaaggatttattagaaaatcctttattcaattagaggaaaatagaagaaataaaccaaaaaatcaaagaaaccctctctttcccttctccctcttcaaaccagccaagacgaaggagattcattgctgaattttgtgttttcaacaaggattggaggaagattcaatcaaggtaaaccctagttactttctagctatgtttttctcaacattttagttagtttcaagtagtgattttgtgaaatgggggctgttagtgttagaaatgcttagggttcagattttatgttaattttaggttgattctaaattctgattgttggttttgctgagttgtgatggaattgcataagtttgaacttagaaacccaagctttgatctttaatggcataatttgattcagtgacttttcctgtgaattactggttggaatata

SEQ ID NO: 157921 - DNA, 698 bp, Cannabis sativa
agagcgtggatatcataatctgatcaaattccatggtgaacacaagaagaactcttgtcgcaccatctgcatctttgggtctccttgaagacccgaaaatggcagatctaagcactccaattctagtcacaactggaatccccatgactactacatatgtggtgaatcctattaccacaataggcactacaagcctagccaatacagctggccaaattgatatgagcaccctagtggatccaagtggcaagcccgtgcctccacctcccactgaaggaaggacccaggggtgacaaccccctggaatgacaactagatctcaactccgattttacggtagagagacaagtccgggagttagtgagccagcaattggcaagcctcacctggacctaggagaagaccttgagttggccagacacaaggaagctgtaggccacctaactgaagaaccacgcactgttgattgcgttgttttcgctcaggagagatgcaaattcctgagatggatggatgaataggagcacagccttcgatctcaccaggtagagttagatcgtcggaactgggaggccaataatctaataagacggttcaattgatagaagaggcaaggatctccttagagatccactttaaggaagactgccgccaagttcttcaaaaactaggacagatctttgttggaaattatttta

SEQ ID NO: 157922 - DNA, 607 bp, Cannabis sativa
attagtttttccttcctaatatgtttaacatatgactatgctctctaattagtagatgatgagtgtatgcatatggtttgatattataccttagagtttctttgagtctaaaaattgggtcatggtgatcacttccccaaagtttgaaagtgacaaaaaggtcctccctttctactcttctatccaaaattgcttctcttaaagtatttcccatagctggttcagacccttatatctttgcagtgtcaaaatgcttgtaacctatctgcaattaaattatatgcaatatatccaattagcatcaagaacaaaaaaaaaaaagctaatataatgctcttattagtacttaagtactactagtttgattgcgtgatagtaatactcatataagtatatataccagtgctagtgtatatatatatatatatgtaccttgagagccatatgaatggctgattttgttgttttcgtattattttggaaggaataagtacctaagccagatgcattgttactaattttatataagttttaaaaatgttattttaactttttttgtattatgtatttactattatatagaattattctaaaatttgataataca

SEQ ID NO: 157923 - DNA, 672 bp, Cannabis sativa
tataacgaggcagtcaaaagtgccaagcgaaaagaatttacccacctgactcagaaagaaaatatgagtgttactaagtatataactcactttgatcgcttggcgaagttggcctcggtaattgtgccaatcgatttaagtaaaaaggagaaatatacggatggattaaatgcgaagattagacgtgatttaatgattatgactgacgacaaaacaacctctgctgaaatggtggataaggcactgggagctgagggcgcagttggattcatgacagagtctattgggactctagtggttggcgggctcctacccctcgtgcattaagttttagcaggggtggtagtggttcggccatggatcataaaaggaaagcatccactgcaaccgtatgctcaggtcagaacaagaggttccgagggaaccagggacgaggcaatagccagggtagttctgaaacccgatacacttacccagagtgccccaattgtaaaaggcatcatctgggggagtgtagagggcaagggtgcttcagtgtggcatgccagggcgttacaagagggattgccttcaactcaaaaccgaagcaccgaaggctccagcgaaacccactccagcaagggtgttcgccataactcaagctaatgaagaagccagcccttcaatggtgac

SEQ ID NO: 157924 - DNA, 676 bp, Cannabis sativa
tggattggatttttgtcgaacgttccctttgcaccttactcaattcctacaatgccaaaatatatatatatataattagatacatgtacttgtattgaagagtttatcttagtacagatataattaacgtacctgaaatttagaacttagttaactttcaacaaatttcaaccaatcagtaaggtcgatttccggatgctttccagggacctgtgccagtcgttgcacatccttctcttctaatgcgggcattatattgtcttttgtcattttatttttgaagtctttcattaacttcccagcaaggatcagacaatcatgtttgaactcatccgacactataaaacccgtctagtttgaaggaaaacaaacatgattagagttaacatctgaattaatcaaaaacaaatcaaaattctcacaaataactgcttacctgtatatctttccacactttatttttttagtgtaggcttgacttctttctaatttttataggacaaccctatcatctgacggcatctaactcctaaagttgatactagctcggagcaatttttaccacagtactgtcatttgtcattcacctcgagtgccactctttttccttggtccatcagcttggatatttcattcatctgagtagctcctcgtgtaggtatcggcctaggacact

SEQ ID NO: 157925 - DNA, 715 bp, Cannabis sativa
  modified_base (32)..(34): a, c, t, g, unknown or other
actttataagtgtttatttcatcgttttagannnttcatatttagggtgttaataaatgtacttgtgagtagatctaagatccttgtaaattaatttccaacagtcttcgaactgaggtttgtttaccgtttctttttggtttcctcctttttctagattttgctgtattttttattttcttggttttgtgtatttggtttgtgctattctaggttttccattttagcattacgtttagttttgtttggatttttagggcttcaatttgtcttgatcaattttatttgttcttttgatgggttttgcattttagttagtttagtcttaattttgtttcattttgttgtcttttttgttctgtttgtgttttccaattttttaaatattttttaattttgtttcattttgttgtcttttttgttctgtttgtgttttcatagttttttaatagtgtaatccgtttacgtatgttgtttattgggaatattatttggtctagttgtttcctgttcatttttaggtaatcaatgggtaacagtttgattttagatcattgtagtttatgttcgtagagttgtttttgtttttcagtttgtttttcagttttttttttatagttttattatagtttggatacatgtatatgctatttgtttatatttgccatgtgtgttaaattgcaggtctgggattacaaattcagtccctttgatt

SEQ ID NO: 157926 - DNA, 509 bp, Cannabis sativa
agttaagggtgcatccccttttaagggggtgcattgtagaatcacccaaaaatatatacttcctatatcttaaaatgtttacattgaagtgtaaatcactgaaattatttttaaatttggaaagaaaatagaaaaaaaaaaaaaaaaagaaagagaatagagtaaaaaaatgtagaattagacggtgaaagagaaggaaaagagaaaaataataggtttttcttttacagcagaggtcaagcggttttgaaacatgctcaacaaataaaaatgttattaacatttaaaaaaaaacactaaattaaatggccacatcattcttaaaaattaaacctaaaataagatatcaactataaaattataaaggaaaaattaccatagaaccttttccctaaaaaatatcatggaaccaaagcactctaatttcttcctcataattataagagaaacatatataaattataggaaaattctacaatacacctccttaaaatggatatattgatgca

SEQ ID NO: 157927 - DNA, 719 bp, Cannabis sativa
tggacattatgaatttctggttatctcttttggactaaccaatgctcccgcagctttcatggatctgatgattagggtattcaaggaatttctcaatatttgtgttattgtatttattgacgacatccttgtgtactctcaatcaaaagaggagcatgagcaacatctccagatggttctgcaacgacttcgagaacataagttatatgccgaattcaagaagtgcgaatttcggctatctcaggtgtctttccttgggcacattgttagcaaagacgagatcaaggtggatctaggaaagatagaatccattaaggattggccgagaccgaaaacagtgatagaaaatagaagcttcctgggtttggctggttattatcatcggttcgtagaagcgttttctaaaatttctacacctttaaccgagcttaccaaaaagaatcaacattttgtatggatggataagtgtgaagtaagttttcaagagctgaaacaaaggttaatcacatctccaatgttaaccctaccttctgataaggagaagttcgtggtgtattgtgatgcatccaaacaaggtctgggtgtgtactcatgcaggccgatcaggttattgtctatgcctcccgttagttgaaagattatgaacagcggtacccaactcatgacctagaacttgccgcagtagtgtttactttgaagatatggcgacattatctcta

SEQ ID NO: 157928 - DNA, 715 bp, Cannabis sativa
ttatcacactatataaccagtaatcccattcacattcacatatgcctgtatgacacagacctgcatgttacgctcacatgtcgttttatatctacgtagcgtaaacctacgtgttgcgctcacatgtctaattaaaataaggccttagaacggttcctctcggttctaattaccgagtctaacctagttatgccttgaatacataaccctaaatcttacatatttatataatcatatatatatcatggcatagcattcatacaacatatatcactagggtaataaccctaggaaattaaaccgctcatgttaggataataaccctaattccagttactgattactcacaaatatcattttcaatataagcgccatcgcacataattctacgtgctaactactatcttacctgatgtcccgcaataacagagattccaaatccccgggtgctcctgaccaggtgccggtaatcgtagtcacaaataccaggattttacacaacaagggttaacccttgattgcacattcatccattttatttatggcatttaaaattcaaataatcacatagatcttggaacgaactttccaacggtatgaagagtgtcccaaacggattctcgagtcaaaagttatggcaagaataaaaactcaaaaaaattaataaactgccattatcatggtcgcgacaagacctatgatagtcgcgaccact

SEQ ID NO: 157929 - DNA, 598 bp, Cannabis sativa
  modified_base (39)..(50): a, c, t, g, unknown or other
tacatatttgtgattataataaactagattataacattnnnnnnnnnnnnataatagattttaacaactcacagtactttgaaatttataatttaccaaacacgtagctcaacttttttccacagtacttttgctacaactgttttttctcacaacacatgtacaactgttttttcccacagcacagctgtaccaaactgacccttaatggattttcgtcgttgcataatgtcggcagcaattaactcttctctttacatacatctaagttcgatctcattatatattacacacacaaatttgatttgatataataaatatatcatatatatttctgtttcaaactcaatctaaaaaaaatgaatatatatatatatatatatattatatgtactgatgttaaaatgtacgtataattaatttttttttaattagattcaataaaatgatatatattaagtaaaatacatgtatgtttaatttttttaattaggtaatgtattttgtttttaattttcgaaatggagtttgagattttgattttaagaattttttttagctattaattgctacattggtgtgtcatttaaatgtgatt

SEQ ID NO: 157930 - DNA, 576 bp, Cannabis sativa
agtccaataaataatataatacgtgtcaatctcaattatgattaatttttttatttaattaaaaaaaattcatttttacattatataggctgagattgatccatcaattgaaaaaaaaattaaaaaaaaaaagtttttcaacaaaaagtgataaaaaaaaattgtatttgacttaaatatttttcatataaatatatttttatatagtgtaaaaaagaaatatttttcaatattttctttaattaagtaactaaattaaacataaaaatttaaattaatatttatagtttaaatttatttattaactattaattgataatactcattaagtattccatatacatgaaaaattaaagcacgatttaaggacaaatatgaaaatagactacaggttagtttggcacagctgtgctatgagaaaaaacagttgtgctgtgaaaagaaatagctgtagcaaaactgtgaaaaaaaaagctaagttgatagtgtttggtaaattataaatttcaaagtattgtgagttgttaagatctattataatgataatgatagtattataatctaatttattataat

SEQ ID NO: 157931 - DNA, 652 bp, Cannabis sativa
cgacaacgggtttggtccaagccccgtgtccagatttgggtcacggtctcgggtccctatctagttccacttcaggtcccaggtctcggtctgggtcttaggttagggtccgtgtcgtgggtctcaatcctagctctcatgcccgtgtcccgagtccaagtctgagtcttaggtctcgatctgagtccaggacctagtcggggttcaagtcttggtccgagttcgggttcgggatccgatcttggtctgggtctagatctgggtttgagtctatgtccaggttcgggtccaagtctcgagttttgatttccgatcagggtctgggttctaaggcccatgtctaagtccccaatccaggtccgggtcctaggtcccgatttgggtccatgttcaggtttagctcctagtgccaatttgtatttcgattcagtgtctgggttcgggttatggtccaggtctgtgttttggtggaagtcctggtctgagtctgggtccgggtttgggtccaggttcggatcttggtctgggtctgcgtttaggtcaaggtttgagttcggatgccgagtgtgggtccaagtctgggtctgggtcacggtctcggtccagatctaggtcccgagttttgatcccgatgtgggtctgagtctgggtt

SEQ ID NO: 157932 - DNA, 566 bp, Cannabis sativa
aacattcaaaatattccctttttttaggaggtcaaaaaatggacttagaaccaaaaaaaatggagtacatacattttctttaaaacaagaccaaatacatattatatctttttggcttaatggaattatatcttttagcaaaaaaaaagaccaaatacatattatcaataaacaataattaaaaaaatatattattttataaggtaatttgtgccataaaatataaataaatacatttttattagtagtattatctaagttgtaattttaaaatttctgaagctacatgtatatcaataagaaaataacaggtaaataataatataatatttaatggtcaaataccgaaacttaaatatttatggcgcaaaatattctatgaacaaagtttttgggctcaattttttttaaataaaagttttaaggctcaattaaacataacctaattgagcatttacttaaaggtcggtttttatttttagggatttttttagaaatatactatattaggtaagtttttacaaaaataacgttaataatgtatcacacacaaaatgacgtgacac

SEQ ID NO: 157933 - DNA, 501 bp, Cannabis sativa
gaccgatattgaactttgattagggggttatcaagcccgaggcccgtatgcccctaataggcaacatcaacctgagaatccacccctaaggggtaggaatgaccaagtaccacccccggctgatggaagggttgacagtcacaatgtcggagaaaggccaagaaccgggtcagtttttgaacgggtaggcccctggggggtagagacttgcgggatgccctcaacagaaatagagacaatcgtggctccaacatagtgaacccacctgagcaagtccaaaggtaccaagcaaatggtggtgtcaatattgctcaacctcaaacagccacagatccggtgatccaggctcggttggacgagttaacccgattggtcaaggaccttaccgcacaaaaacccacagacttggatctggaaaggaggagagggtctgccttctcccaaatgatcaatgacctccctattctagcaaagttcaagatgcccacttgcaagtacacg

SEQ ID NO: 157934 - DNA, 517 bp, Cannabis sativa
aatccattccttatcatcatctaataatcctaaagcatagcacgcgactttaaaagtaggatatttgatcccatttactgttctaatattttcgtacgaagtgcatcgtttgacaaaattaagcaatattctcatatagaagcgttcaccagttgaaggacgtgcgaagtaaattcttccaatagccacaccattttttctcctagtccatattttttcttttgaattccaaacccagtatgaaggaaaatcaaagtaagttagttctcgtgcatcatcatttttcttatttgtctccaaccattcagtgaactttatttgtcttattccaagcttggaaagaacatcgtcaacataatctttttctctgaatattactgtatgctctccaggcaaatggaacggcaatctttcaattgtggttgtctataatgtatgtcaaattgaaagattctccagcaagcttcagttgctgatatatacctacagtctaaatatgttttgatttcatctattt

SEQ ID NO: 157935 - DNA, 1091 bp, Cannabis sativa
  modified_base (172)..(176): a, c, t, g, unknown or other
  modified_base (713)..(716): a, c, t, g, unknown or other
ttaaacagctggagtcccaggctctcggttcggatcttctgggccggtaggagctggaggatctgttgtttgaatgggaggtacatcaacattttagccggagaaagaagcagttgcatcgggctcaccataagccactttggaagcgcagaactcgagatacatgcctttnnnnncacccaagtaatcaaagtttgcttgagctttagccttccaaaagtcataaaagagctcaagatcggctgtctctaaggcatggactttttctcccagcctctccacctcagctgtaagctcatcctccttagacatcttctcctcttccatccgacgaatgacaactcgaagagatgtcctttcatcttgaaggctattcacttctgcagataaggtctcgaaggtcccttcaagtcggtcagaagcctcgagatccttagtcaactcagttattttcttctgagtagtaaaaagcttattgttgccttaacccagctccatcaaaactgctccaagttccaccctggcgtcatcagcgtccttccaggttaagtccacctccgccctcatggtgttggacagagccaagttcttagaagctgtagacttagctcgagagtaagtgtaggccaacttcagaccagcctgcgcagagaaaaaactttagaatctgagccaaataaagaggatgaaaggaaacagtcaagaaagacttnnnnttgtgaattccttcaagactcctcccatcagtagctccaaagaagagtcgttgtcagcaccggccagttgctcactcaccttaggaaccaaccggttcatgtagtgggcgatcatctccttgcatttcttggtctctggaagcactgacaaaggtggagtaggagcccgcatctactcgggaccacttttttctagctcggatccaccttttgattgctcaggcctgtccaagcttcctcctcgagaatccttggacttagcaacttttggagtggatgggttcgaaatagttagctcctcagaaagatcgatgacctccccaacaagcgccttttccttggaaggggtcccctcgccacccctagatttcttgg

SEQ ID NO: 157936 - DNA, 916 bp, Cannabis sativa
  modified_base (883)..(889): a, c, t, g, unknown or other
ggttttcttgaacttcaagttatgaaattatgcatgttttgagggattgagttccatagttgttgttggtgtttgaatcatgtttctgtagttagaatatgatttattaagttgagttaagaatgaattagtagttgtttgaaggttttagcaagctttgagttttagaactcaagcttgaagctttaaaggtgaaaattgtttctgagctttgattgttgttttgttgcttggaatatgtttattggagtataatatgtaggtctggaaagtttggttgagttttgaaacgattttgttaggggtttgaattttgttggttttcagggtaaaactggttaaccggttttacactgcttgtaaactcgattacttcgattttgcagcaggggggaaaacttgttttttagcttgtcgtttcgtgtcagttttaggtttctaattaggttattccctgctagtttgggatattattatattaagttgcagtagatagggttttggtttgaaaacttagtcccggttgtgatttagcgagtcacttatgtgtgttgatatcgatgtgatctaggagcctacaattcgccgagcagttgttccactcaggttgaccggcacacctgaattcagaattgaggtacgattagtataatatcttgcatatgttattacatgtttagcgtacatgttgttatgcctgataaattacattgatagcagtaatagtataaatagagttgtgctgattactgataaatgtatgttggctaaaatacttatccatgctgtcacatcaatatggctagaaaatgactagaatattgagtataggatgacattatggtcgatattattgttttatgaacgttctagactcagtacnnnnnnngacacggggattagggttatgatcagg

SEQ ID NO: 157937 - DNA, 518 bp, Cannabis sativa
aaatgtgcttgttcctcccttctttcctatcatggcaagattttgtgaaataactttgatgagaagaaaaaagaagaaaaaagaaggcgttaatgtatattaaatagttttatttaaatattgctataaagtatactaaataactaattagcaatttaaatatttataaattttactaataagttatgtgagttttttttctattattttattgtaagttatttgtttatttacaaattttgttagtttattagttatatgattttttttttcgtttagtgtaacttattattacataaatatggttatataaggaaaatattaaagtaacgtaaaagtatttttaaaaaaataatgtaacataatctaaaaaaaatatattgatttcaatgtaacaaaaatgtatataaaactagttcaaaaaaaaaaaaatgtatataaaacaattagtacataaaagtggtagcttattataatacatgacaactcaataatttcgaaaataaactttaaaatta

SEQ ID NO: 157938 - DNA, 584 bp, Cannabis sativa
ctctctctctctctcttttaattgcttgggctgctaaggctgggaattttttctttgcaattcaagtattttcagcaattctaagtgtaattcaagctaaggtacaagttctagtaaccttcttgatgtgttcttgaattttgaagaaaaataatttcatgcttggtgattttaatgttggtagctggtctgcatgtttgttgttattgtctgaagtttaaatatgtttatttaaggtgatctaagctagttttgttgttagttggtgggatttaaccatgtgtaaagttttagactcaaaactttgttttgagtggtaaaatgataaatcagttgttgtgcttattgtagttgattgttgttgttttcagaggcttaattatgcatatttgagtagattcaagcaggttttggtgcatgttagtggggtttaaccaagcttgagttttaaactcaaagcttggagctttaatggcaatttttgtatttgttcatgaagctttgtttcttgctttagatatgttcattggggtctaaatagcaggtctagaggttttggtttgatttggggttgaattgcatga

SEQ ID NO: 157939 - DNA, 720 bp, Cannabis sativa
  modified_base (415)..(418): a, c, t, g, unknown or other
ttgcatagtttattcgaatgacttaggcaaaattcctaatcctcatgaaatatattttttggtatctctaatgattacttaatcttaagcaagtattgcacattactgttaatactagattgttgtgttgatgacttagtctagaaggaacttaaaatttcagactaagataatatgtcacaacaagatatccctgaaaaacaatagtaagaggttaaatgtacttctatgtatgaattgaaccagactcctactgttgagtgggagccatctaagatgtaatcaaatgaggaacattaggagacagtcaaaaaagatttctgaaagtgacctatatgttagataatagggtgtatattagaatccttatacctacaccaactcataaccaattagagatggtggttactctggnnnngaggaattattctagaagagtgtaaaaatccatctataataatttaagctccatcagtgaagataaataactttgttgttctgaaaaacattggaaaattattcaactgaagaaagttcttactgtgttatctctattccattttggatagaattagagacaagtcttctttttattcagatacacttaataagcattaaagaatgcagtatccctagataagtaatgcatatagaaaataatgttgcataatgttttatgaacacaaaggaagtaatggtggtgtaaagcccgcttagtta

SEQ ID NO: 157940 - DNA, 553 bp, Cannabis sativa
ataggccaccctatcattacaagagacaaccataaaattaaagattctagtaatcactgttagccattgctcgactttcatgacatcaggacctcccagaaaaactagaggtgcttgcttgcggaacctttcatacaggggttccatacgactcactgtcaccactagttcggcctggatagcaggggcaaatgccactgggatttctggagcaggcactggaggagcaccctgctgtctcaaccatcgattctcatcatcttgttcattgattttggcttgcatcgctgcaaacctattttcccaattttgggcatcctgagcagtttgggcagtttgggcagactgcggcgggttaacatcaacccggccacgtgccctgcccctaggacccttacctcggccaaggatagtaaggagaatctgagctccctgaccaccactggatccaatcgaattaccttggctcctggtacttcgccttgcatccatactaatttagaacagcctgcgtaaccaagagctagtttggtcagaccgtgatcaaagaaaa

SEQ ID NO: 157941 - DNA, 533 bp, Cannabis sativa
tagggttcaaaggacgaaaataccattgcttgtacggggtctcgccgcggccatggcatcctccgccgcggtgattggagcccccaaaaacgatctctctatttttgagttatggctgcggccatggtgaatctcgccgcggccaaaactgcaccgagcctcaatttgacgttttttcttggctccacttgtcttttattgcacttttgtatcccggggcctccataactccgagaaacctgaaaacatagaaaagcgtaattctgtcctaaaacatcgaaaagcaaacataaaagtgatccagaatataggctagaaatagcctaacaaattcccccaaactggatctttactcgccctcgagtaaagctaaaactaaaacagaaataaaacaatgcattagataattaaagcttccaatgattttactacctctaccacctgcacaacttcaagcaaatcaataaccagaatttcaactcaataactctaagaattaacttggatgcacaattcagaagtaagcaattcat

SEQ ID NO: 157942 - DNA, 624 bp, Cannabis sativa
taggacacgattcaacaaatgcccttatatagttcccgactgcctgaagcaccgtagatgtcatacattgagattgaagatcatgaatttgaacccagaggtccaacgtagcgagagtgatacatcgagggttggagttgttcttcattcgtgagataattagagcttttctattgaaataccatggactgctttcaatcactcgcttaatgttaattttatggaaaaattgaaacaaaaaacgattagcatccaattcttttatgtatactcccttaccaggcttccacagagccgctagggtctgttgcattgacggaaaatccactgcccctgcagtgataaaagcacccaccagacataaacgccaatcgtacacaaactcctcttcctccttaggacccagttcttccagatcgagtccaccttctgactcttcttaaatggctatttcgaatagctgttgatcaagattactagaagatgccatcataaaaatcgtgggtaataaccaagacacagattcgaaccaacaggacaaaacacaagagacaaaactaggaaacagagcactcacaaaccatgacaaaagtcaagacttccaatttacctattaattttcat

SEQ ID NO: 157943 - DNA, 647 bp, Cannabis sativa
  modified_base (46)..(74): a, c, t, g, unknown or other
  modified_base (408)..(410): a, c, t, g, unknown or other
actcttgagatcgaacctaagcatgtcaggattaagatcatttgannnnnnnnnnnnnnnnnnnnnnnnnnnnnaatagatattatggtaaatttattgtatctagtccaagttcaacattggtcccttccaatgcatactccatgcatccaacacaagctttactttaaccaatgccttggaaaggacatagcacttacccaaggtgcaagtaaactatgttgtagattattttatcagttaaaccttgtgtactaataaatctaggaatatatttaatcacacaatcttgattactttccactttgctgacgacacaataaacaagaatatcaatgtgataaccaaaagacacaccaaataaaagatgaaattacttttgtctctttattgataattaaatgatannnattacatttaaatagagttttatttagggcacaaagcccaacaaactctcacttgcactaatataaaaaaattagtacatttcaattaatcctaaattcaatcggtgcttttcaaatgcagttcctacgaaaacttatgtgaatggatcagctaggttgtcctcagtgtccactttctccaacagtacatcccctcttgccacatactctctaatgatgtgatatttcttttctatg

SEQ ID NO: 157944 - DNA, 559 bp, Cannabis sativa
ggctaggattactgcagggtaggacgatcattacaaactttttcttcgtctctaagactgctacttacaggtatacctctcatttcatctatttaaaggtctgggtcacttggcgttctctactcttctgcctgactttgctttcttactctgaatattcctgggttatctacttatcttacttgtattgggttatggagggaattactgagaatatggctagtgtgttgtcccttactgagcaagaggctgttgttcacgaacatcttgatgatgtgggtgagggggttgaattggggaagtctttctgtcttgtttttagagtgttcacaactaggaatgtcaaacttgactggttcgaagaagccatgcgaaatgcatggattactcgtgcccctatttccttttctgagtatggtaatgggatgtttatggtggaatttgggtgtgagggggacatgaggagagtcatcgagggacagccgtggcattttgaccactgcttggtcactagtgccaatcctgctggtcttgacatccttcttcccaaccagatacg

SEQ ID NO: 157945 - DNA, 549 bp, Cannabis sativa
  modified_base (484)..(507): a, c, t, g, unknown or other
aagatcataggacgacaacaacaaaaaactgagcaacgtcggaaaagaaattctcgtttacgaagaagaagctaaaatatcaaatcagctagctcgtgatcaaagaaagtgatgtaacttttggtaagcttaattagtggcattgcaatatctttttacattttagattaattatattttaatcaatcatctaatatgtaattatttgtttgtttgtttttggattttacaaggagaaggaggcccgtgatcagccatgtctttcaagtcctgtgttttctttcataataaaaataataatagaataaaattatctttgtattaatatatgtgatacaaaataaatggtatttttattttacttgtaaagagtacttactcgttatcttaaattgtttttcttacgtaattttaattttctttgataaaaattctaaaaatatgaaatttccccttatattaatgaggaaattacactctatannnnnnnnnnnnnnnnnnnnnnnntttttaccttcttttttaaaatctatcatttttacctctttt

SEQ ID NO: 157946 - DNA, 1061 bp, Cannabis sativa
aaaccagaaaggaaactttccaaattgaaccaagatcatgaatttggacttcaaacctgccaaataaactttatttgatttggtctaataaaggcaaaaccgaaatcatccattagaaaaagagaaagtcaagttttccaaaattaaacaactttccataaagagaattccttctcttacaagaagtttcctaaaccaaaaagagaccagctgagaaggaatctttccttagaaaaaaagagtaattaaatgcacaaaatcaatgtaataaaaatagtttaaaggctcaataaaaatgctcattaattaaaaaatattttgacaactaaattgacaaacaatctccccctttgacactttagataatcaaaatattattaattaacaaacacctacaaaacaaagttaacgaaataaacataaaaactctccctgaaaagcacaacattaaaccaaaataaaaaactaactttgaccaaagatgaacacaaaaacaaacctcaactccccttggacaattgagtaaacaaacaaaattaaaatcccaaatactccccctttttagtaagggccaaagacaaaaagaaaccaagattttccaaaaattaagatctaaaaacaatcatgatcaacaaacaaataaaaaacaaagaataagtaatcaaattttaagaggaaactcatcaaaaacttaccaaataaagcacatgttaatacttacgagaagaaagacaaatgaccaaattttcttagcccaaaagtcaagtcacatgacaccttttttttaaatattattttttttcaaaaaaaaaaaacaaaaaaaaacaagagactaaaatattttatacaaaaatcaagttattctaatgcaagcatctttctacatttcataaaaaggacaaataaccatgttatgcttttaaagatgacaaaaatttagtgtctcaaatacaaaccatgcttaccagatgtcgagaaaaaatagacaagttacataaaatgtgaaccaggatttttttttttttattttagtagaggagacttacaaacttgtacacact

SEQ ID NO: 157947 - DNA, 568 bp, Cannabis sativa
caccaagtcaatatcccaagccagtgaatcagtttccataagcgctttaacattctgatcaacaagagcaggattaataaaagttacccttggattatcatcatctaagagccacggatccaacaagacattaatccgagaaccatcactaactctacacctggccccttttcgaacaatcccttgagtttcataaatgctacgccagacaaaacttggattgctacctaactctgcatttaaaattgtaccattgcggtagtacctagctttaaaaagcttactgacgagagagtccaaatgactaaaaagtctccatccttatttacaaagcaaactcaagttaaagtctctcagattttgaaatcccataccacctttagacttatgtaccgtcaatctatcccactttttccaatggatgcctttgttattttaagacgatcgccacgaaaacttacacatcaattgctccatctcattacaagttttcacagggaacaagaaaagattcattgcataactaggaagagattgggcaacagtttttatgagcaattccttccct

SEQ ID NO: 157948 - DNA, 620 bp, Cannabis sativa
cagcatcccgtgtactatgtcagcaagcgcatgataggagcggagacgcgatacccggtaatcgaaaaactagttttctgcctccttattgcctcgagaaagttgagaccgtacttccaagctcacccgatcaaggtactaaccaaccacccactccgacaagtcttacaaaagccagaggcatccgaaaggctcctcaaatggacaatggagttaagccaatttgatctacactacattttgcgcacttccataaaagggcaggcgctaccagacttcatcacggagtgcaatgaagctgacgctaccgcaaacattcccacaccactagtcccgacgtggaaggtattcgtagatggcgcctccaacgagaacgaattcggagcaggggttgcaatgatatccccaaacagacttcggctccaagcagccctacggttcgaattctcagcttctaacaatgaggcctaatacgaagcccttatagcagggctgagattagtaaaaaccgtatgggctaaaagagtagaagtctacagcgattcgcaactggtagtaaaccaggtgtcgggagaatgccagacgcgtggagaaaaaatggccgcatatgtggcgatagt

SEQ ID NO: 157949 - DNA, 516 bp, Cannabis sativa
  modified_base (464)..(465): a, c, t, g, unknown or other
gtggccattcatgaaatgggggatggatatagtgggccccttgccaacagcaccagctcagaaaaaattcatgttggccctcaccgactatttctcataatggattgaagcccaatcattcgctcaaataaaagacaaagaagtagaagggtttgtctggaaaaacataatatgcaggttcggactaccccaggaaattgtagcggacaatggctgccagttcatcagcaacaaattcagaagtttctgcgaacgatggaaaattaaactcatattctccatgccccgttatccgcagagcaatgggcaggcagagtcatcaaacaaagtcatcataaataatattaaaaagtgactcgaaagtgctaagggaagatgggcccaagaattgcccggcgtactcttggccaaccgaaccacaccacggactagtacgggtgagaccccgttctcacttgtatacnngatggaggcagttatcccgacggaaatgcaagtacctactctgcggtccga

SEQ ID NO: 157950 - DNA, 579 bp, Cannabis sativa
caaacttaaggacgacttttacagctttcgggcccaccctttgaatgagggcccggtccctttcaaccagcaaaaacacgtcaaggagtatcgccattgcttcttcttctcctcctagttccgagctgtggaacaaccggagcttctcacggagtgggttaggatccctccgtatgagcggaccgcgcctactcagctcttcctccggaaggccaagctgatcctggggcatcagccggtggaggactccaacctttccaaggttatctgcccgaacgtaagggttccggccgaggagaagaccttccaggatgagatcattgctactgcggaagagaaataccgagagtacctctaccagaaggctcaggagaaggcttacactaaggcccaggcggctgccgggatgccccttcccattgggagcccggttgagaggaggacccaggcggctgccgggagaccccttcgcattgggagcccaattgagaagagggttcccaggccaaggcctaccgtccaggtgccgaatatgggggctcctgatgccagcacttccggctctggtaagtccccttt

SEQ ID NO: 157951 - DNA, 521 bp, Cannabis sativa
tgtacgggacctctgaggttgcgtctagacttcatccgagctggttctgcctttggatggggacacgtgtcgagcgtgaccattcgagactctacgtgaagcttactgggcgtcccttcggttttcggctaataaatgctttgacaattaatatttcaaaatctgattttctctctccacggctgacgattgcactcgattacttttgatttcccatattcgtttttaaggcgggaagctgaggtgtaacaccctgactctcagggacgccacgtgtgtgctttttttttaaaaaaaatctattatcaccaatctataaattttgaaaaaaaaagtatggtttaatttaaatctttaattaaattcaaaataaagacttttattttaaatactatcgtaatataggaatcccctctatataaaagaaaaatattcttttacaatagattacatttccaaacatagaaaggaattcgatcctgcttcccagaagccaagaccccacggctgatatgtacatt

SEQ ID NO: 157952 - DNA, 607 bp, Cannabis sativa
gtcggtgtttggatttgggacccagccctggacccaaacgctaacaaggacctgaaccaacactcggacctgaacccagtcccaaacccaaagttggtcccgaacccataccgtgtgtcccaaaattggaaccaaaaccgaaagtcgaccgggactagatcaaggacatggacatgaaatcataacagaaattggacctagacccagcaccgtaacaagactaggactcggactccaaatcagacctagacccgatttgggagtcgaacctggatcccaacccaaaccgggactggggacccgaacccgaacctgaacttagacccaaacatggaaccagactagggacactgaactagggtcgggacctagaatcgcaccccagtcccgaccccaaactcaaactcaaaaatgggacatgggaactgaactagaataagaccgagaaccgtaacagtgatcctgatgttgactcgggattacggtaacgggtcctgaaacagaccactagtcggtggccagatctgggcctcatactaggactagaacccagacgaagaaccaaactcgaacccagacctagacgagggacccaaaattggaacct

SEQ ID NO: 157953 - DNA, 872 bp, Cannabis sativa
tattttattattaattattagttagtgttttattaattattgttttattttttattgttttagtaataattattaattattgttttattattaattattaattattgttctaataactagtgcagaaccggaggaagagaaagcagcctaggtggtttgatgagtacactgaaatgaaaagaagtctagggcttcgaagacacttgtgaatgcggacccacttagagtggttgatcggaagctggtcaaaacttttcacagttgggtactcggccagattgggaataagtacccgagagagtgcttctccggtagacacgattcagcttagttcctcgaactacatactctgaagacatggcttggagacgatgtaagttcttaagacttttttactttggtttttaaagacttcatctctgacatatttaattttcatgttttagcatttggatgcggcttttcatttgatgaggaggcgacaacacttttatccggaggtgtacccaaatagatgtgtcatcatgccgtgtattttcccatcaagagttattggtcggtgggaagctgtgggtgattaccacactaactttcagtgggatgatgacatattggatttgatttgaggggatgaaggtcaatacttggacagttagaagaataaggagagaatatatatggccctctacttcgatagtgcaaggcattgggtgacactagaggtagatctggatcattggttgttgcacatatttgactcgagccttgaatcgatttctccgaatgaattcaagagtcacttggcaatgtgggaaaaattactaccaactttgatgctgcaggctggcctattcgagactcatgacatgatc

SEQ ID NO: 157954 - DNA, 587 bp, Cannabis sativa
tgccttaagtttccaacgaagaatggggtcgggtgcctgagaggaaatcaacaacttgcatgggaatgttacaaccttaccctaaccaaggctaaaaaggatgtatcctctagtcagagtttggacaagggaaaagacattgccaaatagggaaccgcccaaggcggggatgaagatatggatccccgacttggggaaccaaatgcaattgttgggccagtggaagaactagaagagatttgaatcgacccaaatgtttcgactaggaaactaaaaattggaaaaggtttgatgatcgaagtaaaatcagcattgataaaatttttgagagcaaacctggacattttttcatggtcacatgaggacatggtcggaatcgatccttctataatttcacacgtcctgaatattgatcctaattttcggcctgttcaacaaaaaagaagattgttggacaaagaacgcgccctagcactaaaagaagaggtagaaaagctacgcaacaacaatttcataattaaagctttctactcaacttgggttgctaatcccgtactagtacccaagccgaacaaaaaatggtgagt

SEQ ID NO: 157955 - DNA, 692 bp, Cannabis sativa
tccggacacttgccaaataagaaagccccaagaggttttccttgacaagagtcggtgcaagaatcccaaaggtagtgacattgcaaacaaaaaaaagagaggaacagagaaagggaaaaagggcaaagccaaaaaggcaaggtctactctaagtcctaaagtggtcattacgtgggatggggatgattcctcaacagaaatgcaataaaaagaagcaatctaaacgcgaacaggaagaatttagcgcatcatacagaaactcaagcaaacccattcctagaagttcgacatccagcccagaaatcataaaaaatgctatataaacgaatagtaaacaagtatacgatctacgaggaacttacatgatgtttgaaggctaagggttggtgttgatcgccggtaaaacgaagactggcaacgtcgaaggaataagagcatgaaattaatggtgtttaaagcttttttttttctctctgaaaaaactttaagaaaatttggtgaaatgctgaaagtaaccaaatgaagtaagaaggctggcttttataggccagagtaggtgtgagacagttgtgatcaaccaccatcgtaaggtcaggatggcaaacgattcgaattctacagatccaacggttggattaaacactcatcaaggcagtagaaaacgcttgagtacccgtctgacacccatttaa

SEQ ID NO: 157956 - DNA, 744 bp, Cannabis sativa
  modified_base (717)..(718): a, c, t, g, unknown or other
ccctcttgccacatattcgctgatgatgtgatacttcctttcgatatgcttgcttctcttgtggcttagaggctccgtactgttggctatggctccagtcttatcacaaaacaaaaccaatagtttttccattccagggacgacaccgagtccagtgaagaactttctaagccagacaagttcttttgcagcctctgcagcagctatgtattctgcctccatggtttgtttagcacttctccaaaccacgtctccaccgctaagggtaaataccatcccagatgtagatttcctatcatcaagacatgcctggaaatctgaatcggtatagcctacgggatttaaagcactacccttgtagattaacacgaatttccttgtactcttcaagtacttcatgatatgcttaacaacattccaatgttcctgtcatggattggtctgttacccactcatggttcctaaagcgtaacagatgtcaggtctagtgcatagaattgcatacattaaactcccaactgcagaagcataaggaacccttctcatgttctctatctcttgaggataagtgggacactgttccttagatagacagataccaaatctagaaggcatggtttccccttttgtgttggtcattgacaatctctctaaaactttatctatgtaagttgtttgagagagagcaaggaatttgttcttccggtttctgataanntgaataccgagaacataggcagcttc

SEQ ID NO: 157957 - DNA, 568 bp, Cannabis sativa
  modified_base (509)..(512): a, c, t, g, unknown or other
ggcataaaacccaacagttatgaccctgcatgagtccgagcgcgtcacagagattttgtaattcggttgcatctccgatagtcatctggtcgttggttgcagtcaaaacagtcgtattatggatgccctggttgggtgcggaactattattcccagtctcttgcacactaggcgcaattccacctataggaagtatctcaccattccccactttgccggctgtctaggattaacagcaggcggaaccattgtgctccctgggttcggcgatgtaggatctagcgtctgtgaatttttcggatcaatcaggcctctacgagtttgcaccatcgtattggcggttggatgttgaataaagagcaatttgtgatccccctctcaatgaaagtaccaaaatgttgatttcgtttttagccaacgacactgagtctattttgtaagcgataaacgatatataataacagatataagataaaaaagacatatggattttatagaggttcagcccnnnncagttcggtaatagcctaatcctggttatttgtattgacttaagatcaaggagaaa

SEQ ID NO: 157958 - DNA, 1031 bp, Cannabis sativa
taataaattttatattccttacatttatattgaattgatatgttatatgagtttcatgttttaataagtaattaaaatattaatttgaaaaataatttattgtgccttatgtaacttacaatatttaaagcaattgaaaaaaaaatgattttaaaatatttgaaaaaagaaaaaaataactaataaaaataattagagcttaaacatgccatattaactctctaaaaactttcttttatattatataacttaccttaattgggtcattggtagtcacctcaagggttccgatcacatggatggcaccacctttaacaagaaccaagaacctttcttgaatccctttaatcactttcaagaggggctggggtgggtttcaaatccttaacccaagcaggagaggatgacagtaaaaataattcctactgttatatccaaaattcggtaagcacattagaggaagacacgtgtcgagctgggaagaacgaagaactcaaacatgcaaatgaaaagtacacttagcatggaacggcttgttggaaatataattcgcagggtatgtttataatttggcttgctcaaaagccttatgcgagacagaaacgtacaaactgctaacttatgtattgacgagaaaacatgtgggtgcacgtgtgcatgacaaggcctcaacgtcactgcgtggaagagaaacgataacactaaaaacacttagcgtatattatacgatatacaaactaactgtagatagtgtggcaagtcaagataacagacaacgaggcgtttatcttgctagaagaaggtatgcttacaaggaggatcatctcgacataagaaaatattgttatcaaagttaaaatgatattagtcttgagaagacaaatgacaagcaactgctcgctatcaaagttaacttggttccattttcggtgtggcatccctatgagataaggcttaccgtatatctttaattacgcattcatctcggcccaataaaagtgggatagtcacagctgtgtaaaaacctcatt

SEQ ID NO: 157959 - DNA, 549 bp, Cannabis sativa
tagaagatgaagtgggtgtgggtgaggtgtaggtgaaggtaaaaatcaatggagagaaaaaaagaaaaaaaaatgaaaaagaaaaaaatgattttaaaatatatattttgaattttaaattattttaaattaaattattatttggactaataatattttaacacgtggaaattttaaataagttaacggatcagttaagtttaggattaacggacttacacaaaagtagagcttgggaattattgccgctatttttggaggttggggactaatctgcatcaacacgaattttttggggacttttgccgaaaatttccctaaatttaacaatatcaatagttcggagaaaatttttaacggccaaaaaagttcaggggcacaatttagtacatgtcaaaattcagggagaaaaattactaattagctttattttttctaccacatatttttgtaaactcttatgttttttctagcaagaaagcccttaaaattcatacaactctatttatttgggaaacttacaaaaatactgaaatttgggttaatttt

SEQ ID NO: 157960 - DNA, 582 bp, Cannabis sativa
aattcacctacccctcactgttgggcaagctctgaagagcataactatactggcacagttcttagtattggacgttccatcagcattcaatgtcatgttaggtagtccggccttatatgacttaaaggttgctacgccaatatttcattcatgccttaagttcccaacaaagaatggggtagggtgcctaagaggaaaccagcaagctgctcaggaatattataacattgccataatcaaggctaaaaaagaagtatcctctagccagagttcggacaagggaaaaaatattaccaagtagggcgcctctcaaggcggggatgaagatgtggatcctcgacttggggacacaagcagcaatggggacacaagtagaaagtttaaaatcggaaaaggtttgttgctcgaagtaaaatcagaattgataaaatttctgagagcaaacttagatgtttttgcctggtcacatgaggatatagtcggaattgatcctcctataatttcatgttggaatatgttttacctggatctagatttactaccatgtatgttatttagcatcctaaatatgaatttctaaaa

SEQ ID NO: 157961 - DNA, 564 bp, Cannabis sativa
gttaattacaaagttgactttaatttttttacaacgattatcccctagaatcatgggatttgattacaaatcacgctaagtaaatgcggtttttatttaaaattcacacagctgtgaatattttgcttttattgggccaaaatgaatgcatatgaaagatattcggtaagtgttatctcatggggatgccgagttaactgggaatggagccgagttaactctgatggcgagctggagctcgtcatatatcttcttgaggtagatattgcttttactttaactctgacaactacaatttctagtgtgaagatgatctttctcgcgtgcatgccatcttacagcgagatagacgcctcgctatctgtcaccttgatccacccctctgtttatactcagtttgtataccgtgtcatatacgttaagtatttctagtgttattatatctcctccacgcgacgaggttaatgcattgtcatacacacttgcatttacatggtttctcgtcgagacacaagtcaacagttagtacattttatctctcataagactgttcagtcagccgag

SEQ ID NO: 157962 - DNA, 603 bp, Cannabis sativa
tttgcaattttattttagagtaatataccgtatttccttttccatcattttcttttagagttttatccctctccattcaatttaaaaaaaaaaaaaaaaacaccatttttcatggcctcttctgctacactttgacgaaattgttcttggaaaaattacatccttcggtgagatttctgtggtgtgtgtattttagtttaaggagatttttactatttttcaaatcaaaatgtataacctaatctctcttctcttaattaattttttgatttattcttagatttattttcaatagcaagttttagattttgagcatgcaacataaatcatagattttttgtttttggatttgataatttctaatctgacacatggatggatgacaattgccaaaatagaatagaaagagagtgtgggagtgagaagatgacaaggctatgtatattttacttcgtaatattgtctctgcttctttccccatcttcatcttcttcagttttgtatcttgcacaaaattgataatctatataaatttctattcccaaatctgattcactaatattagtatgattgttataatccatataaatctctaatatatta

SEQ ID NO: 157963 - DNA, 568 bp, Cannabis sativa
tttatattatatcacttaattaatataaaattttcaaaatataaagatattacaaaaattgggtaacaccgcgcaaagcgcggcttagttccctagttttagatagttttgctgctaatattctttttattataattattaaattaaattatatttatttatttttttgagaataaattatatttgagttaataataataataataataataatgagtttttttatttttgcacttcaaagtagttttttttttgtgcatttttacggaattctacatggaaactccaattgcaactagcgctgcaacctaaatcacaacaaaaaatcgtatataaacttatattgcaattaaagctgcaaccactttagaaactaaaccgtaaatttaaaaaagaaaaaaaaataaaaaaaacagtaaatgggtaatcccctaataataataataataataataataataatctatatctatatataaaggaaagtttagaagagttgatgtggcatgcttaacttcttattattctccaaagcttatttttctctttttctaattattttattctc

SEQ ID NO: 157964 - DNA, 538 bp, Cannabis sativa
attataagtttgttaaataattaattatgtaatattttttaatttttttaaaaaaattagaataaaaatatattaattacttaaaaagttaattataataaaaattatatcttaaaataattatgtaatattttagtatttaaataataaagatttaacatgaaaaaaattataaattaaaagtgctttgaagaataaatataaaaaaatataattaattatcgtaatataaaaaattataaataataaatataaaaaatttgaagtaataaatttttaaaaaataaaataaaaataaattaaattagttataatttttttaataaaaaatgtaatatatatatataaaaataatacttacttacttaaaagtatatatatatataaaattatatttaattaattaatagtaaaataatttttaaataattaaataaggtagtgcgtctctccatgacccgcggtttgacaatttttttcaaaaaattttaccatcgcaaccgcaaggtagcgcgtccagttcagccccccctccaac

SEQ ID NO: 157965 - DNA, 513 bp, Cannabis sativa
  modified_base (461)..(480): a, c, t, g, unknown or other
tgtcaattctgcctaccatcttgcccagtcctttgccctctctacttctccctcctcttcttatcctaacccttttaaggattggtggaaaactctctggactttgaacattcctcctaaaatcaagcatttcacctggaaggcttttaaccatcttcttccttgtgctctcaatcttttccacaagcatgctatcccaagctcttgttgttcgttttgtgggggaagtgcagagtcggtctctcatgctcttcttcactgtcccagagttaaaaccatttggcatcacactaagtttaaacagttttttgttgactaccgtaggcttgatatcagggaattttatcttcatagccttactttaattcccagagttgacctttccttattttttggtgtaatttggcaaatttggaatatcaggaatgcccatctttttcaaaaacccagtgtaattgatnnnnnnnnnnnnnnnnnnnnaagttttctgcaggattaccaggatgctcaaat

SEQ ID NO: 157966 - DNA, 689 bp, Cannabis sativa
  modified_base (41)..(67): a, c, t, g, unknown or other
aattataatcggtttgaattatttgtttttattcattatgnnnnnnnnnnnnnnnnnnnnnnnnnnnatatctgagacatttacttctggtgacttttctattgactttttccgatgactgcgacgttttcggtaacttttccgacgacggtgactttttcagtaattttatcaaatttatttattgttttttccccatatgttgaactttaattattttttaatttcatatttttttgcattatttatttatgccataaaaaaaaagtaaactttactactttttctcatatttacgagaaaactcccttttaaaagccaaaaaccaaatgaaaagaccaaacaagagcccaattatccagcctggccgacaaggtagccacgtggcgagctcccgtttgtctgtcagcattgagtctcatgcatgtagcagttgcgtcaactgccaatcccatttatatgagggtaatttgcggcataacctccttaagtggctacgtttttgcaactaacccccaattttaaaattttagtagtttttttttttttttttttttatgcaaaaaattttagtagttaaacctcctaaacccaagttctgttagcacttagccctttccatctatttttgggtgttaagtgccaggttggaatgtctacgtgtacacagtgtacacgtggcacagttt

SEQ ID NO: 157967 - DNA, 570 bp, Cannabis sativa
  modified_base (262)..(272): a, c, t, g, unknown or other
ataacacatttatataaacttttcaattataaataacaaaccaaacaaatgaatagattcactttaggcaaagtcattctaattctacctacattccaatcaactaaacactaccccagttagttacattgtgtaagtagtaactagttataattagttactaaatattgaatttttttagttaggatatttgttatggataaatcacggatgcgtgagaaaagagacacactgcgatttcaagtagggttcaatgcatttnnnnnnnnnnncttaaagaattctaaaaatcccaaacgtatttattatccatgtgtagattgttgtaatggatctaaaggaaatattacaatgattaaggaccatgtgtatttacgaggtttcaataaaagttatactacttagtattggcatggcaaacatttagctaatgatccatataaattaggaaagcaagtgtagatgatatggagggtaatgatttcgatgatcatccatgggacttgctcaacaaagcacgggaggaatttcttaatgattctaaaaaattcaataattttctaagtgatg

SEQ ID NO: 157968 - DNA, 537 bp, Cannabis sativa
ttagtttgtgttcaagccgtgcaaagccaaattactttgtatcctcttttggtttttttaattcatgatgtgcgtactcttctcttatctttaaataatattgagttgtgttttgtcaaacgatctgcaaacaagctgactcatgttttagctaggattcttgtttctctccaagtcgtgtgcttcaattggagaattgttccaacgaagtgcgttctattaataaagttgctaagtttattaaaaaaaaaaaaaatagcatgggtgacatgtacattaaatacgtatactgtattttctatttttttatttttatgttttttaaatattttttatttttataaaaagttatttctattttaaaattatgttatttttattttatagaaattatttctattgtaaggttatgctgttttatttttagatcatgttgtatttatttttataaatgaataaaaaatcaattataaaagtataaataaaaaaatctctttcaaaaattcaaaaatttaaattttatttacatcccaaaac

SEQ ID NO: 157969 - DNA, 689 bp, Cannabis sativa
aaacaggccctggcctgacactcaccctggtggcgctttttacatctcgaacattcaggaaaagtcccccaatttacattcccaccacaacgaaagccttggttaccctggaaccttttgtttgagcctgcagctgatgattcactaggccttttcttccggtcaccgagatcaatacccctaccagaaccaacacctgatgtttgcttttacgaatcccttctgccaatatttttcttccgtatctgatcttctgcaccctcaaaaagtagggccaattcaactatctgggaataagttcgagcaaccccgggttgtttagaagcaacaatcacatcccatgcgatatgttcatccaatcctcgaataaactttgattttctagcagcttctgtagccaattcatctgaagcaaactttgcaagtcgatcgaattattggcatactctgtcactgtcatgttgccctgagtcaatcgtataaactcttctgcctttgctgcccgaatagactcattataatacttctcataaaacaagatacagaaggcatcccaggtcatgttagtcagaccatgaccctgagatacaatctcccaccaaatacgggcatcatctcccagcatatagataccacacctgacccggtcattatcttcgacccgcataaaatcaaaaatggatgttatc

SEQ ID NO: 157970 - DNA, 599 bp, Cannabis sativa
ttaccttccaaccccgaacaacaaccaaacgccaggccctaacagactttgtggtagaatgcacgggcaaagaagaaaaaatatcagaaggcaaccccgagctagtacaaacacctcagccaagtaatagcgaagacaggtagacttggaaactacatgtggatgggccggctacagatcaactatccggtgcaggaatcgcccttgtcatacctggggggaaacacctgcacactgcagttatgtttggattcaaggcatccaataacaaagctgaatattaagctttgatcgctggcttaaaactagcccgggagatgaaagtcgaacacatcaaaatttgcagcgattcacagctagtggtaaatcacgtatctggagaatatgaggcttgggaagaaaagatgatagcatatctaagcaaaatacatgacctgaacgcaccattaaaatgctacggtctcagacaaattccaaggaaagaaaacaggactgtagacgcgttagctcaacttgcaagcagtaatgtaagtgataaagcgaacttggtccctatccagttcctcgaagagcctagcataactggcacggaagagatc

SEQ ID NO: 157971 - DNA, 516 bp, Cannabis sativa
aataataggagcattgctatgggggacactatgaggtgacactttataattagttaatggttctctataatctttattaaagtaaaatatgtagaatccgatattaaattgcactggtagcaatattacatatcacaagggtactagacaccatgagtgccctttagcatttctcaaataacagtatgcgagatatcttcccattggagacatgatcaaaattagaattagaaaaatgagtcaaataatcagtcatctaattcccagatcgtttgaccaaaaaaattaaaataaaattagatgaaaaaggttggagcatcacagttaacctaagaactcatatattctgttttatccattgctcaaaagacacaacaatacaaattattgtagcaggttcattcaatctcgtagcttgagtacttaactattgtgtaaggtacgtaactacattactaacgttcccttcagtcgtagagaacttggtattcctaaccactaacaacgatttgatga

SEQ ID NO: 157972 - DNA, 500 bp, Cannabis sativa
  modified_base (163)..(170): a, c, t, g, unknown or other
agcaaagaactatccaatcaacccaagttttaataaaaccaataaaacttaatgtaagcccaaataaaaagtctaacaaactatgcttatgtgttttggttaattcactttctaaggttattataatataatttatttatgaaaaatataaaatatatatttnnnnnnnntttgtgaatgtaaaatatattttatgtatgaaagttgtctcaaatttagaacgtctcttaagaaatgagttaggttggattatatagagttaaagtgtgcccaacctatgattatatgctctatcacttttcaacccaattaatcatgacctattcttaacataaccctttactgtaaaaaatgagttgagttcgccaggttgaataacttggcctatattttgtgcacacactacaaatttttttacttttagtcacaacaaaatttgcgaatgaatgtaacagaattgtgactaattataaattatgattcctatgttgtgactaaaa

SEQ ID NO: 157973 - DNA, 592 bp, Cannabis sativa
aaatactgtcacacgaaaatttttacaaaaatactatgtttttataaaacaccagtaaaacacaaagcagaacagctcaaaacaacagtagaacatcaataaactactagtaaaacaccagggaaaacttaacacaatatactgcagtatgaaacttataaaaaaatacagtaccgcctggtaatatttttgtaaaaaaatgacaaaagttagtataacatgtaaatttcctgtaatagctcaattcgtaaaatatagcttaaagtatgaaaaatagtcttccattagctgctgtaaaatgaaggaccgatttagcttatttatagtgcttacaaaacaaaatgtatatgacaatgacataaaatatttaaaaatgaatcaaatgtattatttaaataattaagtgaaaaacaatataaaaaatttaaactaaaataaaaaaaaaaataataaaattttaatgatatattttaaaaaaatagaatagagaaactaatgagagtgcttcctaatttttattatgtactaggtgaatgtacgtgccgagccacgtattgctagtttcatttaagattttggtctttttaagatt

SEQ ID NO: 157974 - DNA, 515 bp, Cannabis sativa
  modified_base (46)..(53): a, c, t, g, unknown or other
tattttccaaaatggtacaaataggaccctgaactaattttttgtnnnnnnnnaacttaataataatctgacctagatgtgttataaaacttgttaaattttctatcgtgttaataattgtctttaagttgattatattaaaaaaattatccaaaattgagctcagagttctatttatactattttaaaaaaatacaaaatttattttatcatttaacaaaataaaagatctttacaaaaaaaatagaatctaaaataatattacccctttaaattatatttttttgttggtaaggaggtaaaaaatataattaaaataagagaaaaaagaaaagaaaaataaaacactctcacacacactcactgagctccctcacccgataccccaaatccgaaaagtttgaagcttttccggcgagtttccggcattatttccgccaacggagagtaaagttcaactcaggagaagctctgatgcagcggcaggttccacttcagctactgaagactgtttg

SEQ ID NO: 157975 - DNA, 731 bp, Cannabis sativa
  modified_base (546)..(546): a, c, t, g, unknown or other
tgaatccacgacaagctcctctggattgggagcaaagattcgcagaaatgcaagatcatatctgcccgcaagatgaagaaattctgagactaaggcagcagggtcctcctgcagtgcctccacagcaagctcatgcgttgccagcagaacaacctgttactggcaaccgtatggagccactatacgaaaggttccgcaagcaagcacctccagtgttcctggaaggtccagatgtgatgaaggttgagcaatggctcatagtgatagaaagaattctgaattttatgggggtagttggaaatgatcgggtgacctgcgctacttttcagttctaggaagacgccctagtgtggtgggaattggtgtccctcactcgggacgtcactgttatgacctgggaggagttccaagatctattcaatcccaagtattacggtatcagtgaaattgagaactgataagtatattatgttattttaaattgatcagatgttgaacataattccttaccactctactagacttattgatcatgtcgacttaatnctttggtatttgtgattgtgaatgtcttttgttgattcaaaaaaaatattattgacatagtttaatatcaaaggttaaattggactgatatgttgagatgttatcaaagaactattattttttaaagtagccacaaatattttcttgttgtacattcaatccatgagtcgttttcaaacaaaatt

SEQ ID NO: 157976 - DNA, 506 bp, Cannabis sativa
ttcgtcccagtcactcaaaatacatcagctggctgctgtggaaggaaagagactaaacctggtgggctaaagtggaaaaagattgagcttctatttttaggatgtaaattttgtaccctaaggacccaacaacaaaaagggaaaaaaactaagtacacctccatcttccattaacgtgagcagctgcgaggagtaattgcagaaggaagtatagcaggagaagaaaagagaaagggggcccaagtgcaagagaaagagaaggaaaaaagccttattgtttgcatttcttttcccttttcttctatttttcttttcttttctttcttgtcattaatttctagaaacttgttgaactgtaaaaaagggcaacagccatggaagatacaattttagcttagatttttgtttttgatttgaatatgagctaaactattaaggcttgagtggctatgaactcctatgttgggtatgattaactttttaagcatattttagcatttatgcct

SEQ ID NO: 157977 - DNA, 798 bp, Cannabis sativa
gaagtcgccagaattaatggtggtttttttttggttgtgtttcgtttcaattgtgttgggttgttgggttggtcgatcgaaggtttcgtgcgtgaggttatttgtttcgttccgtgcggctgaagtagtagaagaagtagtattttggtaatattagtttttaggttgtattaatattcataggttcggttattagtattgttgtaatttaattcccttttttgtgtatacatgaaaaaatctctttataaaattcaatattatattttagttttattattattttaatttatttataattaacaaatacatatctatttatattatattatattattattaaatatagcattttttaatgtgtcgtgctgtactgtaggtttgtttcttgttatgtctttcgagctagtctgttcgtatttacgtacggtgttattcgtgcttgtcgtgctgtgtttgtgcttaagtacatattttttttatcgtgtcctgccaatttgtagtattgttttgtatcgtacccaaactttgcttggtggtgctcgtgccaattttgtgtcgcgtcaaaaaaatctaatttgtatttatagcactagatactggatattaaatactactagtaccttttaagatttttcatttgagaagtgcataaagtaattttttatttatttattatttcgatgtgttttgaaatataaaaactcgaattttcgtataaaaatttgagaaatgctaataggcaccagtggtgtctagcaccctcttatgtgttagtatcgttattggtccaactaa

SEQ ID NO: 157978 - DNA, 623 bp, Cannabis sativa
tgacccttatacttcatgttcattaaagaaccaagaagtgttgtcatttcaaccttatcgtttttagcaaaacgttcctcaatttgttcaaggaaattcttaaccatagtgacttgtaaagaccacttagctttaatttggaaattagcagataaatagggtttaattataaaacttgcatattagttacaaattatttgtttacggagatttatttgaattcagaatgtattttatgtcatatatggaatttcatatttttgcatgttttgtgcccgacaacattggaatgcggcgtttggctattagaataaaattttagtatttttagtatagcggggcaatatagttagacatgggaatgttgggaatagtcaagattttagagttgactgaattacccttaggtggtttagtgaatttttggcttaagtggggggcaaagtagtatttttgccatttgtgtctttcgtctcctagtgacttattattgtgctaaataatcagatttgtattaagtttaacattagataaaagttagagtttatcatttgtttagaaaattagaaattaagacataaagaagcattttctctctccaagctctctctctctctctctct

SEQ ID NO: 157979 - DNA, 541 bp, Cannabis sativa
tagatttttaaccataacaaaatattgttccatattttcctttttattatattaatttaatttttcaattttgctgaccctattaaaataatttattgaaaaattctcatttactttctctttttctctttaattattttataacatgttatcagcacgagtctctacccaaattttaaaataaatattatgttaaagttcttgaattgttccaaagtcacaatacacagtatatatttatatatgtactcctctcactgaaacaatttcaaattttttttttcttttttctttaatttatatatctatatattatatatatgtatatgttttcatatactcttattatttatctataatatgatagagaatatataaaatttatatatatatccagaagattctgtattctcgataaaatcttgcatatatcttggagattatacaaaagtataatattcatcatataactgactgaaatataataaaagggatgaatacatattcatatatatatatatgttcttttattctttgagga

SEQ ID NO: 157980 - DNA, 548 bp, Cannabis sativa
  modified_base (259)..(267): a, c, t, g, unknown or other
  modified_base (459)..(475): a, c, t, g, unknown or other
ctaacaatggattttaatcaccggtgtcttccaagtcataacagggtgagttccttgaaaccctcccactatgacaaggtattgtgactttatgtctaacaacataagtggtattgtcctcatcggttttgtcaagaatagaacactcggaatcaagaaaaaaaatatctcctttactttgctactttgtttctgacttagtaattttcttataaaagtagtatttgttgaaacaaatactttcttatctaatgactannnnnnnnnccacccctaatcacttagaatggctatcaaacatgcaaaccttggttaacagttctagcttttcttaaggtcacgattaggaaatccatgattttagtaatggtttacactatgtacacaaccattccatcattctgaaaatttcctatcactagggtatttcgttggaaggacttaggcaactgctagtannnnnnnnnnnnnnnnntactatcatcaatatgcaaatcgattttctggggaggtaagtttggatacaattcaaaaaatcaacttaatga

SEQ ID NO: 157981 - DNA, 806 bp, Cannabis sativa
atttctcagtttttggttcttcctctgatcattgtttggagaacttggagaaagtcctaatcagaagtgaggagtcaaacatggttcttaattgggaaaagtgccacttcatggtaaaagaagagatagttctggggcataagatctcaaaggcaggcattgaggtggataaagccaaggtgtcaacaatagagaatttaccccctcctatttctgtaaaaggagttaggagttttctgggccatgctggattctaccgatgattcatcaaagacttctaaaagatctcaaaaccgctgtccaatctgcttgttaacggggttccttttgagtttggggaagcatgtttaaaggctttccaagttcttaaggagaaattgatatcagcacccatagtcacttcaccaaattgggagttaccattcgagttgatgtgtgatgcaagtgactatgcaattggagcagtcttgggtcaacgagttgacagggtgtttcacaccatctactatgctagtagaacctttaatgatgctcagctgaactatgccaccatggagaaagagatgttggccattgtgttttcttgtgataaattttggccaaatctgactgagaataatgtgatagtttatacaaatcactcagcaatcaagtaccttatgaccaagaaggatgcaaaaccaaggttgataaggtgggtgcttctgctctaagaatttgacattgaaataaaggacaagaagaggaccgagaatctagttgctgatcatctttcaagacttgaaatagaagaaagccaaaatgca

SEQ ID NO: 157982 - DNA, 591 bp, Cannabis sativa
tataattttcttgttgttttcgtgttgtttcataaaatatcgtaaaaatataaaaaaaaaatctttaaacgtaaaaatgtaaaaaatttacaaaaaaaatatagtgtattgtgtaattatcccaaaattttatttatggaattcataagtataaaaacaaaataagaaaattcacaccaaatataacttttttccaaactttacatttatgctttcacaagagttttttattaaatgcacattaaataactatataatgatatgtgtaattatgtagtaatattagaatattttatatggaccaacatttttaagtgttgctcacttagtgttggtattagtatataatgataattatataatcggtaatgtatggtattattattgggccataataggatggacataatgtattaacacgcacatggcctatgaacacgctctaaaacgtctttggtcagcccattgaactaagacaattaatagggctatttacaaaaatatgggaaaatgaagatatgttttgatatatatggcataaaaacttaattgccctaaatatggcatttttttagaaaaacttacaaatat

SEQ ID NO: 157983 - DNA, 573 bp, Cannabis sativa
ataataattctctaaaacacatgaattaatagcatagatagaaatactttgattctttgccgaaaacttagaacactgggtttctagttacccttttcgttgcaatagaagccctttcctttttgctttgcattgggattagcaacctttttcttattaggcattttaacagctttaattaagaggcttcttgctattcttccgatttttcttgttgttgggtttcgaagtagatgcaatgtttgtctcagccttggtcgtaccattagcagtgccagaactaggagctttagttcctcctttatgtggtcctccaatcaaattttcaaatgtcttaaggtggttgatcaactcgtggaagttaaactccaactttttcatgacataatttgatgtataaggtagaaaagctggagtcaaactattcaatattaaactcacttgagttgtctgatctatagcagctccatgattctcagcctatcgggagtaactagtcatctagagcaggtgatcatgcacattctgatgaggtttcatccgtggattgataaaattctttgtcgcctcaaa

SEQ ID NO: 157984 - DNA, 649 bp, Cannabis sativa
acatgtatatctacttacttcacataaaagtgaagcattagatgtctttaagatatttaaaactgaagtagagaaacaatgcaacaagcaacttaagatatagtgaaatcaaatagaggaggtaagtattatggtagatacacagaagatggacaagcacatggtccaattgcaaagtttcttgaaaaaaatgagattgttgcccattacacattgcccggtactcttgagcaaaatggtatttcagaaaggagaaaccgaactttaatggacatggtacagagtatgcttaacaacattctaatcttcttaaatccttgcggacttgagctttaaagacatcagtgtacatattaaatcgagttccaacaaaggcagactcgaaaactctttttgaattatggaaaggttggaaaccaagattaaactatgtacgcatttggagatgtccatctgaagtcagaatatataatccacaagagaagaaattggacccaaggaccataagcgaattctgtatagggtacgctaaaaattctaaaggttataagttctattgtccatctcatagcacaagaattgtggaatcaaggaatacaaaatttcttaaaaatacattgatcaatgggagtggtcaatcaaaggactt

SEQ ID NO: 157985 - DNA, 894 bp, Cannabis sativa
ttgtttttgtaacattttatttcaaattaaaaataaaatcaagttatttttgtgttgttgtaaagtttgttatgaattgcttatacactatactggttgttcaacaattagaggaatagagttttacatgttaaaacaaaaacttatcttatctcttacattcagatatgaaaaataattagagaatacgcatcatgttgattttgaatcaaataggggcattaattataaatatgaaaaaaatcacttatatttagtaataatattatttgttgttttatagtttcttaaagttttaaacatgtttaatttcgttagtattcaaacatgttcctttcacattatttgtatgttaaatttcagtagttaaaatttgtaaatttcttaaattatatatataattgtttttatatttttatatcgttcctaaatagttgttaacagataaaaaaaaagttactaacaattattgtctttttttttaagaatataattatatcaatacttgatgtagaaattaaaaatataataatagttatttttcactataataaaagatataaacaaattaaaaaaaaattataatgttcaatatcccatgcaagatacatgtgaaattaactcgaaaaaaatttaaaaaaaaaatataaaagcaaagtttcttaagaaaatattgctctttagtgcatacaaccataaccaaacacacttctcaatcattaatccatgcacagtagcttcaaccttcttggaagactttggaatatttttttgtacaccttcaatgtatgcaactcacttcattctaccaaaggaatagaaatagacaacaagcctattctgatcaattttgaaattcatcatcactagaaatcaagttttttgcattcaact

SEQ ID NO: 157986 - DNA, 636 bp, Cannabis sativa
atagaatttttgattatttttatttatgcctcattcattttaatcgacattctataattccataactaaatatattttctttatttttctcaaattttaaaaaaaattctttaaaaattaataattttttattgggggacaagccaaatcactttattaatgattcaaggaaatattttttatttacattgaagtaggaaattgtagccacaacaaaacaaactcacccatattcaaaagtaaggtaccaggttacttttagaagcaatataaaaccctaagattgaactaatgtagagggtgaaatctacaattacggaattggggcaccagcaacctgtcaagaacaaagagagagacaaaagttcaattgggagcaccggtggggtgtcagccaaagggactccgacgctcactcaagtaagtcagtcagtacgatacgattgattatagtaaaaaattataataaaataatggaaagaaaataaataaatgtaatataaatggtagccggacggatgagtggacaagcggacagacggactaaaagagtaactccgatggtgaggcttaagagaaaagcttagaaaaaacgactgtctgcttgagtcagtgagtagtgtgagtatcgaatgt

SEQ ID NO: 157987 - DNA, 523 bp, Cannabis sativa
  modified_base (27)..(41): a, c, t, g, unknown or other
gggattgcacagcttacccggtatttnnnnnnnnnnnnnnngggactactgactgtcacactaggtgagagaaatctcactataacagcagcgtgcaggggttgcccaaaggtgtgaaaagggcaattcctgcaccgaatagttgatttgtagctgacccgtccacacgtagtttccaagttggcttgtgttcactgttacttggctgaggtagttttactggctccggattgttttatgatacgctttcttccttgcccgtgaattctactaccaagtctgctaaggcttggcccttaattgttgttcggggttggaagataatctaatattggcccaactccactgcccatttgagtaaccgtctagaggcatcgggtttttgcaatatatggcgtaacggttgtcagtgtatacccgaactgggtgagcttaaaagtagggccttagctttcttgttgctagactcaggcagtaagtgagtttctctatcaatggatatcggccttcaacctcaatgagt

SEQ ID NO: 157988 - DNA, 699 bp, Cannabis sativa
gagaaaggaaaatcaaaatttataaatgagatataactcacatgtgaagctaaatactaacagctcgcatagtataggaaagtattaaacgagacatcaaggagtcttgaaaaaagtacttaaaccttgtgtatgaatagacgatctaactattcatataagcaatcaaaaatatactaagtcataaatcattaaaagtatattcaagtttgcttgaaacagattataacttttattgcgtggcagaattgataactgctcgcaaattaaaagcatggcagataataaactgctcgcgcatatagtagactactaattacttacatattattagaggaaaatacgagcaatggaaaggccaaattttttttcatttgatcaaaatataattatttaaattgtgaataaaacgcaagtaaacaagtatatattaaagttcaagcataaaagtacgaagcattaaataaatataaaagccaagttggccatccaaccttgtaaatttttctttacaaaaaaaaagtgccacaaggggcaaacaattgtctcggccctagggccattttcctaaacaaaataaaaataaataaaaactaagcctacatagtagaagacttggacggattttcttcttctactgcctcggcctcttcctcctccttcttggtcttctcgcagtaagcaagaatttccccttca

SEQ ID NO: 157989 - DNA, 529 bp, Cannabis sativa
  modified_base (468)..(494): a, c, t, g, unknown or other
tggaccactaaaaatttgtcacgtgtacaagtgtgtacacgtgcacagtcacttaactgtgatttttagacggagaggtacacagagcaaaagagaacctaaatttagatagttatgcagttaaaattttaatttttgtggttaactattacaattacaaacttaaaattaaagtgatatagcccaatatcccaaacaaaattaaaaaaataaaaaaaacagcatccagtgtaaattcccctaaaaaaaattaccaaaacaagtctgccatgtagaggctagaaagagtgaaacaccaatgtgttttccgtgagatcgtgacctttttaaatagtagtactttattgatttgtattattttattatataaagctggtctgtttgactttttattacattattaattttaattttacgttttttacatgtgcttttttattctgaaaaataagtgcatgtttggcatcnnnnnnnnnnnnnnnnnnnnnnnnnnnaaaaacagaaaattgttttttgaaaacaatttggc

SEQ ID NO: 157990 - DNA, 711 bp, Cannabis sativa
tcaataaataataattaattaatatttttatcaatctcttatttaacttagattaactaaatatcattttctactaaaataatatatttctctcataatattacttaataataatattatatttaactatataattttatcaaatcaaactacaaagattaatttatcttaatcactcaattcataattgaaataactatacaaagtttgccttcaagaattatttctcataaaaattaagtctttctcaattcattcctcaaattataccttcccttgtacaatattgtatagatgtgatatggggaccatgaacttatatttcgagctccaaaaaatacacgattattactgaactctttaataaaataatcagtttattaattctattattactccactataaatataaaattgcactctttgacaacatagatatatacttatagaattctttctagtagtccattgatataatcaatataagtagttcaccctccaattattagttcataattagagttagtaaaaattatcgttttacccttctaattatctcttgaatttcttatgtaccattaattcaacgtgaacagttaatctataatcccattatagatttggatccaactgttagcactcccagaagtaacactataagggaactaatattcgatcctttcagaaagcttggattctattattgtataa

SEQ ID NO: 157991 - DNA, 687 bp, Cannabis sativa
gagctgcacagtatgtttaaaaagcacgtaatacgcctatgctagttagggtgttatagacctcattccctaccgcagagacctcattccctttctcatgagacttggcagcctcgatggtaagctggctcgaggatttctttttgttggccgtgattttagtccttttggattccttggcagaacttgaggcctcaccagcttggacaattctcttcttagatttcttgtcagctgggggaggactcttgaagatgttctccaaatccacatccatatctgtgaggcaagagaaactcattagcacttaaacaaaataaataagagaaaatgggaaagaactcccaacttaagaaagttaccataatcttcagaggatgacgagggaggactataatattcactaaactccctagatcttgtgattataaagatatcataagggtttagtggatctaaatcccagcttgaatctatgtgactcgatctatccaacatggtctcgtactgctcgacaatcccatagaatgagctggtgcagctaatttggacatgaaactctgggtaccaactatcaaacctatgagttatgcgatttatgaggagagggttccaagtgtaaaaattataccgactatctcggaaggatactaaggtattacattctgccctaagcactgtgggtga

SEQ ID NO: 157992 - DNA, 649 bp, Cannabis sativa
tcgtataggcctgtctgacccagcaaattaacagacgctggattcgacattacacgacccacgaagttcaagggttccacccgctgtcaatcctggacaaatgggaagtgtggtgaatggtgaaacagctcctgttactgaaactgggcctggtgtgcaagagactgggaataacagttccgcgcacagccagggcattcataacacgactgttccgcctggaacaaacgcccagacgaccatcggagatgcaaccgaattgcaaaatctccgtgctgcgctcggactcatgcagagtcatagcaacactctacatcatgatcaagatgaactacgtgctgcagtgaatctcgcatttgacgaacagaggcgtatgttcgctgaatggagagacaaagagatggaggcattaagggctcaccatgaagagatcgaagatcgtagtcggcaagccaccgtgctgatacgaagagcccaccagactgtaggttagcaaacgccaaacgtcattcccctaggagaaatagacgatgacccgacgatgaagacctcccaaacaaccaatggtcagccgtccaatccatagtcacgagttccacccgtgggccaagaggtaggcgggcagaccttgtccgggaattcattagga

SEQ ID NO: 157993 - DNA, 519 bp, Cannabis sativa
attcgagaaaggtattccattcccataaaaaataagagcggcgacattggatctccctacctcaaacctcgcttggcctcaaagaagccatgtaatgatccatttatcatcaaagagaaatgaggagtttgaatacaagtcattaccaagttaataaactttggtggaaaacgggaaccatataacatctcttttatgatatcccattcaatggtatcatatgccttctgtaagtccagctttatctttgtcttccttccatagtgtctgatgagatcttggaaaatcatgatattgtgttcaatgaatcttccatgaacaaatcctccttgattctaaaaaaccaagtttttttaaatatcaacaataaatatgtatatataaaactatatacgtctgcagaagcagaatgtaattttgacattgcagagaccagttttacagtgacaaaactgaacagacagaatataattataattgcagaaaattaaatcacttgacacaagagatttgtacgtg

SEQ ID NO: 157994 - DNA, 515 bp, Cannabis sativa
  modified_base (337)..(345): a, c, t, g, unknown or other
gactatcataggtctggtcgcgaccatgatactggcagtttattaattttttttttgagtttttgtttttgccataacttttgattccagactccgtttaggacgttctttataccgttagaaagctcgttctgagctctatgtggttatctgaattttaaatgccatgtgaatattttatgaatgtaaaatcaggggttaaccctatttgtgtaaatcctggatttgtgactaggattactgacacctggtcaggagcacccggtatttggaatctctattactgtaggacattaggtaagacagtagttagcatgtagagttatgtgcggtggcnnnnnnnnnggaaatgatatatgtgagtaatcagtaatcgagattagggttattaccctaacatgagcagtttaattgcctagggtaattaccctagtgatatatgttgtatgaatgctacgccatgatatatatgagaatatgaatatatatatatatgagaatatgaatatatatat

SEQ ID NO: 157995 - DNA, 569 bp, Cannabis sativa
ctagtaaaatatattccaacatcctgtacatgtgcgaggtagatattttcccgagtttaattgagctcggtatattcagcataaagagggatatatctgttgggtttcttatcctggggtagccttttggaatcgtcttttctctttgatcctgaggctcccgaatcaagttctccaacagtacaatgccccggttgtcttctaagtttcgtgacttgatggcctctgaacttattctccaactcgttcattcgcaaatggaatgaattcttttgctttgaaccgagtcgttgacgaaggtcaggcttcttcaagttcacatgttctcatagatcactcttgtcgtgactgcggtcggaccttgcccttcctctcaaggtttgattcacctttttctccctctaagggtttatgtgagtttctttcttatgagacttaagagagggttggcagttttcgtccgatgttccatgtatctcaagctgtgtctccagattttcctcagtttcctcaggtttcatctcctgagagttctgagtatatctttggattgtcccctgccccttggt

SEQ ID NO: 157996 - DNA, 708 bp, Cannabis sativa
taagattttatagtttaaagaaaacttaaatgataaaattttatgctattttatgatatcttttgctattttatgctagttaagatatcttatgctattttatgatttttttttttccaaaatcatgcattattacttatttagacaaattattattcaccatgtaaaagttataatattattatttttatttttaactatattaaaattttattattaaaaaattttacattattattttaatataacttacacaattatttataaattattataatattaacattcattattaaatatatgttttatttttaatttttaaagaaatattatttaaaaatattttcctatattgaatttttatttttaaaaaattataatgaaaatcttaaattattatttaattctttacatcaatatattttttttttgctttcatatttatttttaaagtaaatattacaataaattttttttattttaaaaaataaattattattattattaatatttatttttttaattatttaaatgttaaaattttattatttaattaacttatttatgtttaattattaagtatttgttttataaaatattttttgtaacttaaatttttattattaaaaaaattataatttagattttaaaatcttatttaataatttacatgaaaaagtttatttttttgtatgttttatattcata

SEQ ID NO: 157997 - DNA, 516 bp, Cannabis sativa
cttttccttttctttttaaatgagtaacttaactcaaacggtctaaaacttcactttaaaaaattaagttgtgtgatctttctttatccacggaattaacaatagagaaatattaaagggtaccttacgatgtcaagcatcacaagaggtgacgttgtttattggtgcattttattatcggatcccacacaatttgatttaataactaataggaaatcgctaaccaattgcaatgcgctatattaatatagtgttggacaatatatgttacctaatagcaatgctcatattgtaaaatttacaaatagtagcttgtaactccacaaaatatatattacaaaataattacacttagttattttgttacattaatatatttaatcaatatactatatcatttaacaaataataactaccggaggtgttcattggatcacatccaatggatttggacccatccgatccgatccaatccaattatttattggatattgaatttttccatccgatccaatc

SEQ ID NO: 157998 - DNA, 525 bp, Cannabis sativa
tcattggaaagggaatttaatttcctaacaattttataaagatgttatcctatagttctgaatatttcaatgccaaaattttatatttttggtaagtcgtgtatttcgttactccatattccttctcagaaatagtttcagtaaaactatcataactctctcagttttaatctatttttaatgatttttatatcattggaaagataattgaatttcctataattattatgcaggcaactttcagtgaatttgtgtagtgtttggtcaaaatagtgttctttctactgtactgtaagagtgtgaattttaatgttagggccttgacccatgtaggtagtagtgacaagataacaagtcttaagcagcggaatttgaggtaaggaaattagatagttttgtatgtgtttatctgtataaatttaaattctttatgtattagaatattatttacgatttgttattatgaatatatatatggtactgagaatgtgtcgtatggacacaatatgagtttgtgaattgata

SEQ ID NO: 157999 - DNA, 541 bp, Cannabis sativa
ctccccgatgtctctggttttgctaagacttgcctcagagggtagtttgttaaaacttcaatactgtgggcctgaaaataaggccgcagctttctcgacaacattaccaaggcgaacactaacttttccatttgaggatagcgggtctcagcgtctaacaggcatttactgacatagtacaccgggtactgtcgtccttgatcttcgcggattagtaccgaactaatcgcatattctgacatcgctagataaatcgataagacttcaccggttatgggttttgataggattgggggctgccccaaatgcgtttttaatgcttgaaaagcctgttcgcatttctcggtccattggaacttctaattgccttttaaaatttgaaaaaaatccttgcatttatcaaaggatcgagatataaaacagtttagagcagcgactttacctgggagactttggacttcttttggcttagtcggtgatcgcatttctgctaatgctttgatcttcacagggtttacctctattcctcgctgatgaacca

SEQ ID NO: 158000 - DNA, 734 bp, Cannabis sativa
  modified_base (27)..(34): a, c, t, g, unknown or other
taattaaattaatttcatcattttacnnnnnnnnggtcataattaccaaaatgcccttggctcaccaacgaggtcctaccatgatataattcatattaattcacatatattaaattatatcataatataattcctcaattatacataattatgtagttagggttttactaatccatttcctaattctagggtattacacaaactttgtccaacaactaaatcaagctaccaacaagcttcaaatcagctcaaaaaacataactttaactccagaatacttctccaaaaacaaaacacaattacagcagccctaataccaaaattcatgtaaaaccactacactttcctacttaaattccaaaatgaagaagaaggaccttaccttagcaaaatactagagtcaagattgctgaattcctcaagaaatgaactacttagaagagaaaatctatttttcttcttgggttcttggtggccgactcaaagcaaagagagagagagagttgatttctttaattttctaatttttaataattgatataaaataggttttggtattctaatatcagccataaaagatttaattaaaaatcaattaaagtttcactaaaagacaaaattcctttaggcaaaaagaccataatacccttgcccacacaaaaccatcataaaaactacttaggggtattttggtaaattctaaaatctcaactattcctgacattcccaatgtc

SEQ ID NO: 158001 - DNA, 582 bp, Cannabis sativa
aggcggtgtgggattgcacagcttacccggtgtttccccttacggatcacgggactacttactgtcccaataaagatatttcaaaatttttcaattttgaaaataatataaaagttgaaaattaatttgttaattaattttagatcaacctaaatcaagtaattttcattaatgatttaattaaaataaatagattaaaatatattatattttgattagaaaataagtaattagtttacgaattgcctagatagatattttctaggtagactttttgttatttttctagatatatttaattaaataagaaaattgatatttaagttcgattttgttcaagacacttaaatatttgatatttttttaagagatttaattaaataggaaaattatatatatgttgaaaattaatttatttaattttagaccaacataaattaaaataatttttccaattttattttattctattttaatgaagaattttaaaatgtattcttttttttaatacattagattttgaattctgtcatatatatttatagaaaattatatttgagttaaaaattaattttaattaat

SEQ ID NO: 158002 - DNA, 569 bp, Cannabis sativa
  modified_base (532)..(535): a, c, t, g, unknown or other
gttattgcatcaacttcatgcattcctgtgacctttttagttgggcctccctctgttgaccaaagttgattagttatggccatctcttcgactaattcaaaggcctcattagcaatatttctcataaaagccccactagttgcggcatctacaagtgttcgggtgttgttcaatagtctagtatagaagttatgcatttataaccacttttcaatcccatggtttggacacttcctcaataaatccttgaatttctcccatgcttcataaaaagatttgttgtcatgctgagtgaagttgttgatttcagctctcagcttggcaatcttcgcaggaggaaagtattttggccaattcctcccaggtgttgatagagtgggttggcaaagataccaacaaacttttggctcgctcccttagtgagaatgggaacagccttaacctaatggcgtcatcgctgactctattcgccttgaatgtctggtaaagctcttcgaagttggcgaggtgcatgtttgggtcttctgatggnnnnccccaaactggactgaagattgaaccatctgcag

SEQ ID NO: 158003 - DNA, 707 bp, Cannabis sativa
atatttaataggggtatcattaatttattttttatgaaatgttatgtccaccatagttggactagaaaattctctaaattatttttctagtccaacagaaatagactagaaaactttctaaaacatttttttagtccagcataattggacttgaaaatagacgaattttttgaaattataccatgtccactacttgttttctagtccaacattattggacatgatgaaatttttttcatgtccaacaatgttggactagaaaactccctaaaatatttttaatgtccaacactgtttttgttggacatgaaaaagagacataaaaaggattttttgtagtagtggtcgaggagaaatgatgatagaatatctgagcaaaatacatgacctactcccacaattgaaaagctacggtcttagacaaattccaagggaagaaaacacgattgcagacgcgttagcgttggcaagcagcaacgtaaatgataaagtgaacttggttcctatcaagttcctcaaagatcttagcattactggcacgaaagagatcgaaatgattgatacttccccaaactggatgacactgctagcggcctacctcgatactggggaactcccagataatccaaatgaagctcgaaagatgaggaggaaggcagcacggtatatcatagtagagggaattatgtacagaagaggattctcta

SEQ ID NO: 158004 - DNA, 899 bp, Cannabis sativa
ttcagtttgtaagaaacatcctctaggggaattgaaaagcagggcatgttttcagtgtggtttgatgggatactacaagagggactgtccccaattgaagaaagaagagcctaagaaggaagcaaaatccactccaactcgggtattttccattgcaaatgccaatgctaaggctagcccgtcagtggtgacatgtcgactccttgttaacatctcttattattcggtatcattttattttggagctactcattcttatgttgctgcaagagtaatcgataaattggacagaccttatgacaattatgaattagggtttcgaacctattgcctaatggataattagttatcttcaaaaggtaaattaggtgtatgctggttaaagtggatgatcaagagtttagtgctgacctagttgagctagtcataagtgattttgatattattctcgggatggatttcctgtctgtatgcggctagtattaattgtaaaaggaaaatggtaacctttcaggccgagggtgaggaatcatttgtctttgtgggatcagttcagggttcccaaatcccagttatctcattattgaaagctagagacctattacaagatatatgcataagatttttagaagttatgatagacattagcaaacttggatagttgggccaccacaacgcaaaatagactttgttattgatttagcactagaagcggagctagtttctaagacactctatagaatggatccagttaaacttaagaaactgaagctacaacttcatgggatgtccgaccttgggtttaccccacccagtgtgtctccctggggagctcgaaggttgtttgtgtaaaagattgatggatcgcttcgtttgtgtattgattatcaagaactgaa

SEQ ID NO: 158005 - DNA, 544 bp, Cannabis sativa
ttagcaaataacgttaacatgccgcttgcaccaactaggccacatgatgtggtagtacctgggaagatagcaacagtggctactctacaaatgagaaatcaaatagtgattgctaacaacccatgttgtcaggaggggttgattaagaaaatcttcttggagtgctgggtgatcgagtagtagagaaagctcatatacaagctgcatggaacgtcacccttcactgaagaagtgcgacaagcaaggctccaaaaaagcttcagactttttgagtcacttaaagataaaggtgccaccaatcctatagattatcttgataaatttaacactattattgaagttgaccaggtacctcaactggaaaagtgtcatatccttcctataacttttgaggataatgcacacaactagtttatctagttacccgaaacctagatttcaacgtgggagatatttgtagatttgttcctaactcatttttaggcagccatgacatataaacctgttgggttttatgccttaaataaaactcatttcatataat

SEQ ID NO: 158006 - DNA, 921 bp, Cannabis sativa
  modified_base (494)..(497): a, c, t, g, unknown or other
aatgggagttcaataggttttgccaccaaaattttgatttttgtggttaagtgttacaaaacgtaaagttcaggtggtttagccgccaatatccctttgagaaatgcactaaaacaaaaaagataaaaattaaaaaaaaaattataggaattttttctcttatagctttattacatctaaactttacttttttttttatctccaagtgcaaaaataaacaaaaatagaaaattaaactttctttttttcaaaaatgcggtctctacatgagaccttcccaaaatagtttctcccaaaaattttagatctgaaatcaacatgaacatcgatcacctccagaaaattctagatcttctccttaatcgacgtattcttcaaacaacaccaccaacaatgtagaagtttttgtcgaaccatgaatgccagcggaaagctttttattgatcaccatgaacgtcggtaagaaactttgattcgatattcagttatggcannnngaccaacgatcagagatctccatgaaaagccaatgaaagaagatcaacaaatgagaggagatgttcatgaacatttacccaaaaaattgggtttttctttatttctttttcttaatttagaaaaataacaaatctgatattattaattttgtttgctttaattattttctaaaatattattattaacgttattgagttgattcacatatattagttgtttttgttaatttgttattgtttttcggtgttttttgaaaatttggaatgaaaaccagtaaatcgttttttttaagtagtataatgagaatattgactgtatgttaaaatttcaaaataaaattatgttgttttagcgttgtttttatgttttctttttgttgttgtccatgatcgtgaaataacaaatgtataaataacacaataa

SEQ ID NO: 158007 - DNA, 646 bp, Cannabis sativa
acactcgaacccaaactcaaactcggaatttcaactagaactgaaccgaactaggactacgaccaagacaaggaccaggacccaaactctaacccaaacccaaataaaaaacaagaccgagatccaaactcgaaccgcaactaggatccaaatccgaacttacactgggacacaaacctagactagaatcgggacctggaaccagaatcgagattgggacctgggcaacgtaactaggactgggacccaagacttgaccccaaaccgggacttcaacctaggacccagctcgtgacccgacaccaaaaatggaaccagaccagcacgcgagatcagggtccggatcaggacccggggcttggaccgaatccatagtcggtgtctggatcttagacccagccccaaacccgaacccagaccaagatgcaaacccggacccggacctgaactcattcccaaacccaaaccttgatcgaaagccataccctgtgacctgaaaatggaacaaaaatcggaagtagatcgagactcgagaactggaccggaaccagaacttggacctcgacctagacccgaaactgtaaccggaccaggacccagtttcccacccagacctagatccgaactgggacccggacctgaatcc

SEQ ID NO: 158008 - DNA, 608 bp, Cannabis sativa
cattttatgagatgaagtggcatcttggtcgggaacagattcatactcctcagaatggtgttaagatgatcttgtagagggcagtaagaatgtgagaataatttatttattaaattaggatagttagtgtagatagtagaaaaatatattcatgaaaataaacatctctagagtgaatgatctcttgagtgtctatgtttaagagagtgtaagctttcataccaggtggataaccaataaagacataaggacgagatcttggatcaagtttatgtcgtttggtttccaaggtggaggcaaaggcaagacatccaaaaactttaaggtgttcataggcaggagctttcttaaagagaatttcaaatgaagtctttttgttaagtaatatagagggagttcgatttatgagataaacaacactatttatgacataactccaataaggtaaggataaatgagattgaaacagtaaagctctaccgacatttaatatgtgttgatgcttgcgctcaacaatagaattttgttgagggtgaccaacgcaagggttgtacttcacggtgcctttgctattgtaaaagcttgtcatattcagttctttagcattg

SEQ ID NO: 158009 - DNA, 507 bp, Cannabis sativa
aagtttgacacattttggagcaaccagggggcggaggtatacattaggctatagaggcatggcccctccttaattttcaaaactatacaataaatgtataatatatgatatatactcccaaccccatcatgttccaagtaaaacatgttgtaatatataaacgcctaaaaaaaaaaaaaaaaactcatagaaatagattctatcgaagaaatatataaaattggaagtttaagttgttgacttaatcaatgttatatataatatatgcctaagtgcaaaattataataatttttaaaataaaaattcaatattttataattgtgtatttttttattttctttatttgaattaaatataaaatgtgcttttattatacatttttaaaagggtgcactaatgtattacttatatgttttggtatttagggaaattttttactctaattatttttttatagttgtgtatatattatagttattgaagacatcttacaaaattttgataaa

SEQ ID NO: 158010 - DNA, 856 bp, Cannabis sativa
  modified_base (322)..(326): a, c, t, g, unknown or other
taattataattattaaataaatagtttcagcatttataggattttagaattgaaaaatatgacatttgtgaaataacagataaatagttgagaagaataaatataattagtgttgggcccacatatatagccatatttttgctattattttatcactttttattccatataattcaatcttaaccctaagggcctgtttggttggaggtaatgaaaacaattgaataggaataggaataagaataggaatggtaatggaatggaataagaataggaataggattcgattgtttggttagatttatggaatcaataattgaannnnnattcttatgtttggttgactatataatgaaatggaatggaataaattaatttttaacaaaaataccattatttttaaaacatgattaaaaaattaaattaaatatattcaacttatatatttttttttagaaaaaattgatatatatttaaaaaaaaactgatatgcattaaaaaaaataatatttatttaaaaatctgatatatatatatacatataaaaatttatatttattgaatttactataaaatattacttcttgaaaaaaactgacattaaagaaaaaaaaactatataatcacatgaaaattttaattttaaaaaaaaaattatataatcataatttaataaaaaaaaaacctgactttataattttttaattaataagatcatacattgttcatacataaaatttcactacaaaaagtataagtattcatgttcaatacccgtatttatgctcaaaataattgtttgcaaaattatgagcataacacattacaccaaatccaaaagattataatttgtata

SEQ ID NO: 158011 - DNA, 536 bp, Cannabis sativa
  modified_base (103)..(120): a, c, t, g, unknown or other
  modified_base (469)..(497): a, c, t, g, unknown or other
ttaacggtaataatacttaagttatatttttgaaacttttataagtacttacttaactaataaatgtaaaattattatttacgtgtcatttttttattggtannnnnnnnnnnnnnnnnnaataaaaaataaaaatttaatgacatgaaccaaccagagactgttacgtggttattgacttgacactttatggccaggtacttatggaaatttcagaaatataacttaaatatattataatcgttaaaaatgaaatatatgtattaatctacaattgagagttaaacttattataccgcaaattactctttttgtaaatacaaaaattactaacaaatcatctaaattatcggtgacttattggatccttagttgaagtttgttattatagtttttttctatgttattctaaacggcttgatatgtctatttttaatgattttgttcttttagggctcgtttggaacgnnnnnnnnnnnnnnnnnnnnnnnnnnnnnattatattgaattgtattttatgcaatatttttatgtaa

SEQ ID NO: 158012 - DNA, 638 bp, Cannabis sativa
  modified_base (578)..(586): a, c, t, g, unknown or other
ttaccaccagctgtgaatcgctgttgatctcaatgtgctcggccttcatctcctgggctagttttaggccggtgatcaaagcttcatattcgacctcattattagatgttttgaatccaaatttgactacaacgtacaagtgttgccccctaggcgtgaaaagggcgattcatgcacccgatagttgatctatagttgacccgtccacatgtagctttcaagtcggcttgtcttcactaatactcgactgaagcatttgtaatggctctaggttactttttcaaatgctctcttctttacccgcacattaaactataaaatctaccaaggcctgacccttaattgttgttcgggttgaaaaataatctcatactggcccaactccaccacccatttgagcaactgtccagaggcgttcggtttttgcaatatttggcgtaatggttggtcaatgtataccagaacaggatgagattgaaagtagggtctttgctttctcgttgctaggattaggcaataagtgagtttttctatcaatggataccgcctttctgcctcaatgagtcttttactgatgnnnnnnnnngggtgttggatattgttttcttctctgatcagtacgacacttacaacatgtt

SEQ ID NO: 158013 - DNA, 670 bp, Cannabis sativa
  modified_base (548)..(576): a, c, t, g, unknown or other
aatagttgaagatgtcttgattaaggttggaaaattctattaccccgctgactttttgattttggacactcaatttgaggttaatactgagtcaaaaattcccatcattcttggtagacctttccttgcaacggccaatgctctcattaactgtaggaatggtcttatgaaattatctttcgggaatatgactatggaggtcaacgtttttcatgttgtgaaacaaccaccagacgaggaggaagattgctatcatactgacgtgatagacacaattgttgaggtagaagttcttattcatgatgattctgattctttaaatgatatcctctatgactttgatactaaaaatatactttatccacctgaggaagccaatgtttcttctattcttgagatgtcccaggatgaagcatcaccgtcacaatatgagaatttgcgatttcttacccgatctatgaaacgcttcttcgggtccatgtgcaatattgagaaattttggtaagagggtaggcttacacgaggagattgttgggttttgtgccctnnnnnnnnnnnnnnnnnnnnnnnnnnnnnttactaataaagatcagaaataacattttatgttccatgattcacatgatttatttcatgactatatgtggataatgtatgaattctatttaag

SEQ ID NO: 158014 - DNA, 518 bp, Cannabis sativa
ccttgaaatggtgggtgtctcctcgtcacttcagggccatgctgaaagacgcatgtcgctgtggtcactgggacacccacaaccattttttgggaagtttttctattcgcacacctatttgcccgcctattggtggcctggttagtattcccgagaattcaaaccatcctccaaaggcgatttttatagtttatatgtcggtgagatcacttatttcgtttttcacacattcaccacgctgaaaagatcttctatctttcagatgagcgacctgtcgaatagtcagctgcttggctcgggaggcaatgcgtttgatggtgacgaggaccaaagggaagatagctttatcccgacttcgatctcagaagaggagatcgcacctactggaggtatagatttaggtctgatgtcttctgcagacatcaagagaatggtgcaggagctcgctgaaccaggggccattgagattcgagacagcgagtctacggtgtcagcccacgattatcttatccactcca

SEQ ID NO: 158015 - DNA, 1135 bp, Cannabis sativa
  modified_base (245)..(245): a, c, t, g, unknown or other
  modified_base (304)..(314): a, c, t, g, unknown or other
tgtattgatttcacagacctcaacaaagcatgccctaaagactgttttccactaccaaggatcgatcagctcgtagagacaacaggagggcatgaaatattaagcttcatggatgcttactcaggctacaatcaaatcaaattgcatccaccaggccaagaacatacaagtttctgaacagatatgggtctatattgctacaaagtaatgtcgtttggtctgaaaaacgctggagctacataccnaagatttgtaaacaaaatgtttaaagaccagatcggcaaaatatggaagtgtacgtggnnnnnnnnnnngtcaaatccagaaaggttggggggcacatagacgacctagatgaatgctttaaagtcctcagaaagtaaaatatgaaactaaatcccttaaagtgttcctttggagttagctcgagaaagtttctaggtttcatcgtcaatgctcggggaattgaagctaatccagagaagattcaagccctcctagatatgaacttgccaacaaaaatcaaagaagtgcaaagtttgattggtcgacgaattgccgtgctcctcaagcagatttgtttcaaaatcaacaaataagtgtgtcccattcttcaatatcgtacaaggaaacaagcaggtcgagtggatggaggaatgtgaaaaagctttacaagaactaaaagcacaacttgcaaaacctcccgtactctcaaaacctctaaacgaagaagaactgggaataacttagctgtcacggaacatgccgtgagtgctgtgctaatcagagaagagaacaatgtacaacacccagtctactacatcagtaaaagactcattgaggccaagggctgatacccgttgatagaaaaactcgcttactgccatattttagcaacaagaaagttaaggcctcatttctaagctcatattgttcaggtatacactgaccagccattacgccaaatactgcaaaagccagatgcttctggacggttactcaattgggcggtagagttgggccagtatgaaatcactttccaaccccgaactgtaatcaaaggccaagcattaccagagtttgtggtagaatgcataggcaagaaagaaatcataccagaaagcaaccccgagcc

SEQ ID NO: 158016 - DNA, 513 bp, Cannabis sativa
acattaggtatttttgccaccaaaaataaacattaggtatttaagtgtataaaatcgaaaacattaggtatttatatcgcaatttaccctttttctaaattatatgggatccaatacttaattttactcaggatcaggtttaggctaagacgggctaagaccgcgcgcttaaggaccaaattaaaaaaatatctaagttttagaaatatcatttgaattataataagagcccaaaaaattgtttttctaaagcccattttaacttaaaatccgttctaattatactaatagcgatattgacaagtaagaaagtattaaacaccattagtacttttagcatttttccaattagctactaaatctagaacaataattccattaagaaatatatttggaacaatgagaaaaagacaaattattgaaattccgtattttaatattccaagtttaattattaaattaagtgattaattaaatgcggaataatgaaattggtactgaaaacagtttttc

SEQ ID NO: 158017 - DNA, 519 bp, Cannabis sativa
attttatttacacattggggacaatgtgatctttagtttggggggagggacttaaatttttaatttttctgttttaattttctgttttagttttttttaggagttggcaataagctaaagatagttgtaagctgctgttgattgtaaagtgtcctgaaattgtaaaaactgtgtgcttaattctgttaactctttggattagtttggatgcttgagaaacctatgtatggatgcaatttgatatctgtgaaataagttataatttcttattcccgcccacttacttgtctcaataccttgtaaatttctgctcattaacacatcacttcctcttaataatctttggaacgactactgattctgcatcctaatatgaatctttctagcgtactttttccttactcatacacttcctggggtgactccccgaaggatttcccatcttgagattaccccaagttaagtatgcttaactccaaagtaagctcatggtgggttatcagaaagtagatacttctt

SEQ ID NO: 158018 - DNA, 519 bp, Cannabis sativa
tcttttgcaatctcgggtcggcaactaacagaaaaaatagttgaaaacgcctcaactatccgatcatcacagccgcgggctacaaacccagtaccaatctcatttgtgtcttcaaaaatagccccatccacattgatttttaactgtccagcagctggtttggaccagtggtctcttgtgtcagtgcgattggaagacagggagaccgagtccagccgcttagactgagcacactgccattgtcgaagagtggtcgagccagccaaacaaccttagcagcactacaacttttaccattccaaagcatatcattttgtgccttccgaattgcccaaccaaccatgacagcttcttcaaccaatcccgtattgcctactgccaacacttccataaaccaatcaaaaaaattagttgctgcataatgaccaacacctaacgcagatctgagccaacacgaatgagccaacacatttatattactttaagtgtttgtatattagttattttttaataatattt

SEQ ID NO: 158019 - DNA, 1018 bp, Cannabis sativa
  modified_base (43)..(57): a, c, t, g, unknown or other
ttatttctgatctttattaacaagtaaatctgattatattgannnnnnnnnnnnnnngggcacaaaacccaacaattaccagtaaatgcaaaatttaaatgctgtatttatctctgtaatatgtaaattcttattattaataaatttaaagtttgttcaagtaattacaaagtttatattctttaaaattacttaaggggcatgtatatgtgtatattaactggaggtcatctagaaatacatattatgttgcaaacccaaaacaataaaaataaaaaattccacaaaggaaaggatagttgattaaaattgtccatggacaatataaagtcaaaaaattgaaaaacattttctttagaaaagaaaaatcaaaatatatatgccagttgaatgttttaacgactcacattaatctggcatgtattataacgaggcacaaggataccttgaaataatactaaagctaaaatatgaatagatgatctaactattcatatgagcaatcaaaagatatacaaaatagttccagagatgaattattcaaaataacttttaagtttgctctgaaagataaatgtttaaatatggaagattgtaaactgcttgcatataacagagcagaatcgaactgctcgcggattataactgctcgacatatatatatatatatagtagattaataactacttaaacatcttaaaggaaaaaataggagcaatgggaatacttcctagagtatcaataagttggatcagaatataactgttaaaattgtgaaataaaacacaatgaacagacatattcaattcaaacctaaggtacgaggcattaaaagtaaaataaatataaaaaaaataaaacaaagttggccatccaacaatgcaaaattccttacaaaaataatgccactaggggcaaccattgtctcgaccaaagggccaattttcctaagtaaataataaaaaaaagtaccaactcaggaaaagggaataacagagagtaagaaataaaccactta

SEQ ID NO: 158020 - DNA, 516 bp, Cannabis sativa
taacacaaattttacgttttttttccattgaagctaatccttttgacagccaaaaaaaaaaaaaaatctaatcctttgtaacatttttacttttggttaattaataattgtcatttacttatgattgtgtgtagtaacatgcacgttgtataaaatgaactcgaagcattgtttgtcttttggcatttctttaattaattataatgataatttttttttttttgaaaataagcgtgaatgtaccattaataagcagagttagacctcgcagtcattacataaaaggttctccggaactgaagaaaccggaataatctcatacaacttgtgaataaaagcccaattaaccacattatgggctgcaaaattacaagttctactaacatacatgaaattacaacaagagaagaagggagatgacttaacacaaaatgagatataattgtcaatcgcccaatgagactccgatccattgagagcattgataactaatctcgagtcactctcaatcaaaac

SEQ ID NO: 158021 - DNA, 647 bp, Cannabis sativa
aatcactggaattgattatatcaacggacactgctgttaaactcaataaatataattctataattactaagagttttattctatatttatagtagagtatcatgaagttaataaacaagggttatttggtttatgagactcaataaataatctagtttattaaagcttagaattataggtccatcgtccatgaatcgcaaccttgaaacactgtcaacggtagggataaagagttgtataatgtgatttggagaaatctattttgaattagaaaaatagtaattatttattttttttaataaataaataatcaaattaattaactagagaaaagacaaaaattattaagaaaaagtttgtcaatacaagatttgttaagataaaagttttcaggacaaaagtcaccaaccttgtccaaaataacaaggcaggcacctatagcatgttcgtgaccttatgaagtttgtccttttgggttaattaatagaattaggtaaatatctaatttgaaaagtagttatagatatatcaaggttgttaagatacctctcaagtagttaagagattccctcataaatatcagtaaaagaattcagttatagatatttatttatttaaacaagtaaatataatttaattaatgagat

SEQ ID NO: 158022 - DNA, 526 bp, Cannabis sativa
ttgatctcctcattatgtagagagcgtctgacttaaactgtaaaacaaaagataaaaaacattaatcattacattaaaagtataattaaaataaaaactagttaatcatccaatctctatccattcccaaacttctaacaaaacaacaaaacaacaatttaattaaccttttaaattaattttaaccaattctatttttaacatgcaattaatctatttaattaattttaaccaattgtatttcaactcaacttatttaattcaataaaatactaatcctaccaaaatttctaccaaaataaaataatgaaataacataaaataaaatattgatagattctgaaccaatttcttcttttttcatgcccataattttaatgaaaaagtgccctgtgctgaaatttttattctgtcgagagtatgaatttcatggttcttcccaactctatactttgtaggagtaaaatataagtctcaccatcaaacttgcccaccaaaacactcacaagttattgtaccagcccaa

SEQ ID NO: 158023 - DNA, 848 bp, Cannabis sativa
  modified_base (302)..(307): a, c, t, g, unknown or other
gattttcactatttcgaataaaatgatcgtcagtgcacgaaaactaatttttctctaaatgtgtcaaagagaaaagtgatgcacaacgatcttggcttcgtctttgtgaaatttaatgatttttggagatgtgtatggtgagattttaagagaaaactaacaagtgtaagagtaaggaaaaagctcgttaaaatttcccatgaaaagaagactattttcaatttttgaattacggggccatatcaaccaattttcacccgaaacgaatcttcatattcacgtcttagtagtacgaattcatnnnnnntagtggcaaaaaatattccgagctcgaatagccggatcgatcacgactttcttccccttgtcttgcgtgcccttagttggcctcttggaggaatccacgacaggggtgaccaccacgtcgcttttcctcttctgatgaacgataggagaagttgccgctgttccagattttggcttgcagttaaggatgggtgcggacttcaagaaagtcatttctgcaacagcaacaacaataaaaaataataataattgccagtaacagtaagattttaacacactagtttatgcatccaatatgctacctgatggtggtcgagaggtttgcttggagaggcgtttgtctatttgctcttattgtttctcagatggctccttgtacactggctctctctgaaggctcgcgttctctgaaatcaagttgtgttctcgcaactttgaagtcgtacacaataatcgccagtcacgatcttgcacaggaagactttcgagaacctcagcagtctctctgagagtcgcatcaagtgtaggtcgagccggtctat

SEQ ID NO: 158024 - DNA, 501 bp, Cannabis sativa
agcttttattgctttagtagtttattttaatagtataatttaaggaaagtctgttaggaagcatgttagtagcctgatattagaatagtcgtatgtttttaatttcctaataagcgacattagtaattttttctttgatcacaatttgaccagactagctcttggttacgcaggctgttcaaattagtatggacgccaggcaaaataccaggagccagggcaattcggttggatctaatgatggttagggagctcaaattcccctaaatgtctggggccgaggtagaggtccaaagggcaggtcacgtggtcggggtgatgttaacccgccacatgttgcccaagctgccaaagcttcacatcatgcccgaaattgggaaaataggtttgcagcaatgcaagctaggaccaatgaacaagataatgagattcgacagttgagacagcagggtgctcttgcagtgcctgctccagaaattccagtcgcacctgcccctgctg

SEQ ID NO: 158025 - DNA, 539 bp, Cannabis sativa
tacttctatactataaacaaagtactcttacatgcattttgatttgtccaaaaatatatgtgtgattgataacttgatcttgctcaataagttatatttaaattttttattattattttaagtcatcaaataaaatttatatatttatataatatatctatatatttataagccgaaaaatatgaataagcaatttattattttttcttttccatattttttttacttatttctcttctaagtgatatttaatatacttacccaaaagaattatataaaatagtaaattataaataatgatagaatagaatataattatataataaaattaataaatctataatcaattcttttatagtaattaataataatataaacatgaaaatgttataatttagattatatcattcattataaatacaatatatatttatggaacaccttttaatggatattacccatgaatgattacgaaacaaatttaactataaatattaattttaaaaatatcaaaccatcaaattttgatctaataacga

SEQ ID NO: 158026 - DNA, 529 bp, Cannabis sativa
aacgccggcccctcaccaccgtccacaacaccgtaaacacgcaccgacacacaaagaccactggagaagaagaaggtccgatgccgtgcacaaataatttttttttttgagtttttatggtcgggtccgatgggctcatcgaaccccatcggacgggcatcggacccgacttcaaaacccccaaaaaaatacccatcagacccatgcatcaggacccatcagacgggcccatcggacccgaccccttaaaagcctagaaaaattgaaaaaaaagaagtttttaagaggggtatttttggagttttggaaaagtggtcatatattttcaatgtagaaaagtattagtttaggaaaaaaaaattaggtatatataagtatagaatttcaaattttctttttatatcatatgggttgagattgtttcatcagtaaaaaaaacttaggaaaaaaaatttttggcaagaaaaataagaaaagaaaaagttaagtttgagttaaatatttttgtatgaacatatttttgatatag

SEQ ID NO: 158027 - DNA, 581 bp, Cannabis sativa
aaaataaaataaaataatacaatagtattataaaaaaaatttataccatattaacaaaattatatacaaccataaaataattataccatacttacaaaattatacatcacatttatatataataaaataataactaaacatgtatgatctaaaataaaatgatatactgtacaataaaacgtatatatcatataacaaaaaatatataccttacaatagaaatatatataataacaacaaataaaaataaagttatgtatcgtgctaataaaattatatgtcacctcaacaaaagtaccataaaaaatagaacttaaatatttttttaaaaataaatataccgtataataaaaaatacatatatcattcaccaaaatatatatactaacattaataataaaataaaatatatattgctaatatatatatcatattaacatgtatatatatattacatatatattatataccaccattatatataataaaataaaaattaattaaatatcatttaaaataaataatatatcatacacttaaaataataattaaatatatgtagtatgtcaatataattatat

SEQ ID NO: 158028 - DNA, 560 bp, Cannabis sativa
ttcgattattttacttatgtttgacttttaaactttatattttccttaattattctaggtgtgaattttattgtgtgaagattttattttatttttttttattgtgaaataagggttacaacccaactcaacctattataacgtatgggttgggttgggttaggttgtacaaaaataataatattaatgggttgaaattttataggctgatcaaattgggctggcctattaaaatagcatcaatccgcccaacccaacccatttgcagccctaatgtgtgctgaaaaaagtcttacttttaccagcgtattaacgcgctaggaaaagtctaacttttgccaacaaaaatatgcactggtaaaagacttacttttacatgcacatttatatgccgataaaactttgtaatttaatttaatttttaattaatattatttaatttaaaaaatttacaaattatttattcaaataacttaaaaaaaataaaacatgacaaattaaaacataattttaaattattctaattatatatgtttatagttataattgtctaaaagtta

SEQ ID NO: 158029 - DNA, 686 bp, Cannabis sativa
tttttcaagaaaaaaatattagttctcgtagtagcaacatgaaaacaatgaaaaaacaacctttcgtatttttgtaaaaaaaactataaatccgtaaaatgtaaattttgtcattatttagtatttataaaataattctaaaatataaccaagataaaatatcaaatcaaactatattaaataaatatatatttaatttttttttgtacatacttttttgagttgatgtacaagtgatttgtagttgcttttaagtttgttctaatttgataagattatttgtttgtgtgtgtgtgtgttttatattaacccaatttgttgatttataataatttttcatattaaatcagggttgttatctcattgttatttagttgttcaaccaagaaaaaattagtatatatttaattttctataggtatgtatatttttgagttggtgttcaagtgttttatagttattttttcatttttatttttgtgattattagtatctatatttttttttttttttttgagtttaggcagtgtgttgatgtctgtttaatttgcatatttttgtattatttttacattacttttaggttgtgggtaatatttattgatgtttagttattttgcttatttaattagaaaaattgttgtgtagttgtattcctgtaattttttggttgaccaaaacattca

SEQ ID NO: 158030 - DNA, 767 bp, Cannabis sativa
tggtgtgttgaaatatttagtttgggtgataccgaaacccatggctcgaacccagccaccacgctcatctgtccccagcgctatgcttaacacgtcgcttttaccttccacttgtacaacaccctcttcaacttgcttacgtaatttgtcctataaacaaaacaaaaagagttagaaataacctatgaagcataacaattaatacaaatgaaattgaactttaaacatacaatccgtttaacgatttctgcagctgggccctccacctcacctttcgtgttcacgtgaagtcttttctagatttcagatctatcaaattcagtaatttggtagcctacctctttctctatttattcttgaaccatctttacaccacctcgttcggtgcgataattgtaaatattacaagccctactcttttaggccttcttcctcttcacgtcaaagtttggacttaatctcgaagccacaacctctctccattgttgcaaatcaattattttttcataaagtttcggtggcttctcgagaagatggggagccacatctttgaatgtaaaaatactttttcttagggtatttttccaatctttctacctctctccacctttagaaattgttaatttcctatcagtgtctggtacattgcacgtggcctgtcaaattgaaaatcgtaattataattacaaattataatcaatagtaaagaactcgaataatagaattaattttacctttatgtaatcccataattagtttttaatgtt

SEQ ID NO: 158031 - DNA, 594 bp, Cannabis sativa
  modified_base (569)..(569): a, c, t, g, unknown or other
actataaaaaatttaaggttgtaattataatagtgtacataaatttttgtaaaccgtccaaccgaataacccacccaaactaaaccgagataacctgacataaaatacggacagaaaatcccgacaaaaatataacccgcccaatctttatattgggcgggttgaaaataatatcaacctgcacaatcaacccgaactaacctgaccaacctgattatgagagttttatatatatatgttttaattatagataatctgtatattatttaatttatatgcatatttataaaaaaaataaaaagtttaaactactatattttttttatggcggatgatttgaactttaaattcaatcttcatatttatctcattattacaataactaaaatataacaattgaatgtaaaaaaaaatattaatgttcggtttggacaggctaacccaactaaaccgaccaattcattgggcgggtttgatacttttttttttcttaattgggcgggttgcatttagatttttgtaatccaatgtaacgtaaaccgaccaaaccgactgacgtacacccctantaaataatattcaaatgaaaagtta

SEQ ID NO: 158032 - DNA, 587 bp, Cannabis sativa
ttctattggagcacaataattttctaacaatatatatagtgtatatatgtatattgtgtaacatatatttaatcaatctcttttattgtccttgtatattatttttactattttctattgtaataatatatctaacatataatataatatttataacagaaaagagtattttttgtttgaattagaagcatattttctaataatgaataaacttgatttgtattttgtacttaaaaaagaaaaaaaaacttgatttgtgtaatttttttagatatagaacattgccattgtttaacgtatgcatggtgacataattaggatgttaacgtatggaatactacattaaaaatatctaatacaatatttattcggcttggcccattgtttgtgagtggtattaaattattaattactctcaatgcattattgaactttgtatttattttgtatggttgggaaatggctacataataatacaaaccgttcatcattacaaaatggatagaattcatatcgttatcattcatcaaccattgttacatttctttccaaaccaaaaggtgaatgttcatgcttatgttataata

SEQ ID NO: 158033 - DNA, 664 bp, Cannabis sativa
tcttgattattctttgaaatattatattagttgttgttatctttttttactatgtctcctaaaattaaaaaatacgagtctgggtaagaaaagcgtaagaaagagaaaaaaattgaggagttaactcaatctcaaagaggagctcttgataaattgattataaaagaaccgcaagtttcttttgaaaatcataatcataatgttgttgatattaaaatttttgaaaatatgttgcctattattgagaattatagtaaaaatgatgatgtagaaaatagatgtgacatgcctattgaaaatgataatgtggaaaataaaggtgatgtgcctattgaaaatgataatatgaaaaatcaaaattttgattatgaaaattgtgatgatgaccatttgaataattcactcgaaagtaaaatcttagacgataataataatgcacagcaaacaaactcatttaaaaatttagttgatatatttgatccaagaaattgggatgctcttgatccaaaaatgattgatttatttgtgatgaagggtccaaaaagagattgttttattatggctagtcctaaaggtaaattttctagacgattcactgctaatttgtatactagagttttatcaaatggagagaagtgtgatagagattggcttgtttattcaa

SEQ ID NO: 158034 - DNA, 531 bp, Cannabis sativa
gacatcactgtaattgtgaatgaatatatgttctggacttaacagattttgtgtatatatgaaaccataaggatgaagatggttgtgcatgaggatagaagaagaagaagaagaaagaaaatgaaaaaaaaaagaaagaaaaaaatataaaaataaaatttttaaagaaaaaagaaattttttattttttatttttaaaataattttttattttttattttaattttaaatatttattacgtggactaattaaattgtgccacgtgtacacgtgtacacgtagacatttcaacctggcacttaacaccaaaaaatgaatggaaagggctaactgctaacagaacttaggtttaggaggttttaccacaaaaattttagaattggggattagttgcaaaaacctagctacttaaggaggttataccacaaattactctatattggtatatatatattgttgacctcgcttttagccaacgacaacgagtcgaatttagtaagcgataagtgatttatagaaatcgatatata

SEQ ID NO: 158035 - DNA, 515 bp, Cannabis sativa
  modified_base (27)..(33): a, c, t, g, unknown or other
tttattgaataataattaatgtgtaannnnnnnatttttatgtaatttaatatttttgtatattaaagattttattataaactttatttttctattcggggatttcctgcctcgtccccgcgcacagtaggggattccctgtctcatccccgatgaggattaaaatttttaacggggatggggatgggggagcactccctgccaattccccacccagtgtgcatccctactcacatgcctcagaggcttaagcctcaaggcgtacgcctcacaaggctgaggcataagcctcatggataatgactgaggctaagccttagaggcatttttacctcgaggcgtacgcctcaaacaatatattatgtatatattttttttatatttatattatgtattatatatcatatatatattttacttagtataccagttgagttggatcagatccgatccgagtatttgatctagcggggcggggcagggcagatccttacatgatctggatcaggttggat

SEQ ID NO: 158036 - DNA, 605 bp, Cannabis sativa
ggaatgggtgcaggaggtccagaggtcgtctgggatcgacccaaaaaatggcctaagtgggaaaaatagaagtctttggcatggttcccccaccgagtggaaggcatcctaaacttataaagacactcatcaaatcctatgggcctacattgggtatactctcggaccgaggggacatggtgaattactaaaggagacttaccggaacctgaagtactggcatctggagcaccagtgttaggaaccgagaccaaaggcttgggactggagggcctcctatccgcgccagtttccaggcgaagggtcctcccagcagcagcctgggccttgatgtaagccagctcgtgttccctcctgaagaggtacttctgataccgctcctctgtcgaagtgattatgtccaaaatacgtggaccaaccggggctgtgacacgtggattgaagaagcaagactttgagatgattcgactaagtccccttaattaaaaggatcagcacttaacatgcctcccggagaaggcatgaaggtttcacatactcccggagagcaaggctataacgaagcacctctgggagacgtcaaatcctatctgaacagtcacctc

SEQ ID NO: 158037 - DNA, 540 bp, Cannabis sativa
tagagatgcaccaagtaaaaagtgaagaccaagtagcaaaatgactcactaaaagactcaacacttcaagatttaagaaactaagaaaacaactcaatatgagaagttggtgttgaggggtagtgttgaagtcaccaccaacctctagaattttctaagcttgaacactaaaagaattaagggcaatttttattaatatacaagtaaatacacaatattacaaaaaatgtgtaaaaaaatataattacataattctatacaattttatgaatatttataaataaatatatatgtttacaattttaacttgttgattactttcaactaattttctaagaaaaaataaacacataaagctaaatatataaatataaaagttaatatttatattttgatatattacttaaataatatattgaaatgaaaaaaaaataataaacaaatatatttacaatttttgtttatattttataaataatgtatatatatatgtttattaaatatttaattagtattattaatatttataatactattatt

SEQ ID NO: 158038 - DNA, 507 bp, Cannabis sativa
agttttggtatttaagtggttagaattggaaaaatggcattttgagaaaatacggaaaaattgtcaaaagtggaaaaattcccaagtggggcccacttacaatggccggtcacttgctagggtattttccatttaatttttccattatttaaatgcctaataaatcctaacataaacctaagtggttgcctataaatagatagtgatggttcacacttaaagatgatgaaaattcaccttcagtaaaaaaatttcgtagccttcttcttctattttcaaaccatcccctctctttctctcttcatattttcataccttgagtggtagagtgagtgcccacacacatcaagtggtatctcaatcatagagtgtaaggctgtgaagaatctagaattaagataaggatattcaagctcagatcttggtgataccctactatagacaggatacaagggttaaagatctgagtggaaggagccattaatattccgttgcacccactgtaag

SEQ ID NO: 158039 - DNA, 655 bp, Cannabis sativa
actacgggtcagttccaagccatgaggtcagggtcccagtctagttcgactttgggtcccaggtcctggtccgggtcccaggaagatctcggtcccaatttttatgcccgtgtcacgggtctaggttccccatccaggtccaagtcctaggtctcggtctgagttcgggacccagtcggggttcaagtcctggtccgagtctgggtttgggttcctatctcaatatgtatccagatctgggtttgattatcggtccaggcttgggtctgagtctcgagttccgatctgggtctaggtttcgaggcccaagtttaggtcccaaatgtaggtccagatcctaggtcctgatctgggtccattcaggtgtttgtccttctcccagattcaattttgattcggtgtctaggttcgggtttcggtctgggtctgggttggggtatgaatcctggtctgagtctaggtctgggtttgggtccagttctagatcccggtctgggtctgggttcaggttaggtccaagttcgggtcctgggtgcaggtccaggtcttggtctgcgtcagggtctcggtccgaatcaaggtctcgagtttcaatctcggtctagggcttgtttgggtttgagtccaggttcgtgtccagatccctatctaggtc

SEQ ID NO: 158040 - DNA, 844 bp, Cannabis sativa
  modified_base (250)..(251): a, c, t, g, unknown or other
  modified_base (360)..(365): a, c, t, g, unknown or other
attagaaaataatttccataaataaaaatattctaatataacaaaatatttttttaaaaaatattaatatcttctattaaatttaattgtattaatatggtataaatatataaatattaatattatttattttaaaataattcaatttatactaattttaaaataatttaaaggtgaattacctcatatatatatatatatatatattttcaaatttacggtttcagtttctaaagtggttgcagcgctnnttgcaatagaggtttctatacgattttccgtaaaaatgcaaaaaaaaaaaaacaactgttttaaagtgtaaaaataaaaaaaccctaatttaaatatatataaatattnnnnnnttatttgtaatattattattttttattgttattttaatattagaagtatgttcaatatataatattaataaatattgtttaatatataatattaatatatttattttaatgatttaataagtgtttttttttaatttataaaattttaaaaatacatattataaaaataaaaattaaaaatataactaagtatacgtatcatgcacgtaacgcaataatctaatataaataaataaaccaactttcatttcatacctctttatttattttttaattgtttcacttttgttttgtatgactcttcatacgttttttttttttaagattccatttaagcctaaagtaaactgttatataattccaagggtcaatatttttttcaagattaggtttaagtttatgttcttttgtttttttatattgacataaaagtgtgatttgaatttgacaccttatagagcactcacaaggtaaaacat

SEQ ID NO: 158041 - DNA, 537 bp, Cannabis sativa
caacttgtatttattttatccaaagtcatgattaatgttaattacaaaaatcatgagtaattgtttgaaatacacccaaattattttgattgaaagttgattatccttataaattataacactcccaacagtttgtttactctatttattaaaacacattatcaaaaaaaaaaattctctattttaagcataattttaggaaaaaaatcttctgtccccaattacctgtctcattcatgtcctttcaataaatagctgtcatgtgtctttgataatatattaatatacagcttagataatatttaaataaaattttaataaaagatacatttaaaatatatttcttataaatcatagttcaatttttttttgtacaaataaaataaaatagtacgatatcaaaactttacaatattcataaaagaatattttcgttccagtaaaagttaaaaaaaatccatgcaatctctaaatactcactattagtcctattgaaaaaaaaaaaatgtacatttattttttaaaaagaataaaatc

SEQ ID NO: 158042 - DNA, 518 bp, Cannabis sativa
atatacatacacacatatataaggatgattttttaatggataatatccattaatagatactaaaaaaattgatgaggttgcaatttggtgacttgctatagcaggttacgaagaagtttttttttaaaaaaattatattttttttaattatagagaatgatcattcttagaaattaatttattttttttttaaattattatattatccttacattaaatatttaaatgtattagatgaggattattagtgatattaatttatgttgttctttgtttcaccattgaagacattgagattggtatgaagaagacactggttttctatgtaggaaattacatcaaacctttttaactttttatttaactaattaatgtagaccgaaattaaaaagataaagataaaaatgagaaaacactaaaaaaatattctaaaattatttattaaatggtttatggtaagagctatttacaaaaatataagaaaaaaatataaattttgatatatatatatttatata

SEQ ID NO: 158043 - DNA, 500 bp, Cannabis sativa
ggggcatcagtcgatggacgactccaacctttctaaagtcgtttgtcctaatgtgagggctctggccgcagagaaggtatttcgagatgacatcatcgccacggcagaggataagtaccagaagtacctcttcaagagggaacaggagcgggcttataataaggcctaggtgaccgccggaagggcccttcgcattggggctccgttggagcagagggcccccagaccaaagcccgtggtcccagtaccgaatacgggggctcctgatgccagcacttcgggttctggtaagtctcctttaatgatacattatgtcccttccgtccgtaagtatactagccttaggcctatagggttcgatgaacgtctccactggtttaggatgtcgtcccctcggtgggggaatcatgccaaggagtattatttctcccacttaggcgattacttaggtcggtcccggatgggttttggaccttcagtgcccgttcccttggactctt

SEQ ID NO: 158044 - DNA, 652 bp, Cannabis sativa
  modified_base (49)..(61): a, c, t, g, unknown or other
  modified_base (160)..(163): a, c, t, g, unknown or other
  modified_base (307)..(309): a, c, t, g, unknown or other
aaacttaccgttatatctttctaactcaatatcaatggttgatcttagnnnnnnnnnnnnnaatcctgatatggttaggtttaacttatttgtattatttatatttttcaagttgtttgtggaagctaaccaatgattctggcagatatttacatcttgnnnncatggtagttcaattgaatgggagtgctaatcatagatataaaatttatagctttcaaaatatttagaagtgaaacgatgatttcattcgagcttggcttgatagagataaatgattgagatcttatttcagtaattatattannntactgaaatatcatttataagtatctaagtgttttaagaattaaatacattgaatgatagaacgataaatttattcctattcattgtagatcatctatagaggatatttgactattatgattgtaacaatggataatcataacgtatctatgtcgtggtacaatagagtgttctacataattgagagtgtattcaattctaaatctatagtggcgaaaggtagaattaataagttaaagaatttatttgataaattatagatctacttaatattgaaagcttggttatataggcccatggtcccctcactagttgagacaatactgcttgcagactcagttaa

SEQ ID NO: 158045 - DNA, 517 bp, Cannabis sativa
tccttggttctgatcctggtttgggttcgagtttttgttttgggtccgggtctagctttgggtctgattctaggagtgggtatttgagttcttgtctgagtctgtgtttgggtttgtgtccaggtctggaccccgatttgggtctaggttcgggtaccggtccaagttcaggtcccgagtgcgagtccaagtttgggtcttggtcacgatctctgtccagatctatgtccagcacttcgatcccagtcttggtcttcgtctgagtccatgttcgtatcagaatccctatctaggtccaagtgtgtgtttggaatcgggtcaaagatttaggtccaggtccaggtctcaattccagtctgggtacacgactgtgtccgggcctgagttcgagtctcagtttaggtttgagtgtaggtctgtgttcgttctaggtttgcgtccaggtcctggtcacggtcctagtcttgttctagggtcttggttcggtgattcttgttcaggttctaatttcgggtcc

SEQ ID NO: 158046 - DNA, 508 bp, Cannabis sativa
ttttttttctttttataattttttatcaaaaaaaatttcttttttacctacaaaaattactaatttcatgtgatgtaggatcatggtaggtaattatagaaggaaaatttaataattcatgcttaaaattattatttatagtcttttttttttttgaatggatttatagtcttttagtatgctacattaaaatgtattagaatttaatactctaaaattaattaaatctcaaaataccttcctcatacattctttctttctctcagtcctctctccatctcactaactctcaccaaacccaactgatacccacgaccacagaaccagaccaaacttgacccagaccaaacccacgaccaccgcaccatctccggtgaaacccactccaaagaagaaacgtaggacaaaattgaggaggatatcgtgaaaccacaaagagaaaacgtgaaacccaaagccccaaaatctatgagctcaaccaccctgaaaccctcaaaatccctaccca

SEQ ID NO: 158047 - DNA, 575 bp, Cannabis sativa
ttaatgacatctttaactttgcacacaactctatcacaatttcctatttctccattccaaaaaatattatttcgggtgcaccaaatcaagtaaatcaaagctgtaatggcagcagtaaacaccttctttttgaagtcgttgcatcttgccttggacagccacctgcatatagctttcagggatacatccgtggcctcccatagcagccaccctctgattttacacaagcagtctttcgagaacttacagcagaagaagatgtgctcaatggtttcactgctgtcattgcacagtaggcataagtcttcttcaattactccaaatctcatcagtctttccctcgtcttcaacttcccaagcatcgccaaccaaataaagctatgcttaggaatgttaaaccgattccaaacaatctagtcccaaaatactctagctggttggtcatgtagtgcccgatacccagcagctactagattactgcttttagccgtgtttatggacccaatattcttcatttgttctttcaccattaccactttcttccaatacctactttcgggtctgggtgatacgta

SEQ ID NO: 158048 - DNA, 557 bp, Cannabis sativa
aaacccctttttgtagtagtgtcttccctaatcctctacagtttcaagcaacgcctctcatggctcatgtggaggagatatgacattctcctccacaggggtacaagagtgaacagacacactagagccagattcttcaataaaaaaagagccaaccatagggttcttcataacaccatcaatgtgacttcgtgaaattgagatatcataagagggttcttcaaaggctaccttagactcatgatcctgctccttggagtcccataggaaatcacgaataacaccggggtgcatttggaacaatttttgaggcctcgagcataaagaagcagaggcctcatttaatttccttttcttaaaaggagtagttcgttcattagtttcagaagtaggcttgacaccaatatcaccccctaaccgtcgtatctcatacaaatccaagctcccaaattgtttaagttcttgtaacatagtttcttgggcttgaaaaaaactagacaaggccctattctcatcaagttaagaatggaccacttgcccacaaactgagtcaacag

SEQ ID NO: 158049 - DNA, 721 bp, Cannabis sativa
taatatatattatatatatttatgcatcccacaaaaaaatagtatatttctatattttttttataggcatctatatatgtatttttaggggtacacaatataaaaatttagaaataaattaagtgttagagattttattataatggaataaaattatgataataattctatggcaatataatataatgacactatatgtataatatacaaataaattaaagaaatgttacaatatataatatacaatatatgtacattatatatataatatataagaaaggtaaaagaagatatatatatatatatatataatatatatatacactcactcacaactttaagtgtagaataatgaaaattaccatgacttgaacaaggtattacacatttgttcaaaagcttatttccccctatctctaagcactaagggaactctctaagaaatagctttgggaattatcaagccttaaggttttctagcaaagtgctttcttaatagaaaactctcgttaaaatgagcaccttaaatctctttatatagtgtttaaaatatcactatttgaaatttaaactcataaccctcatatatgttatggactcacatataactcatacacataccgtaactgctatagcattaaaaattttaaattaagatatgtaatatctttttacactcttaatgttagtgataatggtggaggttactcatactaacaag

SEQ ID NO: 158050 - DNA, 609 bp, Cannabis sativa
actaatgccccggcggcattcatggatttgatgaactgggtgtttaaggattacctggataggttcgtaattgtgtttatcgatgacattttggtgtactctaaccatttcagatactaaaatttgcaaaatagtctcacttaatttactctatgcgaccatcattatggttgcaaacaaccataatgatcgtttatagtcgcacagtgtaattcatgattgattttgcgaccataaaaagttgttatgctaataaaaaaatttacgaagttattttattaataaaaattttcataataaagactatttttacaaaacactcaatattttgtttatgttttttttttattattaaatagttaatgtgtttttttattctaaaaaattattgattttcttaaaaaaaaatctataatataataaataataatgaataaagttaattaattacaatttaagtcatgaaatttaatatttacgttagtgtcttttattaatcaataaaaattgcatattaaataaaaaaatatatcatcaaattatttattaaagatcaatatcttttcattttttataactctcaccaccaccactaataataataataat

SEQ ID NO: 158051 - DNA, 877 bp, Cannabis sativa
aaataagaagaactgccataaaaaatataaaattgcgattcgttcttttatcatataaaataaccagttatttacacaagtactgtaactataaaagtttattataaaaaaaaaaaacctacaaaagctaaaataaatagtaatataattttgttaaggcaataaattaagaaaacaatttcttccatataaacaaaataaatttcttaatgcaaaattcagttatacaattactaaaactcatataaattttacatgtttcttataagctcaaaacttgaccatcaacctattacaaaaactaataccaatattaaaaaaaccaattacaaacttctcagaaactccaatactagaccatcaacccactactaaaacattcactatccactaaagcataatattagctacaaaaaaagtagaaaatagaatgagagtaaattcgctagagttgttatcttgatgaaaaaaaaaataagttacggataccaaagattataaataaattttacatgcttgtattctaaatatactgtataaaatattgaataaatcaagtacaataccaaaataaaactacttacaaacttctcaaaagctccaagactatcaacccaacactacccaaaataatcattatctactaaaataaaatattagctacaaaaaaaaaaaatagaaaatagaatgagaatattcgccgaagttgttatcgttgttggaaaatcatcaaaagagtcatcgtagttgtaacgccctaaataattaggcacgctacccaagaacttataaaaccctaatccccctaatcaggattactaattaaaatagcgcagaatttaaacttttatagtaaacagaatgaaaataaacttgt

SEQ ID NO: 158052 - DNA, 612 bp, Cannabis sativa
agtttatatggaacaaagactttacgagtcacatgaataaattgtttgatgactctgcttctccaactcaacaacctcctgttaatgtctcctactcttactcttaattgctctttttgtaactgttaagtgatcaagaagaattgattttattgcctaatattatcaaatagagtgttttgaaaaaaaagaggcttatttggttttttttcatttgtgaaattaatggattttatgtgatcaaatgtgttgaatgcattacaggaaaagcctaccaagcgtgagatagaatgtttgattttgattttttagtgttcttaacagttattgtatggattttctggacattcttaacagtatggaggttgatctgagtaaagaactcacaacccctaccaagaaattaaaatataataaaattattattggttcctaaccacacaaaacaaaatatatatacaaataataacaaaaaaaaaagtaaagtattactttgcctctgaagtttgtttagttttttttttatgtttaacttgtcttaaaggttcattggtcatctgtaacaattgtttctttcataaaaataaaatgaatatgagctccatctgtaga

SEQ ID NO: 158053 - DNA, 501 bp, Cannabis sativa
taattaaaaaataaaataataaaaggaaattaatatcaaagataattgttattggtcactaataaatttttttccttcaagaaatatatagttaaaaataaatttgcattttggtctctaaaatatattttctttaaataatgttttttataaagtacttttctttttacgaatgcacatatattaataagaaatttctactgtataagataattattataatgaaatatggctcataaatttatattaatgattgatattcttatatgttacatatatatatataaactaatttttttcataaaaatgtagttattatggttataattatatatataattttttttctagggataagctatcaagtttttttaaaaaaatgcttttaccaattttttttatatttaatttttttatagttatctacttttttttttctatcttaccattaattattattgttacttttatattttcttaccaaaatgttattatttatta

SEQ ID NO: 158054 - DNA, 572 bp, Cannabis sativa
taggtattatagataccattttcggaataaaatatttctgggttcggtggccttggaaactcgacggagtggtcagaaatgtcacgacaattaagttgtgttgtattggaattataccagactagattaaaatctgtgaagtaggttaaatcgggaaagttagaaatgaccaaaatacccctaggttatgttatagctcaagttttaatgggaggggtaaaagggtcattttaccctaatttgtcttttatggatttctagtaaatgttggctgaatattatttaagttaacttatatatggttataaatgttttcttttctagaaaattaaaaaggaaaaacaaaaaacctaactaacaaagtcacatagtgctatctatccttctccctctcgtggccatagaaatccagtaagaacaaaggtttttccttacaatttcaaccaattctaggctgagctacccaacttttgttgctgtgtaaattgtgaggtaagttcttcttctttccttgtggatttcttaaggtttggattaacttttgcttagggtttagtttaattttggggctg

SEQ ID NO: 158055 - DNA, 595 bp, Cannabis sativa
  modified_base (187)..(201): a, c, t, g, unknown or other
  modified_base (299)..(305): a, c, t, g, unknown or other
tgggatgtgtactaatgcaagtcgatcgggttatcgcttatgcctcccgccagttaaaagattatgaacagcgatatccgactcatgacctagaattggcagcaatggtgttttcttttaaaatttggtggcattacctttatggagaaaatgtgaaatttatactgaccataaaagtctcaaatannnnnnnnnnnnnnnagatttgaacatgagacagaggcaatggttagagttagtaaaagactatgattgtgagatcttttatcatcctgggaaggccaatgtagtggccgatnnnnnnngcaggaagggtcccgggcaggtagttagtatgatttaaatttcacctcagttagcagaggacatggttagatctagcattgaatttgttgtaggcaagcttcacaactttaagctgcaatctgatctgttagaacgaattaaagacgctcagatgactgatccaaaggtagtaaaaatcagaaaagaggtttcagctgggcaagctagagatttttcagtgtcagacagtgggatgttattgtttaaaggcagggtttgtgttccaaatagtgtggaacttagaaacgaa

SEQ ID NO: 158056 - DNA, 507 bp, Cannabis sativa
  modified_base (451)..(459): a, c, t, g, unknown or other
taacaacacttgcaatatagaaggatcaggtaatgtcagttttaaaatgtttgatggtgtggtcagaaccgtaactggtgtaaggtatgtccctaatcttgctagaaacctaatatctataagtgttctaaatgacatgggtattgttagcaaaattgaatcaggttctatgaagctaagcaagggagctatgaccattattaaaggccacaaacatgaagggctttactatttagatggagaactagtgatacaatgcaacaatgcagtcacaagcaatccagaagacctaaaggcagttctatggcacaggagattgggacacatcagtgagaaaggcttacagatcatgagtggtcagaaaatactgggtaaggataaagtcaggtagacttctgtgagtcttgtatcctaggtatgtttggttttgtaccctaaataaaactcattnnnnnnnnntctgatttactagttaataaagaacacaaataacattttatgttgcat

SEQ ID NO: 158057 - DNA, 755 bp, Cannabis sativa
ttcatttgacaatgcattaatatagtttgttgatgataattggtgacatatacatacgtattgagatacactacattatacgttattactattttatgataaaatgccacaatataccacaaaaagaaaaatattacaccccctttgaataaatctacagatgtatttttatttgttttgatatccaaaataacattttagttaaattttttctaatggtcatatgtgttatagttatttaaaatatcctgtaaaattttaagaaatataaaaaatttaacacgccgtaaatagagtttaaacaaaaaatttttacaccaaaaatataaaataccaattttattacatatatacaacaacacagttacatcaacatttttacattctctcttaattttattacacatataccatttgcacatcaaatccatgcacctatcaaccatcaatcaactctcaatcacttccctttctttcttttcttttgttttcatttgattttttatttctattcagtttttttttttaatcagatcaagtaacctccattgttgaaccatctccccacgattcctcaataattttttccctctcatttttgttcttcaaatttttttcaactaccactaaactaatcccataactgttttccctctttcattttgttttcaatctctatttaaaatggttgtgactcgttcatcctcatctccttcccctgttcagaaaaaaaaaatccaaaatgggtttgaaat

SEQ ID NO: 158058 - DNA, 685 bp, Cannabis sativa
  modified_base (399)..(402): a, c, t, g, unknown or other
ctcccagtgtacatcttccacgtcagcattttgaacttgtggggcagtggtaggagattgatctccggtgagaaaggacttctgcgtgctcggtcgagctcaagatcattgtttctttgtccagccataccgtgaaacatatttttcagttcgtctagctgagcctgtacggctgggctgacctgctcggcattctggtcaatttgaattatgtcagcatctttctgagcggggatttgagtacgggttccgggctgcgagatcgtcgtaacattctgatcgtctgctcccctccttctatttagatcattccttaggtcatgggttgtccctaacctttcgaacacagaagtgtctggctaccttagcggttgattctcttggttgacaggtggaatnnnnccattgatctggttggaaccatcaggtatgacttctcttgatgaataactagacaaggtctgcttgcctatcgctaggcccacgagtggaactcctgaccggggattgggcggctgaccatttgcagtctgggaagtattcatcattggatcttcgtcagtctcacccaggggaatgacattcggcagttgtcgacctacaactttgtaggctcttcgtattagcacggtagcttgccggctacgatcttcgatctctgcatggtgagcccttaatgcctcca

SEQ ID NO: 158059 - DNA, 641 bp, Cannabis sativa
attttattttattttttaatcattaagttgagagtaaaatttgtatttttaaaaaataaaaatgtattctataactacttttatttttttattttaaatacaaaaaataaaagtgtgttctataatttttatttttatttttttattttatttaagtcggatctaaattcgggtttgggatcgtgatccgagtctaggattggaaccgtgcttggagtccacgtctcaatgtccagataagggtcagagttcaatttcttttcatgatcgcacacattgtagctatttaggaccacttgtaaatttttagaaaattctaaatattttatagtgccgaaattaaaatttaaacaattactcactacgtgtagtacacgattatgaaaaaaaaaaaaatcttcttttatacacctattacatagtatacccactttacttattttaatttttacctcaatttttatattctttaagatatacccacttttatagatgatattctcattagaccccttagcttaatttatattatatgctagacttaagtagagagtgagagtatattgggcaactcactcaaaaaaaaatggatatatttaaaatatatatatatataatatcaaagtatttttaattaataa

SEQ ID NO: 158060 - DNA, 716 bp, Cannabis sativa
  modified_base (40)..(55): a, c, t, g, unknown or other
gaattcatattagggtgttaatccaacatacttgttagtnnnnnnnnnnnnnnnnaaaataatttccaacaattcctaataaatagatttaaaatttactaagtggatttttttagcatattaattcctcgtgactccactatagagtcagaattgcactcttgattatatagaatatttggtataccaaatatagatatgctatgaattatatattatttcaatctaaacaatcaatgattctccattgacggtttacatcgagtagggataaatttaccattttacccttcaatgtattttattcttaaaatacttagctatttgtaaatgatattttagtaaaataatataattactgaaatgagtgctctatcatttatcgtgtttagtcaagcttaaagaaaatcatcgtttcacttctaaatagttatagaaactatatatttcatatctatgattaacactcccactcaatcgcactaccaaattcccaagatgtaagaagggactagtcctacaggtaacgaacaagtcaaagaacgcgtataatacaattatgttagaagttgaccatatcaggattgagatcaattgacttaagatcaacttagtggcatcaacttagaaaagacataagagtaagtttatgatatattttcattgtcaatatcggtccaatttgatgtatagtcgatacatttgatacaagttta

SEQ ID NO: 158061 - DNA, 503 bp, Cannabis sativa
ttatataatttgacatatttgtttgcatataattaaactgtaactatataatttgaggtcattaaaagtttttaattatactcttcaattttcatgattttgttgaaaattaagtgtaatttcactatgtaattactaaaatttatattttaaatattaaccgctaaaaaaaatattatttcataggtaattattaactattttaccgaacaacacattaaaaattcataaattattaactcatattcaaacatattttatttaaattatattataattactactctaataattatacgacataataattatacactaattttaaatatgccctaattaacaaaatgtttttgagaagaaaacagaggaaaacattctcctaaagttaactttcaaagtgactttcgtaatatgtatttttcaaaaaagaaaagaaaaaaaaaacatttatatatgaagaaaagaaaattagtaggggcaaaatagatgttttttattttaag

SEQ ID NO: 158062 - DNA, 758 bp, Cannabis sativa
  modified_base (160)..(160): a, c, t, g, unknown or other
cgggtgtccgttttggatgttctagataccatttcgaagcttgcgacgagctctacaatatggtgtatgttctagagccaaaatataagttttattttagtgtatctataccacgcagtttagtaataaatcctagattgtcttacgtgagtgttaagtngtattttgggataaacacttattgatttatgattgttttgacatagggcccgagattatcgatcgttctccaagtaggtcggccaacatacctgatctggaacttgaggtaagaaaagtataatgtaccacatggcatgacaggttctgaaattatcgattgtttaattaggcaatgataatgtaatgatactatggacacaatatatgggctcacctgattgggtgatgcaatatacctggcgacgtaataggcaagggtacgggcgtcagtgacatatgataagtatcgagcgtaggtacgagatcgtttaattagacgaatgcaatatattagtgtcaagttgtggcacgggctcacctgattaggtggcgcaatgatattatatatgatattgcattatgacaggggcttgcctgattaggcaatgcaaatatatgagcatatctatttctatgcatatgaatggttatattacctactgttgaatgttatagtttgataattttgtgataatgaaatgtataattagctatttaatgtatccttctttattacttttcttgctgagtctatgtgactcatgggtgctttgtgg

SEQ ID NO: 158063 - DNA, 563 bp, Cannabis sativa
  modified_base (502)..(524): a, c, t, g, unknown or other
tttaaacttaaaacgaagttaagctttccctctttaaggatttgctatcctgctactaccggagcttagatcgctaggtttcaggttaaaaataaaaaaatgaatataggaagagaaaatgttgtcgaaagagggagaacaagagtttcgttcgttcatttcgtttatgtttactataacttataatatatataaacttaacattaacgataagttttatatatatacataaaatgttattatattaataataatataataatataatattaataataatatgaatgaaaactttattattaatagttatcttattatttcttagccattaaaaatctctatttttaggatatttagccaacttcgagtatccaaaatatcctggtatttctaaaatcaacttatcccaataatcccatcaatatttctaactaaaaccgttgtgacatttttagcttccaattgggtcttcgcgatcgtcgaacctgaaaatatttttatnnnnnnnnnnnnnnnnnnnnnnnccacgtatttcaaataaatctccgtaattaataaactac

SEQ ID NO: 158064 - DNA, 537 bp, Cannabis sativa
aatttcaatgataattctttcaattgcaaaaataataattctattataagttttattaaaatggcttttaattttaatttttctaacttaattttagataaattatactaatttatttcttaagtattttataattatttaaaatattattcttatcagtaaaatataaaaaaattctacaatgatcccttacaagggatgtaccaacgtatttctatttattctggtatttgaaataatttttagtcaaattttttttatagtcatttacgttatagttatttaagacatactataaaattttaagaaatttgaaaaattttaacatgctgaaaacaaggttcaaacagtatgtagtatgcgtgattattttattttatacacgtgtgaaatagattgtttgaagactgttttatattataaattattccaaattttataaaaataactataacgtataaacatatctcaaaaaaaaaaaaaaactataacgtaaaaaaatataaaaaaaaataaactaattttttttttctaaat

SEQ ID NO: 158065 - DNA, 665 bp, Cannabis sativa
tcactgaaaaagaacaaaacctagacagtggttaacaaacctaaaaaccagagagttattaagtgcaaatggctattcaaataaaaagaaggtttaccagggagtgaaggtccaaagtttaaagcaagacttgttgctaagggattcactcaacaagaaggcattgattacaatgatatattctccccagttgtcaaacaaacaaccattagagttatcatatccatggctgcaagatttgatcttgaggtggattaaacggatgtcagaactgcattccttcatggaaatttggaggagaaaatcttcatggagatgcctgaaggctatgatgagaaaccaggtcaggtatgccttctaaacaaataattttacagactaaaataggctcctagacaatgtaaccttagatttgatgagtttatgatgaaaattggtttcaccaagagcaattatgacacatatgtctactttcaaaatggcatttatctacttttgtatgttgatgacatcctgatagttggaaaggaaagaaaccagattaacaatcttaagtctcaactcattattgaatttgaaatgaaagacttggggccaaccaaaaaaattttaggcatttaaataaagagtaacagacccctcactatcaacctatcacaagaaaa

SEQ ID NO: 158066 - DNA, 693 bp, Cannabis sativa
tttttttttttttttgtcaagttttaagagataagttgaaaaatatttttttttgtgtattcattaattaatatttcattaaaaaaatctatttttgtgagtagatttcttaatatacattcattctctccacttaagttggggtgttgttaggctatctttagcctatgtttcggggcataggacagaattacacttattttctatgttttcaggtttctcgtaattgtggacgttcatggcttcaaaagtacaacaaaagacaagttaagcctagaaaaaaagtaaaaatcagggtttggttcacttctggccgcggtagatttatttacgaccgcggccaagatttggcagagagatgtatccaagacgggttcagtagccgcggcgagctactccaccgccgcgaccagatcagcactccctggggcgagggaacccatggccgcggcgaggttccgtacaaagtgaggtaatattgtcttttgaattatggaacgaaaaataaaaagaaaactgcgagacagagaagaggggaagcaaattttagacctagaaagcagtcaagagcggctggaggagcgaagtggcgccccaaattcattctaccaacagtttctttcttccttcctttttaatttctttatgttgaattctgttttaggaatggttatggatttgaacatgagctaa

SEQ ID NO: 158067 - DNA, 580 bp, Cannabis sativa
gtattaacctaagcccgtcgctattgcatttaatatttttttaaaaaaaattaatttaatacacaataattaatcccattattaggggcggatgtggcccgcctgtattgggtccgccggtaattgtaaaatttgttgtagtgaaagtcatgcttcctgagcctcgccgtctgcagcgcaagatgacacgccgccgcctcaccaatcagagggtcactgaagttgagataggacgtagcagtccacacaaccacacctgagtgatctctggccagggccgcaatgcacatggattctccaccaactttaacatcacagttgattttgatctagtcctccggcgaaggcgtccaagaaggcttagccacaagaagcaccggggggaacaggttgaagacataatctgtataacaatgggagatagagttaattacattcaaaatattatcctgagtcgaattatgtaccttatcattgcgggttttccaaatcatgtccacggtgattgaagcataaagaaatagcttttccgcatcatcccatctaactttaagttccaaaggaatttaaccctatccca

SEQ ID NO: 158068 - DNA, 531 bp, Cannabis sativa
ttagtgaattatttaataaaatttgatattccaattcgttgttggtaacttattcgaaatagtgaaactcaatgccacatatttagttaacatagtttcgttaattttttttttttgggtaatatacgttcataacctaattcatttttacaatctttaataagaaaaaggacatattacattatttcgacaatttttatataatagggtcccatattcttaagaatcaggtcaatcactaatgggtagtagtaaaaaattagtacaacttgtatatctataaaggagaagtatgaagcggtgacgtgacaatctaaaatcactttaatctcattatctcctctctccttaattctctttttttcttaaatttttattcagttaataaatattaattattaattaattaagaagaatctaggaattattacatagaaaatataaattgatcctttatttataaaaatacctctataaggtgtggacaacattttgttggaatttattttaccaggaccttagatctactca

SEQ ID NO: 158069 - DNA, 510 bp, Cannabis sativa
agataatggagcctcctccaacatattattcaagaccatctattaaaagataaggctccaactcaaagatctaaccccctgtctgctgcccgtgtatcatttctccggccaaggagtcgcacctctaggacaaattcgcctacccctcactgttgggcaagctctgacgagcataactataatagcacaatttttggtattggacattccatcagcctttaacgtcatgctaggccgaccagccttgtatgatttaaaggctagtacgtcgatattccattcatgcttgaagtttccaacaaagaatggggtagggtgtctgagaggaaatcaacagattgctcgggaatgttataaccttgcagttgccaagtctaagaaggaagtatcctccaaccagagcacagaaaaaggaaaaaatatttctaagtagggaacttcccaaggcggggatgaagatgtggatcctcgacttagggacccaagcagctgttggaagttattttacca

SEQ ID NO: 158070 - DNA, 651 bp, Cannabis sativa
accattcctaaaacagaattcaacataaagaaattaaaaaggaatagagaaagaaaatgttggtggaatgactcgagatcttcactttgctcctctagccgttcttcattgtgttttaggtctccaaatcgcttcccctaattttcaatcacagttttctatttatttctcatttttagggttcaacggacgaaaatacccctgctcgtacgaaccctcgccgcggccacaggttgtctcgtcgcggcgactggagcccccaaaaaccacgtttctgttttggactttatggccgcggccatggttatctcgccgcggccaaaagtgcgtcgagcctaaatttggcatttttcttggctccacttgtcgtttattgcacttttacatcctggggcctccataactccgagaaacctgaaaatatagaaaacaagcataattccgtcctaaaacatcgaaaagtgaacataaaagtgatccaaaatataggctagaagtagcctaacaacggcgtaacacctcttttgcaactattacgctatgattaataaggctagtgaagactactttctgagggatcacatcaatcaagaagggataaaggattatatccacctaacccctaagatacctacagtataggccatgtat

SEQ ID NO: 158071 - DNA, 546 bp, Cannabis sativa
ttttagccacattggagacaatgttgggttgtaagtttggggtgggggaattagctcacaaagtacattattatgcacttttaattaaccttctcttgttatctattacataagtatactatagtagtaatagttttcttatctaatatatatatgaaaaaaaattagcaatgaaaagaaaaaaaaaagtgtgcttccaactaagtttggggtgttccccccattttaattcaaaaaaataaaaaagagaataaacatagcaagagaagtcaattagggtaaactttagtaccctgattgggcagcaaaaggaaggaaggacaaaaggaaaatggttgccgcattttagagaggagggagtatgaaatttcagatctaagtacagaaaaaaataaggaaaggaagagagtacaaagaatagaagaagaaaattaagaagaaggcgaagaaggcaacatccaaagaaaagattcgagcacacaaactcatttctcttgctctcctcttccattttgtatcattttctactctttagtattctcttaa

SEQ ID NO: 158072 - DNA, 968 bp, Cannabis sativa
ttatattgaaatgagttttattgagggcataaaacccaacagaggcctcatttcagtaattatattagttgcttgaatatcatttacaggtacgtagtattttaaggataaaatacattaaagagtagaatgataattctatccctattcaatgtaaaccgtctgtagaggatctttgattatttagattgaaataatgaatattacatagcgtatatattcttggtgagtatgtaatcaagagtgaaatattgaatttatagtagaatcaagagaaattaataaaataaagaatttatttggtaaattctagaactacttattaggagcttgattatataggtcatggtccccacactacctgagatcacactcccttgaagactcaattaattgattttaattaatcaattaaaattctaaataagactatatcttgcttatgagttctactaagcaaaggtaaatttgagaagaaaagaaaatttaagatttatttattaattaagagattttgtaaagtctaagttactaaatagttaaatggtaattttatttgataatttatcgataaaattaatatttaaaggtttagaactagaaaaatagtatttttgaaaaaaaagataagtcaagacataaaatgacattttttaaactcattgggcctctataggttcggctatggggtttcaaaaaaacgggcaagtttattttatctttttaatccattttaaatatctaaattaacccccataaaattgataaaaatggaaagtaatactcttaacctaaaaatacaatgattatatatactcattatatattttacatcaaatgaagagaggatatatatagtcttacatgtatatatatatatatatatttatatactagaagaaagttacgtgcaaagcacgtatatttagttttatgttaggtgttctataatttaattgagaaagatt

SEQ ID NO: 158073 - DNA, 720 bp, Cannabis sativa
tgcaagtcatcatcggaggcccgcatattgctagagattcgggcaaagctcgggagaggtatgcccgaacagcgcagcacgaacaagaagaatttatccttgccatggaagaaaggaggcgcaaagttccacgagcaggagagcctaccataaccttcaacgatgaagacgctgtcaaaattaaatttctacacaacgacccgctggtcgtggaagtccaaataacaaacaaaatgttagccagaaccataatagataatggagcatcttccaatatcttgttaaaaactacttatgagaagatgggactccaactcaaggatctaaccccatgcctccagcctgtcaatggtttctccggtcaaggagttgcacctctaggaaaaattcatctacccctcactgttggacaagctctgacaagcatgactatcatggcacagttcttgatattagatgttccttcagcttttaacgtaatgctaggtcggtcggccttgtatgacttaaaagttgtcacatcaatattccactcatgcctgaagttccaacaaagaatggggtagggtgtctgagaggaaaccagcagtctgctctagaatgttataaccttgcagtgaacaaggctaagaaggaagtatcctccagctagagcacagacaaggggaaaagcattcccaaatagggaatttcccaaggcgggatgaagatgtggatcct

SEQ ID NO: 158074 - DNA, 1056 bp, Cannabis sativa
  modified_base (533)..(538): a, c, t, g, unknown or other
gaaaaattactaattagcctaatcaaaattatgtgattaaactaattagttctatgattaatatattgaatttacactcatatgataatcaacaatttagtttacttatacttgtacagtggaatgtcttttttaaggcattagtaaaataagcttgtattgaatgtatggttatatatcaaactggaccgatattcacagtggaaagatatcataaatttattataatgtcttttccaagtaaatatcacttaattgatcttatatcaataatcttaatcctaagatgattaggttttggttttaatgtatgtattacatgtatgtattctttctttgacttattcgttaaagctaaccaattggattgacctaacacttacatctttgaaacacggtagtgcaattgagtaggagcgctaaacatagatatagaatctatagcttctataaatacatagaagtgaaatgatggtttctttagagtttggctaaacgagtttaaattgtggagtactcatttcaataattannnnnntttattgaaatatcatttacaagtagctaagtattttaaggataaaatacattcaagggtaaaacggtaaaattctccctactcgatgtaaatcattaatagaggatcgttgattatttagattgaaataatagataatttatagcgtatttgtacttggtatagagtgttctatgtaatcaagagtgtaattttgaatctatactggagttaggagaaattaataagatagaaaatttacttggtaaattctagaactacttgttgggagcttgattatatgggctcatggtccccatactacttgaaataatattgtcttgcagactcaattaattgattttattaattgattagaattctgaataagactatgtcttatttatgagtttcattaggcaagggttattttgagaaggaaaagagaatttagggtttgtttattaattaagagactttaaaaggtctaattattaaatagatagaattgacaattatagagttagaattaaaagatg

SEQ ID NO: 158075 - DNA, 584 bp, Cannabis sativa
  modified_base (55)..(57): a, c, t, g, unknown or other
  modified_base (556)..(558): a, c, t, g, unknown or other
aggtattacacctttgtccaaaagcttattttccctatctctaagcactaagggnnntctctaggaaatagctttgggaattatcaagccttttagggtttgttatcccaatttttatactctgacgtggcatcgcatggtggtgacacgtggaatcgactccgagtatctgctcggagaatatagtccgaacaggatgcctcgtatgtataatcaaagcaaagcgatcagcaatccgcgcagagcgaccaacacttagcgaattcatctttcgcatcgtgagtcatcaaagaaatccctataacttggggatcaaattgcagagatatggcaaactgtccaaatcccaccatcagtgtattctgtatttattattcaatctttctgcttatatccattgtaataagaagggaaatacttcctctccaagctcatagccatataaatagtgatgcatgttcactggataaagggtcaaaaacattctagtcgggagatcttacttaaagagatattatctaagaattcatgttcagagatattgttgtaagagctnnnagaaaaggaatctttctccttgttct

SEQ ID NO: 158076 - DNA, 972 bp, Cannabis sativa
gcaataccccaaattacataaaaacgagaaaatctagggttccagaaaatcccccaacctgcagaccagctttgggaattcgtgaaccccatccgaaattccagatgcacaaccggaattccggttcctcgctggatacaatcaaaaattcataactctttcaaatcaaacccaatttaaaccaaaccttccagagttgttctaaataccccaaagaacaaaaccaaagcaacaaatcagcccagaacacacagatactaaaaatgccatgtgagctccaagctttgagttcaaaactcaaatttggctaaagctcacctacaagcatcaaaactagaatcaaactacataatcatgcataataacactgcggaaaccattctcaaactcatgcaacaaacacagcaaccaatttcaaaatttctctttgaaaactaaagcttttaaaccaaaaactcaaacttaaacaagggtgacaagcttgcattaaaaccagctctaatctactcaaattaacatgcttaaacctctgcatacaacatataatcacagcagcaacaagcaacacaaaactagcatgcaacactcatctttttcatcaaaatttttaagaaactaaaagagcaagatgaagaaactttaccaacaattagaggtcaaaaaatcttgctaaaatgagcttgaatcaccaagaaaatatccacttccttgctgctcaaggagggccgaacaagagagaaagagagagcttcgagaaaatttttgtttttcttttaacttttcttaatttttgaaaataaaggataaatgcaacaccaactctttattcagccaacaattaacataataaacatttaatttccaataactaagtccataaaaggactaaacattaatggggcaaaatgaccatttttcccctccacactaaaataacataaagggtacttaaagggtattttgggaaattct

SEQ ID NO: 158077 - DNA, 540 bp, Cannabis sativa
ggacttgttggcttctggactcatttggaaaattgggagtgggaatgatattcataccatatctgaccattggcttcctaatcataaatataaattcttctctaatcatactcatcctccttcacagtttttatcatattttatatctgactcggggacttgggatgttaatagatcgagtgcttattttgataattctgtcattaatgacattctcgaagtacctgttgcagggtgttttggtagggactctctgatttgggagaaaaccagttcaggtgttttttctattaaatctgcctatcatctggcttcctcctccttggacctcccttcttcttcctccttcacttcttctaaaaagttttgtcccgtgtttggtctcctactattcctcccaaggttaaactgtttatctggagaatgatatcaaatgttttaccagttgcaacttctcttttttctcgaaaagttcttgattctcctctttgtcctatttgtaaactagcccctgagagtatcaaacatgctatgctagac

SEQ ID NO: 158078 - DNA, 570 bp, Cannabis sativa
ttggaagatcattactcaaaatcaccacaaagattatctctacaagatggattaagatcatcactatctatggattaaggtatggttttgccatttgagttcttctctttgaatcaacaaatgtattcttttctttagatctatagttatacactactaattatatgtaatatgtttatctatagagttgaatattgttattgtatactttatgagtgataaagaattctaacaaatttagtccacaataaatattatttttatttactataatactactaattattactgttcattgacttttactaaactttacattttttatttaccatattactattatttaaataataaaaaaatataaaataataatttttatatattctcaataaatattaaatgaccatcaatatagttaaagatttttgtctaatttcattcaatattacaattccagtgattgtccccagaatttaaaatttgccaaatcatgcttttcgaactttgacatgtactaaatcatgtctcctgaactttcatccatgttagattttttttactaaaattaga

SEQ ID NO: 158079 - DNA, 740 bp, Cannabis sativa
  modified_base (495)..(495): a, c, t, g, unknown or other
  modified_base (587)..(613): a, c, t, g, unknown or other
tgtggcaagaggggacatactggtagaaaaagttgatactgaagacaacttagctgatccattcaccaaaattttgacagtcactacatttgaaaaggacaaaacgaatctaggattaattgaaatgtactgattattttatgttagtgcaaatgggagtttgttaggttttgtgccctatataaaactctatttgaatgtaatcttgaacattcatttattaataaagaaataaatttatttcattacatgtttaatgtgtattttggttcatgtgattacttgtttgatttataaattcatccaaatctttatcacattgatattcttgtttattgtatcatcaacacaatggaatgtaatcaagattatgtgattaaatgtagtcctatgatttatcagtacacagggtttaattgataagataatctacaatgtagtttacttgcaccttggattagtgttacgtcttttctagggcattggttaaagtangcttgggttggatgtatggagtatccatcgaaagagaccgatattgaactcggataagacataataaatttaccgtaatatctatctaattnnnnnnnnnnnnnnnnnnnnnnnnnnnaatgatctcaatcctgagatggttggcttctagctctgttgtattatttatgttcttcaatttgttggttaaagtcgaccaatggatcttctcgtgacatatagaataaggacatggtagttcaatt

SEQ ID NO: 158080 - DNA, 514 bp, Cannabis sativa
taattctgttaaaccaagaaatgccattagatagacacttttaatatataaagatataaattaaagtttaacataacactactaaaaaaatcaaccaatatttatctatataaatatatattagagaaactagtatttatattaattgtgtcggttattacgtatattgtagacacaaaagtggtgagtaatttgcgtcggttaataaccaatatttattgattatttgtgcccgttcctaaccgacattaatattagaaattatggtatcatttggtaacacttttattttctaattttttaatcacaaaataaaagtaaaatttttgttttttaaaaacaaaaatgcgttctgtaactaattttgttttttgattttaaaaacaaaaaataaaagtgtgttctgtaaagttcatttttgtttttattttttgattatatttaagtctggtctaggtctggggtcggattcaagttcgggtcaaagaccgggttcaacgctagggtcgtgggg

SEQ ID NO: 158081 - DNA, 802 bp, Cannabis sativa
agatgcagaggctaaggcctgaccttgattatatactggggtaacgaaaaactgtatgccgcttatcggtggagcagctgctggtagatttcccaaaagttgagctctgggtacatcccccgctatctcggtagggtagtatcccccatacgccactatttgggcctcttctaggttgatgtatttttggacttttttctggaaatcttgaaggttggaggccccttcttgctgtaactcgttccagaacgaagtcccggtacggatccccgcttgaagcagagctagctgctgtccgtcatcaactttctttgtttttgaggcttcttccttaaacctctttatgaaattcttcaatgtttccgtaggtagctgcttgatgttagtcaaggccctgacctccagattaactttccttgcggcgacaaactatctccggaagctagtttgtagcttattccagcaatccatggatcctggttcttccagtttctggaaccattcttctgcagacccgcttaatgttagtgggaagcacaaaaacttggcgtcattgctaaccctcatgatcgtcattacccagttgaaccgtgacaggtgatcgctagggtccaagttcccggtataagctgccatttggggcatcttaaagtttttggggagctccgcctcaaggatatgcctggcacatggtgttcggttttgtgccctaaataaaatcatttcaatataatcaaacttactaattaataaagatcaaaaactgtattttatgttacatggttcagatgatttatttcat

SEQ ID NO: 158082 - DNA, 551 bp, Cannabis sativa
gaacttactgctgcggttcctcatagaaggcaaggtactttgggtgccaggtgggtgagccctccgtccaaggttactgaggcgcgcctgtgggatttcaaccaggatggctacttgggcaaattggactgttacattctcgccaacaataatcaggccacaaaccctgaaaggggaatgtgcgcctggtcgggtgctcatgcccagaaaggggcattgttgcctttgcacccgtacataaggaatgtggcagaattcttctgcctctatccgacccaatttactcccaacggcattaagtatttgtccgccctcttcgttctctatgcctcccagagatgggatatgccctctccccatgaggtaagctggttttttaacttgaagtccacccctaagcaaggcagatcggtgtacttctatttctctcaaccagacttcaagtgattgacgggtaccggggataagaccgttagcaagattgggcattttattgacgagtacttcatggtggaaggcatgggcaccacccatactcggttccagcagat

SEQ ID NO: 158083 - DNA, 677 bp, Cannabis sativa
acaccccgtcccatttaccaaaaaggtattttcttagtacaccccaaaactttcaagtaatacaatgaagttgttaaaaaaaaaaaaaagaagattaagaatcgcacgagtccatgttattcttttttaattataattgctactgtcactacaattttttttacttttagtcacagtatcaatgatcctcgtaacaccttaattaacatctactgaaactcacctatgcaaattgtatttcttggaaactacaattcacactttgtttattaattgaatatcatcttcatatccattacatttatcaatataaatggttaattaggaaaatcgaaaagacatatcatcatagtattttataaagatactctttacattgattgatggaatctcaaaacctttttcattgattaataatgttagggttgaaaaatactctttacaatcagtttttaattttagaattatattgaatataaagtagttggtgtgtttattaaaaaaaaaacgtaaatgatgatgtattttgttaagaaaaaattgataacttacatggtctaatttggtcattttacacaaaattaaatatgtaattatttcttttaaaattttggggtgctgtcaaaaattattgggatataaatataactcctcttattttatggtgtgtaattata

SEQ ID NO: 158084 - DNA, 507 bp, Cannabis sativa
ggactgtataaatgtttaatgggccggctcatagtatttttgtaattttttttttccttatttgtatatttttgtttttttccccaaaaaattacaataataaaattaaaataaatattaaaattaacacaaaataatatgagaaaaaaagttaaaaaaatattaagagtaattttaaaaattatataaatttaattttttaaatattaaagtgtacttattattttgtgaggtggaaataaaatttctccttaaggtaaatttaaacatggataaacctataattatttgggatgtaaataatatttttttttatttatttattaaactttgcacaaattttcaatagatttgaaggttaaaatttgaaaagcaaaaatattaatttttttatttaacatcaacatttaaagaagaaggagagctttacgttggggatctggagcctagcgtggatgaatgacagctttttgagatttttaaccaagtggctcaggttgtctccat

SEQ ID NO: 158085 - DNA, 943 bp, Cannabis sativa
agggcgtggactatgttagtgaggtgcttattgttgtggttcctcacaggagacaaagtgccttgggcgccaggtgggtgagtcctccgtccagggttactgaggcgcacctacggactctcgaccaggatggctacttgggcgaattggacagctacatttctgcccacaataaccgtgccagaaaccctgaaagggggatgtgcacttggttgggtgcccacgcccggcaaggggcgttgatgcctttgcatcaatactttaagaatgttgcggacttcttcggcctttgtcgggcccagttcactcctaagggcattaagtatctgtttacccttttcatcctttacgcctcccgtaagtgggatatgcatttcccccacaaggacagctggttctttgatttgaagtctacccccaaataaggcaggtcggggtacttctatttctctcaaccagacttcaagttgttgacgagcaccgatgactcagccatcagaaaaattgggcattttattgatgagtacttcttggtggatggcgcgggtatcacccgtactcggttccagcagatttcaacatatcaccatcctcccctcactgttactcttagggatagagctcaaaagcttgcttgactgccgggggaagaccggaatatcatctggttgacctccgaggataatcttgtgaggtacaacctctatctaaagaatttcattcccaaaccagtgagggagaggaagaggaaatctgatcctggacgggctaaacgagctcgtttggagaatgaactcattcaacttaagcgtgaagctaagttgaagcgaggtgcaagggccatgcagtatgcttaggagccctcgaatcctgaagatgaggctgaggaagagcaggtgactccgctcaaaagaaggaagaaactttcggcccagcccaggcc

SEQ ID NO: 158086 - DNA, 622 bp, Cannabis sativa
tattggggagccgttaagccgagctaatttataaaccccagtttccaattattgcctcgatcacataaggaccttcccaatttgagtaaaatactcatgcagatgcatctcgtgtgtttggaaatactcatcttaacaccaagtcactaacgttaaagagtcttttcttcactttcttattgaaatatcttgtaactcggtgttggtatgatgctttagtaatttgcgactcggtacgtttttcttcaagtagatccaaggacagtttaaagagttcttggttttcttcttgattatagaaatctcgtctatgggtcgtgatattgacttccactggcagcattgcctctgagccaaatgtcagcgagaattaagtatgccctgttgctattttctgagtcgttctatgagcccaaagcacttgtggtagtttgtttacccatctaccttttgcagtatccaacttctttttgatagtatctttcaaggtattattaacagcttctacttgcccattcgcttgaggccttgatactgagaaaaagctcttaataatcttgttcctttggcagaactcaataaataattcaccatcaaactgagttccattatcagatactat

SEQ ID NO: 158087 - DNA, 555 bp, Cannabis sativa
catttttctcaacaaaaaaaaatacttgaaaaaatatattttaggatatttttacaatgcaactcgaaaatgagtctatcgattttcgtcatttgagagaatctttttatctatttttctttcatagtggtctatttttttaattatttaagatatcttaaaaaatattgagaaattcaaaaaaaatttaacatgtcaaaaatatgatttgaaaaatatattacatgcgaaactattttattttatatacgtttgaaatagactatttaaatattattttttacgtgttaaatttttctaaatttttctaaatttaacatatatcctaaatacttacaacatatactatgaaaaagttgaattgtataatttttttttttacatagtaaattgtagaattttttatttaaaaaaaaaaaaagaaattgtagtattttttgtatgttttatatttctgaaagtaaactcgactaaaatttgattctacggtaaccgtaagtaactgtataactatttcccaattcagtacacttttcctttttgtaagtgaaattt

SEQ ID NO: 158088 - DNA, 718 bp, Cannabis sativa
atttaaacgtcaaaatatcaaaaattaataataatctattaaaattaaatattatgaaaaaacctgatcttcgtcaacgacttggtccaaaggaagggttttattccatttgcgaatagacgagttggagaataagatcagaaggcatcaagtcagggaacccggaaggcaatcggggtatgattctgttgaagaatttgagttgaaagcttcaggatcaaagagggaagacgattccaaaaggctgcccaaggataagaaatagaagaaacacaataaatatatacccctttatgctgaatgtaccgagcttaatgaaactcgggaaaatatctacctcgcacatgtacaagaagccgttttagcgaacaataacctatgagacacgagagacgtaaaagggacccaacaaaacggtgtgaataccatggagatattggacatacaacggaagagtgtcgtcagttgaaggatgagatagaaggtctcatagcgcgaggataccttcaacaatatgtaaaggggcagcacgaagcccatgatcagtccgatctgctgagtaactcaagagaccagggatcataaccttcttttgtaggaggaagggatacctcggttatctcaaaagggaacgtgtcacaagaagaaaaaggacagttaatccggtaaagcaatcacgtaaaagtattgcgaagtgagtaattaccggctcgctatg

SEQ ID NO: 158089 - DNA, 501 bp, Cannabis sativa
ttgatgaagatgaggatgagttgttgaggaacatggcgcataacatgaaattcaagtatgacaagtattggggaaagcttgatgattgtaatgaggcacttctaattcccttggttcttaaccctagatacaaacttgattatctctatcattgttttagctttactcatacggagttagaatgcaaagagatggtgaaaggggtggaacaaacgattcagagtatgtttaatcaatataatgattcaacatcaagtattgatccttcaatcactcaatcacatgctcaagctcaacctattgatgatggtggttcttcctcatatatcgtttctagtcgaccgaaaggcaagaagtctcgtaatatccatgatgagtttgtggcatgaagaaaggagaataaaggtggcaagatgaaaaatgaacttgataagtattttgaagaggaagctgagcaaccaactgaacaatttgatgttttaggatggtgggctagtagtg

SEQ ID NO: 158090 - DNA, 713 bp, Cannabis sativa
  modified_base (269)..(279): a, c, t, g, unknown or other
aaaataaataaaattattttccgtcttagtaataattctcaataaatattttaaaaattactcaattcaagttggtctaaaattaattaaaattaactttcaactcaaatataatgttctataaatatatatagcaaaattcgaaatccaatgtattttaaaaataaatacatattcgaaatttcataaaataaaataaaataaattctgaaaaattattctaatttatgttggtccaaaataaattaataaattaattttcaacatannnnnnnnnnncctatttaattaaatatgtaagaaaaatatcaaatattaattatcttgtataaaatcaacttaaatattaattttctatttacttaaatataactagaaaaatacttcaagcatacagaaaataactatctagatatttcactaactaattacttattttctaattaaaatataatatattttagtctttattttagtaaattattaatgaaaaatttacttgatttaagttgatctaatattaattaaaataattacttttcaactttaatctatttttcaaaaaaattcaaaattatctgtattaaaaaaaatgcaatttcgaattggtgggagaatgattgataaaataaaataaaatatattttgaaaattattctaatttaatctgttctgaaattaaaatttctaacctaaatataattttctatcta

SEQ ID NO: 158091 - DNA, 659 bp, Cannabis sativa
ggaatctttttaaattagtggaataaatttgtacaaaaaataaaggggtctaaattttgatatgaggtttattaggggcaaaatatgaaatttctcctttataaaaaaagttacaaaaatatggtatttataggtttgctactcttttatgatattttttcacatttaagattctttatggtatttgatatgttatatttttataaacctaatatccaaactcatatttgatgtttttgtttctagcttaatgagttttttttattttttagtttattttatattatatttacattttagggtttttttctatttacaccaaatactaactttttttcaaatattacatttataatttgacaataatatttttacatttatactttttttttaatttttttttcttttttacttattattatttttttgaaactgataaatatttttttacttattaaagctttaaaaaaaaaccttttttttttttgcctttttttatatatatatttttagtcaactttagttctcttttttcttttcatttttttaagtttgactttttttttcactctctctttctctctctacatatatttttcttttttattttttttttctaatttctctttgtgtctctctcttttttttttctcaaacta

SEQ ID NO: 158092 - DNA, 528 bp, Cannabis sativa
ggcttgaatcaaaaaaaaaaaaaacactactaattggcttttagcattttttgtaagaatgaagagggagagagagagagagcgctgacccggatcattaagcgcatattatgtatatatcctacacctaacacttttgggccaagtttggtaaaaaaaaaaaaaattagagaagctaacttaattgtgaaattagaaccaaccaacttcactaacaaattgtgatcaaagttttattattacataattattatcttttaaatgattgaaaggtgatgctcatgcatgtgagaattaagatactgtagtttcattaattaattgtgaaattattacttgccacattgagtagtgaggctagtattgttcacgtgcatatatatgctgctatttattgggacacttgtaagttgtaatgtgtacatatatctaatatttaatatcaatcaatatcaatatatcaatatatcaatatatcaatatcaatatcaatatcaatcaatcaatatataatataaaggaaagcac

SEQ ID NO: 158093 - DNA, 555 bp, Cannabis sativa
  modified_base (45)..(49): a, c, t, g, unknown or other
atatttagggtgttaaacaacattcttgtgagtagatctaagatnnnnntaaaataaattccaacaaaaactagtttttttgtcagacccgttggtggtctgatgccttcctgttgagtaaagagaagacaaagtccgatggtggcccgatgatatggtacgatggggtttgatggtggcctgatgccttcctgacgagcttaatgaatggaacttaacatctataaatgtagatatggttcgatggttgtccgatagtggtccgatggtcacctgatgctacttttttctatgtacaaaaacataaagaaaatgggtagcagatatggtctgatggtggtccgatagtgattcgatggtcatctgatgctactttttttatgtacaaaaacataaaaagaaataaaaaatgggtagcaacgggccaccattggaccgccatcggaccaccagcaatatagatgggaataccgagtatggatggggaagttagaagagaagagaagagaagagagaagggtataataggtatgaatataaagtgtgcctattttt

SEQ ID NO: 158094 - DNA, 755 bp, Cannabis sativa
  modified_base (148)..(152): a, c, t, g, unknown or other
  modified_base (509)..(514): a, c, t, g, unknown or other
cctacttgggaatgtttttttcctttgtctgtgctctggctggaggatacttccttcttagccttcgccactgccaggttataacattccgtgcagactgtaggtttcctctcagacaccctaccctattctttgttgggaacttcannnnngagtgaaatattgatgtgacagcctttaagtcatacaaggctggccgaccaatcattacattaaaagttgaaggaacatccaatattaggaactgtgccataatagtcatgctcgtcggagcttgtccaacagtgaggggtagccgaatttgtcctagaggtgaaactccttgaccggagaaaccatagacaggctggaggcatggggttagatccttgagttggagttccatctttcggtaagcagtcttgaacaaaatgttggaagaagctccattgtcgatcatagttctggccaccattttcttggttatttggacttccacgaccagcgggtcgttgtgtggaaatttaatnnnnnnagcgtcttcatcgttgaaggatatggtcagctctcctactcgtgaaattttgggcttcctttcttccacggccaggataacttcttcttgttcgtgctgcactgttcgggcatacctctcctgagctttgcctgaatctccagcaatgtgagggcttccaataatgacttggttattttgaccctggttggtcttgacatacttctgcatgtgtggattgtttttccttatcagaaattca

SEQ ID NO: 158095 - DNA, 599 bp, Cannabis sativa
aggagaaaaagaggaaatccggtgttggccaagctgagggagctcatcaagagaatgaactcattcaacttaagcgtgaggataagttgaagggaggtgcgggggccaagcagtatgctcaggagaattctgagcaggaagacgaggttgaggaggagcaggtgactccgctcaaaaggaagaagaaacttccaggcgagcacaggcctgttgaacatgcaattcgtatcagggggcctagtctaccttctcggccatccactcttatagtaggaaaggggaaagctgtcctagaggagataagagacttgtaaagtgatgatgagccttcaagtcttgctcgggaaaatgcttcttccgaagcgcaagataatccgtcttgtttttaaccttcttgattattacgctgtcatacttctagtacttttctctaaccatgttgcttttatttcgtgtagacatgtctcaaaagatgctcgaagctctaaagaagagagtgggaagaagctcaggctcatctccttcgccaagatgtttaggggcggtgagacaacaccgtctagagagaaggcatcagccaaagctgttatcgatctttt

SEQ ID NO: 158096 - DNA, 780 bp, Cannabis sativa
tcgatcgagtccacaagcaatggaaaactgtggcttgcatacccacataggatttttttggatgaaaactaaaatttaaactcaagaaaataagaaaaaaaaacaaaacaaagccaaacatggtaaaaaaaatcttctgcattgtctgttggtacccatgtgtgcatagggtcgtggcatctaccgagtccacaagcaacggaaaactgtggcttgcatggccacataggatttatttggatgaaaaataaaagtttaactcaagaaaacaaaacaaagccaaaattggtcaaataaattattttgcatggtctgtaggcgcccatgtgtgcataaggtcgtggcatccactgagtccacaagcaacggaaaatcaggacttccatgtccacataggatttgtttggataaaaatcaaaatttaaacttaagaaaactagaaaacaaaataaaacaaatccaaacatgctcaaaaaacatcttctgcatggaccattgccgcccatgtgtgcatagggtcatggcatccaccgattccacaagcaacagaaaactatggattgcatggccacatgggatttgtttggatgaaaaccaaaatttaaactcaagaaaacaaaacaaagcaaagcaaaagttggtcagaaaaatctcctgcatggtccagaagtgcccatgtgtgcataaggtcgtggcatccactgagtcttgcatgaccacatagaatttatatggataaaaaccaaaagtttaactcaagaaaacaagaaaacaaaacaa

SEQ ID NO: 158097 - DNA, 877 bp, Cannabis sativa
  modified_base (78)..(104): a, c, t, g, unknown or other
atcaatgtaaggttttcctaaacccttatgtgtttatttcattgttttagagaaatcatatttaggatgttaatcaannnnnnnnnnnnnnnnnnnnnnnnnnngtaaaatattcccaacatgcacaacctatgtaataggtgttaggtgagattagccttcatcccttcttgattgatgtgatttttcttgacggagtcgtcactacctcccttgattatcgtgtaatcgcccaaaatcaggtttatgatgtctgacacgtcatcttatggacgttcccagacgttttctccatgcaacattaaatgtaaagtgacagttcaactcaagcctttctggcctggagatgcctatatgtgtcttgactcctggaggagaagatgggtcttttgctcatgtccgggagctagcaccatgaaccatacttgttgtttctttagataaatttccaactcatctccgggtgacgtgcctatgtcgaccacatgtcacatacgacaactaccacgtatattgggaataaactgggacaacaagatatgatgtataaatcatgaattctcatattataatatttcgcactattctcaaactttgtgattaattattcaaaaatatattttataaggggtaaaagtttaaattttacaaaataatagagtttttttttttgtaaatattataattaaatgatataactgttaaaaaaacataatagagtcttaaatataaaaataaaattatcaatatattaattgctgaaaaagatcctattaaatattcaaattaaaaattaattattttaagaaatagttaactgtagttaatttaattctaaaaaataaatttttatatgttggtaacctgctattacaag

SEQ ID NO: 158098 - DNA, 501 bp, Cannabis sativa
cagttcaattgtttattttatcaatcttccaggaacatctggttttgataaaatgggttttgatgtccagggtcaatccccaacattctcccataatcgttttaatattgagggtcgatccctgacatataccagagttccaggtggagtaatcatggttttagttctgtcttcgactgccactggttgacgtccaattatggcaatcataacgagccagtatatactcaggtcacaattcttttacaagtttgcttttaccagagtaactgccttttgtactcttgcgaccctctcccactcaagattactaaagtgtcccttcttctcgtggaagagggttatgatcttcaatcgctctagttattgggcagatcgaactgatcataggcatcttcctgcccttttatatatcgatgaaggtctccttgcgatatgagactttctatcatctttcaactgacgacactgttctgtggtatgaccaatatcaccatggta

SEQ ID NO: 158099 - DNA, 503 bp, Cannabis sativa
aattatgtcattttgtttcccttgagaggatcaatattgtgacccttttttttttttttggcaaaacttagcattgaggatgagtttttctcatttatctttggatgtaattgaacaatgtattgttcaccaaattagtgaggatctttattgttgattaatgagggttctatttaaaaaaaaaaaaagttaaattagcttaatgcagcacattacttggtaactttaatgattgttactggttacttttaagatggtaactagttacttaatatagtcactgatacctctaagatagtaacttgtttgccagatgagagtatttatattacaaaaatagatatttgaggcaaatctcacattgttttagttatattataatatatgttagaatttatttcactacaaaaaactgttacttttagtgataactttttagtcacaacataatattttttgtgactaaatgtgacttttagtcacaacaaaattttacttgtgac

SEQ ID NO: 158100 - DNA, 784 bp, Cannabis sativa
  modified_base (424)..(431): a, c, t, g, unknown or other
tagaggaaaggaaaataaaaaaacaaaaagaagaaaggagaaaacgccgagggtggaaacaagaatcgccctatgccctaaaagcgttatctctagaaaggatacgaataagagagattctacgcattacacaactaatacagtcaaggttatttcccagaaattcagcactcaacccagacattctaatcatgctatacaaacaaacagtaaacgagcacaaagtatccaaaaaagttacatgaaagttgagagctgggggtaggtgttgatcgacggtataacgaggattgacaacggcgaaggaagagtagcaagaaatttatggtgtctggaattttttctctctataaaggctctgaggaaattttgcaaactagcaaaagtaaccaaatgaaataagaaggttggcttttataggccnnnnnnnntgtgaagcagctgtgatcaagcatcatcgtacggtgagaataacaatcgattcgcattctacatctaacggttgggataagagttcatcaaggcggttggaaacgattgagtattcgactgacacccattacatgcaccggatcattaatggatgggaaacgaatcgttgtctggaaaaagtaaaaactcaatgatgattgtcataaatgcatcccatgtgcccaaagcacgtgccgggtagtcaataagagagccggaggcacctaagcaagcctcgtttactttccaccaaacaaggcttggggggtaaatgttgcccttaattttgtccaaaatacgttgaccaatacga

SEQ ID NO: 158101 - DNA, 629 bp, Cannabis sativa
  modified_base (386)..(392): a, c, t, g, unknown or other
aaagtcatcggcttgactttttgagaagcactcatcaaagagcggcttccgcccatagagagtggcatatgccctcacaagtggttctttgtcgtggatgccctcaagcttggcgagatatggaattgaatagcccaaacgctcaacttgactttattttgatgaatgcacatgatgaatgccaatgaactatgccaatggtagaggaggaggtagtgaccaaaaatgatctttataggtgtaggcttccatgactaatgactcactaggttgaggaatagaaactttttgttgctgaattttgtcaaaatctgggtgattttgcttgctgcagcattatgagcagtaacaaatattgacaaacttgaaatgcttgcttcctcatnnnnnnnttcactactttggattgaagtgggctcttgtaattgttcaaaattttccccaagtatctctaactcatcattacttctcaaaatgacattttcactttcttcttcctcctttgaattttccatatcaatatctaaagtttcatgggatttatcatgcaactcattgaccaaaagctcaaattggttctccaatttcctcaaggatgaagcttggctttgaattaaggcatcattttt

SEQ ID NO: 158102 - DNA, 550 bp, Cannabis sativa
  modified_base (478)..(478): a, c, t, g, unknown or other
attcccattcccattctcattctcattcccattcccattcccatccccattcccattcccattcctattccaattctcattactattcccattccctagttcattcccattccaattcctattctcattcccattcccattcccatccccaatcccaatcccattcccattccttgacccattcccattccccggcccatttccatttccattcccatccctattcccattcccattctcattcccattcccattcttattcccattcccatttctattccccaacccattcccattcccattcctattcacattccccgacccattcccattccccggctcattcccatttccattctccttcccattccccggcctattcccattcccattcccaatccccaatccccattcccattcccattcccattccttgacccattcccatttgacggcacgtttactatacagtaatcanaatcggaataaattaatggagaaatgtaacggaataaatgaaaaataatcggaatcaatatttgtaatatgt

SEQ ID NO: 158103 - DNA, 517 bp, Cannabis sativa
atagtaaaaggttgattgggtagtccatattgtatgcttggtacactaggccaagtttgcttgagtgacatcatatccgcaagaggcactttttttgaaaaggaagcttgttggcatgggtgtggaagtattgtaggggccgtcaaattcttgttagtcatgatagtggttgagagttgatgaccatatgatggttcaaattggaatagacatgtgaggcttcagtggttacacatgtgtgtaaagagggacgcatatgaagaccaagggggcagatgccacaatcgttagaggatgattgtacttggaggtgttcgcatgtgacttttatttaatccatatggaagtgtcgagacaattgagtgggatgtgttggctggtgcccgtgggtgtaagtcacataaaggcattgatagagatgtatagttgtgaaatgaatgcatcaaagaagccagcagggctaagaagatcgagcgcaagcgttaagatggcactagagattaggtggaggccagag

SEQ ID NO: 158104 - DNA, 506 bp, Cannabis sativa
agctcttcaagccaaattcaaactcaatctcaagtagggtctactctttctcaagatgttggtattatggctgagatgttttagagattgcatgaatgctttccactgggacacaacacttctgatctgtatgacccgcgatttgagagtttcctccaacaatatttaccaacccaacctcagggtagtgcaacatgtccaatgccgcaacaacaaccttttcaacagactcaacaatctcctaatttgcagggaagttcctcccaatctcctcttcttccaaacatgtttggacgctcctcccagtctcctcaatttttctacattgattatttttggaggatcatagtcccaacagtcgatgtttggtcaatctgagagttcatcacagcagccggtgttttatgggggtccaatgcagcaaccttctccgggtcaatttttcggtgcacaaaatccatatatttttcatggtcagtttcagcaacaatcatcgaatttttcgc

SEQ ID NO: 158105 - DNA, 599 bp, Cannabis sativa
  modified_base (270)..(292): a, c, t, g, unknown or other
tttatgattccactccaatcaattgatatacacaatatatttaaatctgcaaagaagaaagaacaaacaacagtctctatgaaaaaatagaattatataacagaaagtagaaggaatgtgtcgagtaccacaaaaaaaaaatggggaattaccccatttactattttttttaatttttttttcaaatttacggtttgggttcctaaagtggttgcagcgctagttgcaataaaggtttctataccatttttattgcaatttaggttgcannnnnnnnnnnnnnnnnnnnnnntatgtagaattctgtaaaaatgtaaaaaaaaatctgttttgaagagtaaaaatgaaaaatgtcccccaaaaaaattatctataatattataattgttattagattttaattttttatttcttattttttgacaaaaaaaacctaaatcacttgaaccaatcttagactatcacacttatttgacactattaagtatttataacaagattgattgtacaattatatttaaggggaattaccctatatactatctttttaactttttttttttttcaaatttacaatttaggtttctaaagtggttgca

SEQ ID NO: 158106 - DNA, 615 bp, Cannabis sativa
tcctaaatatccaaaattctaattgaaattcaaatatttaactaatttttaaatttttagtttatttaaacaatttaaattaattaaatatccaatcgtgttgccttaatcaaaaatatatggtctattgcaactaaaaaagataacttgtgggtaaaatgggtccatagtgtctatatcaaacaagaagattggtggggatacaacgcccctctccaaagcagctggtattggagaaagctagtggagattaaaaatgaagtcaaacacctagtggatcctgcaacattcatgagcaaatagtatgtcattgcagcaggttgcaaacggtataaacaagctcaggatcgatagcattagagtaagcatgcttggaatagacttaatgttccaaagcactgctttgtggtgtggatttttttgttgaacaggctcaaaaccagagacagactcctcaaatatcacattgtgacagatgataaatgccttatctgtagaggtagcactgaaaatggtcgaccctatgtgggtccatcactagttaaatttttgccacttttctcaaccatttatttatttttcacaaatacgactttttgtactttcaatcctata

SEQ ID NO: 158107 - DNA, 585 bp, Cannabis sativa
taagtttgtgcatgtcgtgctgacccgattcatatttattttttttaaaaaaaaaatgggttgtgtcgtgttgtgccacagaaaaatataaatcgtgtcatgtattgcatatttttaaagggtaggcctggcacgacttgcaggcctgatatttttatgtcatgctctgattcatgtcttgcattgcttgtgtggacctgtatttcttaaacaggctagtctgtttttatatccagacttaaatttgtattttactttttcatatttttttaacaattactaaattatatatattatatatatattaaaattttagttatattcatgatagataatcatataaaaaaaattattaacatcattgaatttgaatatttacttataaatactcaaacttctatatcttaccctataaataaattaatataatcttagttttcatgttttaatagttttaattatagaattatattatttaatattagattttagttttattattattttaacttatttataattgatgaattcatatcttattagtattaataataataaattataagttttttaatacgtcgtgtc

SEQ ID NO: 158108 - DNA, 506 bp, Cannabis sativa
acattacaaagagaaataggcctgggagactttcttcgggttagctactttcggaatgaggatcacattagtagcattaactcctctgtgcatggagcccgagatgaaaaaatcttccactgcctcacagaaatcagtaccaaccgaattccaatagttcttatagaacagcattggcataccatcaggtcccggggcctttagactacccatgggaaagagagtatgtcttatctcttcagagtttggaatggtaaccaaatccctttgctcctggagggagaagtggtccgaaatcaggtggtttaagcattccagcgtcccataaatcgtgcttttgaagacacttcccaagaaattcgagaattccttcccaatgtcccttctgatactcaaccacaccccatctttgttcatgatggcctcaatctcattccttctatttttgatggtgatagtagttaagaagaactttgaacatttgtccccgtccttgatccaggaaa

SEQ ID NO: 158109 - DNA, 999 bp, Cannabis sativa
  modified_base (486)..(491): a, c, t, g, unknown or other
cataaccttaataatttttcccatatttttgaaaatagcccaaaaaaatattgatatagatgaagatatcagtactatcaattcataaaaatttatgaaaaagtgggagtgagtttttataaaaagaatgtgttctacaattatttttatttctttaattttaaaaatataaaataaaaaaaataaaagttttatgtaaattttctttttattttatatttttttttggctaattagtaatttttcctccgaactttgacatgtagtaaatcgtgccccctgaactattttgcccgttaaaaattctcccgaactattgagattgttaaatttaagaatttttgtctaatttcattgaattttactgtttattgtttaagtactaaaccatgctccccagactttaatatctacccctcaaactttgatatgtactaaaacatgccccttaaactttcattcatgttagaattttttactaaaatnnnnnnaaagtccttaaatttaacaatcttaatagttcggggggaatttttaattgcaaaaaaagttcagaggacacgatttagtacatgttaaagttcaggggaaaaattactaattagtttttttttttatttatttaagaattgagaaattgaggtgagagaaattgagtagagatcactggggctggggccaagtctcagttcaggttgtggatccaaaatattaacgagagaatatacaaatggagtataattaattaaaaaaattgtttaaattattttttgcaaatatattagtccttgaagtgtaaatattagtaaattgtttgtaagtatacatacaaatttgggtttatattttgtattggagaaaatgttagagatacagactaaagtgcatatagaaagccataggcaaaaaaaacatatcctccaaatcatcagagagcaaataaacacttgaataactgatagcaactctctaattttacaaaataaataaataagttac

SEQ ID NO: 158110 - DNA, 1788 bp, Cannabis sativa
gacagcagggtgctcctgtagtgcctgctctagaaataccagtggcacctgcccctctgtgcaggccgaacctgtggttatagtgaaccggatgaaaccccggtatgaaaggttctataagtaaacacctccagttttcttgggagatcccgatgtcatgaaagccaagcaatggctaacagtgaatcttgaattttatgggcatcaccggtaatgatagggtggcctgtgccacttttcaatttcaagaagacgctctggcctggtgggacatggtgtccatgattcacgatgtgacaactatgacctgggaaaagtttcaggaactatttaatgctaagtattataacaaagcagtaagaagtgctaaaagaaaagaattcacccaactgactcaaaaagaaagcatgagtgttactgaatacacgactcaatttgattgtttggcgaggttggcctcgagagttatgccaaccaatttcagcaagaaagagaagtatcttgatgagttgaatgcgaagatcagacacgacttgatgatcactacttatgacagtaccacctatgctgaaatggtggataaggcactgcgagctgagggcgcagtggagtgcactttagagtctcgtgggactccagttgttggtggggctcctacccctcctacatcaggctttagcaggggaggtagtggttcggccattgatcagaaaagaaaggcatctactgctaccagtggctcgggttagaacaagaggttccaggggaaccagggtagaggcaatcgcaagagtggctctgaaacccaatacacttacccagagtgccccagttgtaaaaagcaccatctgggggagtttaaagggcaggggtgctttcagtgtggtatgtcagggcattacaaaagggattgtccccagctcaggaccgaaacaccaaagactgcaatgaaacccactccagcaagggtgttcgcgataactcaggctgatgcagaagccaacccttctgtggtaacaggttagctctcggtgaacaactcgtatttctctgtgttgtttgactctggagccactcaatcttatgtggcagccagaatttttagtaaattggatagaccgcatgatagttatgaatcagggtttggaaccctactgcctcgcagaaagttagtcatctccaaaaggtggcttaggtcaatgccaatcagaatagaggatagagagttgagtgctaatttgatagaaatgaatttagcagattttgatattatactgggaatggatttcttgtccaagtactcagccagtatcgattgtaagaggaagacggtaatcttccaaccagaaggcgaggaatcgtttgtctttgtcggttcgattcagggatctcgaatcccgataatttcagtactaacagccagggaattgttacgagagggatgtctagggtttttggtcagggtattggataccactcggcctgactctgtacggccagaagacatcaaggtggttcagaaacttttagatgtttttccggatgaacttccgggtttaccaccgcagagagaaattgattgtttatcattgatttggcacatggagcagaaccagtttctaaggccccttacaaaatggctccagcagaacttaaagagttgaaaattcaactccaggggttgcttgacatagggtttttgcgacctagtgtgtcaccttggggagctccggtattatttgttaagaagaaagatgtgtctgtacgaatgtgcattgactaccggga

SEQ ID NO: 158111 - DNA, 516 bp, Cannabis sativa
  modified_base (455)..(456): a, c, t, g, unknown or other
ttccacctgaatagatccagttctgtcctcagtattgctacctgcattgttagtctcttttgtacctgcactagggttagatgtaataggcaaacaaggaaaaacatcttccctaaatattacatccctgctattaatagttttgaaacctctttgttccgaaacccaaagcctataacctttaactccctcaggataccctagaaaaacacatttcatagctctaggttctaatttcccaacattttggtgtgtatatgctgcacaaccaaatactctaagattagatagattataaggaggtttaccagaccatttttcttcaagagttttgaatccatttgcactggatggacttctgtagatcaaataaacagctgttaaagctgtttctccccggaatccttgtgacaacccagattgtaacagcaagcatctcactttgttgagaatgnntctgttcattctctctgcaactccattctgttgggttgttatcctaactgtcctgtgtct

SEQ ID NO: 158112 - DNA, 627 bp, Cannabis sativa
agaactcgcagcagttgtatttgcactaaagatttggcggcactacctatatggcgagaaatgtgagatatacactgatcacaagagtctgaaatacttctttacccaataggacttgaatatgagacagagatgttggctagaattggtgaaggattatgactgtgagatcctttatcatcctggtaaggccaatgtagttgctgatgccttgagtagaaaaggttagagtcaattgagcactacgaagaaaatatcccaacagctagcaaatgagatgactcgagctaagatggagttggttgtggggaaattggctaatattactctacaatccactattttagagcgaattaaaaaagaacaaaagcaagattcagaattgataaaaacctgagctagggtttcagctgagaaggctagtgatttctcagtagatgaaatagaaatgttgagattcgggaatcgagtttgtgtacccatggatgaggacatcaagaaaaaaatcatgaatgagtctcgtacgactccttattcagttcatccagggtcatcgaagatgtatcaagacctgaaagccatgttctggtggccaggcatgaggaatgatattgttgaatatgttgc

SEQ ID NO: 158113 - DNA, 532 bp, Cannabis sativa
ggtttgtttgttaattaaaagactttatgcatgataacacttgaataaagagttatttgtcatatttttttagcttaatttgtgtatgtattttacatatatttagtttttttcctcctcttttgtgagaatatatattattttgtatttttatattcttttggataatttagagttgttagtaggaattattaagttttatttgggttttggtaaagaaaagggcttaatagagaaagtgcaatgttttgctgaagttttgcaggaactttgttgcagcaaaagtagcagggctgattgttaaaactaatgtagaaaaagatgacgtggcaattcattaatttatgtggcgaaaaatagctgaagtggcgttttaggagtggctgctggagcaaatacttggagatgctagatttatgacatgtgtaaggtttatgttgggaaaaagatacaaaacctaagattttatttggaagagggcagcctccattataccacaaaaaaaaaaaggaacacatttcttggcagccat

SEQ ID NO: 158114 - DNA, 664 bp, Cannabis sativa
atgcttaacatagattgatttctttatacttgctagtgtttctatgcatagctaatttctttcatgatccattctcttctctactttgtttgttttgaaacttattcagcttttggcttggtgttgtcaaactcaaatataatagtaaatcttgtttaatccaaaggacctaaaaatgttttcttattaataaacaagttggtgtatgaattttgtagtgtatcgtactttctttgtgatctcctgtggtgttaccaaggattcaatgtttattgtatcttacataggttaggtttcttttgtatgacttttcaaatctggtctgaatgaaatcatggtctcttttcattttcagatcctaataaaagtttgagatgtgtgaatcgtcattatagttgaacaatgcaatcttttgctaagtcaggaaaaggttatgcttaaagtaagtaaaatattaaaaatggaagctgtttgcagtcttcatataataaattggagtagttttttagatccaaaatggaaagctgtactagttattagatttattttcaatgattgataatataaaattaaaatatgtttgaaccaaattggggcattccgagaatcgaactcgggacctctcgcacccaaagcgagaatcataccactagaccaaatgccc

SEQ ID NO: 158115 - DNA, 709 bp, Cannabis sativa
aaggatgcagcaactaaccaagtgtaggccaatactgaatctaatccttccagtgaagaaagtcacaccttcttacctcaactcagtgtgtctcaatattagcagctgctgaatcttttagctaatcaaccgagtaatatacctgctactgatcctagctcatcttcgggagcaacaggtattatcttgtccaatcattatgtcaatcctaaaaataaatcttggataatagattcgggagctacaagacatatttgcaacaacattaagagttttcaatatgtttgtcctatccctaaagtcaggttaattctacctaataatgagtttctttttgttcaacaaagtggttctattgttattaacaaagatctaactttgactgatgttctttatgcaccaagtttcaaatataatattatctctgtgagtagtctaaccagctgcaattcgattaatgtcaattttactgctaatgatttttacatacaggacaaactccatctgaaggagattggcagaggtagcagtagcactggcctgtacaccttggatactgccagatctaagaatgttctatctgtcactgctgacttgtggaattctagattaggacatttatcccagaaaagattggctctgttaagcaatcaattgaattgtgctgttaatactctacatcaacatactccttgttacattttccctt

SEQ ID NO: 158116 - DNA, 640 bp, Cannabis sativa
aatgtaattatgcaaggtcattgatgcaatcattatttttacttgctcctggtatggataatgttgaaatatctttgtaaatagttagagttatttgtacagctatatttagtgtgtatttgacagcttagtttaggttgtttttttttcctaattttcttgattgttgcctaattatactatgtaatcaacctatataaaggccacattttcatcaataataacagattagaagtatcattcacaaattactacatggtatcagagcatttgtagtaaaaaaatcattttttctttctgcctttttttttaaaaattattagggtttagttctttggggtccaatcttagaaatctggtttacattcctcttctaatctcacctcctatccaaaaagcttcccacagccccgatcggcaaaacctaaagttcgtggtccagaacatcgacgcatgagccacacgcgccgccgttgtcatcacccacgcgtcacccacgtgtgggcgtgtgagccatctccggctatcgtttctttgacgtcttcctccctgacactccttacttcgaatgtgactcttcatctagggttcttcgttgagttcttcgctacaactaattgtttctttggctaagtttttt
